United States Patent Application Publication US 2008/0229439 A1 - sequence listing, part 12

SEQ ID NO: 23484 - DNA, 4847 bp, Oryza sativa
  Clone ID: TF_OsC2630_1
ctaaaccttgcacgtccccttaagttggttttattgacagaacacaggaaagccatggttatgatttaatataccgtcattacatgtatataatagatttatagaaaagaacaagggtatccagagagacactaccaaactcattaacaacacctgttgactgtagttgcatgttttcaccaagggtaagcaactgagggcaggcagtaaaccaacctataattgcctgttcagttcttccagttccaggccatataaaaatctgaagaattccgaggttgtgcgcaagcaagcatattcaatagtattatacacagactgagaaatgagaacatcgagcaccaatgatgcgcatcacaacttatcgaccgaaccatcccgtcagcggctgctttccaaggcagacgatgacaccggtggtgatttcccgcttgtcgacgtcatcggcgacatcgctgtcactgaatccaactagatgaacagctcctttcttcctccggtagctacagccgcgattgatggtgccggcgacatagcgcagcacacgtttcacggctgccagatgctcggtagtgggtttctccatgaatctactcacataacccactgagaacgccaagtccggtctcgagttcaccaaatagcgcagcgacccaacaattttcctgtaatcagttgcatccacgcaaggagatgtgctcaacttactgagtttgaggcgtggctccattggagtctggctcgggttgcatccaaccatgcctgctgcctcaagtatcttcttggcgtacgcaccctggctcagggtgatgccctcgtcggtctgactcacctccaggccaagatagtaccgaagtagcccgaggtcgctcatctggaacgtctcccgcatctccttcttgaattgatcaagctcggagtggttgccgccggtgatgacaaggtcgtcgacgtacaccccgaccaccagtcgacgtgcgttagctccgcgcatgtacacagcgtgctctgaggcactgcgatggaacccaagtgacagcagcgacgcgtcgagcttggtgtaccatgcacgcggggcttgacgaagtccatacaacgccttcaccaggcgcagcaccttctgttccttgccgtcgacgacgaaaccgggcggctgcgcgacgtagacttcctccttgagctcgccgttgaggaacgctgatttcacgtccatatgatggacggcccaaccttcgctcgccgcgtacgccagcagcaagcgaaccgactcgagccgtgcaactggggcaaacacttcgtcgtagtcgattccctgccgctgcacgtatccttttgcgacgagccgcgctttgtgcttggtgatgttgccggcagcgtctttcttcgtcttgaagacccacttgagtcctatgggccgctggcgaggtgggggatcgacgagcagccaggttccgttttcttcaattgatttcatctcatccagcatagcttgacgccaacagtcttgctgttgcgcctcggcgagagacgctggctcttcagcacttgccatcatgagttcgtcatcgaactcgcgcacagccagtcccggcggggtcgccggtcctaatatctcgtcgacgcggcggaaccgaagcggagcatcatcatgatcggcgtcgaggtcgtccgcggcgatggttggtggagtcgcgaattccgccgatgtcgcagttgtgcccgccgtggcggcaggtgtgcatggacttgtcgatgtcgcggacggagtcggcagctctggctgctccgagtcagctcgtggcgcgttcaccacagctgggtggtacacagtggtgtactcgatggtgaagtccagctcactcgccgtctcgccgtcccacctccattgcgcctcttcgtcgaatgcgacgtcacgtgagatgtgcacgcgccgagaggcagggtcgtagcagcgatacgccttcgaccccggctcataacccacaaagatcatgggtttactcctgtcgtcgagcttcttgacattcggcgtggtggtctggcagccctttggctttgagcatgctccgcgccgtcccgaccaccgattggttgcgacgttccacgacgccgttttgttgcggcgagtagggcgccgtcgtctcgcgtcggactcccagctcggcgcagtaatccgcgaagtggtggaccaggaactctccccccctatccgtgcgaagagcacgtagcttcttgccgctcttgcgttcagccgcggcttggatgcgcttgatggctgccgccgccccatccttggaggggagcagtgacaaccacatgaaacggctgtaatcatcgacgagaaggagaaagtaccggttgccgctcggagttggtggcgagatcgggccgcagaggtcgccgtggagtagttggagcggctccagggagcgctgttgagcctgctgtgggaacggcgtccgacggtgcttgccggcgaggcaagcctcgcaaagctggtcaacttgcgacacagccggaagaccgcgcactagctgctctctgcccattttccgcagcgcagtgaagttaatgtggccgaaccgtgcatgccacttccatgcttcgtcgccgatgcgtgccgtaaggcagaccgggcgcgcgagctcgacgtcgaggacgtagagacgtccaggattgcggtgaatacgggcaagcaggcgccgctgctcatcccatatccgcataacgccatcctcggcctccaccttgaaaccggtctcgtctagctgcccgacactaatgatgttagcagcgaggcgtggaatgaggtaggtgttggagagggttcgatgctccccattcttacaggagaagagcacggtgcctcgcccttcgattcggacgacggagccgtctcctagtcggacgttgccggtgatgcctgtgtcaatgtcggagaaggccgtccggcagccggtcatgtggttggaggcgccggagtccacaatccagcggcccggatcacgcttcgcggcgtcgtcgagcgccgcgaacagcttcttttcctccaggtagatgggatcggatgacggagttggcgcagacggcgctggtgcatgctcctgttcacatgcatgtgtgattactcctcctgtgaggagaagcaaggtgggctcgtcgtcttgtgccacgtgggcctgttcatcccgcttgggcttgctcctgcaatccttggcccagtggccgtatttgccacagttgcggcatttgtcttcacgacgggccgctccggagttcgtattcttcgcgccgccgactccagcgccgccgccgttgcggcctttgccgcctcgccgcttgccacggttgcttgggctgcctgagttcttctttgcctcctgctcctttttattgtggcgctctagccattcttcctcggtgaggtagagcttgccggcgttgtctgaggacgaagatggcaatggcatggcgtcctcagctgccttgagtctgccggtcacctcctccagggacagtgtagagatatcaaggagagtttcaatggaaaggacgagttgggtgaacctgggacgggcgacgcgcaggtacttctcgacgaccttgtctgccggctcgggatcgccgagcgtcgcgagttgattgacggtggaggtcaggcgcatggcgaagtcctccacggtctcaccgtcgcgaaggacgagcgactcgtactccatgcgcaccttctgtgcgcttgctttgcgaattcggtcgtcgccgactcgcaggatcctgatgcaatcccatgcctccttggccgaggccttggtggccaaggtcgagatcatctcggggggcaccgcgctgcaaatggcgtcaagcgccatcctatcctcatgaagctcgacgccgcctggatcgatggcgccccacaggcaccgggcttgcagtttgatcttcatcagcaaagaccaatcgttgtagttggttcttgtcaacagcgggtagttcgctgcacctcctgcttccttgaccacgcggtggatcaccagcccgcggtcgctcccgccgctgcccgaggcgcggccgccggaacctgaaacatgcacggacggtgacgccgaccgccggcgcggggagtgcgtgcgtcctcgaggcatgaagacaccctcaagagcgcgatctcgcgtccacgctctgaaccgagctctgataccacttgtcaggtttcctagatacatcgtgtaaggtttatttccaacagtgccgttgtcggccggctcggcatgctgaccacgtccatcggtggtaccgccgcctccctcacccgcgctgctcctcccaccttcaacgctgccgccgcaggtgcagaagaagccaccgccgaatgccgccatcttcgagaggatgccgacgtgagtcgcggtggcgagacgcaggcggcccttacgtgttcgtgggcacggcgggagaactgcggaggcaggtgcgtcgtggccggcagagagggcgtcgagcgcagcggtggatagtgcggtggcggggccgagggtggcgaggacgcggccgttctcatggctcgttttcttccttccaacagccaaccttccacggcggcctcgatctccgccgccgccgccgctctggccctcgcgcgcacgtcgctgtcgccgctccagtgccactcccgggtctccgccgcttgcgggctgatgcaccgccgccgccagcaacgacgccgcgggaaaggggaggaggaggctgtggatggagttggaggaggcgccggccaccgccgctagctcccgtccaacgctcacgaagagaaagagagggggaggatatgatttatgtaggccccacat

SEQ ID NO: 23485 - DNA, 2184 bp, Oryza sativa; identical to SEQ ID NO: 14936
  Clone ID: TF_OsC359_6011

SEQ ID NO: 23486 - DNA, 2527 bp, Oryza sativa
  Clone ID: TF_OsC359_7259
aaaagaaaatcctaaaagaagttctttttccccccccccttccctcttgggccggctcggcccacttctccctccctctctctctctcctcccccgcggcccatcggcctccccgcgcgcgcgcgccgctgacaggcgggcccgcccgccgctctcgctgacgggtggggcccacctgtcatcgccttcctcccgccgcgcccgccgccgcgcccgtgccctagcgccgccgccgccgcggattgcgccgcatcccgccgtccccgcgcgcattaaagagaggggaatcactccccgtgattccctctcccgtttcccccgatttcccctctctctctccctcggatccgtccggattcatcccgtaatcctcgccggcgacatctatggagcccgagatccccgcgcccgtttccttcctctccggccgcgttctccccctctcggtgctatataattgctccccgagctccgctcttccgtttccgccgctcgccgctcgctctcgccgtcggatccgtgctcgcgccgtgctcctctctctccgccgtcgccgccgaccttcggctcgccgccgacgtcgctccggtcctcctcccggctcggcgccacctccctcggcatcgccgcatcgccgtcgacctcgtccgcgcctccgtttcgctcgccgaccgtcggagcgccgccgtcatcgtcatcccgagccgcgccgccgtctccctccgctccgtccgccgttctcgtcgtcgtcgttgtcccggggtgagccgtggaccgtccccttcgtttcccccttccctcctctctctcgggtgccgctccgccgcgccgttggtcgccggcggcgaccatcggggcgcgggtgcgccgctcccgtcggccgtgccggcgaggccgccttcgggcgcgccctcgcggctgccaagtgggcccggccgtcagccgcccgcgcccgcgggtgcggctgacgcgtgggacccacggcgccgaccgccgccagccgcgtgctcccggtccaccgtggaccgagaggctgacgcgtgggccccactcccgtggacccgggcaaatgaaggctacacgagctgcggcccgatggctgacaatgagaaaggcaataaggtcagaagtcaggacattggtacctcaagctcccgagtgaatgaagcaccagacaccagttgtgtggcagtggtccaacacctgattaaccagaaccaattgcttatagagatactacagcagcatcggatgccaattttgaacccgagtcagatgcaacctcaagtgcagttggaggcagtccaagcactcacaccacaagtcagcgcaccgccaacatcccagaaggcccctcatgccatgccacatgttgacccaaaagaagcaagtatcatctgttttatgtgtgatgagcaagggcactacgcaaggaactgtcctcagcagaaaagaaaagcaccaatgcgaaccgaagatgaagtccgtaagatgatcattaccagcacagaatggcctccaccaggaatgacagaacatcagagaagaaattccttccgaggtgcacaacagttgacagagcatcttttagctaatggaggtagagtgtctgatagtgaagattcagatcaagtctcctcagatgatgaagataaaatagaacttaaggcatgctctcgttgtggagaaatcggtcatgttgccagctcgtgtgcctctacatgcgttcattgtgaggaagaccatccacccgacaggtgtccaacgagcaggatcacttgtttcttttgtgaaggaactgatcatgtaccaaaagattgtcaattcagttttctgctgacgaagaagatggccaaccaacccgccagttccaacggagagaagcatcaaggcaacacaaatcctcgccaagattccagcttcagcctaactccagtgccaggatagaggaaacaaaatgagaaaagaaaatgccgagtccgggaagatatctgttgcttcaattgtcaaggaatgggtcatttcgccgacaagtgcccaaaaccgagaaacgtagctgccagcacgtcagtccacgcaaacccccgcaatcagaagcttgctcctcaacgaattgtcatccatgcatcccgaagcagtcctataacccgcgttgcaacagctccaattccaatgagtgcactaccacaaggtgtcaatgctcaatttcagccccagcaaagaattgtcgtagatggaagaagttgtgtctctccccgacctactccaggccgagccaagggcaatcaacctccggagggcgataccaagcagaagaccgtcatccgcttcaaccagcaatcagaaggaagcttctcctgtgaatgatagcattatgcagtcctatcacatcatcacagaaccaatcaaggatgcagtcactagaacaatgccagctatatctctccagaatcaaaatgagcagccatgtttgtggttttcagtccgctacttatcatggggtaatcgaaagtttgcagcaataatg

SEQ ID NO: 23487 - DNA, 1496 bp, Oryza sativa
  Clone ID: TF_OsC359_7550
taatcaacttgcagaataagcctaacatacatcataacagcaaaagacttagatctgttaaggtcctatccttagtttctaatctgtctctccccttcgttttccctctctccctctccaaacctttgcaacagatggctgacaatgagaaaggcaataaggtcaggagtcaggacattggtacctcaagctcccgagtgaatgaagcacaagacaccagttgtgcggcagtggtccaacacctgattaaccagaacaaattgcttatagagatactacagcagcatcggatgccaattttgaacccgagtcagatgcaacctcaggtgcagttggaggcagtccaagcactcacaccacaagtcagcgcaccgccaacatcccagaaggcccctcatgccatgccacatgttgacccaaaagaagcaagtatcatctgttttatgtgtgatgagcaagggcactacgcaaggaactgtcctcagcagaaaagaaaagcaccaatgcgaaccgaaggtgaagttcgtaagatgatcattaccagcacagaatggcctccaccaggaatgacaagacgtcagagaagaaacaccttccgaggtgcaccacagttgacagagcatcttttagctaatggaggtagagtgtctgatagtgaagattcagatcaagtctcctcagaagatgaagatgagaaatctccccaaggtttcaaccaggataaaatggaacgtaaggcatgctctcgttgtggagaaatcggacatgttgccagctcgtgtgcctctacatgcgttcattgtgaggaagaccatccacccgacaggtgtccaacgagcaggatcacttgtttcttttgtgaaggaactgatcatgtaccaaaagattgtcaattcagttttctgctgacgaagaagatggctaaccaacccgccggtttcaacggagagaagcatcaaggcaacaccaatcctcgccaagattacagtttcagcctaactccagtgccaggacagaggaatcaaaatgagaaaagaaaatgccgagtccgggaagatatctgttgcttcaattgtcaaggaatgggtcatttcgccgacaagtgcccaaaaccgagaaacatagctgccggcacgtcagtccacgcaactccctgcaatcagaagcttgctcctcaacgaatggtcatccatgcatcccgaagcagtcctatagcccgcgttgcaacagctccaattccaatgagtgcactaccacaaggtgtcaatgctcaatttcagccccagccaccagctgacaagacagatgccagtatctgcgttgtacctttagaagctccaatacagcagctgagaaatcaagtacaagatgaagaacccgagttggagaagggcattactccaaaaactgtccccgacctccacattttcgccaatttacacgaagcagacattccaatcgtattgtggtcactggagcaaacgccgtacccgtaa

SEQ ID NO: 23488 - DNA, 1927 bp, Oryza sativa
  Clone ID: TF_OsC359_7896
taggtggagtcctgcttataccccagttgagcgcctgtgaagatggagccgtaggccgctagtccgctgcttactagatggtcaggtcagtgaagaagaagacatcgtcagttgtttgccgaagctccggaagactgcaggatccgctagcgaaatggaggaagtagtgaagccagctgttcataacagcaaaagacttagatctgttaaggtcctatccttagtttctaatctgtctctcccctttgttttccctctctccctctccaaacctttgcaacagatggctgacaatgagaaaggcaataaggtcagaagtcaggacattggtacttcaagctcccgagtgaatgaagcaccagacaccagttgtgtgacactagtccaacacctggttaaccagaaccgattgcttatagagatactacagcagcaccagacgccaattctgaacttgagtcaaatacaacctcaagtgcagttggaggcagtccaagcactcacaccacaagtcagcgcaccgccaacatcccagaaggcccctcatgccatgccacatgttgacccaaaagaagcaagtatcatctgttttatgtgtgatgagcaagggcactacgcaaggaactgtcctcagcagaaaagaaaagcaccaatgcgaaccgaagatgaagtccgtaagatgatcattaccagcacagaatggcctccaccaggaatgacaagacgtcagagaagaaataccttccgaggtgcaacacagttgacagagcatcttttagctaatggaggtagagtgtctggtagtgaagattcagatcaagtctcctccgatgatgaagatgagaagtctccccaaggttttaaccagaataaaatagaacttaaggcatgctctcgttgtggagaaatcggtcatgttgccagctcgtgtgcctctacatgcgttcattgtgaggaagaccatccacccgacaggtgtccaacgagcaggatcacttgtttcttttgtgaaggaactgatcatgtaccaaaagattgtcaattcagttttctgctgacgaagaagatggctaaccaacccgccagttccaacggagagaagcatcaaggcaacaccaatcctcgccaagattacagtttcagcctaactccagtgccaggacagaggaatcgaaatgagaaaagaaaatgccgagtccgggaagacatctgttgcttcaattgtcaaggaatgggtcatttcgccgacaagtgcccaaaaccgagaaacatagctgccagcacgtcagtccacgcaactccctgcaatcagaagcttgctcctcaacgaattgtcatccatgcatcccgaagcagtcctatagcccgcgttgcaacagctccaactccagcgagtgcattaccacaaggtgtcaatgctcaatttcagccccagccatcagttgacaagacagaggccagtatcggcattgtacctttggatgttccagcacagcagccaagaaatcaagtacaggatgaagaacccaagcgtaagaaagttatttacaacggtagtacctgttaaggaagcagacgtgccaatcgccaagtggtcactggagcaaatgcagtacccatggtatcctagtaatgacaagctgatatcgacgcataacatgaagtggtaacttgtatgaggttgaccccaaagatatgagctatgcgaagttctggaactgaagccccatcttcaagtgccgcaacccagtcgaagtcagctaaaggttcaaccagggacaagtcaggtgaagagaagattccatctgcaacaggagatcgagccaagcagtccagagtggagaagttgtgctaggcaagtttgttatagaagacggagcggaagaagtcagacaagaagagaagaccgcccaacctatcttcttgc

SEQ ID NO: 23489 - DNA, 4365 bp, Oryza sativa
  Clone ID: TF_OsC372310_1
atgtcggctccaacgccgcgtgtgtcgcggtcccgtgaaccgcaccagcgacgtatctcccgttcacctccacaccgtcgtggtcgccggcggcctggcgaagaccgtgaacttattccggtccagcgtgtggtgaaggaggtgggcggctcagccaactatccactgctgacgaagactaactacggagattgggctctcatgatgaaggtcatgctgcaagcgcgcggcctgtgggatgccgttgagcatggtgacgccgatttccaggcggatcgaatggcgatggaggccatactccgggcggtgccgccggagatgttagcttcactcgccgtcaagccctcggccaaggaggcgtgggacgcgatcaagacgatgcgagttggcgtcgatcgtgtccgcaagtcgaaggcgcaaatgctgcagaagcagtatgatgcgatggagttcaaggacggggagaccgtcgaggaattctcgttgcgcctcaacggactcgtcaccaacctcgccacgcttggagtccatcttgaagaaggaaaggtggttgaaaaatcccttaactctgttccagatcatctctcgcagatcgctttgtccattgagacgttgcttgacctcgatgagctcacgctcgaggaggtcaccggccggctccgaaacgctgaggagaagctgcctgccaagagctctgctgccggtgggaaactgtttctcactgaggagcagtggactgcccggtggaaggagaaacaggccgcggaaagttcctctgggaaggcgaagtccggcggtggcaaccgtcgtcggcgtggtggcaagaagaaagctgaagctgctgcgcgcgatggagatcgtgccgggcgcgacacgcaggaagggcgggaaccaaaccgcgacaagtgccgcaattgcggccgcacggggcactgggctaaggactgccggcagcccaagcggcctgccgaggcccaccaggccctggcggatgaggacgatgacgagccggccctcctcatggcccatgtcgtcgacgctgctcctgtgtctgcgtcgtcttcatctgcgccacctgcttcttcgccgccatcgcagcctgacaagacgatcgagctcgtcgagccaaaggtgttcgcgcaccttctcacggagaaacaaaccgacggcggcgtctggcatctcgacaccggagccacaaaccacatgacgggcattcgcgaagttttcgctgagctcgacctgtctgtgcggggctcggtgcgattcggcgacggctccgtcgtcggaattgagggtcgtggcaagatcatttttgagtgcaggaatcaggagcaccgagcgttgacgggggtgtattacatccctaaactcaacgccaacttgataagtttgggccagctcgatgaaaatgggtgcgacgtccgtatctaccacggtgtttgcacgatacgggacccggcggcccagctgctcgcacgcgttcggcggacgcggaatcgcctgtacttgatcaagctcaccatcgggcaaccggtgtgcctcgcggccaaggcgcaggagtgcgcctggctgtggcatgcgcgctacggccacctccacttcgacgctctgcgacgactggcgagccgccacatggtgcgcggcatgcccgacatcgatcatgtcgagcagctgtgcgacagctgcgtcatctctaagcagcgacgcaccccgtttccacgccgctccatgtttcgtgctgaggatcgccttgagctggtgcatggcgatctgtgtggtcccatctcgccggcaacccctggaggcaagactcatttcctcctgcttgttgatgatgcgagcaggtacatgtggatcactctgctgggacgcaagagcgaggcggctgatgccatcaagcgctttcaggcgcgagccgaggcggaatccaagcagaaactgcgcatcctccgcaccgacaacggtggcgagttcacctcggtggaattcgccacctactgcgccgaacagggagtctcacgccacttctccgcgccctactcgccccaacagaatggcgtggtggagcgccgcaaccaaaccatccttgggatggctcgcagcttgttgaaagccaagaacatgccggcacgctattggggggaggctgtcacgacggcagtttttctgctcaatcgcgcgccgacaaagagcttggccaacatgacaccttatgaggcgtggcatgggaagaagccggcggtgggttacctgcgcacgttcgggtgcctggcctatgtcaaggacgtgcggcctcacctccccaagctctctgaccgcagcaagccgatggttctcatcggatacgccgacggagccaaggcgtacgaggtgttcgatccggtgtctggacgagtgcaggtctcgcgcgacgtgattttcgacgagggcgctgggtgggactgggatgcggcgggcgctgcagccgtccccggcggcggaggttgctcagacttcaccgtcgagtacctgacaacggccacatcaccgtcgccttcgacctcggcgccatcatctgcatcttcgggcgcttccgcgtcaagggcagtcacgccgtcgtccgcctcgacacccgccaccttggcgtcggcctcaacgcccgctacaccgacgttcgtctcaccgccaccaggcgtcgacgagaacctggacgcggagcaggatgattgtccactgcgttatcgcagtatgggtgatctactgggcgacgcacgttcgccggggttcgcaacccgggatccggagaagggggagcttcatctccttgcggccgaggaaccagcctcgttcactgaggctgaacagcggcaggagtggaggcgggctatgctggatgaaatcgcctcaattgaggagaacaacacatggcgccttgtcgatctcccgtccggccatcgtgcaattggcctcaagtgggtcttcaagctcaagaaggatgcagaaggcagagtggcaaagcacaaggctcgcctcgtcgcgaaaggctatgtgcagcaacccggcatcgactttgaggaagtgttcgccctggttgcacggctggaatctgttcggctgttgctcgctcaggccgcgcaggcaggctggacagtgcaccatatggacgtcaagtccgcgttcctcaacggtgagctagccgaggaggtctacgtcaagcagccgcccggtttcgtcgaggaaggccgtgaacaccaagtccttcggcttgacaaggcgctgtacgggctgcgccaagcgccccgtgcgtggaactccaagctcgacgccaccctgctgtctctcggcttccggcagaacgactgcgaacatgcggtctatgttcgaggtaacaccagtgcacggttgctcgttggtgtttatgtcgacgatctaatcatcacagggacaaaggaggatgagatcgttcgattcaagggcgaaatgaaggcgttgttcaagatgagtgacctcgggcttctcagtttctacctgggtatcgaggtcgagcaggtggcgggcagcatacggctgtcacaggcagcgtacgcacgccgtatccttgagcgagcagggatgctgggatgcaacccgagcgccacgccaatggaacaacgcctcaagctcagcaaaaccagtgctgcggcgccggtgaaccccaactggtaccgtggcatcgttggctgtttgcggtatctggtacatacgaggccggatatcgcgttctcggtgggctacgtgagccgcttcatggaggcgcccaccaccgagcacgaagcggcggtgaagcgcatactgcgctatatcgccggcacgacggagttcgggtgtcactaccaccagtccagcagccccgttcagttggtgggatacagtgatgcggacatggccggcgacccagacacgcgcaagagtacgaccggtgttgtcttcttcctcgggacaagcccggtcagctggcaatccgtcaagcaaaaggttgtcgcgctttcgtcttgcgaggcggagtacatcgctgcgacaacggctgcatgccaaggcgtctggctctctcagttgctaggagaggtcaatcaagaagagccggacgcgttcaagcttctcattgataacaaatcagcaattgccctcagcaaaaatccggtgttccacgagaggagcaagcacatcgctacccgctaccactacattcgagaacgggtgggagatggctccgttcatgtcgagttcgtcaggactgaagggcagattgcagacattttgaccaaggcacttgggcgcacacgttttcaggagcttcgctcccgcattggcgttgccgacgtcaaattcaggtgcaagacttag

SEQ ID NO: 23490 - DNA, 2824 bp, Oryza sativa
  Clone ID: TF_OsC1713_4588
atgcaatgcttctatgtttcacagggcaaacgaagtgaaccgcctctctctcctaaggaggaggctaagtttgaggcttcggattgcctgttccgtggagcattgatcagtgtactcactgacaatatagtggacgtgtacatgcacatgccttcagggaaggacatgtgggatgcacttgaggccaagttcggagtttccgacgccgtcagcgagctgtatgtcatggagcagttctatgactacaagatgatgctggcaaaggaatttgagaacaacaactgtgagttgccggacaagtttgtggcgggtggcattattgccaaattgccaccttcttggtcggactttgctacttctctaaaacacaagaggcaagagttcagcgttactgatctcattggctctttgggtgttgaggagaaggcgagagtaaaggacaaccggggcaaaaatatcgagggaggttctagtgccaatttggtgcaaaagaagaaccctcatgcatcccacaacaacaacaacaagaaagtcaagcctgatgtcaaaccaaaggctacaaccaattttaagaagaaaggcaagggaaaggccaagggcgactgctttgtgtgcggtaagcctgggcattgggcgaagaattgtcctgatcgcaaggacaagaagtctgccaacatggttattagcgagggcggaggaacatcggggtatggtcgggagaggttcctccttgttgatgggaaacgggtcgcttgcggctgttcatggtgttggtacggtcgatctgaagtttacttcgggaaagaacgtgcagcatgtcccttcaataaagaagaatctagttagcggctctctattgtgtagagatggttttagacttgtgtttgaatccaataaatgtgtcgtatctaaatatgaaacttttattggaaaaggttatgacagcggaggttccaagtgccatacttgtgttcaatcgaaacatcctcgcaaacctcacaaggcatctgaggcgagaaatttggcaccactagaactagttcattccgatctgtgcgaaatgaacagtgtgttgactaaagggggaaagaaatatttcatgacactgatagatgattgcactagatattgctatgtgtacctattgaaaacaaaggatgaggcattgcattactttaagatctataaagctgaggtagaaaaccaacttgaaaggaaaatcaaacggttgaggtcagataggggtggagagtatttttccaatgagtttacgtccttttgcgaagagtttggaattattcatgagaggacgcctccctattcaccccaatcaaatggggtagccgaaagaaagaatcgcactctaactgagatggtgaatgccatgttagatactgcgggactttccaaggaatggtggggtgaggcaattttgactgcttgtcatgtcctgaataaaattccagtgaagcataaggaagtaataccattcgaagaatgggaaaggaagaaattaaatttctcatacctacgcacatggggctgcttggccaaggtaaatgtacctatagccaaaaagcgtaaacttggaccaaagaccgtagactgtgtgttccttggttatgctatccacagcgtgggctataggttcctaatagtaaactctggagtacccgacatgcgtgttggtacaattactgagtccagagatgccacattttttgagaatgaatttcccatgaaaaatacacctagcacgtctagtcaagaacctgttttaccccatgagcactttgcaccgatagaacacaatgatcaaacgcctgaggaaaatcctgaggaggataacattgtagcaactcgaaagagtaagagagaaaggactgcaaagtcttttggagataactacattgtataccttgtggatgacactccaagaaccatagaagaggcatattcatctactgacgctgactattggaaggaagtggtacgcagtgagatggactcaattatgtctaatggtacttgggaagtcgttgagcgtccatatgggtgcaagcctgtagaatgcaaatgggttttcaagaaaaagcttaggcctggtggtacaattgaaaacctcaatgtgattgaggaggttaaggactttttgtccaaaagctttgaaatgaaggatttgggagtgactgatgttattcttaacattaagctactgagaggagatgagggtgggattacactcgtgcaatctcactatgtggacaaggttttgagtcgctttggttatagtgactgcaagccagctccaactccttatgactccagtgtgctattaaggaaaaaccgaagaatagcaagggatcaattgagatactcccaaatcattggttcattgatgtacttggctagtgcaacgaggcctgacatctcatttgctgtgagcaagctgagccggtttgtttcaaatccgggagatgatcattggcaagctctggaaagggtcatgcgctatctaaagggtacaatgagctatggaattcactatactggttacccaaaagtactggaagggtatagtgactcaaactggatatctgatgctgatgagataaaggccacaagtggatatgtgttcacacttggaggtggcgctgtttcctggaagtcttgcaagcagaccatcttaacgaggtcaacaatggaagcagaactcacagcactagatactgccacaattgaggccgagtggcttcgtgaactcctgatggatttgccggtggttgaaaaaaaaaccagtgccagctatcctaatgaactgtga

SEQ ID NO: 23491 - DNA, 2544 bp, Oryza sativa
  Clone ID: TF_OsC1713_5062
atggcgacagtgtgcccatgtgcgcggctaccgacgggcatgtcttctgtctacctggtcgtgtccgagtgcgtggccctcgcacctgcctccgaaaccacgcgctgctgcgacgtttgcacggacgggcgggcgatcaggtttttggagagcgtaaggcgcgactactcactgttcgtcaacatctacttcaccttcaccaatatgtcgaacactggagacaacggcaacactggatacaaggagaaggaggctcccgtcaacatcaacggaggcaatactgcctcaaactccaacggaggaccattcttgggtgtactcgctgacaatatagtggacgtgtacatgcacatgccttcagggaagaacatgtgggatgcacttgaggccaagttcggagtttccgacgccggcagcgagctgtatgtcatggagcagttctatgactacaagatggttgatgaccgttctgtagtggaacaagctcatgagattcagatgctagcaaaggaacttgagaacaacaactgtgagttgccggacaagtttgtggcgggtggcattattgccaaattcccaccttcttggtcagactttgctacttctctaaaacacaagaggcaagagttcagtgttactgatctcattggctctttgggtgttgaggagaaggcgagagcaaaggacaaccggggcaaaaatatcgagggaggttctagcgccaatttggtgcaaaataagaaccctcacgcatcccataacaacaacaagaagaaagtcaagcctgatgtcaaaccaaaggctacaaccaattttaagaagaaaggcaagggaaaggccaagggcgactgctttgtgtgcggtaagcctgggcattgggcgaagaattgtcctgatcgcaaggacaagaagtctgccaacatggttattagcgagggcggaggaacatcggggtacggttattttttacctacagttctctctgtttttcattcacctgattggtgggttgatactggtgctaatattcatgtcgggagaggttcctccttgttgatgggaaacaggtcgcttgcggctattcatgtttttgatattgctgtgtacctattgaaaacaaaagatgaggcattgcattactttaagatctataaagctgaggtagaaaaccaacttgaaaggaaaatcaaacggttgaggtctgataagggtggagagtatttttccaatgagtttacgtccttttgcgaagagtttggaattattcatgagagaacgcctccctattcaccccaatcaaatggggtagccgaaagaatgaaccgcactctaactaagatggtgaatgccatgttagacactgcgggactttccaatgaatggtggggtgaggcaatttttactgcttgtcatgtcctgaataaaattccagtgaagcataaggaagtaacaccattcgaagaatgggaaaggaagaaattaaatctctcatacctacgcacatggggctgcttggccaaggtaaatgtacctatagccaaaaagcgtaaacttggaccaaagaccatagactgtgtgttccttggttatgctatccacagtgtgggctataggttcttaatagtaaactctggagtacccgacatgcgtgttggtacaattactgagtccagagatgccatattttttgagaatgaatttcccatgaaaaatacacctagcacgtctagtctagaacctgttttaccccatgagcactttgcaccgataaaacacaatgagcaaacgcttgagggaaatcctgaggaggatagcattgtagatactcgtaagagtaagagacaaagggttgcaaaatcctttggagatgactacattgtatacctcgtggatgacactccaagaaccatagaagaggcatattcatctcctgacgctgactactggaaggaggcagtacgcatcgttgagcgtccatatgggtgcaagcctgtaggatgcaaatgggttttcaagaaaaagcttaggcctgatggtacaattgaaaagtacaaggcaaggcttgtggccaagggttatacccaaaaagaaggcgaggattttttcgacacctactcaccagttgcccgcttgaccacgattcgagtactacttgctctggcagcctctcatggtcttctcgtccatcagatggacgttaagacagttttcctaaacggagagctggaggaggagatctatatggatcaaccagacaggtatgtactaaaaggtcaggagggaatggtgtgtaaactgttgaaatccttgtatggccttaagcaagcacctaagcaatggcatgagaagtttgaccccacacttacatctgctggctttgttgtgaacgaagctgataaatgtgcgtactatcgctatggtaggggagaaggagtgatcttgtgcttatatgtcgatgacatattgatctttgggaccagcttcaatgtgattgaggaggtcaaggactttctgtccaagagttttgaaatgaaggatttttga

SEQ ID NO: 23492 - DNA, 654 bp, Oryza sativa
  Clone ID: TF_LIB4833-033-R1-N1-B4
ccggccgggctcttcttcctcctcctcgagacctcggcacctcgcacgccacgcttctcctcctcttcctatcccaatccactcggcgacccccctcgccgtcgccgcgctgcgccggcgagcgccacgggagcagcagccctcgccgctccgcggctagctagctcgtctcctcgtccgcctcgcgcctgctggagatccgccccccgacccccgtgatttcctaatgatttgtgcaacaattgtaagcgtccaggacattttgctagagattgtccaaatgtggctctttgccatgcatgtgggcttccagggcacattgcagcagagtgttcttccaaagatctctgctggaactgcaaagaacctggccacatggctaacagctgcccaaatgaagggatatgccgcaactgtggcaagtcgggtcacattgcaagagaatgcagtgctccaccaatgctgccaggtgaaatgaggctttgcagcaactgctacaaaccagggcaccttgctgcggaatgcaccaatgagaaggcctgcaacaactggtaggaagagtggccatcttgctcgtaactgccctaacgagcccgtctgcacctatgcaacgtgtcaggacatttggcccgagagtgccccaaatctgatgct

SEQ ID NO: 23493 - DNA, 2535 bp, Oryza sativa
  Clone ID: TF_OsC1232_8
ctagcgcgcggagtggcgggggccggcgatgacgacggcgggcggtttggagcggagcggcgacagcggcgactggcgcgggcagagctcgccccctgttgccagcacatccttccccgtcgccagaacgccattctccgtcgccagcacatctttccccgtcgccagaacgtctctccccgccaccagcgccgtgctcgtggcaagcacacgcggcacgacattacacgcagcatcatctcccctccccgccatcctattcccaggctcgccacttgagtgttcctctatcgtatccctgtccgaagcatgcaggcccgagccggcgtgttcagtgtgctcgtcgtcgcgggcggtatccctcagcgcgccggggttggtagggatcatctcggacacccgctgaactgaagatgtcgaccaggtgcgccccggtagcccaccagcaaagccagatgctccgccaaaaggccgacctccgccttgtttcgacgtccacggccctgtgccgtcgattcggccagcccagcaggagaacgtaacctggcgcgggacgtcatcatcatcttcgtcgttggaggccgtggagaggggaacatggaggggcgtcgggtcaatgatctcctcaatgtgcacaatgatattgtacgtcagcgtgcacttgtgcagaggcgcccttggaatcctgattgatcccgccatacgttcccagcacggcgggccgccccccgcgcgctctgggatctccacctccagcgttgttggcaccgcagacgggttcttgagccaggcgaacatggtgagaaccctcgcgtccgccggcggaacaagctccaccaactctccacccagctcacggatcagctgggccatcgcctcctcatcccaggcgtgctggggaagcccttctaatgacagcttggtgaagaattggaacctcgtgctgctggccagcaggcgcctgttccagctcttgaaggcgattggcgccccttggaagaagacttgtttggatttgccgaggacccaatccttttctctggcagaacgaaacacaattaggtagtcctcaggggtcgttacctccacccggaagtgcgcggggaggatgccacagtcgacgatcaccgcaaccagatctctaggtgagagcgctggctggttgccaagcactgtggccaggagcaccttctgctcgaagatggcctccgtctccaccatgcgcggcgtccaggagatggtgcaccgccccgactccggccggatgttggcgtccccggtccgccactccttcatgacccgagagggctgctgagcgcagatctgaaagctagccatgccatcaccagcagccactccctcttctcgccccttctttctgggaggcaaagcttctagcacttctttccgcggtttttcacctcccgctggcttcgttgccacttcttttgaaccagtggccggctgcgccctagccgcacgggaggtagggcaattcctagcgatgtgccctgagtaccagcagttgtagcatcgcgtgcttcctgggcaggcggatttctggtgtcctagccccaggcagttaaagcagcatccttggagccagcgggggactgttcttgccttcttgaatgcctggtcttcttcgccccgttgatccaccgcattaactgcgggacgcgacaggacgatatcacgccaggacgtccttcctagctgcgacatgagagaggatgttgggaggtggtcgccggcgtcggagtgcccaccggcgattagatggtggtcaccgtcgccggagtgacgactggcgatgagtctacggacctctctatccaccaagccacaaccacttttctgccatcttcctgaaaaggggaacatgtccacattgcagctggagccgcagctgcagccatggccggcctcaccggagccggcagccaactcgaaacccggttcgctgtgccccttttcaggtgcaacaccgaggaccatggtcactgaggtggtggtggtgttcttctctgccaggtcagggtacatcttttgtacaagatgtggcaggagctcacgcaaccttctagcgccggccagcatccagagcttggcctcctctatgattttggtaagcagatacgtcgttgtggactccttgtgctcaaaaatccgctgattctgctccttccatatctcccacaccacccatctggccacggtggtgggcttgacggcgtcgcggatgcagcgcctgcgtgaacctactcttgtccaactccggaggtcgccgtccgccggcgtgaactcctccgacgtcttgcagctggagccacagctgcagccatgggcagcctcaccagattcagctgccttgccaaccatcacctcaaagtgccccttctcaggtgcaacgccgaggacagtggttgcagtagtggtggtggtggtgatcttctcagccaggtcagggtacatctttccgcagccaccgccgcatccgcaggaaccgcagttacaacttccaccgcacgacat

SEQ ID NO: 23494 - DNA, 2190 bp, Oryza sativa
  Clone ID: TF_OsC359_6616
aaagaaagtgaatccgagttgcttccgcctcgcccgtgccctagcgccgccgccgccgcgaatcccgccgcttacgtccgtcccgcgtgcaatcaagaggggggaaatattccccgtgattccctccctctttccccccccccccatttttccctccctctctccctcggattcgtttggaaactcctcccctaacctcgccggcgcatcaatggcggccggatcttccgcgcccgtttccccctcatccggccgctctctccccctcccaaccctatataaacactccccgtgcctccctccgccgtttccgccactcgccgcactctctctccgccggaatcgagctcgcgccgtcgctctctctctccgccgtcgccgccgagctccggtccgccgctgtcctcgccccggaccatctcccgcctcggcgccgcctccttcggcttcgccgcaacctcgccgacctcgtccacctctccgtttcggtcgccgaccgccggaacgccgccgtcccggtcaacccgagccacgcagccgcccctctccgctccagtcgccgttcccgtcgtcgccgtcgacccggggtgagccgtggaccgccgattcgtttcccccttccctcccctctctcgggcgccgctccgccgcgccggtggtcgccggcgggcgaccatcggggcgcgggcgcgccgcctcccgtcggctgtgccggcgtggccgccttcgggcgcgtcccgcggctgccatgtggggcccggccgtcagccgcccgcaccctcgggtgcggctgacgcattggacccacggcgctggccggtgtgagccgggtgcacccggtccaccgtggaccgtgagactgccgcgtgggccccactcccatggacccggacaaatgaaggctacacgagctgcggcccgatggctgacaatgagaaaggcaataaggtcagaagtcaggacattggtacctcgagctcccgagtgaatgaagcaccagacaccagttgtgtgacactggtccaacacctgattaaccagaaccgattgcttatagagatactacagcagcatcagacgccaattctgaacctgagtcagatacaacctcaagtgcagttggaggcagtccaagcactcacaccacaagtcagcatgccgccagcatcccgaaggacccatggtgacgtgccacatgttgactcaaaagaagcaagtatcatttgttttatgtgtgatgagcaagggcactatgcaagggagtgtcctcagcagaaaagaaaaacaccaatgcgaaccgaagatgaagtccgtaagatgatcattaccagcacaaaatggcctccactaggaatgacaaaacgtcagagaagaaataccttccgaggtgcaccacagttgacagagcaccttttagctaatggaggtagagtgtctgatagtgaagattcagatcaagtctcctcagatgatgaagatgaaatggaacgtaaggcatgctctcgttgtggagaaatcggtcatgttgccagctcgtgtgccactacatgcgttcattgtgaggaagaccatccacccgacaggtgtccaacgagcaggatcacttgtttcttttgtgaaggaactgatcatgtaccaaaagattgtcaattcagttttctgctgacgaagaagatggctaaccaacccgccagttccaacggagagaagcatcaaggcaacaccaatcctcgccaagattacagtttcagcctaaatccagtgccaggacagaggaatcaaaatgagaaaagaaaatgccgagtccgggaagatatctgttgcttcaattgtcaaggaatgggtcatttcgccgacaagtgcccaaaaccgagaaacgtagctgccagcacgtcagtccacgcaactccctgcaatcagaagcttgctcctcagcgaattgtcatccatgcatcccgaagcagtcctatagcccgcgttgcaacagctccaactccagcgagtgcattaccacaaggtgtcaatgctcaatttcagccccagcaaagaattgtcgtcgatggaagaagttgtgtctctccccgacctactccaggccgagcaaagggcaatcaacctccggagggcgataccaagcagaagaccgccatccgcttcaaacagcaatcagaagaaaggttctcctgtgaa

SEQ ID NO: 23495 - DNA, 1593 bp, Oryza sativa; identical to SEQ ID NO: 14864
  Clone ID: TF_OsC359_6910

SEQ ID NO: 23496 - DNA, 2395 bp, Oryza sativa
  Clone ID: TF_OsC359_7459
atggctgacaatgagaaaggcaataaggtcagaagtcaggacatcggtacctcaagctcccgagtgaatgaagcaccagacaccagttgtgtgacactggtccaacacctgattaaccataaccgattgcttatagagatactacagcagcatcagacgccaattctgaacctgagtcagatacaacctcaagtgcagttggaggcagtccaagcactcacaccacgagtcagcatgccgccagcatcccgaaggacccatggtgacgtgccacatgttgactcaaaagaagcaagtatcatttgttttatgtgtgatgagcaagggcactatgcaagggagtgtcctcagcagaaaagaaaaacaccaatgcgaaccaaagatgaagtccgtaagatgatcattaccagcacagaatggcctccaccaggaatgacaaaacgtcagagaagaaataccttccgaggtgcaccacagttgacagagcatcttttagctaatggaggtagagtgtctgatagtgaagattcagatcaagtctcctcagatgatgaagatgagaagtctccccaaggtttcaaccagaataaaatggaacgtaaggcatgctctcgttgtggagaaatcggtcatgttgccagctcgtgtgccactacatgcgttcattgtgaggaagaccatccacccgacaggtgtccaacgagcaggatcacttgtttcttttgtgaaggaactgatcatgtaccaaaagattgtcaattcagtttgctgctgacgaagaagatggccaaccaacccgccagttccaacggagagaagcatcaaggcaacacaaatcctcgccaagattacagtttcagcctaactccagtgccaggacagaggaatcaaaatgagaaaagaaaatgccgagtccgggaagatatctgttgcttcaattgtcaaggaatgggtcatttcgccgacaagtgcccaaaaccgagagacatagctgccagcacgtcagtccacgcaactccctgcaatcagaagcttgctcctcagcgaattgtcatccatgcatcccgaagcagtcctatagcccgcgttgcaacagctccaactccagcgagtgcattaccacaaggtgtcaatgctcaatttcagccccagccaccagttgacaagacagaggccacctttcaactattacagaattggaactacccagcaggggcaaccaacgttcaagtacctacagtccagcaacagtgcaagttatcagaatttctcaaaactgagactccaacctttgccattgtcgtcgaacctatggaagccagtgattggttgcgcacagtcgagaagaagctggggttgattcagtgcacagaccaggagcgggttgtcttcgcaactcatcagttggttggactggcttcagaatggtgggatagctacgaagcatcacggccagaaggacataccatcacctgggacgagttttcatctgtattcaagagatcccatgttcccgcaggaatgatcacactgagaaaacgagagttccgctacctgaagcaagaagatttgaccgtcacagagtacctgcacgagttccatcgtttggctcactatgcaccagaagatgtggaaaatgatgaagacaaacaagagaagtatctccaggggttaaaagatgagatcgcagtgcaactactcctagaggaatatgaagattttgagaaacttgtggacaaagccatacaactcgaaagtgagcataatcggatgaagaactgtaagagaaggattgtcagcatcccagtattcccatgtggtaaccaaagacagcgcacggagccacttcagatcaccggatcttctgttgcgcatcaagagtttccgccccaagaagatggacacaatgcagacaacaacattagcaatactaatgatgatgataccaccaacaaccatgcttcttgccccattagtgaccactcaaatcaagcgtgcaatgtcaacatcattcaccaaggtgtcgacgatagtatcaatgatggcacccaaaatgacaaccctagcaattgtgactctgagaaagactccaatggtgatagcaactatggtttctctgaaagacagcacgcccaaggacctcattgccccagaagcatcctcaacacccggagcgaagagtacctggttgagaaaggtcgaaagtggtaacttgtatgaggttgactccgaagatatgaatcatgagaagttctggaacggaagcatcattaaactaccgcaacctagtctgagtcagctaaaaggtgcaccctggttcaagtcaggtgaagagaagattccatccgcaacagaaggtcaagccaagcagttccgagtggtgaagttttgctga

SEQ ID NO: 23497 - DNA, 5158 bp, Oryza sativa; identical to SEQ ID NO: 14843
  Clone ID: TF_OsC359_5506

SEQ ID NO: 23498 - DNA, 4791 bp, Oryza sativa; identical to SEQ ID NO: 14847
  Clone ID: TF_OsC359_6712

SEQ ID NO: 23499 - DNA, 5437 bp, Oryza sativa
  Clone ID: TF_OsC359_8039
cccgccgccaccttcgccttcgcctctcgtcgcccgtagcgccctagcgccgtgtgccctagcgccgccgtcgccgccgtcgctccagccgtgcgccgccgccgtctaggtcgtcgtcgtcgctcgggaagaccgccgtcgtggtcgccaagtcgtcgccgtcctcgtccgccacttcgccaccgtcggagaccgccggagcatcgtcgccgtcgtcaagccgaagagcgccgccgtttcaacctcgtcgccgtcgccgtccgttggtcttccgccgtcgctttggtcgccggtgagttcgccgtgccgtccgctacccgttggtgccttccgttcgcgccgccgcgccgccgttcgccggtgagcgtgtgccgttcgagccgtccgagccgccgagccgccgccgccggtggtgacgtcatcgccgacgtcatcgtcgccctctcccattccgtcgtttccggagagtccgttttcgcaggagaagagtttgaagagttccaaggccagcaaggcaactcctggtttggaatggtatattcctggtttggagataggactgtgcagccgggatggttgttcagaatggttgggcctatacaacaggatgccgcgctacaagcctgagtacttgtttggtgttgagggatttgtccaggagttgcgtacgatgtcctttgccataggatttgggactgcccctttttatgcccaaattcctcatgatcgtcacgaagaaaagtgccgagtcaaagtcaccttgaacagtaatagtgaagatatcccctcagtgatgttcgaagccggaggaagaaactacatccatacatgtcaggaggtggcaaggatcgccataggagagctccgcgatcgctacagtgatcagttggccgacactgagtatcgctaccatcctcgccaaccccagggaagtgaccgtggcagctaccttgagactgagggaattgagaatgatgctaccacaaggcatttggttgagatgctgtgggctatggatgaaacccgtgcggagactgtgttagcggctcaagatcgtgaagatcggaatcgtggtaagatttgcaagttagaggacaaggtggatcgtttggagaaggaactagccgtattgaagggagaagcaccaccgcagaaggccagggttcgtctcaccgcgaggaagagagctctatttgtccctcgctaccaattggtgccaaaggtccgtgtggtggagaaagaagttaccccagccctagcagatcctccggtcgtcaatatggtgctcactcgcagcaacgggaatggccccaatagtaacaataacaataacaatgaagggaacccaactcttgcccaagttcttgctcaacagacacagcttatgaacatgatgatgcagcaactccagaaccagcagaaccagggaaataaccatgcacctccccagaacaagttagcagaatttcttcgtgtgaggccgcctattttctctagtaccgctaatcctgttgaagctggtgattggctgcatgccatagagaagaagttggatttgcttcagtgcaccgatcaggagaaggtctcatttgcatcacaccagctgcatggccctgcctctgaatggtgggatcacttccgccttaataggattactgctgaacctatcacttggcttgagttcaccgctgctttccggaagacgcatataccatcgggagtggtgtctctcaagaagaaggaattcaggtcgcttacccagggatctcgctctgttaccgagtatctgcacgagttcaatcgtctggctcgttatgctccggaagataagttagtggataaggctattcgtcaggaggacaaatacaatcgcatggagcagaagaaacgccggattgctcatttcatgacgcaacaggggaataatcagaggccgcgtcttactttaggaccccagtccatgccacagggaggttcttcgtctgttgttcgtccgcagcgtcagttcttcaacaacaatgctggcaacaacatccgcaatcaagctccacgccctgttgcagctttgacacagcaacaacctgccaagaaggagcaaggcagcaagcccgtggtgtgtttcaactgtggagaaccaggacattacgctgacaagtgtccgaagccccgacgcgcgaaggttgtccctgcccagagcaactctaccgcaccagcatcaaaggcccgtgtcaatcatgttgctgctgcagaaactcaaggtgctccagatgtgattttggccccttctatcagaatagaaattcaaggagtaccatttctggccaatcttatcctgttagaatccaaagaccttgatgtcatcctagggatggactggttagccagacataaaggtgtgatagactgtgctaacagaaaaataactctcaccagcaatgatggtcgagttgtaactgtgcatgcattgtctcctgagtttttaaggtcaagactgaaccaaataactttggaagagattcctatagttcgggagtatcccgatgtgttcccagatgatttacctggtatgccgcctaaaagggatatagagttcagaatagatttggtaccaggaacaactccgatccataagagaccttatagaatggcagccaatgaattagcagaagtcaagaggcaagtagacgatttgcttcagaaaggatacatcagaccgagttcatccccatggggagctccagtaatttttgtggaaaagaaagaccatacccagaggatgtgtgtggactatcgtgcactaaatgatatgactatcaagaataagtatccgctgcccagaattgatgatttgttcgatcagcttaaaggtgccaccgttttctccaagatagatcttcgatcagggtatcatcagttgagaatcaaagaggaagatatacctaagacagcttttaccactaggtatggattgtttgaatgtactgttatgtcttttggacttaccaatgcccccactttcttcatgaacttgatgaataaggtgtttatggaatacctagacaagttcgtggtagtctttattgatgacattcttatctactcccgaaccaaagaagagcatatagaacatcttcgccttgcactagaaaagctacgagaacatcaactgtatgctaagtttagtaagtgtgaattttggttgtctgaagtgaagttccttggtcacgtcatctcagcaggaggagttgccgtcgatcctagtaatgtggaatccgtaaccaactggaaacaaccaaagacagtttcagagattcgcagtttcctaggcctcgcgggatattatcggaggtttatagaaaatttttccaagattgctaagcccatgacacgattgcttcagaaagatgtgaagtacaagtggtcagaagaatgtgagcagagttttcaagagttgaagaatcgcttaatatcagctcctattttgattttacctgatccaaagaagggtttccaagtgtattgcgatgcatccaaactggggttaggttgtgttctgatgcaagatgggaaggtggttgcctatgcatctcgtcagttacgtccgcatgagaagaactaccctactcatgatcttgaattagctgcagtagttcatgcgttgaaaatttggcgtcattatctttttggtactcgtacagaggtgtataccgatcacaagagtttaaagtatatctttactcagccggatttgaacatgagacaacggagatggttggaattaattaaggactatgacatgggaattcattatcacccgggaaaggctaatgttgtagcagacgctcttagcaggaaaggctattgcaatgctacggaaggacgacagttgccattggaattatgcaaggaatttgaaagattaaatttgggaattgtcagtacaggtttcgttgcagccttagaagcgaagcccactctaattgatcaagttagagaagcccaaattaataatcctgatattcaagaaattaagaagaatatgagaagaggaaaagctatcggtttcttggaagatgagcaaggaactgtatggttgggtgagagaatctgcgtccccgacaacaaagatttaaaagatgcaattctgaaagaagcccatgatactttatactccattcaccctggtagtaccaaaatgtaccaggatctcaaggaaagattttggtgggcaagtatgaagcgtgaaattgcagaatacgtagcagtatgtgatgtttgtcagcgagtcaaggcagaacatcaaaaacccgccggtttgttgcagcctttgaagattcctgaatggaaatgggaggaaatcggtatggatttcatcactggtttacccagaacgtcatcaggtcatgactctatttgggtgatagtcgacagacttaccaaagtggctcatttcatcccagtaaagacaacatattctggaagtcggttggcggaattgtatatggcaaggattgtgtgtttgcatggcgtccctaagaaaatagtgtctgatcgaggcagtcagtttacttcaaaattttggaagaagcttcaggaagagatgggttctaagctgaactttagtactgcttatcatccacagacagacggacaaaccgaaagggtgaatcagattttggaagatatgttgagagcttgtgctttagacttcggtggaagttgggataagaatctaccttatgcggaattttcgtacaacaacagttatcaagctagtcttcagatggctccttacgaagcactgtatggtcggaagtgccgcactccgcttttgtgggatcaaacgggagaacgtcaggttttcgggacggatatcttgagggaagcagaagaaaaggtgaaaatcattcaagaaagattgcgtgtggcccagtctcgccataagagttatgccgacaatcgtcgtagagatctaagttttgacgcaggagattatgtgtaccttcgtgtcacgcctcttcgaggggttcatcgttttcataccaaaggaaaattggcaccgcgttttgtgggaccttataagattatcagtagaagaggagaggttgcttatcagttggagttacctcaatctttggcaggagtccataatgtgttccatgtgtcgcagttgaaaaagtgtttaagggtacctaccgaagaagctaatcttgaacatatagaagtccaagaggatctgacctatgttgagagaccaatccatatcttggaaatagatgagagaagaaccagaaatcgagttatccgtttttgcaaagtccaatggagtaatcactcggaagaagaatcaacttgggaacgagaagatgaattgaagtcagctcatccgcatctgatcgccagtgcttccgaatctcgaggacgagattctgtttaa

SEQ ID NO: 23500 - DNA, 9114 bp, Oryza sativa
  Clone ID: TF_OsC1713_5497
tcaagccacattagagaagtctatgacatttaactcattcctcaacttgcaaaagcgggtttcatcaagaggcttggtaaagatgtcggctagttgatcctcggttcttatgtggctaatgactatgtcacacttggcaacatggtctcttaggaagtgatggcgtatgtcaatatgcttggttctagaatgttggaccgggttattggctatctttatggcactatcattgtcacataggagtggggttttggtgaaggatatgccatagtccaacaatgtttgtttcatccaaagcaattgggcacaacaactacacaccgaaacatattccgcctcggcggtagagagggctacggagttttgtttcttggatgaccatgacacaagggatctaccaagcatttggcaactaccagatgtgctctttctatccactttgcaaccggcataatccgaatcggaatagccaacaagcttaaacttagcaccttttgggtaccacaagccaatagtagaggaatgctttaaatatcttagaatccttttcatggccactaagtgacactccttaggagcggcttgaaatcgtgcacacatgcaaacactaaacatgatatccggcctagatgcggtaaggtaaagcaagctaccaatcatagaacgataaagctttaaatctaccggtttacctccctcatcaaggtcaagatacccgttggttgccataggtgtcttgatgggcttcgcatcctccaagccaaacctcttgagtagatccttgatgtacttggttttgctcacgaacgtcccatccttgagttgcttaatttgaagtccaaggaagaagctcaactctccaatcatggacatctcaaattccctagacatcatatcaccaaattccttgcaaaatacctcattagtagaaccgaatatgatgtcatcaacataaatttgacacacaaagaaatcatcaccaatgatttttgtgaaaagggtggtgtcaacttttccaattttgaaatcctttgacaaaagaaaatctctcaatctttcataccaagccctaggagcttgttttaaaccataaagagcttttgagagtttgtaaacatgtttaggatttttaggatcttcaacttgtgtgaaaccttgtgccaccaaccttgccttgtttctcaccaccaacccgttctcatcgtgtttgttcctaaagacccactttgtccctatgacattgtggtctctaggtctttcaaccaaagtccacaccttgtttcttgcaaagttgttgagctcttcatgcatagcattcatccaatccggatcacaaagagcttcatctacatgttttggctcaagacaagaaacaaacgagtaatgttcacaaatcgaagcgacacgagatcgagtttgaacacccttactaatgtcacccaacacttggtcaattgggtgatccttggaaagagcggtgtgtatccttggaggcataggtggatcttgtgccttctcctcctccacttcaacttgagcttgacttggcgtagcggaagtagatggctcatcttgagtggaggtggatggcttgtcttccacttcaataggcttgacatctccaatagacatgttcttcatagctctcatcaagccttcatcacatacatcatccaaattctcgtacccttcttgggagccattagtctcatcaaattgaacatcggcggtttcttccacaatacctttgttcttgttgtagacccggtatgccttgctttttgaggcataacctagaagaaacccttcatcacaccgactttcaaatttggttagtctaacaccctttcggtaaatataacatttgcaaccaaaaactcgaaaataggcaacatttggcttcctcccaacaattagctcataggaagtctttttcaagagacgatgcaaataaagcctattggttgcatggcaagcggtgtttatggcttccacccaaaagaaatcggaaacaccatattcatcaagcatagtccatgccatctcaatcaatgtacgatttttcctctccattacaccattttgttggggtgagtaggtagcggaaagttcgtgtttgataccaagatcatcacaatagtcctcgatattggtattcttaaactcggaaccattgtcacttataattttcacaatagtgcaattaaattcattttggaccctttttgcaaactttttgaaaagctcggcaacaatagacttgtcatgcaaaaagaacacccaagtatagcgagaataatcatcaacaatcacaagacaatgactattaccaccaatgctcttataggttgttgggccaaacaaatccatatgcaagagctccaatggtctagatgtggacatgatacttttagtaggatgagaacatgcaacttgcttgccggcttgacaagcactacaaagcttatctttctcaaacttcacattttttaagcccacaactagatcacgttttgaaagtttactcaattgattcatgccaacatgggctagcctcctatgccaaagccaacccaacgaagtttttgcaactaaacaagttttcaaatttgcttcactagaattaaaatcaaccaaataaagatttccatatctaaaacctttgaacacacaagacttgtcaagaaggctagaaacaataacttcttgcgggaagaaagcacatgacaagccaagatcacaaatttgagcgaccgaaagcaaattgaaatttagggatttaacaagagagacattatcaattgacaaatcattggagatagcaattttacctaacccaattacctttcctttgctattgtctccaaatgtcactttctcttgttcattccctcctacttcaaatgtggtgaacatagccctatcaccggtcatgtgttgagtgcatccactatcaagcacccaatggctcccaccggtgtggtagttcacttggaggttagagaccaaagctttgggcacccaaatggcattcttttttccaccgagtatagggtaatccacatatctagcaacaatgcttgcatcataagccttcctaagcatataatgagaatcaaacatgcaagtcttaggaggcttaccaccggggcaatcattcaccaaatgtccaacctcacgacacttggagcaatacttaccattgctcttaacaaaacgagtggcacggtgagaaggtttcttacccttctttggaatgaatccaagtccctccttgttaaggatgcaccgttgctcactcaaaatcttgtcaagagtgttcttacccttgaagcacctctccaagctcttgttgagcttagccatttgctccttaagctcattcttctcaacaacaagtgaggcatcacaaatagaaacacaagagctagagctagagctagacatatccacaagatcatcacaagaggtagaaatgctagatgatgcaacatgagcaatatggcgagtagcactatcatcaagcaaatcacaagatatgccaacatcaatgagagctccaagttgagtagtggaaatgaggttgtcatgagcttccttaagcttctcatgagaaatggtgagtctctcatgagaagtctttagctcctcatacaagacaagctcatcataggaaacatcatcacaatcatcatcactctcactatcactaagagatgttaccttagaggagccctttgccatgagacaaagtggagcgaagagtgatggagccttcttgatggcaacaacggccatcttcttcttcttggagcttgcatcatcaccaccttcttcctcggacccggatgaggcggagctctcctcatttgagtcgcaatcctagggtgatatgatctcaagtgtgtctctagaaatgtaaattgcacaaatgtaaatgcgacaatcaaatgagacaatgagacaagagatttttcaccgaggttcggaaactcgccggtttcctactccccgttgaggcgagcccaactccaccgctcaaccacgaagccaccgcacgcccccttcgtcaaggggtgggcaaggcgggagccggcccacggagaggactacccaagcctcgatcactcggggtagttcttccttcactccgaaggtggtgaactccaaaccactcacaaaccggtgccgggcctcctccacaatcttctcggagaggtcaccgggcaactcctccacaagccgtctaggaggcggcaacctcattatgtagggagcataatagattccttgtccaatagtcccctttgagatggtaatctccttcatcataaagttgataacatcaaaccgacgaccatccataatggcatcaataacatgccaagcaactccgcgtatgtcatcattgttgccgcatcttgggaggatggtggcccttactatgcggttgatcacacttgggagagcccttaaacccgccacctttccatatgtgtgccttcccccttcttcataaaactgagaaaagtgatcaatggggaagggattgtgggtgtgctcatcatgaaggtcatccccgttgttgaagcgaatgtgcaagagctccttgaattcacggcggttgatagagcatcggagggtccccgacatccacttcattgcatcacaatcgccggacacccatacggtggcatagaattgccggatgagatcttcatcaaaaggttgcttcatggtgacaattctatcaatcccaacggtccggaacatctcttgcacattctcaaactccggtgtctcaccaatgtgcctccaagagatccatttgtgttcggtgaaggctttcttggcatacacttgtacatacacggacttttggaaccgtgtatgaaatcttggatcattacaatcgttaggcctccgaaattgatcatgatgatggaggatagcgtattgttgagcattcctcaaattaagcacaaattggatggaggaatcgaaaggactcccatcatcacttgcctcatcatcttcaccatttccactctcattgtcatcaccatcatcacttacttccatctcatcaccctcaacattttccatattgtcctcatcactttgaacatactcatctccgcttgattcctcattctcactaacgggatcgggcgtgggcgcacgacgaccatgccgagtgcggggaggcatagcaagcatttggcaactaccggatgtgctctttctatccactttgcaaccgacataattcgaatcggaatagccaacaagcttaaatttagcaccttttgggtaggccactaagtgacactccttaggaacggcttgaaaccgtgcacacatgcaaacactaaacatgatatccggcctagatgcggtaaggtaaagcaagctaccaatcatggaacgataaagctttaaatctaccggtttacctccctcatcaaggtcgagatgcccgttggttgccataggtgtcttgatgggcctcgcatcctccaagccaaacctcttgagtagatccttgatgtacttggtttggctcacgaacgtcccatccttgagttgcttgatttgaagtccaaggaagaagctcaactctccaatcatggacatctcaaattccctagacatcatatcaccaaattccttgcaaaatacctcattagtaaaaccgaatatgatgtcatcaacataaatttgacacacaaagaaatcatcaccaatgatttttgtgaaaagagtggtgtcaacttttccaattttgaaatcctttgacaaaagaaaatctctcaatctttcataccaagcctaggagcttgttttaaaccataaagagcttttgagagtttgtaaacatggttaggatttttaggatcttcaaaaccgggaggttgttcaacaaagacaagttaggcaatttcaccatttagaaaagcacttttcacatccatttgaaatagttttatatcaaagcatgatgcaaatgcaagaaggatgcgaatagcctcaagtcttgccacgggggcaaaagtttcaccaaagtccaaaccttcaacttgtgtgaaaccttgcgccaccaaccttgccttgtttctcaccaccaatccgttctcatcttgtttgttcctaaagatccattttgtccctatgacattgtggtctctaggtctttcaaccaaagtcaacaccttgtttcttgcaaagttgttgagctcttcatgcatagcattcatccaatccggatcacaaagagcttcatctacatgttttggctcaagacaagaaacaaacgagtaatgttcacaaattgaagcgacatgagatcgagtttgaacacccttactaatgtcacccaacacttggtcaattgggtgatccttggaaagagcggtgtgtattcttggaggcataggtggatcttgtgccttctcctcttccacttcaacttgagcttgacttgacgaggcggaagtagatggctcatcatccacttcaataggcttgacatctccaatagacatgttcttcatagctctcatcaagccttcatcacctttgttcttgttgtagacctggtatgccttgctatttgaggcataacctagaagaaacccttcatcacaccgactttcaaatttggttagtctaacaccctttcggtaaatataacacttgcaaccaaaaactcgaaaataggcgacatttggcttcctcacaacaattagctcataggaagtctttttcaagagacgatgcaaataaagcctattggttgcatggcaagcggtgtttatggcttccgcccaaaaggaatcggaaacaccatattcatctagcatagtccttgccatctcaatcaatgtacgatttttcctttccactacaccattttgttgaggtgagtaggtagcggaaagttcgtgtttgataccaagatcatcacaatagtcctcgatattggtattcttaaattcggaaccattgtcacttctaattttcacaagagtgcaactaaattcattttgggccctttttgcaaactttttgaaaagctcggcaacaatagacttatcatgcaaaaaaaacacccaagtatagcgagaataatccaaacttgtttgagtccttggaggttagagaccaaagctttgggcacccaaatggcattctttttaccaccgagtataggggaacccacatatctagcaacaatgctaccatcatgagccttactaagcatataatgagaatcaaacatacatgtcttaggaggcttaccttcggggcaatcactcaccaaatgcccaacctcacgacacttgtagcaatacttaccatttctcttgacaaaacgagtggcatggtgagaaggtttcttacccttctttggaatgaatccaagtccctccttgttaaggatgcaccgttgctcactcaaaattttgtcaagagtgttcttacccttgaagcatctctccaaactcttgttgagcttagccacttgctccttaagctcattgttctcaacaacaagtgaggcatcacaaatagaaacacacgagctagaactagagcaagggctaggcatatacataagatcatcacaagaggtagaaatactagatgatgcaacatgagcaatatggcaagtagcactatcatcaagcaaatcacaagatatgccaacatcaatgtgagctccatgttgagtagtggaaaggagattgtcatgagcttccttaagcttctcatgagaaatggtgagtctctcatgagagatctttagctactcatacaagacctccaaagaagcatgatccttctttagggccttgaacttgacaatatccttctcactataagcatagagctcctcaaacatactcacaagctcatcataggaaacatcatcacaatcatcatcactctcactatcactaagagatgttaccttagaggaaccctttgccatgagacaaattggagcgaagagtgatggagcctccttgatggcaacaacgaccatcttcttcttcttggagcttgcatcatcaccaccttcttcctcggacccggatgaggcggagctctcctcatttgagtcccattccccgatgaaagcctcaatcttcttcccttccttcttaagtttcttcatgagcttgtagcctccactcttcttcttggatgacttgtctccatcatcatccttggaagggcacttggaagcaaagtgtcccttctcactacactcaaaacacctcaagttggagagagtcttattgggtcttctatttcttctcctattggagttggagccccttcctctctcctttctccttcccaagagatcattgaaccttctagcaagaaggatcatctcttcctccaagtcctcattgacttcattcaccttgctcttgctcttgtcttcaacttcggcttggagagcaatgcacttcttggagggtgaggcttcctccatctccttcttcttcaacttgtacatgtcattggtgttgatcttccccaagaggcttgcgggtgtcattcttgacatgtcggagttgatgagcatggtgacaagggtctcatacttctccggtagggctctaagcatcttttgggcaacctcaagatcggtgtagtttgccccaagccccttgagatcattcacaatgacattgagcctcccatacatgtcattcacattctcatgaggcaacatggagaatgtctcatattggatcttgaggaagtgaagcttggcatccttgtactcacttgtaccctcatggatctccgccaacttgttccaaatctcatatgcggtctcaaggttgctcactctatcgaactcctcttggctcaaagagttgaacaaggcattcatggcttgggcattgagttggaggttgcggtgatcaatctccgtcaagggtgtgccagtgatggcaaagcctacatccacaatactccaaatatggaagctcatagctttgaggtgagtagatattttaattttccagtggagtagtttgtgccattaaacatgggagccttccctacatggttcaccttgttcgacat

SEQ ID NO: 23501 - DNA, 586 bp, Oryza sativa
  Clone ID: TF_LIB4309-037-R1-K1-D4
tccgaatctgcgagagcggaagccaccgaggcggaggcgaggaggagggcgcaatggcggggaaggaggagggccggatcttcgtgggcggcctgtcgttccacaccgacgagcgcaagctggccgacgcgttccgccgcttcggcaaggtcgtcgacgcccagatcatgctggagagacacacccaacgccatcgtggtttttttttcgtgacattttcagatccagaggcagttgatagcgctattaaagaaatgcactgtcaagaattagatggcaggactatatcagtgaacaaggctgagcctaagatgaatacagatgacacaaggtatgaaagtggtggtggacgaggagagtatcgtggtggtagaggtgatggaccacccccaggcaattgctttgagtgtggccgtgctggtcattgggctcgtgattgccctaatcctggtggtggtcgttctgcgcgatactcttcttctagttcagcgctggtggcagaggagaccgtttttctggatcagataggtttggagaccgttacatggatgatcggtatgatggtgggtaccgggaaccctgtgat

SEQ ID NO: 23502 - DNA, 1320 bp, Oryza sativa
  Clone ID: TF_OsC7718_1
atggcggggaaggaggagggccggatcttcgtgggcggcctgtcgttccacaccgacgagcgcaagctggccgacgcgttccgccgcttcggcaaggtcgtcgacgcccagtggttcggtagcttttgtggctcttttgtgaaccaggtgatactgatcatgctggagagacacacccaacgccatcgtggttttggcttcgtgacattttcagatccagaggcagttgatagcgctattaaagaaatgcactgtcaagaattagatggcaggactatatcagtgaacaaggctgagcctaagatgaatacagatgacacaaggtatgaaagtggtggtggacgaggagagtatcgtggtggtagaggtgatggaccacccccaggcaattgctttgagtgtggccgtgctggtcattgggctcgtgattgccctaatcctggtggtggtcgttctgcgcgatactcttcttctaagttcagcgctggtggcagaggagaccgtttttctggatcagataggtttggagaccgttacatggatgatcgttatgatggtgggtaccgtgaacctgttgatgtcagagacaggtatggtggaggccgtgaccgatatgctaatgatcgatacccatcaggtggtgaccgctatgttccagacagatatggaggtcccgatcgctatcagcctagtagttatggccgggaacgagaaagaagctacgagagggatggagtgcgtggcaatggcggctatgataggagtggcccaaggggtggtggaagctatgacagggatggcccaaggggtggtataagtggtggctatgacagggatggcccacgtggcggtggtgttgaccgttacggtggtggagggcctgctcgttatgatggaggaagctacagggacagatctgggccgtatgaccgccctagcagaggaggacgctttgatgatcgcttccagtgaagcctttcgcagaatcaagttatgtatttgcggtttaatgcttgcagtttcgcatggctgaatgtttagtgaatgctctggcacagttatatctattatgtattagaacctccagcactgttttgattctggcaaaaagtttatctatcagactgttttggattctgaaaaaaaaaaaaatgcactgaaaggttgtctgcctgatccccgtgccgctgaatgctttctgtggtttgtacatggtgattaaggcttgcatggtatcatcaatctaatctgcaaggattactacagaaacagtggctaaattatgccggcccagcacatttgtgagaaaccttagtatgc

SEQ ID NO: 23503 - DNA, 5151 bp, Oryza sativa; identical to SEQ ID NO: 14860
  Clone ID: TF_OsC359_5804

SEQ ID NO: 23504 - DNA, 1167 bp, Oryza sativa
  Clone ID: TF_OsC20523_1
cacgactcaaaacattgaacagtagatcatattaaattcccgttgtacgttacaaaaccgtgatcccccaatagacaaaattgttcggaaggatcttcttctgtatcattactggtaagctacaaaggttacatagtttaaccaaagaattttacaactttcggagcttgttttacttttgccttagtgttggtattcttgtcaccatcgcctgtctctgtggtagattttgaactagattgtttagccttctttgccttggtgtgtcttgtttcttcttcttcaataaaatcgtcatcaaggtcatctccaccccggagaacagcattgtcttccaggtgatgctcctccgtattgaaagcatcatccccagaagatatcaagtcttgcctccctctgtttggacaatgcttggccaggtgtgtaacttcaccacatatcttacagcaacctccctttggataaatgccgtgtttgttttcaggacaattcttgctcaaatgtccctgctgtttgcagacaaaacagcttgcgaactttgtacccccattttcaatgggtttggggcacttggaaagtgagtgcccagattcaccacaattataacagaatttcttcaaattttcatcatttttgtcagggcaattcttcaggctatgacctcgttgcctgcagagcaagcaaatcttgttcttctcccagagggacttctcggggcagaccttggcgacgtggtccgcggccttgcagatgaagcaccgctccccgggccgcatcccggggacccggagcgggtgcttcgacctccccgcgcctcccccacccgccttactcgtcttcttgaacatgctcttcttgttgttcttcttcttcttggtgccgtcggcgggaggggtcgggttggcggggaagaggcccgggttcgcctcgcggaagcgcttccgcgcttcccgctgccgcttgttcgccatcgccttgggctacggacgctctctcgccgtcgcgcgtggtgctgtcctcgagcttggtatctcactctctctctctctctctctgggcggcggcgcgcggcggcgggggacgggagtcgggaggggagcaagggaacagccgagcaaggagggcttcgttttgggaggcgctgacgctttgagattccccggccgg

SEQ ID NO: 23505 - DNA, 1774 bp, Oryza sativa
  Clone ID: TF_OsC359_8329
ctaagcatattttggtacccaaatcacgttgggtccatggatgttagtcacaagagatttagggacccaaatggcctttgtgctagcatgtagcgaactaatcaccctagtagcacaagtgccatttttggccttcctaagcaaattgtgatgaaatgagaggtttggcttaggaattttaccaatgggacaatttttaccaatatgtccctttgcccggcaattgtagcaaagttgagttttgcttttatcttgcttcttgacttgcttgttgccggtttgcctcttgcttgatcgattgctatgatcatccttcttgtgcggacaaaatccaatttcatgccccttctcaatgcaaccgtagcacttccttctgttgattcttgatgtctttcttggaagtgtggcttcatcatcaatcttgcaaggacaacttgaggcaaagtgtccctctttggtggatttgaagaacttgtgagcaagatcctcattcttgctcaacttcttctgtttcttccaagggcaatctctcacatgatgtcccattttcttgcacttgaagcaagtaatggaagctttgttcttgctttgatcttgccccttgctcttgttgttggacttgttatcttcttgatagaacttggtgcaagctacggttgatcccttctcaagcttcttcagcatgctttcacggttatcttgagaaggttgagcattgcaaacaaatccatgatcgatgtatttatcctttttccctacataatccaagtcacatgtagtgcgcagaaaaatatttgcttgagagcaacaagagttagcacatgtaaagtcaacttgaacatgaggcacataggattttaccgttattatgatcacctcatgagttacttctagcatggcatgtgaatccacaagatttccatgagagcacaaaagctcatcatatttttcttgtaggtccacatgcttgctagtgagctccacaagttgagctttaagctctagattttctttctccaaatatgatttctccatgatgcaagaatattcatccaagtgtgaagatgagcatcttggagatgtaaattcttcacttggccattttttcccacatacttctaccatttcattacctttaatggagacatgtgttggtgaggaggtgaatgtggcaagactatcttgctcattggatagaatcacttgaggctctttacaaattgtcgatgaatttgagcactccacaagtggttcttctatagcgagctttgcctcatcacactcggacttgtcatatctctcctcgagtgtgttccaaatgagatgagcatcaagtttgaactggaaacctgccaggagcttccgggtaaaagtgccaggaacttctgggcagcacttatgaaatttttcaacctcaccttggtgccaggaagttccggacagaacctccaggtgggactctctgtcccgacttcaaatggcctcgcacggtccaccacgaccatcatgacaaagccttcactcgcccttcaccaccggattcggtccatcggcgccaagcctcttgcttgcccttcaccccccacatggtccattgtagccgagccttgcttgcccttcaccgttttgccataaatagccacttcataccccgcatcatcaatgtcttcacttgctcctcatcaaggtataatgtccatcttctagccgagccttgctttctcttcaccggtttgccatagatagccatttcataccccgccggacgcgtggg

SEQ ID NO: 23506 - DNA, 1354 bp, Oryza sativa
  Clone ID: TF_OsC6521_1
cggacacgtgggctcgacggctcgagcttaaaaccctagagccgctcctcctcctcctcctcgcctaccccgaaacccaaatcccccccaaggcggacgcgcccgcaaagggtcgagcgcgctcatggctcgcgtgtacgtggggaacctggatccgcgcgtgacggcgcgggagatcgaggacgagttccgcgtgtttggggttctgaggagtgtatgggttgctagaaaaccaccaggttttgcctttattgactttgatgaccgcagggatgcagaagatgcaattcgtgatttagatggcaagaatggatggagggttgagctgtcaaccaaagctggtagtggtcgtggccgagatcgttccggtggttctgacatgaagtgctatgaatgtggcgaacctggtcattttgcacgtgaatgccgcttacggattggttctggaggccttggcagtggaagacgccgcagccgcagccgtagccggagtccaaggtaccgcggtcgtagtcgcagccgcagcccaagataccggaggagcccaagctatggtagaaggcccacgggatcgttctccaaagaggcgcagctacagcaggtcgccaccaccagctcgtgcacgaagctacagccgatcacctccacctcctcgtgagcgaagctacagcagatcaccagcacagccagccaaccgcgaggagtccccctacgcaaataacgcgtaacccgcctagttccaatttgctggaaatgttaggggggctcggtgtgtttttgtaagcgcttgtgttatggagtcttgaaaagctatagggattgagtatgttcttcggaagcatttgtgtacccttcgggaaaaaccccgccgctgctgatacaattgttgaagcaggagcctagcgttttggtcgactgtatgactttgagaccccatgtagtccgtaagactaagttttgtaccattagatttttcacattgctggaatatttgtgctaaatactagtattattaattaatgtcttttgtaggtgcaaaaaaaaaaaaaacccagcaggttcacagctcttctggagcagctcacatatactcctacaacattcactgtatcatgcatcgcgtcaccattgccatgatcacatgcgctacatgtgtaccacccccacacccggcacgggcacaccgatacggcgcttcacatggctttgtgccaaagcggtgtacgctagtaccgaggtcacatggttgcactacgcggctgcagccatcaaacttccatggcatctgcaacagaaaaggcttcaatgattccaaccctttttacgtggttcaaaaaaaaaaaaaaaaaaaaaa

SEQ ID NO: 23507 - DNA, 4944 bp, Oryza sativa; identical to SEQ ID NO: 14886
  Clone ID: TF_OsC91_2317

SEQ ID NO: 23508 - DNA, 4665 bp, Oryza sativa; identical to SEQ ID NO: 14885
  Clone ID: TF_OsC91_2600

SEQ ID NO: 23509 - DNA, 4515 bp, Oryza sativa
  Clone ID: TF_OsC91_2629
agaggagagaaggagaagaaagaaatgtcttcagtggttggaaaggaggttgtagatgcttcctcacttatcactaagggtgatatgaaggatttgctagaggatttgttgaagatgggcatgataggtcagaggaatgtagcaggagggtctaaactgaaactagaagtgatgccaagtgagttgaggttggaagggagcaaaaattatttgagttggtgtaggagagctcaactaatgttgagagcaaaaggggtggatcattttttgcaagagggttgtgaagagccctctgataaggagagccaagcatggaggacatggaatacaacaaatttaacagttatgctattgaagcatgaggaggacattgtgattggaaataaatggatgcagaggcgaagagtcattcatttcttgaaggggctgaacaaggagtttgaggatagaagagcggctatgttccaccaggctacattgcctactatggaagaggttatttttgctatggtgcaggagatgaggttgaaactgatgagaggcacaaatcttacaagatcagcatacactgtggctgataatagggaatgctacaactgtggacaagtgggtcatgtgagctacaattgtcccactcctcggaacattggcggcagggggttaattcgaggagggcatggtggatttggtggaacccgtggtggatttggaggagaccgtggtggctttgggggaaaccgcggtggtagaggaggtgactggagaggtcgcggtggaggtcgtggtaggacagaggttctcctcaggccaatgcagccattgaggagggagaagggactgggaggaggattgggactggagtcaggcgtgatgggttgtggtacatcaatcatgaggaactggataggttggcatttttgggacggagtagtggtgatggtaaatctatcatcatttttactattaccacctaataactacttaaattatccgcattggctccacctctctcctcccctctccgcgtgggacggtgtccgtggcgtcgcggcatcggccacgggcgggacaactgttcctgtgattaatccggccgtttccgcggcggatccagcatcagtggtgggcgagaaactgaaggcggccgttcttgcagcgaacccagtgttggcggcatcggcaatgggcgggggtagtatcggtcatgttggcggcaggcgaggcggtcgttcttgtgtcagatccggtgtcgacagtgggtggggcggcctatttaatgctatagatactattctaattattgggagaggagctttctcgatcgcaatcatggagctggtgatgggggcaatggaaaacctgatccccaagttgggtgagctgctcaaggaagagtacgtcatgcagtcgggcgtgagagagaagatccagtctgtctcacgggagctcgagagcatccacgctgctctccgcaagatcggcaaggtgccatgggagcatcttgacgatgagttgaggctttgggcgcacgaccttagggaggcgtcgtatgacatggaggacatcatcgactccttccttgtgcgcgtcgacggccatgaggcaagtgaagttcactggttcaaatggttcttggagaagatgaccaaccagttcaacaagatcaaggctagccatgaaatcggtgtcgcaatgaaagaaatcgatgagaagctccaggaggtggctaccaggcatgcgaggtacacaatcgacaatattgccatcaatcctgcaggcccagcaactgtcgatcctcgtctcttgagtatgtacaaaacattggcagagcttgttggaattgaggggcccatggatgagctcatgaagatgttggatattgatttgccgaccaagaagaggaagatcgaaatcgatgtgtccgttagaaaaccgaagatggtatccatctttgggtttggaggacttggcaagaccactcttgccaaagcagtctacgacaagcttaaaccaagttttgattctggggctttcattccggtcggtcagaatcctaatattaggaaagtttttagggatattctcatggatcttgacaagcagtcatacaatgacttaaatctaaagctgctggacgaaaggcaactcatcaacaaactccaggaattcctccaaaaaaagaggtgttttgtagtcattgatgacatatgggataaggattcatggaggttaattagatgtgcactacaagacagtaaccatgaaagcagagtagtcacaactactcgtatttatgaagttgccacacaagtgggcgaagtttacaaaatgcatccactttctcatgatgaatcaaaaaaattattgtacacaagaattattagcggtgaaggtgagtctctccgtagtacatcggttgaggcatgtgacaaaatactaaagaaatgtggcggtgtgcctttagctatcatcataatagctagtctgttggccaataaaccaagggaatactggtccgaagtgtataactctattggtttagaacatggatacaatgatgacgtagataatacaagaaggatattgtctttgagctactatgatttgccgttgcatctgaagccgtgcttattgtacctaagcatatttccggaagattattatattgagaaaaatttgttaatatggaagtggatagcagagggttttgtacatgagaaacaagcagcaaagttagggttatttgaaaccggggagggatatttcaatgagttgataaacagaagcatgatccagccagttgagcatgaatactcagggtacatgtgtggttgccgtgttcatgacatggtacttgatctgatcctcttattgtcaggtgaagaaaactttgtcactgtagtagatggcagtaaggaacatgaactttcatggaaaaatgcccgtagattagctctacaacattggagttttgaagagaacaggaatcagttggctaatatgggtgtgaagcaaacaaggtcccttattatgactgagtgctttgataagaacatgcaattaccgagcttccaagttttacgtgtactagaaatacaaaagcaaggccgttggtggaacattgatggtaaaattaacctgcagcatgttagaaatttacttcaccttaggttcctccatctagattgtattgattctattcctctcatagagcaattcagaaatttgaggtttctacaagtacttcatctgaaggaatctaacatacaagagctgccagagtcagtgggcctgctaacaaaattgctgtccctacgtgttgatattgatgtaagggtgtcgcctggtgtgatcgagaagctgacgtccttacaggagctgtatttgtggccttatagtgatgatacgttccagttcgtgaaggtcctaggcaagctgagggaactgagggtgctgcatgctaaaaaccttaagcttgatggacagggcgagacatcagcactgctggagtccctatgcaatctgcacaagatccaaactttggacattgacctaaatcttaatccaaatgagggtgtcacgtgggatgcaggattcacttcccctcaatgcctccgatacctctgcttggtgtctttgaggtttcatagaatgccagagtggattaattggtcgcttcttccaaacctctcttatcttgaattgagagtgaattttttggaagagctagaccttgaaacccttgggaggttaccaaaactacgatacctccatctgtttatacactgcgacaggatagtaagcatcgggaagattgccggtgctggtgatgcctgcttccaagagttgagatttttgaacacaccctacttgtatgtccggtttgatcagcatggcatcatgtgcagcaaagacgaaaaagctgtcatgccaaacgtcaaaactctcagtttttgtgtttatgtgcggatcctaaaagataccgacatacttggatttgacaagctgtttagcttcgctcatcttggaagaagttcgctccaacaagtccaagttaacatccaatgtcgtggtgctcgtgccatggaagtcgaggaagcggaggcggcgttggcacacgcagccgccatccatcccaaccgtccaacccttcaaatccataagttttcggagggagaaatgcttccccctcacgaggagcctagcagcttctttcctaaagttgttgtcgaaaatctcaatgcgcatgagagaaaggacgacgatcttcgttttgtcctcggacagatgctccagcgtaatccatgcgtaaagaaattcagtgtctccatcaactgtgaaaatgcatgtcttgaggaggtggagaaagcagaggcggctgcgagatatgcagtcgacttccacgcaaaccgcccgacacttgaactggtaaaatatggtgaagataagatggtgttgtctggccaacaccaacaggtatgcaccccaggttgcctatctgattctaatccctag

SEQ ID NO: 23510 - DNA, 329 bp, Oryza sativa
  Clone ID: TF_uC-osflM202067e09b1
tcgcttcgccacgccacgccacgccgagttgtggagctgagccatgatggagttgcgcaagcactggggcgtcggcgggcggcggtgcggtgcgtgcgaggcgtcgccggcggccgtgcactgccgcggctgcggcggggtgtacctgtgcacggtgtgcgacgcgcgcccgggccacgcgcgggcggcgcacgagcgggtgtgggtgtgcgaggtctgcgaggtggcgcccgtcgccgacacctgcaaggccgacgtcggggtgctctgtgccgcctgcgacgccgaccatccaaaaggcaacccggtggcccgtcgacacgcgcgcg

SEQ ID NO: 23511 - DNA, 2114 bp, Oryza sativa
  Clone ID: TF_OsC1274_1
cccacgcctcccgctcgctctccctttcgcgcaccagaaaagtcgttttttaattttcgagtttccgtggaagattctcgatacctgtccctcgtcgtcgtcctcctccgccggccgccgccgacgaccgcagcaggggtggatccggggcggcgccgattcgtatcctggtaggatcccactgaattcaactgttgaacaaaaagccaggaaggtggctgttcttgtggcactcagtgctagtggaagtgctccagtactgtataggaccatggatgctctttgtgatttctgcaggggagctatggtcattggtctattcccgatcagatgcaccagccttgtgcgtgtcttgtgatcgtaatttgcattctgtcaatcccctttcccgacggcaaacttgcgtccttctttcatgaccgtgggttatagaccctgcacctgatcgctgtcttgaagagaccacctgcctttgtccacacactgaacggaccgggcgtggtggaggatgctcagttgtttttcatcaaagggagagaagaagatgttaatcgtggtgctcaacttcgacacaactttcgagaatctggtcctcgagtatggatatcccgactgaatctacggagacaaactgtgaggaaggaataaacatgatgagcattaatgacaatgacgtcaataaccattgtggtgctccagaagatggccgcttgttggatatagctagcacagcactcatgagtgatttacctacaggagacaagttcaaacctttaataggttcttcttcaggagatgggatgaatcttctgccacttaattcagatcagccagctgagccagtttcaacgacgcctaaggcaccctgtgtcacagacaaagatatgttcaatgatgggagcgtatatggagacttctgtgtggatgatgctgacctaacatttgagaattatgaagaattattcggtacctctcacgttcaaacagaacaactctttgatgatgctggaattgacagttattttgaaatgaaggatgtgccagcagatgaatctaatgagcagcccaaacctgtgcagccagaatgtagcaatgtcgcatctgttgattctgggatgtcaaacccagctgcaagggctgattccagccattgtattcctggtaggcaggctatatccaacatatccctttccttctctggtttgactggtgaaagcagtgctggatattttcaagattgtggggtatcgtcaatgatccttatgggtgagccaccctggcatcctcctggtcctgaaagttcatctgctggaggcagcagagataatgctcttacacggtacaaggagaagaagaagagaagaaaatttgacaagaagataaggtatgcttctcgtaaggctagggcagatgtgagaaaaagggtcaaaggacggtttgtaaaggctggcgaagcatatgactacgatccgctgagccaaacaagaagctactaaagcctttcactcgattggtttcgtccagtgttcaagtagcaattttcagcagctgatttgatgttggttgcacggcaagcatgatcactggagaacacaagcaattgcggcagaccttgcaattgaaaacggggaaaggaaaccaaacgctgtgatcaaatcaaattaatgaaataaaaaaggaaaaaataggatgcaaacatgcgagaagctcatggatggtaatgctccattttctcctgtacagttcatgcatcttcagttgcttctggttgagatgtctgaatcactctctaccatctgtgcattaatcaaatacaaatacatgggcctaccgcacgacgacgaacgcacctgcttctgttgtgatgttttgtgttgcggctgtcaggctggatctctaggtaacatgattaattatactactgatggaatttgcaccgctgtaatattatttacgaatcacaatctgccgtgggattgttcttctgtcgtgtatgtatgtgtatatagatggatggctgttaagaaaatattgtgacgattataaagtttacctttgtaaaaaaaaaaaaaaaaaaaaattgatctgtaaaaaaaaaaaaacctgcagcccgg

SEQ ID NO: 23512 - DNA, 332 bp, Oryza sativa
  Clone ID: TF_rsiceb_8130.y1.abd
gcacgagggttagctttgcttcgtggcgactcgtcagctcgctgcttggttggtgatggagatggagctagggttgggaaggtactggggggttgggaggaggcggtgcggcgcgtgcgcggtggcgccggcggcggtgtactgccggacgtgcgacggcgacggcggcggaggtgggtatctgtgcgcggggtgcgacgcggagcatgggagggcggggcacgagagggtgtgggtgtgcgaggtgtgcgagctcgcgccggcggcggtcacctgcaaggccgacgcggcggcgctgtgcgccgcctgcgactccgacatccacgacgcca

SEQ ID NO: 23513 - DNA, 1775 bp, Oryza sativa
  Clone ID: TF_OsC79690_1
cgggctgcaggtttttaattaagtatgtactgattactcaatgtacatgggtgtggcgcaggcacaacccagtttacatacacaagtcatttgtttcctttatggagtgtttctacaaaaccatgaacaccaatgtttacacaagtacaatcgcctactttctctccggtcgatggaacagagataaaagagatccaaaagcaccgagccaaacaccaacaaaaccgaaaaaaaaaaggaagagaaaaacttttgaattgaacaacgttatactacttgaatcgtgcagcttcgacaaattttgcgtgaacttttgtgccaatcgagtccatgaggcatacgatcgaacgcaggcaagtctcgacaccggacacgtacgcatggtgccgcgcgccgggccgtgcgcgatcgtacgtctaggtgacggcgcacggggcggcggcggcggaggggcgcttgacgaaccggcccttcatccgcggccgtttctcggcgttcagcttccgcacctcgtaccgtatcttcttggagaacagccgcgtacgccgcttctccctgtacctcgtcacccgcgcctcccgccccgggccgtccatccgcggcctcaccgtcatcatccccacctccgcgccatgcccgccccctcccgcagcccacaaccccgagtaatggtggtcgttgggccagaagtcgtcgagctggccgtgcggcggccggccgtcggtccacggcgagttgccccagctctcgatgatcgcctcgtagttgagcctgagatccaggctcctgtggaagaactgcgaatcggctgcggcgccgttgctcgccgacgacttctgttcgtccggcgaggtgcagttgaaatcgatgtccagcacgtcggcggattcgacgtcctccggcttcggatgagcgcggcatgatgggagagataccctgctgttggaggcaacaccgccgtcgagctccatcttcacccggccggattcttctaccggcggcgttattagccctagggtctccatgtagaacgagtcctgcagctcgttgctgtcgtccaggccttgtccgagtagggcttccatgtcggcggcgaactccctcagctcggcgtccgtcggttcgaagttgacaaagctatccgggagctgctgcacgggcgacgacgccgcagctgccggatactttgcgtcttccacggcgccgtcggcggcgtcctccttgaagcacgatgaggatgcggccgccgcgtcatcgatcgggggcggcgagcagaactcggcgagggaggggtcaaagaccggaacgcggtacagcaactgcccctcgagctcctcgtgagctccgtcttcgtcggccttccgttcgtccgacgactccaccgccatctccggcacgacgagccgcctcgagagcagctgcccgacgctcttgacctgcgggcgccgggtgcgcgccttgcgcttcgaccatgccggcgtgacgccgccctctctcttcgacgtcgtcgtcgtcgtcgtccccaccgccgccgccgcctcctcctccaccgacgcccgcgccgtcagcggcgggggcgacgagacgcgcaggcgcaggcgctcgtgccgcctggcgagcgggttggccgagtgcaccgacgtgtcgcacccctggcacaggaaggcgtcatccgccgcgcagtaccaccgcgcccgccgccgcaggcagctgtcgcacgcgcgcgccgccttgccgcccacggccccggccgccttctccgagctgcagctcat

SEQ ID NO: 23514 - DNA, 1219 bp, Oryza sativa
  Clone ID: TF_OsC69289_1
atgtcggtggcggcggaggggaaggagaagggggttggtggtgggggtggtggtgcgggtgcgggggcgtgcgagctgtgcggggcggcggcgagggtgtactgcggggcggacgaggcgacgctgtgctgggggtgcgacgcgcaggtgcacggggccaacttcctggtggcgcggcacgcgcgggcgctgctgtgccgcgggtgcgcgaggcccacgccgtggcgcgccgcggggcccaggctgggccccaccgcgtcgctctgcgagcgctgcgtccgccgcggcggtggtggccgtggtggtggaggaggtggaggcgctgctggtggtggaggccgtggtggtgggggagacgaggagatgggcggcgagggcgatgaggaggaggaggacgaggacgaggaggtggtcgtcgtggaggaggaggacgaggatgatgaagacgaggagggggagggggagggggagaaccaggtggtgccgtgggcggaggaggcggaggccacgccgccgcccgtcgcgagctccacgtcgagcagcagccgggaggccgccgccaacggcgcgaacgccgccgaccgcgtcaaggaggaccagccgtgctcgacgtcgcagccgagcttgtgccggtacgcgtcctcggctcaccatggcggtggtggccggagcgacgaggccacctcctcccggaacggcggtggcgtcggcggccgattccttgcctcccggcataggaagagatcgccctcggatttccgccggtcggggttggcgcagtcggtgagcggtgtgcagggaagtaataggctccaaggcggtcgttggtcgaaatgacttttcctgaggcaactgaaacaatgatgtagatgctgatgctaactacattagaaggtcacttttggtgtatccaggcatttggggggagatgtggatcactgcaaagatcaaacctccaccgagcacacacatcttcacatcttttccgtcgacaacttgcagagtcgacttatcacgcggccatcccagaactcggtagtattcataatcgcgacggcttgctggagcttgtatatgtgcccccactactttcatgtgtttaaatccctttttgtccttttggatgaggcgttctggctaacttaagaaatgatataggtttgcatttgcagggccattcttccatggtttccctgtttgaatgcttccattgtgccct

SEQ ID NO: 23515 - DNA, 439 bp, Oryza sativa
  Clone ID: TF_jC-osroLIB3475022g09b1
cccacgcgttcgcccacgcgtccgagcacccacccaccgcgccggcggtgaggccatcacctcctcctactgcacgtgcgccgagggcgtggtcgccggagccggaagggtggatgacgtggcggagctgcgactactgcggggaggcggcggcagcgctgcactgcaaggcggacacagcgaggctgtgcgtggcgtgcgaccgccacgtgcacggtgcgaacgcgctgtcgcggcgccacgtgcgggcgccgttctgcgcccggtgcgaggcgcgccccgcggcggcgcgtgtcgccgccgtcgctggagctggaggatgcggcggcggcggggaggccaggttactttgcgccgggtgcgccgacgacgacagtgcggatgcggcgagggtgcccgcggtggggttttccagatgccccagggcccgccgagctcg

SEQ ID NO: 23516 - DNA, 644 bp, Oryza sativa
  Clone ID: TF_OsC34358_2
ccggccgggaaaaaaaaaaaaaaaaaaccattgccgccgcgccgcgccacgccacgccacgccgagttgccgagctgagccatgatggagttgcgcaagtactggggcgtcggcgggcggcggtgcggtgcgtgcgaggcgtcgccggcggccgtgcactgccgcggctgcggcggggtgtacctgtgcacggcgtgcgacgcgcgcccgggccacgcgcgggcggcgcacgagcgggtgtgggtgtgcgaggtctgcgaggtggcgcccgccgccgtcacctgcaaggccgacgccgcggtgctctgcgccgcctgcgacgccgacatccacgacgccaacccgctggcccgccgccacgcgcgcgtccccgtcgcgcccatcggctccgccgccgccgccgccgtgattcccgaggctctgctgatccggataaatcccgccggggcccagcccgaggcgttggagaataagctgcttcacagagcaccaaagctacaaacaggcaacagaaaaaacgtgccacagccctacactgattgtcgctcatcacaatcttattgatacgcttctgggattatttttgtttttaatcttaatgcttacgcagggccgaaattctgttaagatgattccatccaaaa

SEQ ID NO: 23517 - DNA, 1478 bp, Oryza sativa
  Clone ID: TF_OsC80961_1
atgaaggtgctgtgctccgcgtgcgaggcggcggaggcgcgggtgctctgctgcgccgacgacgccgccctctgcgcgcgctgcgacctccacgtccacgccgccaaccgcctcgccggcaagcaccaccgcctccccctcctctcctcctcctcttcttcctcctctccctcccccccgacctgcgacatctgccaggacgcccacgcctacttcttctgcgtcgaggaccgcgccctcctctgccgcgcctgcgacgtcgccgtccacaccgccaacgccctcgtctccgcccaccgccgcttcctcctcaccggcgtccacgtcggccttgacgccgccgccgacgacgacgacaaacaccccccacaccccttgtcgtcgtcgctgccgcgcaacacggcaccgcccccgcagccgccgccgaagcgcagcccctcgccgatctacagcgatgacgacgtcatcgactgggccaccggtggccacgacatcggcatcaccggcaacctgcccgactggtcgctcgtcgacgagcagttcaacacccctgcgctgccgccggtggtgaccaagaccccgccgaagcgggcctcccgtggccccgtcacggccggcaccgccgcggcggtgttcggcaacctcgccggcggatcgccggactggccgctcaacgagttcttcggcttcgccgacttcagctccggcttcggcttcgccgagaacggcacgtccaaggcggacagcggcaagatcgggagcatggacggctcgccgaacggcggcaggtcgtcgtcgtcgtcctcctcctcctccgccgccgccgccggcggcggcggcggcggccaggacttcttcggccaggtgccggaagttcactgggccgtgccggagctcccctcgccgcccacggcgtcagggctccactggcaacgggacccgcgctacggtggcggcgccaccgacgccagcgcggtgttcgtgccggacatctcctcgccggagaaccccttccgttgcttcgccgccgccgccgccggtgaccataccatgaaacgccggaggagatgctaattaagaagcgcggcaacaaaatgagagaaaaaaaatgaaagagagagaaaatgttcgagttggtacatgtagtaggagtatttgagtgtgagattaattagtggtaatccgttgaagtaaattgatgtacttggctagctagcctgctactaggtgatcgcttactctgtattagtggatataatagctttggatctgattaattaggggctgcaatgctgcatttgtgtaacgttttgtgttagttactactctcccccgtccctaaatataagtgattttggctgtctaattaaaatcccttatatttagagacggagggaatagaaattaaggacagtgaaaagaaaacgaaataaagtggagaaaattgcaagtcaatttgtttcaaaaaaaaaaaaaaa

SEQ ID NO: 23518 - DNA, 672 bp, Oryza sativa; identical to SEQ ID NO: 15768
  Clone ID: TF_OsC378772_1

SEQ ID NO: 23519 - DNA, 1385 bp, Oryza sativa
  unsure (1)..(1385): unsure at all n locations
  Clone ID: TF_OsC1269_1
cccggtgccacacctcccccccgccgcgcccgcgctgcgtcggcttctggggtgccgtcgcccccgacgctgccggcctccggcgcgccccgggttcacaccgcgccgctcgccgggccgctcgtccgccgctgagctctatctatctactagttagtttagtcgtctcgagggtaaattgagctttgtgtgcggttttgaggggagtacatcggcatgaggatccagtgcgacgcgtgcgaggccgcggcggccacggtggtgtgctgcgcggacgaggcggcgctgtgcgcgcgctgcgacgtcgagatccacgccgccaacaagctcgccagcaagcaccagcgcctcccgctcgacgccgcgctccccgccgccctcccgcgctgcgacgtctgccaggagaaggcggcgttcatcttctgcgtggaggacagggcgctcttctgccgggactgcgacgagcccatccacgtcccggggacgctctccggcaaccaccagcgctacctcaccaccggcatccgcgtcgggttcagctccgtctgtagcgccaacgccgaccacctcccgccgccagcgcccaaggggaactccaagccgccggcaagcggcatcgctgctgctgctgctcccaagccggccgtgtccgcggcggcgcaggaggtgccgtcgtcaccgttcttgccgccgtcgggctgggccgtcgaggatctcctgcagctctccgactacgagtccagcgacaagaagggctctcctattgggttcaaggatctggagtggctcgatgacatcgacctgttccatgtccagtcgccggccaagggaggcagcacggcggcggaggtgcctgagctcttcgcctcgccgcagccagcgagcaacatggggctctacaaggcgagcggtgcacgccaaagcaagaagccacgggtggagatacccgatgacgacgaggacttcttcatcgttcctgatcttggatgagatgttgttatgtaacagtaatgctatgcaagtgatgtaattttgtatgtatgcaaagaacactgccatctcggttgtactaagtgtgctaagtacatcttactgtgggcgtatgtaattgtaagacaatttgggcccaatacttatcagcatggtgttgggcatgaactatgatgtactatgacatgacgaaagtttgcttgcagcgtgtgttctgttcgtagatcaactgtgaaaaatttgagccaactctgcttccgtcccatgccatcagtgatcaatctgatataagtttttctgaaaaaaaaaaaaaaaaaaaactcttatgtttaatcttccgagattaccagtacagaaagagattaccngtacaaaaaaaaaaaaaaaaanaaaaa

SEQ ID NO: 23520 - DNA, 528 bp, Oryza sativa
  unsure (1)..(528): unsure at all n locations
  Clone ID: TF_8956058
gattcggtcgagtggaggaggagtcgggttcttgccgcggcggaatcgcacgcatgaagctgctgtgcagcgcgtgcgaagcggcggaagccagcgtcctctgctgcgccgacgangccgccctgtgcgcgcgctgcgaccgcgacatccacgccgccaaccgcctcgccgggaagcacctccgcctccctctcctctcccccgcctcctcctcctcccctccgccgccgccctcgcgccgccgccgccgtcgccgcccaagtgcgacatatgccaggagagccacgcgtncttcttctgcctcgaggaccgcgcgctgctgtgccggagctgcgacgtggcggtgcncncggccnacgccttcgtctccgcgcaccgccgtttcctcctcnccggcgtgcnngtcgggcaaggaacangacgagcactcccctgacccgcctgaccgtctcctcctccgccgccgccgccgcctgcatccaagagcgacacccggcgccgctctacggcgaaggcggaagaaggttc

SEQ ID NO: 23521 - DNA, 369 bp, Oryza sativa
  Clone ID: TF_jC-osleLIB3474042h04b1
ctcacgcgtccgggtgttgaggttttgcgacgcgtgcggtggggaggcggtgcggctgttttgccgagccgacccggtgatcctctgcgccgggagcgacgcacggccgcacgggcctgggtcgcagccacgcgcgggtgtggctctgcgaggtctgcgagcacgcgcccgtgggggtcacgtgctgggccgacgccgccgcgtcttgcgtcggcttgcgacgcgacatccactccgccaaccccgtcgcgcgccgccacgagcggctccccggcgcgcccttcttcggcgcgcttgcctacacgcccaagcagggttctggtgcccacggcggcgacgcggtggcggtcgacgatgacgggagcaacg

SEQ ID NO: 23522 - DNA, 1459 bp, Oryza sativa
  Clone ID: TF_OsC1272_1
gcacgagggagagagggagcgatccaatcgcgtcgctaaaaccctagcggctggctgatttgggggattgctcgtcggagagatgaagatccagtgcaacgcgtgcggcgcggcggaggcgcgggtgctgtgctgcgccgacgaggcagcgctctgcacggcgtgcgacgaggaggtgcacgccgccaacaagctcgccgggaagcaccagcgggtgccgctgctctccgacgacggcggcgccgcgcccgccgccgccgccccggccgtgcccaagtgcgacatctgccaggaggcttctggatacttcttctgcctggaggaccgtgcacttctttgcagagattgtgatgtttctatacacacagtaaactcctttgtttcagtacaccaaagattcctactaacaggtgttcaagttggccttgatcctgctgatccagttccacctgttgctgacaagcatgttaagagtgctggtggttcagtggattcagcaactaaacatttgcaaaggaatcctacagacttatctggtgaaaacagtgcatctttgcccagccaaaatgtaatcaatggtaattattctaggcagagttctgttacaatggccaagacaggacaggtcaattggactatgagcaacaacacaattagatcaatagaccctccacccaagtattcatcagaggaaagtccagcacttctgctagctagccacactagcaccatggcagcgtactccagtcaaatcagtaaggatagtgatcggatctacaacttaccattcacaggtggtaatgggtcagatagtctacatgattggcatgttgatgagttctttagtaactcagaatttggctttgctgagcatggttcttctaagggtgacaacgctaagccagggagtgctggtggatctccgcagtgccgtctggctgaaggcctgtttgtcgaaggacttctaggtcaagtgcctgacaatccatggacagtgcctgaggtcccctcgccaccgacagcctctggtctctattggcaaaataatttgctttgcccttcgtacgacagcaccatgttcgtccctgagatttcctccttggagaactctcagaacaacttcactgtatctgctggtttgaagcgccgaaggaggcagttttgatctgccgatagcatcagacaccattcggtttagttggcaggtcacgttgagaggagggcttcttgcctgcctgaccaaagccacaaaacacagggatggatgatcatccagtggtcagtctaaaaatatgttgtaatgtttgtgtttcgactatacgtttgttgctgaagtttaaaggcgagggaattgttgtgagatctgggatgacagatttgttgttaccaattttgtgaatagtgaaaataaaaagagcatggataagatcatgaattcatgaaaaaaaaaaaaaaaaaa

SEQ ID NO: 23523 - DNA, 1809 bp, Oryza sativa
  Clone ID: TF_OsC770_1
tagtggatccccgggctgcaggctcaaagtcgtcgtagaccccgcctccttcctcctcctcctcgcgcttcgatttggtttggtttgattcggtttgcgagatgaaggatggtggtggaggaggagggagggggcagcagcagcagtggccttgcgactactgcggggaggcggcggcggcgctgcactgcagggcggacgccgcgaggctgtgcgtcgcctgcgaccgccacgtgcacgccgccaacgcgctctcgcggaagcacgtccgcgccccgctctgcgccgcctgcgccgccaggccggccgccgcgcgcgtcgcctccgcctcggcgccggcgttcctgtgcgcggactgcgacaccgggtgcggcggcgacgacggcgcggccttgcgggtgcccgtcgaggggttctccgggtgccccgccgccgccgagctcgccgcgtcgtgggggctcgacctccccggcggctgcggcggcgaggaggaggaggccgacgacgcgttcttctcggcgctcgactactccatgctcgccgtcgaccccgtgctgcgcgacctctacgtgccatgcgacccgcccgaggtggtggtggccggcggcgggcggcgactcaagggggaggcgctcggccaccagctcgccgagatggcgcgccgggaggccgagacggcgcacccgcacacgcagccgcactcggatctgagcccccgcacgcctcgccggacctccgccgcggcgagcggccgcctgcaggaaaagcaagctcccccgccgttgcctcatgctgctgcgacggcggcgccgctgccgtacacttcactgctcatgatggcgccggccaactgcaccgagctcatggaaaacaaccgtgttggagacgaagatgaaaatgttctgtgggagagcaccgcgccatcagtgccaccaacccagatatgggattttaatttgggaaaatcaagggatcacaatgagaactctgcacttgaagttggatttggctcaaacaatggaggctttatgattaagagttataatgacatgctcaaggagatttcttctgggacaacgaaggatctggaagatatttatgactcaagatattttgcagctgccgaagatatcatgtcgactaatgtctgtcagctgtcatcgaaaaatccaagcaccaggagcaacaaacggaaggcgagctcatgcgcttcgacgatcgatggaccgacaacttccacaagccatgtacctgctgcttcaggggcattggggggctcttcgaacgacagaggatcggctctccccaaggagatttccttctgtgatcagaccgtcgtccctaccggagccgatcagaggccatgtaccatcaagatcgacagcgagacgctcgcgcagaacagggacagcgcgatgcagcggtatgagaagcacatcaggtacgagtcgaggaagctgagagcggacacgaggaagagggtgaaaggccggtttgtgaagtcgaacggagcacctgatgatgtcagcaatggcgggtgatctcatccctgcaatccctgatagctagctgcaatgtacgtagcctggctttttgacgttgcagagatcgatgtggccatatatatgctgagagctaagtctgaaatatgttgcgtatgttgttacaacctatgcacgctctgcttaagtctgtctgctgctgcatgtattgttcagctaaaattttgcgtccaagagtcgatcttgataattaagtacccctactacaaatctacactacatactgtaatagaccttagtttttttt

SEQ ID NO: 23524 - DNA, 247 bp, Oryza sativa
  Clone ID: TF_uC-osflM202027f08b1
tgtactctctgagctctatctatctactagatagattaggtcgctcgagggtaaatagagctttgagcgcggctttgaggggaggacatcggcatgaggatccagtgcgacacgtgcgaggccgcggcggtcacagtggtgtgcttagcagacgaagcggtgctgcgcgcgcgctgcgacataaagatccacgcggccgacaagcttgctaggaagcaccagctcctaccgttggacgccacactgc

SEQ ID NO: 23525 - DNA, 1024 bp, Oryza sativa
  Clone ID: TF_OsC280_2
atgaaggtgcagtgcgacgtgtgcgcggccgaggcggcgtcggtgttctgctgcgccgacgaggccgcgctgtgcgacgcgtgcgaccaccgggtgcaccgggccaacaagctcgccgggaagcaccgccggttctcgctgctcaacccctcggcgtccggccgctcgccgacatcgacgacggcgccgctctgcgacatctgccaggagaagaggggtttcctgttctgcaaggaggaccgggcgatcctgtgccgcgagtgcgacgtgccggtgcacacggcgagcgagctcaccatgcgccacagccggtacctcctcaccggcgtgcggctctcctcggagcctgccgcgtccccggcgccgccgtcggaggaggagaacagcagcagcttctgctgcagcgccgacgacgccgtgccggccccggcggcgcccgccacgagccacggcgggagcagcggcagcagcagcatctccgagtacctcaccacgctgcccgggtggcacgtcgaggacttcctcgtcgacgacgccactgccgaggccgccgccgccgccgccgccacctcttccggcatctccgcgaacgggccgtgtcagggggtaacacggatcggagggctgcaagaatccgccggctaccctgcgtggatggcgcagcagcagctgtgctgcgacggcctcgtcgccggcgacgcgtcgccggctagccgggagcggtgggtgccgcagatgtacgcggatcagcttgccgccggcagcaagagatccaggacgtccactgcttcttcctactcctactggtgaaactaaagcaattgaggccatggtttgtacgtagtagatgttgtttcgggcttaattaatgactgcattttgcgcttccggacgggagtgtttgtgcgttatttttgaggcgcagaggaaaatctgagccttttgtatcccttcctttttgctcgtcacgactagtactgtatgtttttcttctacgcaataacgagaatttttcctcttttcc

SEQ ID NO: 23526 - DNA, 1197 bp, Oryza sativa
  Clone ID: TF_3618313
ccttcttctgccgctcgttttccattgccgacgcgcacacgcagctgcgcagccacacctttgcggctgtcttatcttgttcttgagttgtgttcttggttggggaggaggaggaggagatgaagatccagtgcgacgcgtgcgagagcgcggcggcggcggtggtgtgctgcgcggacgaggcggcgctgtgcgcggcgtgcgacgtggaggtgcacgcggcgaacaagctggccgggaagcaccagcggctgccgctggaggcgctctcggcgaggctcccgcgctgcgacgtgtgccaggagaaggcggcgttcatcttctgcgtggaggaccgcgcgctcttctgccgcgactgcgacgagcccatccacgtccccggcacgctctccggcaaccaccagcgctacctcgccaccggcatccgcgtcggcttcgcctccgcctcgccctgcgacggcggcagcgacgcccatgactccgaccaccacgccccgcccatgggctcctccgagcatcatcaccatcatcagcagccggccccgaccgtcgccgtcgacacgccctcgccgcagttcctgccgcagggctgggccgtcgacgagctcctccagttctccgactacgagaccggcgacaagctgcagaaggagtcgtcgccgccgctcgggttccaggagctggagtggttcgccgacatcgacctgttccacaaccaggcgcccaagggcggcgccgccgccggccggacgacggcggaggtccccgagctcttcgcttcgcaggcggccaacgacgtggcgtactacaggccgccgaccaggaccgccgccgccgccttcaccgcggccaccggcttccgccagagcaagaaggcccgcgtcgagctccccgacgacgaggaggattacctcatcgtccctgatcttggttgaatcttgaagaggagttcgttccagaggagaagatcctcctcctgtgttcttgggttttgccatgtccttgtgttttctgcttgtatgctagcttttgtgtttaacgttagtcctgctcaactgtgacatatttgagccactctgcttccgtcccatgccatcagtgatcaatctgatataagtttttctgaaaatgagctccaggctctgctcttatgtttaatcttccgagattaccagtacagaaagagattaccagtac

SEQ ID NO: 23527 - DNA, 1654 bp, Oryza sativa
  unsure (1)..(1654): unsure at all n locations
  Clone ID: TF_OsC1268_1
aattttttnactcctctttccccctcccttcttcttgcttctaatcccccaagcaataacgaggcgtcatctgactagttctcttctactctccctcctctagtcctcttcttcttctactttgtacgcgccactcactctccgagcttgacggcggcggcggcggcggaggtcgtcgagtggtggtcggggagatgggtcaagatgaggtggaggtaggtgcggagaagaaggatcaagaactaccggaggtggaggtggtcgaggaggaggaggaggagggatccaagaaggcggcggcgggctgcgactactgcggcgacgcggcggcggtggtgtattgcagggccgacgcggcgaggctctgcctgccatgcgaccgccacgtgcacggcgccaacggggtgtgctcccgccacgcgcgcgcgccgctctgcgccgcgtgcgccgccgcgggggccgtcttccgccggggcgcgggcggcttcctctgctccaactgcgacttctccaggcaccgccacggcggggagcgcgacccggcggcgccgctccacgaccgctccacggtgcacccgtacaccgggtgcccctccgcgctcgacctcgccgcgctcctcgggatctcctactccgacaaggcggcggcggcgaccgcggcggcggggggcgacgacggtgggtggtgggccatctgggaggagccccaggtgctcagcctcgaggatctcatcgtcccgaccacctcctgccatggattcgagcctctcctcacgccatcttcccccaagattcagaactcgccggatgggaaggtgaatgaggaggtcatacgacagctaaccgagctcgccaattcagacggcggcggcgcgcagatttgggctcatcgcgaggcggcgcaggccggcgatcatcagttaccttcatggggaacaacaacacaacacaacactggacatggcaatttcggtactgcaaacagcaatgaggttgcaaccatgccgacgcctggttatgagaatggtggatgggataacagcgattaccctgcgctaaatgatccgtgcaaggtcgagttcacatatgagcaacctccagccagctcagctgaagcatgtatttcatcatttgttcagatgtctgaactttgccccagcatgagcaatggtagcagcatggaggaaacccaccagacaaaccctggaaatggcacgccaatgcaagttctacccaaaatgccagaatttgttccttgccccgacaggaacttggtcatttctcgctataaagagaagaggaagacaagaagattcgacaggcaggtccggtatgagtcccgcaaagctcgtgctgatagcaggctgaggattaagggccgttttgctaaagtcaatcagatttgagccttcatttctgtaatatattttgcatcttggacatgagtaatactaattaggaccaagcagatatagtacaagaaaaaatatcagcattttgtatgtaactatgtacccacccagtggctacgccacgctgaggagaatttagtttcatcgaatctctgtatatagtgttgcatcgaactcagtgatactatttacatgcaaaggatattgtcattaaaaaaaaaaaaaaaaaaaaaaaatccaaa

SEQ ID NO: 23528 - DNA, 1198 bp, Oryza sativa
  Clone ID: TF_OsC62991_1
ctcctttcgatcgagctgtagtacacgtgaagcttttcttgattcgggtgtatccatggcgcgggatgacgacccggccaagaaattagctgtggatggcggcgtcgcggcggcggcgcggtgctgtgacttctgcggcggcttgccggcggtggtgtactgccgcgccgactcggcgaggctgtgcctgccgtgcgaccgccacgtccacgccgccaacacggtgtccacgcgccacgcccgtgcgccgctctgctccgcctgccgcgccgcgcccgccgccgccttccaccgcggcgacggcttcctctgctccagctgcgacttcgacgagaggctccgccgcggcagcatcggcggcggcggtgacgagctgccgctcgacgaccgcgccgccgtggaagggtacacgggttgcccgtcgatcggggagctcgcggcgatcctcggtgtcgtcggcggcgattccgacaagccggccgacgacggctggtggtccgcgagctgggaggaggaggcgccacaggtgctgagcctggatgacatcatcgtgccgaccacctcctgccatggcctccgacctctcctcacaccaccctcccctgagaatcagagttcgccggacaacggggagctggacggcgaggttgtccggcagctaggggagcttgccaggtcagaggcggcggcgcaggccacctttgtagccggcgatcagctggcttcatgggcatcaccggagttcacttctgggcatggtgattttggcattgaggcagcaagcactacagtaccttcttgtgagaatgaaacatggatcatgtcaaccgattgcactgaccctaccgatgcaagcaagacggacatcgcacgcgaggaggctccagcaagctcatctgccgagccatgcctctcttcgctcgtcgagatttcagagatttgccgcagcatgagctacagcggcagtggcatcgacaatggcggccatgatccatcaaccctggcaataatgccaacgcaagctctgcccaagaagggagtctatgacatcgcctaccctgacaggggcacggtgatttcgcgctacaaggagaagaggaagaacagaagattcgacaagcagatccggtacgaatcgcgcaaggctcgtgccgatggcagattgaggatcaagggacgcttcgcgaagtcgaactag

SEQ ID NO: 23529 - DNA, 1577 bp, Oryza sativa
  Clone ID: TF_OsC385_1
caaaattccacaagagccatgcgaggtagaggaacaggagaagacgcatacacacacgacacatagagagagaggacaaacacaatagcttggatcgatagacttgtccatgtggtgcaagctaaagctactactaccacaagcaaggctacttcgttcatgaattataattttggtggcaacgtgttcgaccaggaggttggagttggaggcgaaggaggaggaggaggagaggggagcggctgcccatgggcgcggccgtgcgacgggtgccgcgcggcgccgagcgtggtgtactgccgcgcggacgcggcgtacctgtgcgcgtcgtgcgacgcgcgggtgcacgcggccaaccgcgtggcgtcccgccacgagcgcgtgcgggtgtgcgaggcctgcgagcgcgccccggccgcgctcgcgtgccgcgccgacgccgccgcgctgtgcgtggcgtgcgacgtgcaggtgcactccgcgaacccgctcccggccatcaccatcccggccacctccgtcctcgctgaggcggtggtggccaccgccaccgtcctcggcgacaaggacgaggaggtggactcttggcttctcctctccaaagattccgacaacaacaacaacaataacaacaacaacgacaacgacaataacgacaacaacaacagcaacagcagcaacaacggcatgtattttggtgaagtcgatgagtactttgatcttgtcgggtacaattcgtactacgacaaccgcatcgaaaacaaccaagatcggcagtatgggatgcatgaacagcaagagcagcagcagcagcagcaggagatgcaaaaggagtttgcagagaaggaagggagcgagtgtgtggtaccttcacagatcacaatgctgagtgagcagcagcatagtggttatggagttgtgggagcagaccaggccgcctccatgaccgccggcgtcagtgcttacacagattccatcagcaacagcatatctttctcatcaatggaggcgggtatagtaccagacagcacggtgatagatatgccaaattccagaatcctgacacctgctggagcaatcaatctcttctcaggtccctcgcttcagatgtcccttcacttcagctccatggacagggaggccagggtgctcaggtacagggagaagaagaaggccaggaagtttgagaagacaatacgttatgaaacaagaaaggcgtatgcagaggcacgaccccggatcaagggccgtttcgccaagagatcagatgtgcagatcgaagtggaccagatgttctccactgcagctctatctgacggtagctatggtactgttccatggttctgatgggactcatgagacgctatcttataggcatatatatggggacttactgagtagcaataacatcgatccagtgggagtagttctagacaatctgtgttatgaataatagtgtgttgtttgcgacttaaaattgatcaagtaccttagctttttaaagttttgctttgtaatttccggatagcagatatatattgttggtacttgctcagtaaaaaaaaaaaaaaaaaaaa

SEQ ID NO: 23530 - DNA, 1347 bp, Oryza sativa; identical to SEQ ID NO: 13170
  Clone ID: TF_OsC84660_2

SEQ ID NO: 23531 - DNA, 1180 bp, Oryza sativa
  unsure (1)..(1180): unsure at all n locations
  Clone ID: TF_OsC174263_1
gctcgcggccccgccccgcgctcgcgcccccccgagcgtctcgctcccaccccaggcctcccccctcgccgtccgcgcgcgcgcccgcggtttcccccgctcgccgccggtttcccccgctcgccgccggtttccccgaagcgcgccgcgcccgcgcctgcgcccgccggtcgccatcgccatctcgccctcgcgcggagactggtgtccctgttttgctctgtagtatagagccacgcaaacccccgccaggtgttcgaccgagcgacacaagagtccagcctcttgcaacctgtaatggaggtcggcaacggcaagtgcggcggtggtggcgccgggtgcgagctgtgcgggggcgtggccgcggtgcactgcgccgctgactccgcgtttctttgcttggtatgtgacgacaaggtgcacggcgccaacttcctcgcgtccaggcccccatcaggaccctaaaatcttgtggtttaggaagcctctcttgtggttaacatcaaatcacaagtctaaatccaatggatgggactctaatttttctgtgtagtattagtatacatgatgatagtacatttgatttgttattaattggttattaattaaaggtgatttgatcactagactttatgtggtccaaaaagtaaccaaataaagcaccgcccgccgccggttgggggttgaggtggtggatgaggaggatgacgcccggtccacggcgtcgagctcgtgcgtgtcgacggcggactccgcgtcgtccacggcggcggcggcgncggcggtggagagcgaggacgtcagaaggaggggcgggcgcgggcggcgtgccccgcgcgcggaggcggttctgnaggggtgggcgaagcggatggggttgtcgtcgggcgcggcgcgcaggcgcgccgccgcggccggggcggcgctccgcgcggtgggccgtggcgtcgccgcctcccgcgtcccgatccgcgtcgcgatggccgccgcgctctggtcggaggtcgcctcctcctcctcccgtcgccgccgccgccccggcgccggacaggccgcgctgctccggcggctggaggccagcgcgcacgtgccggcgaggctgctcctgacggtggcgtcgtggatggcgcgcgcgtcgacgccgcccgccgccgaggagggctgggccgagtgctcctga

SEQ ID NO: 23532 - DNA, 1320 bp, Oryza sativa
  Clone ID: TF_OsC1713_5565
tcccatggtaatgtacaagccttggttaggcagaagaggagtagtaggagtacaaggagtacaatagaatactacgtccatggatgaaaaactactgtacatattattcatgtcacacggggccatgcgtcgcacacacgcacgcatgcacgcgcgcacggggcgcgccaaaattacgacggcgcacgtcgccgactcgccgtaccgtgcgtacgtccttcctcagaacgacggcacgacgccgtccgacgcggcgagggcggagaacgccggcgagcatggcgcctcgtcgtcgtcgtcggcgtcggcggtgcgcttggcgaaccggcccttgatgcgcggccgcgtctcggcgtacgccttgcgggacgcgtaccggatggtcttgtcgaaccgccggttcttgcgcttctccctgtaccgcatcagccgcgcctccctctccttccccttgctcgccaccaccaccaccatgggcggcgccgccgagcccgccgacagcgcgtccggtacgatcgcgacctccgacgacgacaagctgtgggccatggagtgttcggggtagaaaaggctgccggcggtgaggtccagctcgggcggcgcgaccggtaccccgatggccttgattccgtccatggaccgggcgaagtccaggtcgacgccgaggtacgcgccggtgtcggcgaagaacgcgtcggcggctgcggcgctatcctcgtggctattgtcgtcgggctcggggagaagccacgacgccgcctcggcctcgttgctccggtcatcatccgcatcctcctcccgcgccgcggcggcatccgcggcggcctgggagaaggggaagggctgcggcgcgtcggcgagcgggccgaagaagggcgcgacggggaggcgctcgtgcctgcgcgcgagcgggttcgccgagtggatgtcggcgtcgcaggcggcgcacagcgccgcggcgtccgcccggcacgtgacggcggcgggcgcgtgctcgcacacctcgcacagccacacccgcgcgtggcgcgacccggcgccgtgcgcccgcgcgtcgcaccgggcgcacaggaacgccccgtccgcgcggcagtagagccgcgccgcctccccgccgcacgagtcgcacgcccgcgtccccaacccccacgacgacgaggagtaccccgccgccaccgctcctcccactcccaccatcgccttgtcctccaccgcctccatatattcttcgcttcgctttgccgctcggcgcgtggtgcgtttcactcgctcgcagctcggtttctcgcggagtttggctgtgttttttgggcctcgtgc

SEQ ID NO: 23533 - DNA, 1397 bp, Oryza sativa
  Clone ID: TF_OsC281_1
tttagcttagcttaagccacttgatctcaagctcaagcttaaaattagcttaagattaagccattaattagccaagctaactaagcaagcaagatcttgttgaggagatgatggcaagcgacggcagcgcgagcccggccagctgcggcggcgcggcgtgcggggtgtgcggcggcgcggcgacggtgtactgcgcggcggacgcggcggcgctctgcgtgccgtgcgacgccgcggtgcacgcggccaacccgctggcgtcgcgccacgaccgcgtgccgctcgcggtcgccatggcggcggcgagctccggggtgtacgaccacctgttcgcgcccgacgacgacgccgcctcgtcatgggctgccgccgcggcggcgggggcggcggtgcaggggcaggggcaggggagccccaacgacagctcgtcgagcttcaccaacgacagcgccggcggcggcggcggcggcggcgccgagaggagcctctttgacctgctctccgacgtcgacatcatgtcctgcggcggcggcggcctcgcgtcgtcgttcgacggcgccgccgcgccgccgctgtggctgcacccaggccagctcgccgcgttgacgccgtggtcaccggccgactccgtcgtcgtcccgacctcggcggccggcgcggtcgccgcggcggcggcggcgagggaggagagggtgaggcgctaccgggagaagcgcaagaaccgcaagttccagaagaccatccgctacgcctcacgcaaggcctacgccgaggcgcggccgaggatcaagggccgcttcgtcaagcgcgccaccaccgccgccgcctcctcgtcatcggacgacgacagcacggccgccgccggagtcagcggcgccggcggcgccggcgccgccgccacgaaggaggccaagttctggctctccttctccgacgacggccgcgccgacggcgtagggttctacatggacagcaccaccgctgccaccgcggcctacggcgtcgtgccaaccttctagaaagttccagaaacccctctcccaatgggcgccaacgcggcaacggcaatggcgtttgcccgtcttaagacaaacattaagaaaagggcaacatgtcataatctcgccgtcatgctaatggtggcgcatggtgttcatgtcgtcgtcttcttcgccgtcgctttctgattccgtggtggaaacccgcatcactatttttaactgctgatgcgggttttcggtgggtggaattccaaattccatcggttaaaattagggggattattattaatgcattgtgacttttgtaagataactcatgtagttaatttctatggttcagtgctgaaataataaaaaaaatccaatgtgatttttctctaaaaaaaaaaaaaaaaa

SEQ ID NO: 23534 - DNA, 1861 bp, Oryza sativa
  Clone ID: TF_OsC106088_1
atggcagtttccgttttcaacacaaggaggcgtacttcccttgtttccgccttcatagatcgaacacgtatgttcatatccacacctctcccccaagtacgagacaaggtctcgagaacaaaaccccccaaaccccacggcggcggcggcgagcggcggcggaagaagcagccgcaagaggcagcagctcgcgccggcggcggcatgggtgggagcagcgcaagcccgtgtgacctggacagggagttcgcgccccaaatcgcccagctcctcgccacccctcctctccaacccgcgcaggaatactacaatgggctcatacagtccaggaaacatgatggtataagagtgaacttcagcagcaagcatgggaaaggtgtttgtgcgaacaaggagtttgcagaaggggaccttattctgaaggatcaaatattggttggtgctcagcacagtcttaacaagattgattgcgctgtgtgcagttattgctttcgcttcattggttctatagagttccagattggacgaagattgtattggcaaagcgttggttcaagcagtgactgcactaataggaggcattgccatgagagtgatttgggatcgagtgccagttcttctggtgcaacaaaggaaaacagtagtactttgccagaagaggtcttaggatcacttattactggtgacatgtcactgcctttcacagaccattttagtttgcctcaagttgttccttgtcgtggatgtgaggaagaacgctactgcagccaatcatgtgctgattccgactgggaaacttatcactctttgctgtgtactggatctaagactgaaccatcccagagatctgctcttcagaaattcatagaacatgcaaatgggtccaatgatatttttcttgttgctgccaaggctatcactttcactctgctgaggtacaagaaactcaaaacgcagcctgaatttcaaaataacacagatgaatcaaacttttctttgcttatggaagcatggaaaccactttcgatgggctacaaaaagaggtggtgggactctgttgctttgcctgaggatgttgattcctgtgatgaagatacatttaggcagcaaattagggatctagcacttacgatcattatcttctgtgtttcgcagtcattgcagcttctcaaggatgctatttttgattctgatggtttggttgttccgtctccagtggaagactatttcatacatattgatgatcttccagatgatgagaagtgcaacatatcccaggaggaagctgaaaaggttacaaggccatttctagatgctttaggtgaagactatgcagctccttgtgaggggacggcattctttcctttgcaaagctgtatgaatcattcatgttgtccaaatgctaaagcatataaaagggatgaggatactgatggtaatgcagtgataattgctctggagcctatcaagaaggacgatgagattaccatatcctacatcgatgaggatgtctcctacgaggagaggcaggcggagcttgcagattatggattcatctgtacgtgccctaggtgccaagaagaaaagcccaactgaacaagatccacagtttggaggttcctgaaatttatttttttggtgtggaatatgcaattgaagttttgacgactccatttattttattttttttgtctaggatatgcaattgagattttgacaactccaaaaatgttaggataggatatgcggaaagaatgatatgatacgtacttatttgagtggatgctggattttgctgtgctaatgttggatgctgcagaaagtttttattccttctgttcaaaaaaaaaaaaaaaaaaaa

SEQ ID NO: 23535 - DNA, 1416 bp, Oryza sativa
  Clone ID: TF_OsC63363_1
gcccggcccgaagcggctcgggacgcggggggaatggcgtcgtgggaggagatggcgtcgtgggaggagcagctgcgggacgagctcgccgcccgagacctcgccgtcgcctccgtccccggcaagggccgcggcctcttcgccgcacgcagcttcttcccaggagaagtcgttatttcgcaagagccttacgcttctacaccaaacaagatttctgtgggctccaactgcgacaattgtttcgcctccagaaacctgaggaagtgctccgtttgtcgagttgcttggtactgtgggagtgcgtgtcagagagaagaatggaagcttcatcaacttgaatgtcgagcaatcgccgcgcttacagaggatagaaagaagatgcttactcccacaattcgtttgatggtgcggcttgtacttagaagaaaactgcaggatgacaagatggccaatcttgtccaactgattcttccttcattcgagcttgatcttaaggaaattacacataccttttccaagtttgcctgcaacgctcataccatatgtgatcctgaactgaggccccttgggactggactataccctgttttatctattattaaccacagttgtgtaccaaatgcagttttgatatttgaaggtcggacagcatatgttcgtgcattgcaacctataagtaaaaatgaggaggattctgaggaagatgcgctccttgagggatacagatgcaatgaccaaaagtgtgatggatttcttctgcctaatgcagtagataacagtgaggtaggttctatgtacaagaccattgaagagctagagcggaagctttaccatcctttgtcaatcactttgcttcacacacgggaaacactcttgaagatatatatggagttacaagattggcagactgcattgatgtattgcagattgacaattccagtttatgaaagaatttacccaccttttcacccaatgattggattacagttctatacttgcggaaagcttgaatggttgcttgagtacacagaggatgctctgatgtctttaaccagggcagcagatatacttcgcataacgcatgggactaaatccgagttcatgaaggaacttttgggcaagctagaagaagtaagggctgaagcttcttttaggctctcggctggagatgaacaataattgagtaaccattttattgtgaagctccaggtcatcgtgatggcaaatagaatgtaacaatgttgcaacaatgttcaaataggatagtactaagtagacaatctctaaatttagaatagctttgttaattcaacattgggatataagctgccctgaagggctcgcatcgggacaagaactgtgaactggtgatatggaaaattcattgttcacctataaagtgtgggttttaacttc

SEQ ID NO: 23536 - DNA, 991 bp, Oryza sativa
  Clone ID: TF_OsC22960_1
ggtccggattcccgggtcgaccacgcgtccgccgccctcccccacgcgacggcggcggcgacgacgaggaggtggccgggatccggcagcgcggcgtctctcggccgcccgtatccggcggcggcgcggcgcctctccgctgctcggatttttatttttgtgtgtgggcaacataaccaccccggacgctaaaatgtgattttcgtgtgcggggaacgccgagactgagaacgccccctttcctttccccctcctctcgttggaggcggccggggaagctggtgggcatatggagtgcgcggcgaaggggctggtggcggagccgtgtgccggcgaggcccgccggcgctgcggcggttgcggcgccgtcgcctactgctcgcgcgcccaccagactgtgcattggggatttcataaagaagaatgcgcaaggctcgcagagcagatgagccgcatcgatatgctgaaacaatttccattcacgttctctgtggaatctcctgctccgaatcatacattccctagtctaagatgtttccttttggaatcattcaaacttcaccaaaaaggactctggaaatcagaatgcatatgtgatccagaggttacttcagtcaaggacttaagcaaaacaactgactggagtatgggaagcgccctctgcccatgcacagagcctgaacataatgtatccacacccctgacaagctggaaagactactataggtggagatcgcttcctttgcaatcacctgttgctgttttacttcactggcaacttactttatatctcattgttgccccaaatgctggtatagctgcatatcctagttggattccaactattgaaataattaggaaagttgggattcctgcaattttcacggacttctgtgaagaagctgcacatctagcttcgtcctgcattacctccataactggtcaacccctcagagtcccaattcagaattgcaagtttgtatcaccatga

SEQ ID NO: 23537 - DNA, 3267 bp, Oryza sativa
  unsure (1)..(3267): unsure at all n locations
  Clone ID: TF_OsC64741_1
ttttttttttttttttttttttttttttacaaactgagccattttttcctttttcattgcagtggggtaataatacatcccccattattatacctgtacaacccaaaccctccacatgtcaataaaatgtttgggccgtcctttccctagccgatctcctcaataaaacactattggcttctccaggatcatgctcagtcccatctaacctcctcctatattgttctgttaacttactactaaattgatgtttactttggttagtatacaaggaagaactttcatcgccctgattccaaccctccctggcaccctgaagcctgtgctcgtcaggcctatactgatccacctcttgacccgatgaactggtacccaagctagactttgatcgggaataagtcatacggccgttttccccatgtccgaacatagagccatcaaagtatgaaacttgatcaccaaatatgaggcgttccatatcctcactggtagagtttctagtgctttcactgctgtcggtgctatgtgaccctgtgtcggaactggtgaaaattgatgaactctcacttggactaggagattctgctggcgaatatggtccatgtccaaactcgtcatatgtatggggcaaatcatctgtcatgtgatctgcgtacatctgaccaccttggtgtatgggacctcctccatgccaccgtcctgaatttacccttgccttgtccttctttacacgtgctggatcttgagccatcagcgctggccttacagagcttggagctcttggtgaacaccttgcatagagcagcatgtatgcgcacttcgacatgacattttccagagatacaggtttgacctgactgtcatctgttttgtaccacttcccatgcgtgtccttcacatagcatacataatgaccagaaaaggcggcattcataatatcatgatggacaaccactgcatacaggctgtaaacaggggaagtgtcatcagcttttgggctcatatagcgctgcaagttcaaggtctctggaaatctgatggctttgttgatctttccaaactttccagactgatatcttttcagcgcaatagtcaggacatttggtgcttccgatattgtcagcttctttttagcgcgctcatgcgatttgcatctgctgcatttatatttattatctccatccaagacttctgtagatgtaaatcgctcaagtgctccttccagtgaactgatgtcgccatctatttcaacagtaagatccaaaatacgctcatgttgctcggaagtagcatcacatcttgtgcatcttatcttagatcgcagatagcccccaaatattaattgcataagtgttgtttcttcgtgtaaccgatgagtgccgcttttcctggcttccttcatgcatacagattgcatagcatcaatggcgtacctaaggaattcatgagcatcttcttgtttaccaggaccaaagctacttccaatgtcaggcaaatgagagagtatcccagttggtgacaaagcaatcttgccttgtctgccctccccaacgagtttttcaaattcacacatgaagcaccattcctttttggaacaattttttgaatgaagccctcccaaaagatatgatgtaagtggtcgggtaaacattaagcactgaagaacagcatttgcatagcaactattgccaaggttatgaagaccaaacggttgcaattcaaccttttcatagagcttaatgaaaagctcatatggaaaatgtgttggctctgatggataatgcctcacaacttttggtgctgtttgctgcctgacaatttttttcagagatgttgccaggctatttgctgttgaaattgatttctctgatggtttagaattcctttcagcaatattatcagccctttttgatgaattaggtgtaacagaacgtccaccgggaacaggagaaactttatcaacagtcaaaacagatggcaccatttttgacacaccaatgttgtctgagccagcagcttttgtcttggagtgtccaacttccacatgaagagcagtcctggaagttttaggttctactgcaacaggtagagcagcttgagcattgttgttatctgcatattttttgctgttactagtttgagagcaatcctggtgcttcttggaatcaattaaggactctttgttgataagacttccagagccactaatctttggtggagaaggttgaaatctacacaccaacgcctcatctaagtcctttgtgtaagaaccattttcaacaggagttgtaggtttcatatttgattctgtctttctactgccaagagaagctacttgtgaagaactttgagggagtttgaccgcactgacagaatggtcatcatcaggaacctccaccgaagcaagtacttctgagggcatatcttttgttttatcatttaaattcttcacggtggctgccgtgttggtttcagctatgttttcttcagaagcacttgtctgctcaattttcctttcctttgcaacagaaagttcagccacatcatcatgattagcatcagtgcttggtgggcggcattcatttttatgaccctgtctccagtgggctatctggcatttgaaggaacagtacttgacagccttgcactgcttgcacctgaacgtcgtcggccggaagcacaccgcgcagacccccttggcacccaccggcggctgcggctgcggctgggcccgggcctccatctccgcctctgcctccgcctgagccggaaccacggccggcggcgccccccacgccgcctcatccaccatctccgtcgcgtgcacgacgctcgggaacagctccgagtagtaggcgcgcgcgcactccacctccgccatctccgactcctcctgcgccagccgcgtgagccgcagcacctcctccctccgcgccgcggcgcgcctcaccttccgtcggaccacaacccacaccaccaccaccaccgcaatcaccacagccaccaccaccgccgacgccgacgacgacgacgacgaacccgccgcctccgccatccaccacctcctcctcccctttgaccccggtaccctgctcctccttctgccctgccctacccatcgnatagatctagccgaccaacctcctgcacccatcggatgcgcccggcgatcccgaacccgaacctcccccggacctagccgtagccaacccgcccaaatttaggctttcaaatttttcccggatattaaaaaaaaattttcccgct

SEQ ID NO: 23538 - DNA, 3062 bp, Oryza sativa
  Clone ID: TF_OsC49686_1
atggcgactccagacgttatattgccaggaccttctttaagacccatgccttatatgagatctgcaccttctgcaagacccgaataccatgagtgtgctacttgccacgggcctgctaagactcgctgctccagatgcaagtctgttagatactgctctggaaagtgtcaaataattcactggaggcaaggtcataagcaaacatgtcagcaatggaatggttttggtactagcagctctggtggactacctcctactgagaatactgaacagatgccattcttaagtaacctgaactcacctcttcgagggagcgatgttcatctgcatgacatggatttcgataccatgtcagagccatcctttgtgacaacagatagctataatcttgataccagcccatttctgtcagaccgaagcaacatgaataaaccaaaccaatttctacatacaagtgaaaatggtgctgccattggatcttatgagaagaacgactatagtattgatggagaagtcccttcttctgagattctgtcaggaaataagggtttaaataacagttctggttcaggtgaaaactgcggaaaccgtgatgtaatttatcctctcaatagtgtggtacatcaacccaataattatgcccctgaaataagaaagcggcccaaagcaagcatcacggtttatgaatctgataaaggcgtgtatttaacttctgatatgatcagttctggtgaggggccatatgcttctgctgcagagtcactacaaagaagtaactcgtctggaaatgttaccggaaaaggaaacatgatacataagaaaccaccatacccatctggatctaccaaaacagctgtttcaacaaacagcagtttgcaaggatgcaatggcatctcaaaagcaggagcatcaaaggttgaagccctgaagaagccttcaaaatttctcaaaaccagtctggtgggtttgatcaatgataacaagaggagtaaggtactgttcccatatgaagatcttgttaagttttttcagtatgaagtacggggcatctcacctagaggtcttttcaattgtggaaatagttgctatgcaaatgctgttctacaatgtctcatgtgcacaaaacccctgatgatctatctgcttctgagactgcattccaaagactgtaataccaaaactcaagcccccaccctccttggtgtagttgtgaaatctctcaccatctctgatttctttgacattgattgctttattcttttaggttgctcaaagaattggtgcctcatgtgtgaacttgagcaatatgcttcaactttgcgtgaaagtggtggccctgtttctccaagtagaatcctttctaatctgaggaatattggatgtcgcttgggtggtggaagtcaagaagatgctcatgaatttttaaggcatcttgtgatgtctatgcaaggggcatgcctggatggacttggtggtgagaagcaggtagaagcaagcttgcaggaaactacactgatacagcagatgtttggtggccgtcttaaatcgaaggttaagtgcctcagatgctaccatgaatctgaaagatacgagaatataatggatcttactttggagattcatggttgggtcgagtccttgcaagatgctttgacacaattcactgctcctgaagatttggatggagaaaatatgtataaatgtggaaggtgttctgcctatgtcaaagctaggaaacaattaagcgtgcatgaggtgccaaatatattaactgtagttcttaaaagattccagacagggaaatatgggaagatcaacaaatgtgttacttttcctgatatgttggacatggttccgtttgtgactggagctggtgataatcctcctctttacttcttgtatgccgtggttgtacacgtggatacagaaaatgcatcattctctggacattacatatcatatgtcaaagatatgcagggcacatggttgagaattgatgattcagaggtccaggctgtttcactgaatcaagttatgtcagaaggtgcatatatgctgttctacatgagatcttttcctcgcccaccgaagatttacattgagaagggcctatcatcagttcctacatgttcaaagcgccattcatcaaaatcctccaagggttctaagcaagacctgaatcatactgagtcactctttgcttccagtgatcaaacctatggaatatacgatttcagaccagacaacggctatatacaagatcagcatgctgctttgagaaccagaaatttctatcataccgatgatgcttttgcagattcaattagcacagacttctcagatgctacatcaagcgaatggtcactgtttaccagctctgatgaatcctcatttacgactgaaagcactagagattcattcagtgttgtggactatggtgacaatgctggccttgatccaatttcctctatatttgggccttattatgctcaagaccatcctcctggcagttttgcctcgtgtacaaggttgtcaccttccaatccacaaacaaggtacttccaagagaacacaggctttgtctcagattcttccatgccggctcacctgcccggcaatgtacatagaggaagatatccagacagggcctgttcttcttcagctgaacctcctgcttcagcaaatccgcgaagcgtatatggtaggtatggccttagtagagaaggttttgttcaaacatctggattttgtcaaatgtaattgtctacatttcatagttttagctggagtttggcagttgtggttaccactgccattaaataccgcctcatgttcttttatttcagatgaggcatatttaattttagctgcatatcctaggttagttgagtgagtgactcaatgtagcaggccagcagggtaattagatttgtctaggtgcctagcatttcaggagatatatgttagaacacagtgacaggctttgtgccatccattgttcaaccaaaagccagtcatatcatttatctagttgcacaaattgtaccaaaaaaaaaaaaaaa

SEQ ID NO: 23539 - DNA, 1586 bp, Oryza sativa
  Clone ID: TF_OsC8143_1
gcggcaaccactctcccctcgccaacaccaacgccaccgccaacgccaacgccgccccgcatcatctatcaaccgccggccgaggtggagcgggagcttggactgagatgaggacgaggagtggatctctctaccgcagcggcggcggcggcggggagacggccatggttgggcagaagaggaagaggtcgtcgttgccgccgcagtacgccaccgccggtgactgctgcggcggaggaggccgccggaagaggctggccggtggtggcccggattacctcgacgagctccccgacgacctcgtcctcgccgtgctctccaagctcggcgcctccgcctcctccccttccgacctcctctccgttcacctcacgtgcaagaggctgaatgggctggggcgccatgacatggtcttcgcaaaggcctcgccggcgtcgctcgccgtcaaggcggcgtcgtggtcggagcccgtgcagcgattcctcaagctctgcgccgacgccggcaacctcgaggcctgctacattctcggcatgattcggttctactgtcttggcaaccggagcggcggcgcggcgctgctggcgagggcggcggtcggcgggcacgcggcggcgctctactcgctggcggttatccagttcaacgggagcggcggcgccaatcggaccgcgcgccggggcggcgctgtgcgcgcgcgccgccgcgctggggcacgtcgacgcgctccgcgagctcgggcactgcctccaggacggctacggcgtgcgccgcgaccccgccgagggccgccgcttcctcgtcgccgccaacgcgcgggagctcacgctcgcgctcgccgccgcggcgtcgcaccgccccttcgccgccctccccctcgccggcggcgccgccgccggcgccatcggctgcccgctcctctccgacttcgggtggagcctcccggaggcggagccccacccggccaacctcttcatggccgactggtgggcgtcccgcggcgtgcaggcgacggccaagaaacccggcctcgaggctcccgctgccgccaccggcgacagcgacggcggcggcgagctccgcctctgctcccacgtgcggtgcggccggagggagacccgccgccacgagttccggcggtgctccgtctgcggcgcggccaactactgctcccgcgcgtgccaggcgctggactggaagcgcgcgcacaaggcgcagtgcgtgcccatggaccggtggctcctcgccgccggcgaggcccagtgattagcccccgccgccaaatactcccttagaccaatcggtccaccggtttaacgctggaccgggtgtagccaaggcaagtggcagagaaaaaaaattgaggaagcctttttttctttttttttctttatgaccgaatccatcgatgtcttcttgtcaaaggtacgtattcccctagggaaaaaaagggtaaaaatggtacggatgctttttactcgcataattccttttttttttctcattccgagtaaactaaactttaaattaaattaaattataattataattataattccaacccctttaaaagacccagggggttt

SEQ ID NO: 23540 - DNA, 1535 bp, Oryza sativa
  Clone ID: TF_OsC11539_1
ggctgcaggaattcggcacgagccctctctctagtctctcctactattcgctagaagccaagaacgcgacgcggcgtcgatgaggacgaggcgaggcgcgtgctactcgccggcgtcgtgccaggacgggcggcggaagaggcggaggatcgccggcggcggcggggagggatcggctgcggcggccgcggcggtggccggcggcgccgaggggcctgccaatgatatgttcgaggagttgccggatgatcttgtggtgtcgatcctcgccgacgtcgcggcgtccgcccggtcgcccggtgacctcgccggcgccatgctcacgtgcaagcggttcagggagctcgggcagagcaaggtggtgctcgcgagggcgtcgccgcggtgcctcgccgtgcgggccaaggcgtggtcggacgctgcgcaccgcttcctgcagcgctgcgccgacgccggcaacctcgacgcgtgctaccttcttggcatgatccggttttattgtctcgggagccgcgggtcgggagcggcgctgatggcggcggcggcggtgggcgggcaccgggaggcgctgtactcgctggcggtgatccagttcaacggcagcggcggaagcaaggacgaccgcgacctccgcgccggggcggcgctgtgcgcgcgcgcggcgtcgctggggcacgtcgacgcgctccgggagctcgggcactgcctgcaggacagctacggcgtgcgccgctccgtgctcgacgggcgccgcctcctcatccaggccaacgcccgcgagctcgccgccgcggtcgccgcctcggcctcgctcctccgcgcggccaccggcaagccggcggcggccgcctcccgccgccactcgtgcctcctcaacgacttcggctcacacgccgcggcgcccaaggcccgccggcgaggcgcacgccgccaaccgcttcctcgtcgactggttcgcatcgcgcccgctcaccggctccaccacctccgccgccccggcgccaacgccagggagcgccgcggaggacgaggcggccgggctgcgcctgtgctcgcacgcgctgtgcgggcggccggagacgcggcgccacgagttccggcgctgctcggtgtgcggcgtggtgaactactgctcccgggcgtgccaggcgctgcactggaagacggcgcacaaggcggagtgcacgcccatggaccggtggctcgacaacgccgccgccggcgccgccaaccccaatgccgccgccatggccgcgcccgccccatgaccgcctcgccgcgacacgcgcacgcaggcgcagcagtaaatgcaccggacgaacggttggcgaactaggcgtgaactcgcaagttggaaacgaacggatagttattagtgactgtttaattagtacttttactttagacggttaaaaaaaaaagaggaaaattactgtgcgttcttttttttcacccgggtggtcttctactcttctgtacatgggaccttgaaacgagcgaacgaacactgaggtaaaaaaggtaaagcaagtctg

SEQ ID NO: 23541 - DNA, 1492 bp, Oryza sativa
  unsure (1)..(1492): unsure at all n locations
  Clone ID: TF_OsC114099_1
tgcgagtcgccgaacacgcacgcatttttgcccccacgccgccgccgaggatggagtccaacgccgagaagcttcgtggtctcaccatcacctcgctggatgaggaagacgacgagcccgaactgccccaccgatccccacccgccagcggcggcggcggaggcggcggcgcgggctacgaggacgacgatgaggaggaggaggaagaggcggaggtgacgcttggttttctggagaagccgaagcacccgggcctcctcctccgccacctgttccctagcaaggccggaggcatcccggcgtggttggatcctgtgaacttgccatcggggaactcgcgttgctgcggcttctgcggcgagcccctgcagttcgtcctccagatatatgcaccgattgaggacaatgcggcatcatttcaccgcactttgttcatgttcatgtgcccgtcaatggcatgcttactccgagaccagcacgaccagtggaaacatagacaaggcaatccgtgtagaagcgtgaaggttttccggtgccagcttccccgtagtaatgccttctactcaagtgaaccaccaaagcacaatgattctgacaagccactatgtccaggagctcctgtctgccattggtgcggtacatggaaaggtgataaactctgtagtagctgcaagaaagcacgctactgctctgagaagcatcagacactgcactggcgctctggccataagagtgattgcctacagttaatcagttcttctgaagcttcaagctctatttttcctgctgtaggaaaagttcctgctagcaaatcttggccagaatatgagattgcaatcgactatgagggtgctttcaattctgacagttgtgatgagagtaactcaaagtccttggtgatgcaaagacctggtaaaccagatgatatgatgcagtcatggatggatcaatttgaggctgatgctgacaacaaatgctgggcgtcttttcaagagcgggtctcaagagcaccaaagcaagtattgagatactgtcgagaagagaatgccaaacctctatgggcgttatcggctggttgtccatcaaatgccgatatcccatcatgtagctactgtagaggtccactatgctatgaatttcagataatgccacagctgctttattactttggtgtgaaaaatgagccagactctcttgattgggcaacaattgttgtgtacacatgtaaaggatcatgcgatcaaaatgtcagctacaaggaggaatttgcatgggttcagttataccctacaacaaccacaaggtcatgataatgtttatggtttatttgcccccncagaantaagctttgtnatggcctacaggganctggctgaaatcatctncactcntttttgacttgaantccggagctcnctgatccanacnaaatanatttgttttcccccnctgggggatttttttantgggggtgttggtttccaanaatccc

SEQ ID NO: 23542 - DNA, 571 bp, Oryza sativa
  Clone ID: TF_rsiceb_7074.y1.abd
gcacgaggggcggacaaggacgcgcgcgcgggctgtcgctgctgtgctgcgctgcgccgcgtggctcggccacaccccggcgctccgcgagctcggccactgcctccaggacggctacggcgcccgccgcgacgcccccgccggccgccgcctcctcctccacgccgccgcccgcgagcacctctcctggaagaagcacaaccacggacaccacgacggcagcgccgccgaggacgcggtgagccggttcatggtcgcgtggtgggactcgcaccgcgccaaggcggcggcgcgggggtgcctccctggcgaacacggcgacggcgagcacgacggcggcgaggacctgcggctgtgctcgcacgcgcggtgcgggcggcgggagacgcggcggcacgagttccggcgatgctcggtgtgcggcgccgccagctactgctcgcgcgcgtgccaggcgctcgactggaagcgcgcccaccgcgcccagtgcgccgccgcgcgctggctcgccgcggccgccgccgccgacggcgtcgcgcactgagcgcgacacgtcgcgcatccatgtaca

SEQ ID NO: 23543 - DNA, 486 bp, Oryza sativa
  Clone ID: TF_uC-osflM202007a02b1
gtggttttaaggatatcagatgcaaccaaccttgtggaaagaaccggcaatgtggaatgcacgcttgcaacaggtcttgccatccttccccttgtgatccaccacctgcaaatggagatgctagctcaagtactggtggtagagcttcatgtggacaggtatgtggtgccccaaggagggaatgtaagcacacttgcacagctccatgccacccatcatcaccttgcccagatttgagatgtgaattccctatgaccattgcctgctcttgtggccgtatcactgcaactgtgccatgcagtgctgggggaaccgccaatggcgataatatgtttgaagtatccatcatacagaagctgccaatgccactccagccggtggaatctgatgggaggagggtaccacttgggcagaggaagctcttttgtgatgaggactgtgcccagatggagaggaagagggtccttgctgaagcatttgacatca

SEQ ID NO: 23544 - DNA, 2577 bp, Oryza sativa
  Clone ID: TF_OsC24256_3
tcattcacaagcttcttcccaatcatccacttcgacttcaggctgcatcttactaaccggtggcgcagtacttggccctgcgctggatacagcatcggtgcgaggagcaggcttactctcctcgactggcctggagcttgtggccgcatcggactccagggcgttccagcggttcgatgtccccatgacttgggcgacagtgtcaccgccacgcctccatactgatcctggagcttgaccaagcacacctgtccagtctcctgaggatggatcaggctcagaggcagtggccttcttccatggattggcactgctcttggtagccgccactccatctttctgccctgcaacccagacattgcctggctgagcgctgctgcttggcaaaaacacagcagcaccctggtaagcagaaccataatccagccgcctcagagctgtcgctgctctagctggatcattgaagacagccacagcattcttgtcattcagccaaaccaattcacactccccgccaaaccttaaaaccagagcgctaacatcagcatcccggggcaggtccagcattgcaacaacaagccttgggtccatgtccaccaagggatcaaagaaaggatgggaagcagcaacaaatacacctggcttggaacccaggatgcgagcaggcgcctttgacttcggtgtgggatggatagtaatgaaacgtttgggttcccaaccagcagcctgaacagaaagcttccacctgtcggcaatgaccctgatagcatctctcttatcctttgtcatgtgacagaagacatggaccttgaggttgcctgaagaattgcctcttgtcttcccaagtacaaggaacttgcacctctcctctatggccatcacccattttggctcacggcggaaaaggtcagaaagcaaatccgatgcatttgagttctcaccaaaatgcaatgcatccaaattgggtggagtgatgtcaaatgcttcagcaaggaccctcttcctctccatcttggcacagtcctcatcacaagagagcttcctctgcccaagtggtaccctcctcccatcagattccaccggctggagtggcattggcagcttctgtatgatggatacttcaaacatattatcgccattggcggttcccccagcactgtccacatgaagctctaccaccagtacttgagctagcatctccatttgcaggtggtggatcacaaggggaaggatggcaagacctgttgcaagcgtgcattccacattgccggttctttccacaaggttggttgcataaggcttgttgcaacggaattcttcctccaagaccttgtagcactccaccatctggcctgatgaaccacagcggcacctctgttccacacgaaccacacaaggtgggcagtctccctcatggcatgtgaccttgcacctatgcacaccacaaggcagcttcttgtcgcacaccttgtcacaggttgggatcgggtccaagcagcttgctctcttctccagcagccttgtcttcccacaatggcatgctgtgaccttccctggcataagttcgcactccccgcatggccctgggtggcaaatgtcttggcaggcatgatttccgcacgacagcatatggctgcaggcctcactgcatgagaacactccatccttctcagataaattccctttcagttccatctctccacacagcaatgtctctgtcttcttcccacagaaacaccgggcagaaatgagaacattacagtccccgcatggtccagtgtggcagaccttctcgcagcggtgcctccggcaggggagcagccgatcacaccgctgcccgcacgtcacaggcgttgtccggtccgcacaccgccgcacaatggtctgcttgccgcatgggcacagccggtccggcgcgaacgctttgcaaggcgggcagggccctgggtggcactgcaggacgcacacatgggggcacctggtggctgcagcgtcgtcggccttcacggcagggtcagccttctcgaggggcttggagcagggctcgccgcaggagtgcggcgtgaggaagagatcgttgggtggctcgcggcggcgcccgcagaagcaggtgtaggcgagctcgcgcgcggggacggcgtgcacggactggcacccggggcagcgccaggaggagtccgggtcggacgcgtcggcggcggacgccggggagcgcgcccacttgcggatgcaggggaggtggaagatggagaagcagctgccgcaggaccacaccggcgccgaccgccgcaccatgtcgtagcagatcatgcactccaccgcccccctcgccagcttgtcctggatctcctgcaccagctgcggcaccgccccatctccccccgccgccgccttcgtcgccgccacacgcgcaggcgcaggcgcggcggcacgggtcggagcgggcgccgcatgctgctgccgctgctgctgctgcggcggcggcgggggcggcgcagcggaaggcctctcctgcggcgggccgcggcgctggccgccacccccatgattcctccggcgcgggcgacgttgctgctg

SEQ ID NO: 23545 - DNA, 15590 bp, Oryza sativa
  Clone ID: TF_OsC4072_1
ttttttttttttttttttttttgacttttttttggctcttgtcgtcaataacttcatttacggtcgttgtttcaccttcatgttcttcaattgcaggtggagcaaggaatgtgaatggaggctggtaaatgccaggacaaaagctagcatacaaaccttgcccagtttcattttacaaggaagaattataatgtttacagctgccacacaaaagctgactatccttacaaacatacaggcgcgtggcaaagtttcaacacaaattgtagatcctcggaaaacttcgttcagctctttgcaccgtgtatgatcgcccggacaaagtcttcacatgtagtgtggccaccggagaacacatctggcaacgcacccatgacatcgaaggcctcctgcaagtcctcagatgaggtcatgtcttcgagccatgagagcacgtctttggagaatcctagcatctccttcatgttccccagcttttctttcatcataatctcccaagcttcgaggttaccaccacttgatccgtccttctcaccgaccttttgcgtgccagacgatttgcctttcttgaaaaattgctgcagctgctcaatcaaaccagtgtacaccagcatcggctggacaatggcaaagagcctcttgctgtcgtttgaatcggcggatgaaccttcatctgatcggactgcagaggaagacgtgtcggcagaaagcttgagggtggatcgtccatgcttgtgttgcatgtaagcatggtagatgcccctctgcaggaaagcggggcggtgctgcagccaactctcataggactcagacagcagagaattgaccatcatgaactgtacagtctcctccgaggaacctgaaccaccacgagctccagatagagctgaaagtcgaacaggagattctggagttgaaggcgaagaggacaagtacgaggtaacagccttggccatgacatgacgctgctggttggcacttccatctacaagatgagaagccatttggatcatgaaaggaagaaaccgcgagttgctctccctacccccacctttgcagtcagtgctgaaagaagcgcctgttgcaaacctggccaacatcagaacaatgtcatatgttaacaagcgaaggcgacttccatctgctcgtcctagagaattcaattggtcccaatactggtcgagacatcgtgtgtactgcccaggaggaacagatggccccctcaagggaaagatacaattacacagtgtctcattatttctcagggtagcaccatcccattcctttttaggattcttcagtgcagcatcagctcttttagcctcctgatgacattggtagtgtatgatgttgaagtggctaacagtagtgtaaacacagtccccacggccactgcctgaactagtggcacccaagttcacccgtttactaaatgcatagactcctaacatgtcagtcggcctcaaagtatacccttctctacaaaccatgcatgctaacccatcctcttcttcttccacatcatccaagccttcaattataggctgagacacaacaatacgtctacctccatcagaagcaaattcttgtcgcattcctagcccctggagtagcatttctcttttcttgagagcacggcgtcgcatttcatcccttgtagcatgtcggagctcttgaatcttctctgccaagaagccatcaccattattttctttgttggcaagggtatccaaaagattttctgctcttgcaccaatttcattttcaccaggcactccttctaaagcatgcagcaatggcagaatatcttcttcatcgacacacttttgtgtaggcagatcacccttggcgagccccttcaacattgagaggatgagtggaatggaaggcagttttaacccaactgtccattctgcactagtcctaaagctagcctgccctgcagaagcaaagctttccctcagatgacctacagctgcttttgtaatgcccttctctagaataatctccttcagcctttcaccgcaagaacttgtcttgagtgactctgagactcgaacaaagttttcaacagcagacctctgcattgatgcgtttttgcttaaagtttcatcttttggattttcctcgtgttgtttctgcaactggtcaaactcactccagttcataaggtagggctcaaaatgcaaaacaagggcctccatggctgctggctccccatacgtcaagttaggtaagatccttgccaccatctcctcgtttctttgttgcttgtttgattttttggcaccatcaggagggcacagcctctcaagaaacatgagaacaattttctttgcctcctcaccagcaccagtctcctcagtagtagttgtaaaaacactttgggcaatacttatgtcactctcattagcttccattgtaagactttctacaattaatagaataccctcagctggctccatcgcatctactgagaatgcacgtctggctgtctcaagtagcaaacccaatgcacccaggcgtaataaagcacatctattttcacgaattttgcaacaatacttcagaaggttaaggactgaacccaattcttcctggtttgatcttaactcatcttcgcgtaggctctgaatcatgcttaatataatttcaaggcctccacattcccttacagcacctgctatagcaaactcaacttcaggatcttgtgattcctccctttcatcttctaactctttaatcataggttcagtagcttcaccatctaatccctgcaatctgtaagtgactgtcattggcggacaatctctgacagatgaagcagcagcagacagttggctagcattggacaaagaatgttgagtttgaccatggtgctttctccatacttgctcatagacttgggagatgctaaggtcaagtgaaattatattcccagcgaccagtaactccataccatagtcatcttctaaaagaccaatcaaatcaagttgatggcatattttatttttcacatctctcatcagtgggccaatctcagcactggagtatggattccttgtcatagagcccctaatgaactcttcttgagtatgtgctttgtttagaattaagagataaacaggttctggctttactgggcaaattaaattgcagagttgctccaaaatgaacagagatgtccgtctcttcttttccttcacatgcttttgcaatccagagatgcaagcacgaataaattgacgtttgtttgcagtactctctacaagcaagctatcaagaaggtccttcaaaagcctattgcagtcattaattaactttgtcttttgcacaactagcccacggataaccagaaaagcctccagcacatcagataataaattatcactcataaatcttgctctaatattgggaatttcaagaaatttgttgagaagctcaacaagcttgtgaagaatgaatccttgtgaaatgtcaatgctaaggcttctctcctgtgattcaacattggacacttcttttgttatcaaagaacataatgtggtcaaacaaccacgaacagttaagaaaagacgtgaagcttctgtatcaatcattgtcccaagtaactcaaagtactctgcggcactttcaccagctgacagtgttctagggagtaacgacataagcaagttcaatagttgaaactgtctggatgagtttgatgggcataacaagcttatgagagtgcatatttcagatcttattgactgagaacaagaacttaagatcaagtctgagacccaggagcccaaggcaaattttgagaagtcacctttagatgactttcgacatgcacgacgcttccacctcagtccatattttagaaccaggtagtcagatttttgtgaatcatgccgtgttttttgcagtcctttcacagcttgtgatactttatactgcctcctcacaaaatcaagatatgatgcaccgctctcccattctgaatagctgagaagtgaaatatcctgtcgtcttcgacttccatctggaatctttcctgataactcagactgagtcttggaagtggaaagattagttactgaatggccaactgtatcatcattctttgcctgcatcaagctagattttcccataccaggctctttttccccagaatcagattttggaggagtacaagcctgagaaatgattctcaaacaagggagaataatatgctctgaaattgcaggatgctttgctccaactttaatagaagaaaacaacaactgaaaagcaacacgaagccttgcctcccaaaactcatccacaagggcacatgtctctgaaagtagaagtaactcttctcgtgtagattgtgaaatatccatggagcgatggtgctcaagacaatacatcaccttcttctgaatcaggttattcagttcctgcactgcatctgcatcaccttcagagaaggaagaaagcacagctcttgcaagagtgcgtgcagttctagggccctgatgaatgttgttttcaaataattctgacagaatgccagcactaacaagttgcttcctgctggttgcatgcttggacagaacttgtaataactccaagcattgagttacaaacgtggtactacagccatagcaactacttggagaccttggtattgaacaagccggtaatgcatctgtatcattagaattcttctggtgcagatatgtcattagaacacggcgcagtccttgtaatgtctgaacactcttgctcactgaatcaaaagctgctttgcacttttcaccatacaaaacaccaagaagtgcaattttgcgatttactttgcctgtaggcccagggagagacaccatcatctgctggacagcatctttctgttgtgaatcaatctcctgctcacctatgcttgatacaagtttaatgagaggcttcttaaatcccatcagctgctgatatcgcctgtgagcattttctgattctgactcaattgctgtcaatcctttcctcatatcatcatcgttttccatgttatcgaatgagaaacttggttttgccatgaaatggaattcaaaacgaccatatttactgtatccacactcattgcagaggaaagaatcaaggttttcatagttaatatttctgcattgtctacattggtatgcattttcatgacaattgctacagatgccatgcttatcagttacagacctgctacaccgaggacactgcaatgactcaagggaagatgcttgaagattttcataaaatgaatcaagctcaatcatgaaattgcatgctgtgattggaatggggaactcaaccttcaattctgtctgattaaatgtaagatggcagcttttagcacgcttccagagagaccaattattcttcagttctgacaaatctgttaccggcctgttgttgtaatataggttaagtactttcactgactttgacttgcgagcatcataaacattcattgtcaccgactgtatagtaaagcttccagtacatttcactattatcctattgtcagtgaatttggtctcagacttcaaactttcaagcttcattctcgaatatggaacatctgggcagctgcaggtaacacaaggctcactttccaagtaatagccatcaaactccactaagcaactcagtgtattgtatatacgggaattcggatgatttgccaatagctcattttgagaatgaagtgtgtcgaaaatgcagcttactacatcagatgttaaacatttattcagaagttcagtgtcactttgctttgcagtagaatcattagcttttcctagtaaacatgtcatgagatcagtgtactcaatgatgttctgtccatacatgggtagatacttgaccttctgcagtagagttgttaacatgttctccttaaatgagctctttgcatggtaccacagtccaaatagaacacttttggcctcatggcgcacactcgttgagttccattccaacaagaatgtatcaacaaaacgtttcaagacatcaccatccttaccagtaaacactaccacagcctgctccatgtccatgcaggatttttctgaggagccttcagagctatcgtcacctttccgcttcttttttgaatctgatgactgtgaaccagtccttgtggaacttccaatatctccactctctgttttctgtgcattatggttagcatcttttcctgaatagaatgctagatttaaaagcttgagagtctgaacgatacattcttcactgaaatagtagaagttatccattaaaaaaggaagaagatctgtgtgcttcaagcaaaatttttgccaatttcttggccttgatgcagccacatcacaaagagtagacaaacattttataagcttaacacttctctcatagggcacaggatttcgaaaacctccagacttattaatgattttatgaagtttcttgacttcatgtgaatattgccatgaatccctgacactgtaataatgagtcttgctgccacacagatgaagaaatagcctccttgcatacctccgaacaaacgttgtatgagcattgctgatataactacaaagaacatcttggtatccatctaactttagatccttggtgttgggaaccttgcaacttttatccttatcagctgatttttccttttctggtcgaaccatgctatatacaagcctgaatgtattctccaacaacaatttgtagtagtccatgaaaagatcagtgggatgggacttggcatatgaatctgagaaaaagggagagaagtttcccgctggtaactctctccgtactgtcaatagggatccacagcctgaactagaagagccaccttcaccatttatggatgatgacttgaaaacatgaacaagttgttgcagtatatccatcaaatagttcagaaaggattgctgcctgagggcagaacaagcacgaattaactgggaagcaaactcatttttatcatggtcatcattggaggattgaagagtcgtggttgatacttggacatgaacaggacctttttctgtcaaatcagagctcccacctgacttcgaatgagagccatcagtcccaggctgatgccagttacggaacataagtgtgaaaaacatgaaaacaaggatagatacttctccgaaagaacaacgtgttttcgcaggaaatggtttacttatattgatttcatctataagccacttcacaaacttttctaaatccaaattttcaggttttgtgctatccatgaaaggtccgccaactgcagatgaaagtctgtaaaacagctgcattataggtatagctcgagtgccagcagtggtctccatccagccactaagctcttcaattaaacgactaagtagcaaagagttaatggcccgttttgatgcagaaattgatactgtcctttgttcggtcatggaaccatggaaatctacagactcacttgcatccagtacatgaattgacgatggtgaggtctggatagttctatcagcaggagcttgaaggacactggaatctgttagttcatcaacagagaaatgaatttcatttccttctcccccaaatgtatcaagctcaattggtattgctgacatgggatgatctcttgaatgtggtgcaggtagacgatctgcatcaagtatctcatagcatgtttcacacaagtcaaagtctggacatatgttgcagtgccaccttcgcctaagtattggaacagtggaacaaccatcacaacaatattgcactgaggatgtggcaggatcttcttcaatcatgacctgagcatttccagtggttgaatttgaagcagcacttgcttttgcatgattgtcaggagcatcatcattagcaatcattgtctgctttgggaaagggacttggagaaatcgtgatgaaatagccaaactgcttgaagtctggactgcttcatatggcgcaaatagtaacttcttcaataaagcaactgcaggtgctactgagactccagatttttcatttgaatgtaaggccaagcattcagcatagcctagctttcttgtgacattaaggatagcaacagcgtgggtctcaagaaaagaagccaagtttgatttcctgtgcacagcaacttttgacactgtgtggatctgggctatgaattcttttgtaacccaactggatgcagcacctccaactcctattcttgaagtaattgatggaagtgattttattacccctagaaggcgcatagtatccttaacatgatagtatatttccttcttcgggaacacagcctgaaggacacggcatgcagcagaatgtaacagaggctccctgtcactctgaaagattgtttccagcaaagatctgcattttagattgttaagttccatgtctgcatcgattgtgtccgtacagaaacctggttggcaaagcaggtatatccgtgagaggatcctgagagcatctgccagaacctgctcctggataggagcagcttgcatcgtttgagccttttttccagactttccactagcagaactaccacctaggacatgcgcttccatatcaagtgcagcatccattttttctttccatccaaattcatctttggcacgaccatacacttcaatagaatctatccgaggaatagatgaaccatcgaatgtccgaccaacaacaattgtgaattcttcgtcagccagaagtgattcagcagtagtgaacggaatatcataccaagatctcatgccttcatccagcttaatgactctatgaaaaattgtgatttctgaagggatattgctcgcagatgtgttacccacatggattcggcaaccaaccatgacaatatcagggtttgggtttgaaatagtcaccttgaaaccagcggatgtcaaactttctaaataaccatcatctgagcttaatctttgcttgatgctttcagaatcactacttttggttgtgtcactattgaatttcacatcacatgtgatacatgtcgtcttctcaaaaaaatcaagtggaaattctggtttggtgccagcataagctctactactaaggatactgctgcccaacttctttgtctgttctgcagtaagggttgttgaactatcacttccattaggtgtatgtgaataaatgttaaggcttccatcatcatacaaaagaagacaatgagctttatctttggataaaggcttatatgcagcaataccaacaactggagcatttgaaccacttgcatgtctcatgttatgtgcaaacaactcgtgaggacccaaagatacagcaagaggagagtttgatttaaattttgataggcaagcaagggccccactgccagctattagctctctccaacggtacaggcctgctggtttcgatttaccgtcttgatcattctcacatatgtaggacaattcagtaattgacgaggaatcgccatccaagcgccccatgtaagttgtgccatcttgatgagacacaaatagaagcctgtaagttgatgagaagtacaatgagagacctttgtgcatagatactgcatctttcaccaagactgtatcagtcaatgttttcgcaccaacatcacccgccaaggcaacattcaacctatacaaaaggcctccttcagaaagaacaagaagcaccaactttcccattgaggagggaacaagcgtggcatcaacaattatatcatcagccacagtaaaataatgcaacgggctaatgttgtcctgcgagagatcatatatcttcacaaacttgtttgttactaccatgagttgtacctgagaacctggaacccactccacgcaacgaatatatgctccttgcagagcaagttcaattgcaagccgatcagttacctcaccacggctatttaatgttagtacttgacaatcctcatacccggcaacagataggtaatgttccaccaatggattgaaaatcaaatgaacaatttcaaagcgaactatgttcctggagagaggcttcacatttgttttgtctgctgtaataggagctgcagtaggctgtccaataatttgtcccacatcaaatatagctactttatccccttctccaacagcaagcttacctcgaatgctgatacttagcaaggatttagtaagagacccatttgcaagatgcgacttaagttcccttgaatttggatagtctgcttttatcttcaggtccagcgatccacttttgaaagctttcttcagttgaaaaatatcagaagcttgtgacatgggcatttcacctcctaaaaatactttcctgtccttcaaaagattcagctctctttggctaagtatcattggaagcaacttcttgcagagttcaagcattcgaacttcaacatcaagatttttaagaaatacaggaagctcatcactgaagcctttcggcacagatagcttgatacaattctcagcttcagttgagatgtcatcttcaaaatcagaaccactgtctgcaacaggctccacatcctcatgataaggcaatattggctggaaactgctcgtgacaggaggagatacactagaggtaccagtaaatttccgaggtttcaagcactgacagctgcttcccctcacaccaccagctccacaatcacagaagaaacggcttgaccgagaataaacaacacgatgcccttgatggcacaccttggcacagacagaacagcaacccttggaaacagtcaaatcacatgtatagcagaagtaccaatgctgttccatgaaattgctaccactggatgtaaatgtgcacactttggttgcaagagctctttcactgtttccatcctcttcctcatctctatcaatactgaccaattccccatcagatgttccatcatcttcatcttcctcgccggagctagcatcacaatcaacagtggaattactttcttgattggtgcgaagaacaagactgtctgaattcttcagttgctttgggataagagatcctgaaccaaaactgttcccagaacttttagaagaaagcctcttaagtgcacttctgtttgatccagcatcaccaaacactgactccacgcaagtaaacagaaacttcaaagtatgaagcaaaccctcattaccaaccatgttctccatcagtttcagcgttttttcaaagagctctttgaaatgtgattcatcagttgagagttgagcaataaaatggaaatgtgctttaacaatctgaaggtcacatgacatgaatgctttatcaagtaataaaagcattgagtcaaagaggtgatgctgaagctctttggcaagtgtctcagatgaagggcaggtaaggcgcataagaaaatccattgtcaattctcttagggctgtaggacctgatgtagtactattggtgctttcaatcttcatagaatgacccaatgttcgaaattctagccaagaagaaaagcaggacacgtccattccaataaatttgtgttgcaatttctgcttaagatcgggacaaagaccatcacctagaatatcagtaaacaagttaagaatcttcaaattaacctgctcagactggcatttgtccagtacatcaataaaaacggacatatcagcctgctcaagagcaaaaagactgtttgctctttcaggtgctccttctgcttcaccaagaaagaatttgaacacatttgttttagatcggaggtcttccactagatcaacaatggtaaaaactataatttctttcacctcattatccatgatttctttcgagttgatgtctgccaggtacccttctaactgcttaagaacaaacaagtcgctatatccagccagatcatccttctggtcaattagagacataaatatagaatcacacagcttgtgaatggatgtgaacattccatctgactttatagtcattatcatactaagtagtttagaaataacacccacatcaactagatctctgtcattgggctgcatgatctttatacatccattgagcatgtaaatgatctcatttatcaccagaacacaagaaaggatagcactgttattggaggcagagttcactggaaatccatgtaacaaacacttcaagagaaagtattctttccgcccatcacccaatttcgtagcaactcgatctatccttgatgaaaggtcacatataggctccagcattccaatgtttgaaccaactttctcaaagagaagaggatgcttggatttgtcaaatgcagaatgtttaagcagccaggaaggataacaatgatcctcacaaaccctccctttctcaacaacaaatgagataaatgcttccttaaaagcatgaagataagtctccaacagtgatgacaaaacatgtaaacaatgtccactattttcacttatgaatgtaagcaaactcttcccaaatatctctgcatcttggaccacctgctttccctgcaaatcaacatcaggtttcccacttgtttggtgcccccaaaaaccagtattaattagagacagaataagagaaagccatgctcctttcctgaggaaatcccaactttctagaacacttggaccacagagaatctcagactgcaacaacttcaggaatccaaaaattacagaaggcagattggcgtccaaaagtgatgaagcatcatcacttacactgagagcaaacgaaatgaaaaagtttacatcagcgaagtcaggattcaacagaccttcatatccaccgctgtaacctataccagagagagtgctccagcaaatcaaaaataaatatctctccgcaatgagatcctcagccacttcagctttcctgcccttccaaacaccaagaatttcagaaatgtttgagcccaaattagcgaagttcaaacccaaagcttctagagcagacttgtcaaagtagatttcagcatgagctggagtcacgtcaatcaattgagggaacaaactactagttgaagcatactccttgacagtatcagcaaaaatgccctccacaacttcagctgtgaaggatggcaagtaatcattcatggagcgtgactgaccttctttcaacaaaatatccctcattctggatcttaacctcataagcaaccatgacggatgtgttaccggatacaacaacatatgccgcaagacaagcaggagtcttgacaggagtaaagcccatcttgtgagtccagatgcatttactccaagtggaggctgtctcattttctctagggaggaaagtacaatattgatcaaatcagccttttctggcccagtggttgaatggaatgccaccaaaagaatttctagatggaaggcacaaggaagaattctgcagaaattattcaaatctaatgagctggatgatttatcatttgctttctccaaaagataaccaacatactgaacaaaaacttttcttccaagattatatattgagcttgccccagagatgatagcacgtgccactagagcaagcgtataattgttgtaagtatacatcccattctcagcattaaacactttatccacaagatcctctcttaaagatgccgggcattcatgggaaataaggaacatctgtagaagttcaaaacaggctgtgttgatatgcaatgagttaacctcagaaagagatgttgtagcaatgctttcatcagagcaaaaggctggacattgaagtattgacagaaactgttccaaatgattgctgtggaacttcctgcaagcatccacatatatagcagtgcaccattcaggggagaagatggacatcttcataaagcatatcaaatcagcagctaattgaatagggccatgctggctgctcgaagggccactccctagagaaattggctgttcaacactgtcagctactcctgtagagcgggcttcagcaaatagattaccaaaaagtgcttcttcctcatgactagccacagactccaactctgaaagagtaacttgctttgtgcaactcatctgcggcttctcaagtagaggcattgattttactccctcttcatggaggaaaaagatgagatgtaccaaatcatccaaccattgctcttctgaagggaagattaattgcagatactcctcagatgtgtatttcttcagcaatggcactttctttgaacgagcatggcaagacaaaccatctgtctcggaattgcatgaataacctagaacatctttgccaggtctgtccctgtcaacacgacttgtccaacgtttggtatcattgagaagtttaagcacatattgaacaatgtggggtgagtaaactaaagggggcatcaagcaagcagcagatctgtcatatttccatttttctgggctgaaaatttccaacagggaagcaagtatgcatacttgtactgtacaacaaatatcactgttgcagaagataatatgaattagctgcagaaattcgtcaagtatttgcagcaacacagttccaacaccatctccagaaaacactctgtcatggttagcgaacttgaacttaagtttaaacaagactggcagactatcagtacatcttgctactgaacaaagcatcatcgcatcagaagcatcacaaggaaattccatagccaaaccatgtactaacttcaaaattctttggccaaaagacaacctcatattaaagttggtatcttctatcacatccaaagctggagactggcaaagcttctgaaccaatgtaagaaggactggtatgcaatgtaggtgaacaactgcaaaatgctgtgctattgacaccatgccgtttggggatgctgtgtgtgatgattcagtattctctgcaataacataatcttgctgtaaacattcaggtgataacgtcaaacgaaaccgttgcagatcatctccactatttgagcaattgaagcctggttgtgccatcaaaaaacaatcagcaaataaagcaccaacattccataaaccttttaaatagcagaaatacttctcttgtgggctgatacgctcagaatcaacttggacagacgaccactgctcaataacatcatttacgacactgggttccaacgagtaaaccttgctgggagtccctctaagcagcacgcattccatgaaataggcaacctcgttcagtaacccatagtcttcacatgcatatgatgatttttcgagatacaatagacagaattccaaagacctctccacaatctccacaaccgttgactccacttgctccactaaaacaaaagtgtaacgcccctcaataaaggatggtggtacactcaactcaactacagtgctgacttcacatttcatattattttcgaaaccaaatggaatggatggatcagaagtggaaactggtaattgattgtttttgcgcattacggcgcgcgcggcggcgaggacggcgcgcgcgcgggccgggtcggccggcgggcccgcggcgagcgcccccgcgagggcctcgagccccgcccgcgccgcgggcccgcggaggcggcgcgcgggcgggtcccggtcccccgccgcggcggcgggcggatggaggaggaggtcgagcagcgccgagatctccgccgccat

SEQ ID NO: 23546 - DNA, 2995 bp, Oryza sativa
  Clone ID: TF_OsC96744_1
gcacgaggcccaaagcatggcgctgtccgcgtcggcggcggcgtcggccgggcggggggcgcgggcggagaaggtggggaggatcttcgagcggttcgatgccaacggggacggggggctggaccgcgacgagatggcggcgctcgtcgtcgccgtcaacccgcgggtgaagttcagcgaggaccagatctccgccatcctcgacgaggtgttccgcacctacgccgagttcatactccccggggggcggggcctctccctgccggggctgctacgcacctacgacgacggcgccggggacgtcgaccgcgacttcctcgcgctgtcccttcccccgctcgagtccggggagtcctccccggagatcgccgcgggggacccggccgccgcctcgtccccgccctccggcgccgccgccgccgcgtcgctcctggacgaccacatcaagccgcttggagcagccggtggggcgccctcgtccagctcacgcgccgcggcggccgcgccggcgtgggcgacgtcgcccagccacgggattgcgttcgactcctcctgggcgctcctcgacgacctggagatactagtgaagcgcctccgctccaagcagctgcggagaacatcctccatcgacacgatcaacggcagcggcggcgcggggaacaacaatttcgactccttctccgaggccgggtggtcaagggagatctccggccaagcggattcggcttcgaccgccgcgccatgggacgagacgagccgcgactacctcaccttcgtcaaggagctcgccgtgctccgcacgcgcgcggacgcctcccgctcacgggaggaggccttcgacaatcacatggtcatcggcagggcgctctccgagcaccgcctcttccgggacgcgcttagcagcttccgccgcgcctgcgagctgcagcccactgacgtgcgcccccacttccgcgcggggaactgcctctacgcccttggccgccactcggaggccaaggaagagtatctcctggcgcttgaggcagcggaggcaggtggctcccagtctgcggacatcctcccacagatccatgtcaaccttggcattgccatggaggctgaggggatggtgctcggtgcctgtgagcactaccgagaggctgccatactgtgtccttctcatgcccgggcgctgaagctcctcggtagcgcgctctttggtgttggtgagtaccgtgcagccgagaaggcactagaggaggccatcttcttgaagccagactatgctgatgcacactgtgatcttgggtcagccctgcatgcgatcggggatgatgaccgtgcggttcaggagtttcagaaggcaattgatctcaaacctgggcatgttgatgccttgtacaatcttggtggattgaatatggatgcagggcgctttgtgcgggctgcggagatgtatactcgtgtgttgagcatccgaccgaaccattggcgtgctcagctaaacaaggctgttgctttgcttggccagggggagtctgaggaggccaagaaggcactcaaggaggcatttaagatgacacaaagggtagaggtgtatgatgccatatctcatctgaagacactgcagaagaagaaaccaaagcctcccaaaggaaaagatgatagtcaaggagaggaggccttcgttgtagtggagccatccaagttcaagagggttggaagaaagactaccttgcggcaggaccttgctaatgcccttgatataagagcctttgagaaaacgacaaagcttggccgctgtgacgcggagcttctgaggaaagagatgaacgagactgatgtccccatatcctactcaggcgctggcaacccagagaagtcaatacggaaagcagctctcgaggttattctccacaggctcctatctttcctcaagccagatacctttcagggttctgtgaaggcgattaacgaaagaatcctctccgtccttgatgcctctggttctggccgtgttgaccttgggatgttctttgctattatcgccccaatttgttctggtcctgtggataagcgcaagcgggttgtctttgatgcacttctttggcgtccggcaagtgaaggaagcaggggtcagattaggaggagcgatgcactgtcctacatcaaacttcttcgtgctgtttatatacccacccatggggctagcgacatgcttgaaatgcatggggagtctgaccccactatggtatcatacacggagttcctcgaaatgttcaatgatcccgattggggatttggaatcctaagcacattggtgaagcttgaggacagcgatcacattcgtcacggccgccacacctgctcaatttgccgatatcctatcattggttcccgattcaaggagacaaagcactcctttagcttgtgcaatcgatgctacagtgaagggaaggttccatcagcattcaagttggatgagtacaggttcaaagaatatggtaacgagtctgaggctcttatcgataagtgcatgtgctttaatttacattctaagaagctcgaagctgatacttgatcattcgatctttggtgtcgattgctcgagcatgaatctgtgtatcccctttctaggtgcaaagatctctagatagtctcctgccctcttgtaaactaaggtgctgttctgttcggagttttctgaatgtgttccaactacttgaaaatcctaatcaattagctattgttcgtccaagtgtatgggagtgagaacatgtgaattccaaacacactgttgttacaatccccaatgctcttgtttaatagagatccttgctgatatccatgaggttttatttgaaccaaacaattttgggctatttttttctttaatcacacttgtatgatttatagcttgggttgcaggaatagatggtaaaatcactatgtacattcagttttaaacttctttgtaagttggtctaacaaagattattttctaaggcagtcc

SEQ ID NO: 23547 - DNA, 1731 bp, Oryza sativa; identical to SEQ ID NO: 15795
  Clone ID: TF_OsC329578_1

SEQ ID NO: 23548 - DNA, 2991 bp, Oryza sativa
  Clone ID: TF_OsC15191_1
atgtctcgccgccgggacgctgcgccgacggcgcgcgagggcgagagggatctcgtcgtgaaggtaaaattcggtggcactcttaagcggttcactgcttttgtgaatggtccgcactttgatcttaatctggctgctcttcggtcaaagattgcgagtgcttttaagttcaatccagatactgagtttgtactcacctatactgatgaggatggggatgttgtcatactggatgatgatagtgatttatgtgatgctgccattagtcagagactgaaccctcttaggattaatgttgagttgaagagcagcagtgatggggtacatcagacaaaacagcaggtattggattccatatctgtaatgtccactgctctggaagatcaattggctcaggtgaaattagctatcgatgaagctttaaaatttgtaccagaacaagttcccactgtccttgcaaaaatatcacatgacttgcgttctaaagctgcatcatcagcgccatcattggctgatttgctggaccggcttgctaaactgatggcaccaaagagcaaaatgcagtcttccagtggttctgctgatggttcatctggctcctctagtggtaggggacaaactttgggaagtttgaatattaaaaatgacactgagctcatggctgtttcagcttcgaaccctctggatatgcataactctggatcaactaaatcacttggtcttaagggtgtgcttcttgatgacatcaaagctcaagctgaacatgtatcgggatatccttattatgtggataccctttcaggctgggtaaaagttgataacaagggaagtaccaatgcccaaagtaagggcaagtctgttacatcctctgctgtgccacaagttactagcattggtcatggtgcacctactgttcattctgctcctgcttcagattgcggtgaagggttaagaagtgatcttttctggacacaactaggcctttcttctgagtcctttgggcctaatggccagattggtggtgatttgaactcgacatgccctcctccaccactgtttccccgttacccacttcagtctctccgagctgataaaagcagtatcaagggtggttgctcttaccctccgtgcatctgcaaaagtagcacatctaagcctgagaatctctcccattacccagttcagtccctccaagctgacagaagcctaaagggtggtcactatttccctccatgcacctgcaaaagtaacacatccaagccagataatctctcaccagtcggtctttatggaccttattctgaaggcagcagctgtaataggtgcccatacagggatctaagtgataagcacgagagcatggcgcagcacacactgcatagatggatacagtgcgatggctgtggggtcactcctatcgctggttctcgctacaagtcaaatattaaagatgattatgatttatgcaatacctgtttttctcgaatgggcaatgtgaatgaatataccagaatagacagaccatcttttgggagtagacgatgtagagacctcaatcagaaccagatgctctttccacatcttcgacagctacatgattgccgcttcattaaggatgttactgtccctgatggaacagtaatggcaccatcaaccccatttacaaagatttggcgcatacataacaatggatcttccatgtggccatatgggacatgtcttacctgggttggtggacatctatttgcacgcaacagctcagttaaattagggatctcggtggatggtttccctattgatcaagagatcgatgttggtgttgattttgtcacacctgcaaagcctggtgggtacgtgtcgtactggagattggcatcacccactggccagatgtttggtcagcgagtttgggtttttattcaggtggagcacccggtcaaaaccagtagcaacaagcagagtgctgctataaacttgaacatgcccccagaaggaagcaacacagaatggaagcattctgttgatgcaaatattcagtctgcagatattgtgggtaaatactctggaagcaccataactgatcctcttgcacatgcactataccatgaagccaccaaaccgatggaacctgagcttgtttcaagtgccgtaccttctgtacctagagcatttgaatcagtgctagtgccagctactgatctcctcacttcatctgctggagctgaaaaggcttcgaagcctgctgccacgcctggacctgcacctcaagccgttcccctgccaaaacctgttagcattcctgcatctggacctgcgcctgctcctgttagtgcgactaccgctgcacctgtcggagctgctgctgctcctatcagtgagcccactgcacctgctgctgccattggaatgccctctgcaactgctcgcgctgcttcttgcctgcctaccgagccttcatctgatcacatcagtgccgtggaggacaacatgctgagagagctggggcagatgggcttcgggcaagtcgacctgaacaaggaaataattaggcggaacgagtacaacctggagcagtccattgatgaactctgtggcatcctcgaatgggatgcactccatgatgaactgcacgaactgggcatctgatcagaacggagatgaacaaggcgctcaccaaggacggcgaggaagcatgtggccgtgaatcttttttgcccctcctagaagggccagtgatgacctcgtcgtgttcagctattgagcaccttgcagtatccaagatatagaccgtagtatatttataaatagcttacctagttaaaagcggcgttcgtgctgctgtgctacccctactcgccagcaaccttagagggtctggtgtagtgccagtagtggtgtttaaagacttctaatcatcggtgtgtaatcgaaataagtaccgtacctactagttgtttattatgctatatgatgtattaaacttgtgttgct

SEQ ID NO: 23549 - DNA, 2986 bp, Oryza sativa
  Clone ID: TF_OsC1100_1
taacaggcatcgaggagcgccaggccccgtgggcgcaccggcacgctctcctctcctcctctctctctctctctcgcaccaccgctctcttccgccgctgcggctcacggctacgcagctctcttcccctctcggcggcggcgcggcgcggagcagaggaggacgaagcagcaggcggcggcggcagagcacggcgacctagcccgacctcgcaaccatggcaaggggtttgaagaagcatctgaagaggctcaatgcgcccaagcattggatgctcgacaagcttggtggagcttttgcccccaagccatcttctggtcctcacaagtccagggagtgcctgcctctgatcctcattatcaggaacaggctcaagtatgctctgacataccgtgaggttatttctatcctcatgcagcgccatgtcttggttgatggcaaggtcaggactgacaagacctacccagctggtttcatggatgtcatttccatccccaagactggtgagaactacaggcttctgtacgacaccaagggacgtttccgccttcagtctgtcaaggatgaggatgctaagttcaagctttgcaaggttcggtctgtgcagtttggccagaagggaatcccctacctgaacacctatgatggtcgcaccatccgctaccctgacccgatcatcaaggcaaacgacacaatcaagatcgatctggagaccaacaagattgtcgacttcatcaagtttgatgttggcaatgttgtcatggtgactggaggaaggaacacaggccgtgttggtgtgatcaagaacagggagaagcataaaggcagcttcgagaccatccacgttgaggatgccctgggccaccaattcgccacccgtctgggcaatgtgttcaccattggcaagggcaacaagccttgggtgagcctgcccaagggcaagggcatcaagctcagcatcatcgaggagcaaaggaagcgggatgctgccgcccaggctgctgccaacgcttaaaatctgctgctgcgtctgcctggagttttgctatagcgagttgtttgcaaggatatagaactatctgccccagactatccttttttgagctcttttgcctaatgttatgttgatcaattcgcgaactcatgtttgctgctagctgtaatgcgactgtttaccttatttaaggcgccttttaagaacctccaaaccaaaaagtcattaactgttgctgagatggtatggttttgagcattcagcccataccctggccgcctcttgtcctctggccatctgcatggagaccttggtaataacattgagaactcaccagcacgcacattccatagatggattcagtgtgatggttgtggagtgcaaccaattgttgggcctcgatacaagtctaaaacaaaagaagattatgatttgtgtgatgcctgctttcatcgcatgggcaatgaggtcgagtacaccaggattgacaagccactcttaccccagagattactgagagaccctacattgtgtcgcaagatccattcacgggctgcgatgaagtcaaagcgggagaaacttgaaagtcgcttcattttggatgtaactgtcctggatggaacattgatggcaccttcaactccgtttactaagatttggcgtatgcataacaatgggtctatcatgtggcccttgggcacacagcttatatgggttggtggcgaccagtttgcactgcagacctatgttccattagagattccagtggacgggtttcctgttgatcaggagattgatgttgctgttgattttgtggcacctgcaaggcctgggaggtatatatcttactggaggttagcatcaccttctggccagaaatttggtcagcgtgtttgggttcacatccaggtggaggatccttcttttgtcagtaacaacaggactgccgctataaacttgaatttgcccccagaaagcaatatcacaaacacaagtaatttgattgatgtcaatattgagcctgtggatcaagtcttcaaccaacatgtcaatagcacaaacaaggagttacttgaacatttgatacaccaccagattgacgagcccaagaatcctgagcctgctccattacctgtgcccattgtttcttccacaacatctcttcaccccatcattgatgttgatgttccctccagttcaactgctgctgcttttgtgcctgtctttgatgagcctgcgcctgaacctgctgtgactcctgtgcctccaactgttaatgtgcctgctggtaatgcacctgcgtctgttggtgcatcatcatctgatcatcatggcattgacaatctcacagaagagaaactgctgaaggaacttgaggaaatgggttttaggcaggtcgatctgaacaaggagatactcaggcagaacaagtacaacctggagcagtctgtcgatgatctctgtggcgtcagcgaatgggaccctctcctggaggagttgcaggaaatggggctttgaggacactgagataaacaaggagatgctcgagaagaacggaggaagcatcaagcgggctgtgatggacctcatcgctagggagaagaaagaccagtgaagatcgtgtgctcttgagccatccctatctataacctaactatgtgtgtatatgcgtaaataatgtgacgaggtgtaaggctagcgccggccgccggggctgctgctacagtctcagggcctgcttgcttatgaactgtgtgtggtgttgtgcgactggtatatttgtcgcggagatatgtgttaagtgcgcgtgcgcgcctcttaaaaagcggttaccttgccaggtaaactgcgtgtaattactatgggcttagctgctctatgcctcttatctactgctgtgactggaacttgatggattaataagatctatgttgcgtatgttaaaaaaaaaaaaaaaaaaaaaaaaaaaaaaaaaaaaaaaaaaaaaaaaaa

SEQ ID NO: 23550 - protein, 1081 aa, Oryza sativa
  Clone ID: TF_OsC259_1.pep
LVLENKKRDEDNPHSAHPHPVSTRPGREQGGEAPEPNGGPRPPTVRAGPLPACPTVPGAPDPQDGPGATAGRPRLSPSDPEVVGTEVECAPGGLSDEERPGDAAPGEEDRPRRKVQRPVYFVSEALRDAKTRYPQAQKMLYAILMASRKLRHYFLAHRVSVVTSYPLGQILHNREGTGQVVKWAIKLSEFDLHFEPRHAIKSQALADFVAEWTPAPEPVSVLEASSGPSQLPHTAYWVMQFDGSLSLQGAGAGVTLTSLNGDVLRYLVRLDFRATNNMAEYEGLLAGLRVAAGLGIRRLLVLGDSQLVVNQVCKEYRPPPGAFEERLAQPSARPDPLGETDAPERPPRPVGVQASGPDGSVPSSLRLIAWIAEIQAYLADKTLPEDREGSERVQRISKRYVLALQTIPLSWLFAVWGLDILGPFRRAPGGFEYLYVAVDKFTKWPEAYPVIKIDKHSALKFIRGITARFGVPNRIITDNGTQFTSELFGDYCEDMGIKLCFTSPAHPRSNGQVERANAEILKGLKTKTFNILKKHGDSWIEELPAVLWANRTTPSRATGETPFFLVYGAEAVLPSELTLRSPRATMYCEADQDQLRRDDLDYLEERRRRAALRAARYQQSLRRYHQRHVRARSLCVDDLVLRRVQTRAGLSKLSPMWEGPYRVIGVPRPGSVRLAMGDGTELPNPWNIEHLRRFYPYGTMNRVPTSWGFVYSRVNKVTTLAPAFMLWVLCGYRVPTGSVWAQGSPRGEGSRSLFGAQRAGTRLHWRNGPVAVDRQRVRASGHAGHQPVQQRRFVVVVKRFPTFPVPTKAAFASATTTATRRRRRRRGEEEREGEREAERYEEMVEYMERVARAAGGASGGEELTVEERNLLSVAYKNVIGARRASWRIISSIEQKEEGRGNDAHAATIRSYRGKIEAELARICDGILALLDSHLVPSAGAAESKVFYLKMKGDYHRYLAEFKSGDERKQAAESTMNAYKAAQDIALADLAPTHPIRLGLALNFSVFYYEILNSPDRACNLAKQAFDEAISELDSLGEESYKDSTLIMQLLRDNLTLWTSDANDDGGDEIKEAAAPKEPGDQ

SEQ ID NO: 23551 - protein, 136 aa, Oryza sativa
  Clone ID: TF_LIB3434-064-P1-K1-F6.pep
SLCVFITFRFCTSKCCLFYHLMLIPLSHYILFVILLSSILYSSTSSSLFSHFFPFLLPYFLFLLPSFLLSLLPSSFFSTPLPFLPSFSYLIPFLFPSSFPSSPFTPLPFFSLFPFSFHLFLSFPFFSSFFYFSSSS

SEQ ID NO: 23552 - protein, 111 aa, Oryza sativa
  Clone ID: TF_4879985.pep
AHQTSSGLCHLLHEFDHFLVTLKPARQALPCTHSPHAMPQQATFFLSFVLQRKLSLTLCTFPPPSPSRFPSALLTSSLFPTRAGFVRCGCGSPGRSGGRAGKRGEERRSGG

SEQ ID NO: 23553 - protein, 162 aa, Oryza sativa
  Clone ID: TF_uC-osroM202032b04b1.pep
VLTSGAATSARVVRFRRCSLGRADRRVTVTVALLLLLLGSHHPRRALLCSRSTASASHGATPKLQLNAGHLSRGDPGRLLPPWPGATPARLPFPTTRVTVARALRVPGAPRCDRCHGNDRSRRRTCNMKRDYYQYLDTLRLELRGRMLLRTPWWHTKPLMIL

SEQ ID NO: 23554 - protein, 108 aa, Oryza sativa
  unsure (1)..(108): unsure at all Xaa locations
  Clone ID: TF_OsC20576_1.pep
KGDYYRYLAEFSTGTEKKAATDQSLXPIRLGLALNFSVFXEIMNSPERASQVAKQALDEATAEINSAGVEGYKDSMLMMQLLKENLALWTSELTGGETSKDDDVVMEG

SEQ ID NO: 23555 - protein, 120 aa, Oryza sativa
  unsure (1)..(120): unsure at all Xaa locations
  Clone ID: TF_11118254.pep
GRRSXGPSFLLLDRRDDPLTNARRAPMTFLYXTDXRFRSSTVSSSPPEAXPXXAATRSMYSTISSYRSAXPPXRLVHALLPXCSAGDMANCLPTYLPLAFPLLLSSSASAAAAAAAAADA

SEQ ID NO: 23556 - protein, 88 aa, Oryza sativa
  unsure (1)..(88): unsure at all Xaa locations
  Clone ID: TF_2442689.pep
LVAPXHSQAQLNSTRIRKRDRXIRWRRRREEGRGRRWCTWRTGGQAERYEEMVEFMEXVVTAAAAGRGWELTVEEXNXLSWRXKTLSA

SEQ ID NO: 23557 - protein, 80 aa, Oryza sativa
  Clone ID: TF_uC-osroM202039c12b1.pep
VVTTPPEEIVYMVKFANHAQRIEVIREYVLHGGNTVGAHKLTVMDRTLLAVAYMNEIRARQASWLMRLILQTHRVAGNLA

SEQ ID NO: 23558 - protein, 88 aa, Oryza sativa
  Clone ID: TF_LIB4370-040-R1-K1-G5.pep
MAAAAGGGTREEMVYMAKLAEQAERYEEMVEFMEKVVTAGALCGPRQLTAPDMELLSSAYGHATVTTLSSVCVLRVLARHGCRRLPVL

SEQ ID NO: 23559 - protein, 62 aa, Oryza sativa
  Clone ID: TF_uC-osflcyp073d07b1.pep
MSPAEASREENVYMAKLAEQAERSEETVEFMEKVAIEPPDRLCEPQPVRAKPGNLCLFLMGF

SEQ ID NO: 23560 - protein, 39 aa, Oryza sativa
  Clone ID: TF_LIB3434-001-P1-K1-E7.pep
TYLTTRWDGILKLLESQLVPSNRGAASTGSYLKMKGDYY

SEQ ID NO: 23561 - protein, 218 aa, Oryza sativa
  unsure (1)..(218): unsure at all Xaa locations
  Clone ID: TF_OsC20576_2.pep
MKEREKVVRLAKLAEQAERYDDMVEFMKTLARMDVDMSAEERLLFSVGFKKTIGARRASWRILESLEQKVTAGDQPGVTINGYKKKVEDELRAVCNEVLSIIAIHCLPLANSGENVVFFYKMXCRFYQMMLRFHXGTEKKAATDQSLMAYQHAMVGACSELSPAHQLRLGLALNFGDFXEIMNSAERASQVAKQALDEATAEINSAGVVGYKGSVLMM

SEQ ID NO: 23562 - protein, 177 aa, Oryza sativa
  unsure (1)..(177): unsure at all Xaa locations
  Clone ID: TF_LIB4309-008-Q1-K1-A8.pep
ANLEKVVTAAAAGGGGELTVEERNLLSVAYKNVIGARRASWRIVXLKMKGDYHRYLAEFKTGAERKDAADATLAAYQAAQDIAMKELSPTHPIRLGLALNFSVFYYEILNSPDRACTLAKQAFDEAISELDTLGEESYKDSTLIMQLLRDNLTLWTSDMQDDGGDEMRDATKPEDEH

SEQ ID NO: 23563 - protein, 163 aa, Oryza sativa
  unsure (1)..(163): unsure at all Xaa locations
  Clone ID: TF_OsC327859_1.pep
RPELSGICQDVLNVLDKHLIPAAQSNEAKVFYYKMKGDYYRYXAEFKAGDLRKDAADKSLGAYQSASDIATKELASTHPIRLGLALNFSVFYYEIMNSPDKACQLAKQAFDDAIAELDNLTEDSYKDSTVIMQLLRDNLTLWTSDGQGDNDKDGGDDKDDKDE

SEQ ID NO: 23564 - protein, 73 aa, Oryza sativa
  unsure (1)..(73): unsure at all Xaa locations
  Clone ID: TF_LIB3431-002-P1-K1-B6.pep
RAHACAHTSGYEVMVEYMXMVANTAYVEELTGVERNLLAAADKNVNAAHRACWRIALSIVQTEEGRANEEHVT

SEQ ID NO: 23565 - protein, 87 aa, Oryza sativa
  Clone ID: TF_uC-osflcyp002e09b1.pep
REENVSMAQLDEHGERCKEMDEFIANVALTTDVRELTLVDRNLLFVSYKNDIGAQDALHKSISSIDQKEDSTWNEAYVASINDLQLR

SEQ ID NO: 23566 - protein, 206 aa, Oryza sativa
  Clone ID: TF_14571301.pep
DFERRPGRYMAKLAEQAERYEEMVEFMEKVAKTTDVGELTVEERNLLSVAYKNVIGARRASWRIISSIEQKEESRGNEAYVASIKEFKSGAEGKEAAENTLVAYKSAQDIALADLPTTHPIRLGLALNFSVFYYEILNSPDRACNLAKQAFDDAIAELDTLGEESYKDSTLIMQLLRDNLTLWTSDNAEDGGDEIKEAAKPEGEGH

SEQ ID NO: 23567 - protein, 125 aa, Oryza sativa
  Clone ID: TF_uC-osflcyp077e11b1.pep
FYLKENDVFHRGIDVAKMGLELKDLVDITVETYNSADAFGLTNLTATYMLRHVLTLYYSVYDYDMLNSPDLDCILEQQASDYCIGVLDTVQNMAYLDSSSNIQAMSIKLSLWTARISEDVRVKTR

SEQ ID NO: 23568 - protein, 92 aa, Oryza sativa
  Clone ID: TF_LIB3431-007-P1-K1-B4.pep
HASAHASAHAFAHASAHASAHASAHASDLLSVAYKNVIGARRASWRIVSSIEQKEEGRGAAGHAVVARSYRARVEADLSNFCAGILRLLDER

SEQ ID NO: 23569 - protein, 95 aa, Oryza sativa
  unsure (1)..(95): unsure at all Xaa locations
  Clone ID: TF_LIB3431-058-P1-K1-E2.pep
PTYVSGKASPANASCEENAYMAXLAYPAERYXEMRQFMDMAANTTDVLELTVQERNLLSRAYKNMTCARMALWRIISSIEQKEDSPRHAASVASI

SEQ ID NO: 23570 - protein, 73 aa, Oryza sativa
  unsure (1)..(73): unsure at all Xaa locations
  Clone ID: TF_uC-osrocyp028c02b1.pep
AKMHRQENVYMGKLVQQVEGHEVMAVNMEMVAXDCTXEELTAVECNLSSVAXKNVIGAHHASRDVDLFSAHYE

SEQ ID NO: 23571 - protein, 97 aa, Oryza sativa
  Clone ID: TF_LIB4309-032-R1-K1-D2.pep
ETFFFFLQTSAWWIPDCVGEAYEPASAARPALCSMMTSVVPKDESHGYEDSVARMRDSRARIETELSSCWDGTLNLLALHLGPMSSAPECKVSSLGT

SEQ ID NO: 23572 - protein, 656 aa, Oryza sativa; identical to SEQ ID NO: 15894
  Clone ID: TF_OsC2845_1.pep

SEQ ID NO: 23573 - protein, 181 aa, Oryza sativa
  Clone ID: TF_jC-osroLIB3475P018b07b1.pep
MVASGNNTAAPLANTLPAVINPLLLATACTGSPKGLDLLLNSKVAAGDQRVLPFALGSQRFRDLISAYTSSDRSSLATPTQRIPPHDDPEALLAEMLMLEGVAVDGDTVLHAVATYGENDDFQKCAQTMCSKARQLLFKQNKNGDTPLHCAARAGKIQMVSCLIDLARGGGGDGNSSSSSS

SEQ ID NO: 23574 - protein, 465 aa, Oryza sativa
  Clone ID: TF_OsC311016_1.pep
MPMQTTDKTDAVKSMLSGENSEGSDGSKSSDTVEWDPWDPPHPPCPTLPPTASLMSQVEMVKQHHFQVLAVLAASRATNIIAPDRTPQEVRRKFAEICNELADILEKDSVRRFLNLYRRNMRIMGWGLVITSQTMNFIVSFNALRCAKVVLEGKAPKLCQIRANPNYMTSYGYFPLHKAAEKFSVDMIKLLLCYGASANLRTSGQKVIEGLLPLHVAIENTCMHKYLEDNLLTDRKLKQVDLDFIYKLIHLLCLPEMKIFLDTTRLLADNTDNIVDELWNYIKEGRLVHAAILLLAAQRKIRTCASSNRNISCNLNGFDIIRDRVMGSIVSIEREGRGLTSGKNSKAHKQLEEKRKFFHNSLMLIFVISKTGEALDEYIQSHSEVSHQEVLEGVSSILDDHGFAPTGKGISIGDLECRPYDCNASNSVPKCNYEDSGTTKAVGESPNLNVKAKKSAPVVMLYGFG

SEQ ID NO: 23575 - protein, 231 aa, Oryza sativa
  Clone ID: TF_OsC180673_2.pep
MCAYMVEELQVDIDAADELGITQLDEAGADVKGVGTFTPLIVAATEGLTDFYKCLLEGGADPDVPDKVDPFFKIRPADLKLEGNRAYMRKDYLTAAKLYNMADGRRQQAAAATAAALSGVGGSSSNNSSTSTITRRRHRLHHRQHVTAVACSSNTTSTAAATTSKEDCGTRILRPDWPKGCYREGTAHMFMKDYEKACNAFLDGFKLDPANIEIENALREALKSLKASRAA

SEQ ID NO: 23576 - protein, 462 aa, Oryza sativa; identical to SEQ ID NO: 15813
  Clone ID: TF_OsC335757_1.pep

SEQ ID NO: 23577 - protein, 633 aa, Oryza sativa; identical to SEQ ID NO: 15814
  Clone ID: TF_OsC77260_1.pep

SEQ ID NO: 23578 - protein, 601 aa, Oryza sativa
  Clone ID: TF_OsC3800_1.pep
MCSGPRKPSTPPLPQQQKEATVMAASLLLELAAADDVAAVRRVVEEEKVSLGVAGLWYGPSASGVARLGMERRTAAMVAALYGSTGVLGYVVAAAPAEAARASETDGATPLHMAAAGGAANAVAATRLLLAAGASVDALSASGLRAGDLLPRATAAEKAIRLLLKSPAVSPSSSPKKSASPPSPPPPQEAKKEYPPDLTLPDLKSGLFSTDEFRMYSFKVKPCSRAYSHDWTECPFVHPGENARRRDPRRYSYSCVPCPEFRKGGSCRKGDACEYAHGVFECWLHPAQYRTRLCKDEVGCARRICFFAHKPDELRAVNPSAVSVGMQPTVSSPRSSPPNGLDMAAAAAAMMSPAWPSSPASRLKTALGARELDFDLEMLALDQYQQKLFDKVSGAPSPRASWGAAANGLATASPARAVPDYTDLLGSVDPAMLSQLHALSLKQAGDMPAYSSMADTTQMHMPTSPMVGGANTAFGLDHSMAKAIMSSRASAFAKRSQSFIDRGGRAPAARSLMSPATTGAPSILSDWGSPDGKLDWGVQGDELHKLRKSASFAFRGQSAMPVATHAAAAEPDVSWVNSLVKDGHAAGDIFAQWPEQEQMVA

SEQ ID NO: 23579 - protein, 405 aa, Oryza sativa; identical to SEQ ID NO: 15819
  Clone ID: TF_OsC140365_1.pep

SEQ ID NO: 23580 - protein, 94 aa, Oryza sativa
  Clone ID: TF_uC-osflcyp015c11b1.pep
LIIHIAVPRNSGGYFGHVLAKLEPSIDMKDNLGLTPLQLSILLGKYAAMQKLIDFGADIHIHSLYGGPIHAAVALDDEIALEALMRKTNTRLLL

SEQ ID NO: 23581 - protein, 153 aa, Oryza sativa
  unsure (1)..(153): unsure at all Xaa locations
  Clone ID: TF_uC-osroM202020g09b1.pep
CNPRGYTVLHIAARRREPKIIVSLLTKGARPADVTFDGRKAVQISKRLTKQGDYFGVTEEGKPSPKDRLCIEILEQAERRDPQLGEASVSLAMAGESLRGRLLYLENRVALARIMFPMEARVAMDIAQVDGTLEFNLGSCANPPSXRQRTTVD

SEQ ID NO: 23582 - protein, 552 aa, Oryza sativa
  Clone ID: TF_OsC4142_1.pep
MSESALDKHIVVKIPDHVLPDAFIGESVGKGKEDGATVDNMDPSRPFLVIKKSDLDKADEWVKIKYAWMAKSLTNDIIIPDPTPQVVRDAFFDISPRLDSVLRKDSVRCFFRLFAECTAAMAFKCNITSETLSCIVRHNALRCAKTVLEGKAPQLSCMHANPNCINPYGIFPLHEAAERFSVDMIKLLFCHGASANLHTVNDAGIPGLLPLHVAVGNTCLHKYLEDNLSPVQYHEDYIYKLIHLLCLPEMKVFLDTVRLLAEKTDNLADELWNYMKNDKLVESAVLLLAARKHIREGKPDGFDIIAQRIYEDYDSLVCDKGDTAEGQKLLEERRALLKCKCLIVTIISQAGEVLDNYIQAHSEVHNNETDLMKFMLARTTIMLSTMKYDLVPNVEVLARVSYILKEFGFCPNEEYIDTMILCPYNKISYSDIVHKDVTKAVAQMSTSLPAAEKKAARKKALKGWDPTFIKRNFFPYWRSVLGAQLSVSNGAADEKSMLHRPQFRNSVNAHEGAKDMSKKVPSGMLLLITIGLQSIMLRTSFADTLRRLRIYM

SEQ ID NO: 23583 - protein, 105 aa, Oryza sativa
  unsure (1)..(105): unsure at all Xaa locations
  Clone ID: TF_rsiceh_7309.y1.abd.pep
FAPLHMAAENFSVDMVKLLFRYGASANIRTKGEYVIEGLLPLHVAVEXASMHKYIEDHWAHGDHIINLIFLLCLPEMVSSSFNSYPYYITARAFSLFQILAWTNN

SEQ ID NO: 23584 - protein, 111 aa, Oryza sativa
  Clone ID: TF_uC-osflcyp039a01b1.pep
VISGQHSTMKILLEHHADPNRVFNLDGTPLIMSIVSGSLECVKLLIKVGADMNFRDSNGVTCVMVAANHGSSVIMKCLLDAGANPNIPDEVSNILSSIACDWMLLRQAVWS

SEQ ID NO: 23585 - protein, 388 aa, Oryza sativa; identical to SEQ ID NO: 15878
  Clone ID: TF_OsC115542_1.pep

SEQ ID NO: 23586 - protein, 526 aa, Oryza sativa; identical to SEQ ID NO: 15879
  Clone ID: TF_OsC46535_1.pep

SEQ ID NO: 23587 - protein, 556 aa, Oryza sativa; identical to SEQ ID NO: 15880
  Clone ID: TF_OsC99825_1.pep

SEQ ID NO: 23588 - protein, 167 aa, Oryza sativa
  Clone ID: TF_LIB3434-005-P1-K1-C10.pep
DKGLVARTSLILWHTHQNDAGAVRKLLEEDAALVNARDYDSRTPLHVAALHGWHDVAECLIANGADVNAQDRWQNTPLADAEGAKRHAMIELLKEHGGLTYGKTGSHFEPKTIPPPLTNKADWEINPLELDFSKAVIIGKGSFGEILKANWRGTPNAVKRILPSLSD

SEQ ID NO: 23589 - protein, 482 aa, Oryza sativa; identical to SEQ ID NO: 15882
  Clone ID: TF_OsC54254_1.pep

SEQ ID NO: 23590 - protein, 342 aa, Oryza sativa
  Clone ID: TF_OsC4338_1.pep
MATPAASPLLLPLPLPLPASTFPPRRAVPCARRLVLRPPRAGRPRLRDPPPAAPPPAAEEVGEEEEDDDAPPLRLLEPPQEDDPFPPEVLNLFPPSCFRCSHLFCSRACMHDEQCRRVQMEPADPDFYRIGYARMMRAYGVEFLEGPDGMAVYASRDVDPLRRARVLYAYISSAAFYNAMQIIKYGVIMEIPLELMLTITQKRPWMFFPDIIPLGHPIFDIIESTDPETDWDLRLACLLLYAFDVEDNFWQLYGDFLPSVDECTSLLLAPKHKTIPLKLKRLAPDHERFLLGLRRRRRRRWARNRSNQRRRRRPPSRRRISSTPLGTMTWRTSSRCSPPVFP

SEQ ID NO: 23591 - protein, 185 aa, Oryza sativa
  Clone ID: TF_OsC58045_1.pep
SCNHASPVSSQGKRLTDELARNVKSLTQTYTSNTSLVAILMATITFAAAFTLPGGYSNDSGSEGLPVMAKKLAFQAFLISDTVAMCSSLAVAFICILARWEDLEFLLYYRSFTKKLMWFAYMATTIAFATGLYTVLAPRMLWLAVGICFLSVLLPILTKLLGEWPVVKLRFRLGKTFKTDLLDMV

SEQ ID NO: 23592 - protein, 384 aa, Oryza sativa; identical to SEQ ID NO: 15883
  Clone ID: TF_OsC340376_1.pep

SEQ ID NO: 23593 - protein, 403 aa, Oryza sativa; identical to SEQ ID NO: 15889
  Clone ID: TF_OsC506_2.pep

SEQ ID NO: 23594 - protein, 411 aa, Oryza sativa; identical to SEQ ID NO: 15890
  Clone ID: TF_OsC180673_1.pep

SEQ ID NO: 23595 - protein, 749 aa, Oryza sativa; identical to SEQ ID NO: 15891
  Clone ID: TF_OsC14877_1.pep

SEQ ID NO: 23596 - protein, 341 aa, Oryza sativa; identical to SEQ ID NO: 15892
  Clone ID: TF_OsC359_7584.pep

SEQ ID NO: 23597 - protein, 160 aa, Oryza sativa
  Clone ID: TF_uC-osflM202091b10b1.pep
RTNMASQNALRCARVALQGTSPLLRCRRRADPNTRHRYGFAPLHMAAENFSVDMVKLLFRCGASANIRTKGDNVIEGLLPLHVAVENASMHKYIEDHWAHGDHIINLIFLLCLPEMKMFLDTTRLIAKQTDNIVDEVWNYIQHEEKHVQAAILLLAAEKQ

SEQ ID NO: 23598 - protein, 1003 aa, Oryza sativa; identical to SEQ ID NO: 15896
  Clone ID: TF_OsC64079_1.pep

SEQ ID NO: 23599 - protein, 341 aa, Oryza sativa
  Clone ID: TF_OsC1713_5567.pep
GATFRCHALRKWCYHYNFLWRYISKKIKTDIVSFNVIQSYFASISFSVCLTGRTPLIIAIVFNHVSTVEYLLDRGADANKASHNGLTPIHFAICLGECGMVQLLLAKGACVDPVAYCGTPLHVAATEGRDGAMKILLDHNADFNKMVDGLTPLDTAMDSGELKCINLLIKVGAVVSEDRMLTAENSGSTECFNYLMEETGANCNISDNGEPVNKRKATDLKSLGNKAVEKKDYLSATGFYSKALYLYPDDATLFSNRSLCWHHMGDGHKALLDAYECRKLRPDWLKAYYRQGAALMLLKDYESACETLYDGFKLDPGNSEMEDALREALASLKASASTEAR

SEQ ID NO: 23600 - protein, 1073 aa, Oryza sativa; identical to SEQ ID NO: 15901
  Clone ID: TF_OsC3235_1.pep

SEQ ID NO: 23601 - protein, 687 aa, Oryza sativa; identical to SEQ ID NO: 15904
  Clone ID: TF_OsC341728_1.pep

SEQ ID NO: 23602 - protein, 624 aa, Oryza sativa; identical to SEQ ID NO: 15924
  Clone ID: TF_OsC43580_1.pep

SEQ ID NO: 23603 - protein, 675 aa, Oryza sativa
  unsure (1)..(675): unsure at all Xaa locations
  Clone ID: TF_OsC102369_1.pep
MEEESQSQSHFPLRWESTGDQWWYATPIDWAAASGHYDVVRELLRLDANLLIKLTSLRRIRRLESVWDDDMRFADAARNRAAVARRLLHDCEPPRGAAAGGGSRPNRLIRAGYGGWLLYTAAAAGDAAFVRELLGRQPLLVFGEGEYGVTDVLYAAARSDSSEVFRLLLSAVLSPPECSAGGEGDGGTAAIAGGFMFRCEMMNRAMHAAARGGNWXVLRELLQGCSDASAFRDAQGSTILHAAAARGQLELSRMXVVKDLIASFDIVNSTDEQGNTALHLAAFRGHLPVVKALITASPSLISATNEVGDTFLHMALTGFRTPGFRRLDRQMELMKQLIGGVIMDLSSIINMQNDDGRTVLHLAVIGNLHSSLVELLMTAPLIDLNVRDNDGMTPLDLLRKQPPTASSEILIKQLILAGGIANSMDHETRSAIASQLKMHCIVGSPGTSFKIPDAEIFLHAGIDASDISERTNSFSSVGQSEPEFPESSRKKLNSMQNAAKHLKILLRWPLRKEKKSSSGARNELDDDASSVDSVKSWSHGETPTPLRQKYSRMSSLFNNKRTMAARIGSPSPSMKKSFADGLAHGVMQPESPSGSGSWSSSSLVDRIEAVHLDKNGQASPDTSVVIRRTPKKHGSLNSRLMNQYFCIGAQGIAVEDSTTGQRSSRMFRSSLLSAA

SEQ ID NO: 23604 - protein, 388 aa, Oryza sativa
  Clone ID: TF_OsC68848_1.pep
MGLQQSKEELVYQQWIDKEGKTPLMVASMRPDLINVVQVLIELGANVNAYRPGSYCGTALHHAAKKGLEQTVHLLLSHGANPFITNDDCHTALDLAREKGHVNVVRAIEGRISLFCGWMRENYGPGFLEAFAPQFLTRKIWAVILPREARNQTRPLKLELTIYPELQASKPQAVIKLWKCQLEEPKFNQANPSVVNYGNADGIRALRAQGAGLEWIDKEGKTPLMVASMRPDLINVVQVLIELGANVNAYRPLPSVISTPSQEDKKGPEPTIHSLLSHGANPFITNDDCHTALDLAREKGHVNVVRAIEGRISLFCGWMRENYGPGFLEAFAPQFLTRKIWAVILPREARNQTRPLKLELTIYPELQASKPQAVIKLWKCQLEEPTIN

SEQ ID NO: 23605 - protein, 212 aa, Oryza sativa
  unsure (1)..(212): unsure at all Xaa locations
  Clone ID: TF_LIB4371-012-R1-K1-H5.pep
MGQGASCGRPIEEVDFFGAAHSGDLARLAAAGRWRPSLLCRTTLFDRLSALHIAAAHGHLQVVSMALDLCVHPDVVNRHKQTALMLAAMHGRTECVRRLLDAGANIVMFDSSHGRTCLHYAAYYGHADCLRAILSAAQSAPVSQSWGFARFVNVRDDTGATPLHLAARQGWRRCVHVLLEXGAIVSASSSAFGFPGSTPLHLAARGGSLDCV

SEQ ID NO: 23606 - protein, 571 aa, Oryza sativa; identical to SEQ ID NO: 15910
  Clone ID: TF_OsC22761_1.pep

SEQ ID NO: 23607 - protein, 823 aa, Oryza sativa
  Clone ID: TF_OsC6747_1.pep
MSLPRRFGSIVSDSPFGDSAIDSDSRTGSCLFGSVLPGSELTGRARCSTSKLSLVLSNRAGGLGFGGNQEGASGPYFLGGAWFLFNRRVLRYFRNDGYEWRKKKNGKTIAEAHERLKVDNVDALNCYYAHADKNSTFQRRIYWMLDPAYDHIVFVHYRDVQEGSISVSALNDSSTSNQNGSGSRAEAQSSPGLTSELFAPCLNSCSPGSAEEVSSQIMAINNETNSVSQPDWVQHCNQAALRKLKVQLSLEDREDHDVDAKDIPSNSEPITVYGIQNEEPGTCRNLADVFSGLEFSKENHPEETGLPFSSTIDVLKNSDTWLEEDQIEAILHSASMIVTENQWFNIREVSPEWSYCSESTKVIIAGDFLRDPSHGSWAIVFGDVKLLFDGHVSEQFLKFGLPFPNLECGLQVSPSEIMKGASERLNRDTAVNCVMEVLLNNKFEEWLFSKYEQNSEGNHFLPRQYHGVIHTIAALGYNWALKLLLNSGVLVNYRDANGWTALHWAARFGREETVVLLLDAGAAAGALSDPTAQDPAAKTPASVASAYGFKGLSAYLSEAELIAHLHSLESKENGSSGDQISRVVGRISDTSAHAQSGSDDQLALKESLGAMRYAVQAAGRIQTAFRIFSFRKKQQAGLQNRGNHIISIREVGAASHGMLEKAALSIQKNFRCWKKRKEFLKIRKNVIKIQARVRAHQQHNKYKELLRSVGILEKVMLRWYRKGVGLRGFHPGAIAMPIDEEDEDDVAKVFRKQRVETALNKAVSRVSSIIDSPVARQQYRRMLKMHKQNKDDDEKVEVSPASHVYGSGSHHMCWLSYNKQPMF

SEQ ID NO: 23608 - protein, 417 aa, Oryza sativa
  unsure (1)..(417): unsure at all Xaa locations
  Clone ID: TF_OsC50757_1.pep
MPRGRVPGGSTANFSAHLIAAQLGMQCRMGPAAAEQMRRVIASSDCDTGRVMRMFGAMEGGDSDSDSDDSAETEKVGPLHEAASAGKMDTCKHLVEQLGFDINAEASDDLGMTPLACAVSKGKAIAVRYFLDKGADPNKQDNIGFTPLHYATKEGYDGLARLLLSKGASVDVISSKGTALHLAASSWKSGIMKILLEHNADPNKVSADSETPLAATLIASDGLNEPAVLKCIKLLVKAGANLNRAIPDTPLVIATNKDFVECVEYLLEAGANANIPTNNGGKTPIEIAAKSGRRKLVEILFPCTLPIKGVSNWTVEGIITHVKSKKSKKKACAQDKESGTDKKAQLKSLGASAVQGKDYVGASKFYSEMRVRGVATGISLVRLNMEEDEKVPGSSNTSYIXTCIGLKPDWAKGYYRK

SEQ ID NO: 23609 - protein, 557 aa, Oryza sativa; identical to SEQ ID NO: 15872
  Clone ID: TF_OsC75595_1.pep

SEQ ID NO: 23610 - protein, 399 aa, Oryza sativa; identical to SEQ ID NO: 15919
  Clone ID: TF_OsC52071_1.pep

SEQ ID NO: 23611 - protein, 192 aa, Oryza sativa
  Clone ID: TF_OsC55485_1.pep
KDVLTLNNSLLTVANMDGETPLLTAVTNGHMSLASILLECCCTLGFSEAILQQDRNGCNALHHAIHCGHKDLALELILKEPALSKAVNKYSESPMFIAVMRDFTDVSEKLLGIPGSSHVGTYGHNALHATVRNGNAVMAKKILEGRPWLGKERTRERKTPILMTVIWDKIDVLRVLLEHDVLLGYECYEVVI

SEQ ID NO: 23612 - protein, 329 aa, Oryza sativa
  unsure (1)..(329): unsure at all Xaa locations
  Clone ID: TF_OsC24838_1.pep
ARGETALYVSAEKGHTEVVSEILKFCDLQSAGLKATNSFDAFHIAAKQGHLDVLKELLQAFPALAMTTNSVNATAARAAATQGHIDIVNLLLETDASLARIARNNGKTVLHSAARMGHVEVVTALLNKDPGIGFRTDKKGQTALHMASKGQNAEILLELLKPDLSVIHVEDNKGNRALHVATRKGNTVIVQTLISVKEIVINAVNRAGETAFAIAEKLGNEELSNILREVGGETAKEQVNPPNSAKQLKKTVSDIRHDVQSGIKQTRQTKMQFQKIKKRIQKLHIGGLNNAINSXLVVAVLIATVAFAAIFTIPGNXSGRYGKIHMIPT

SEQ ID NO: 23613 - protein, 130 aa, Oryza sativa
  unsure (1)..(130): unsure at all Xaa locations
  Clone ID: TF_OsC308714_1.pep
MEEKGMGKQRWEKMLLQAAFDGNLRLLRKMARGLVTTGRGRGEADVLAAVADGGSGSRALHLAATEGRMDVLTYLVEDLRLDVNQTNDRGSDXLIXSAFFGRTASTRYLLDHGADPMIVGKSGSPLHAAA

SEQ ID NO: 23614 - protein, 434 aa, Oryza sativa; identical to SEQ ID NO: 15922
  Clone ID: TF_OsC115270_1.pep

SEQ ID NO: 23615 - protein, 523 aa, Oryza sativa
  Clone ID: TF_OsC1528_2374.pep
MTMEDGSCPSPVTPSEAEAGAEDYESWTLKQKIEDLVNCDPIHGIVPKNPKYKAYFEEKFQEKLSKYVRVVLPKLRPAIQKDSVKQFFQVYNCWSGFMGRGNFLLPDILTNMANENALRCARVALQGTSPLLRRRRADPNTRHRYGFAPLHMAAENFSVDMVKLLFRYGASANICTKGEYVIEGLLPLHVAVENASMHKYIEDHWAHGDHIINLIFLLCLPEMKMFLDTTRLIAKQTDNIVDEVWNYIREEKHVQAAILLLAAQKQLRGRLNNSSGKASLNGFDIVKSHIDDALNTIHLEGLNMVKEGKNGRALKRLKDKKEALLTALVLVGIVHKAGEALEGYIQTHSQVRHDEIVEHVSSILKSNGIAHSGESIDTGKLECYQHGGGMSIGKSDSQRVGYGETIEADKSSSDIGEVSKMILGKQPPKGSAIREVRDMFFPYWKSVLSRRLQLKIVPSCQLSRKDLLSAEASTKGTKSMDHPCNPIKSMGNLGSMGWPPLSSESRRMLYTVASMSRKVFKRT

SEQ ID NO: 23616 - protein, 1033 aa, Oryza sativa
  Clone ID: TF_OsC29324_1.pep
MAAAADARRFAVVPQLDIAQILKEAQQRWLRPAEICEILKNYKSFRIAPEPPNRPQSGSLFLFDRKVLRYFRKDGHNWRKKKDGKTVKEAHERLKSGSIDVLHCYYAHGEENENFQRRTYWMLEEDFMHIVLVHYLETKGGKSRTRGNNDMHQAAVMDSPLSQLPSQTIDGESSLSGQFSEYEEAESGGTGYHSFTQMQQQQNGIGPVTDASMFSSRVSASSIGNYQGQHAMGHTTNFYSSSQHDSPLVLSDPNLELANNGHESLWNGVMKPDEGTVQMTHLQPPVHPEQGMFTTEGQGVEYLTFDEVYSDGLSLKDIGAAGADVEPFWQFSSNSYLTEAIAFQLSSATADISATENSVQQNDGSLGAAIGFPFLKTQSSNLSDILKDSFKKSDSFTRWMSKELLDVEDSQIQSSSGAYWNTEEADSIIEASSREPLDQFTVAPMVLQDQLFSIVDFSPSWTYAGSKTKVLVTGRFLHANEVTERCKWSCMFGEVEIQAEISADGTLRCYSPPHKPGRVPFYVTCSNRLACSEVREFEFRPSDSQYMDAPSPLGATNKVYFQIRLDNLLSLGPDVYQATITNPSKEMIDLSKKISSLLANNDEWSKLLKLADDNEPLSHDQQDQYAENLIKEKLHVWLLHKVGDGGKGPSVLDDEGLGVLHLAAALGYDWAIRPTVTAGVNIKFRDFHGWTALHWAAFCGRERTVVALIALGAAPGALTDPHPNYPAESTPADLASANGHKGISGFLAESSLTSHLQALNLKEANMSEISGLPGIGDVTERNASQPAIGDSLGAVRNAAQAAARIYQVFRVQSFQRKQAVQYEGDKGGISDEHALSLLSMKPSKSGQLDPLHAAASRIQNKYRGWKGRKEFLLFRQRIVKIQAHVRGHQVRKHYRKIVWSVGIVEKVILRWRRRRAGLRGFRPTEGAIESSSGGTSSNLVPTRPAGDDYDFLQEGRKQTEERLQKALARVKSMVQYPEARDQYQRILNVVSKMQESQTVQEKILDESTEMDEGDFMSEFKELWDDDTPLPGYF

SEQ ID NO: 23617 - protein, 396 aa, Oryza sativa
  Clone ID: TF_OsC180174_1.pep
MASSPSAVVLQAALDGDLHLLCEMAKKLDLRGFKDMNGRNALHLAASYGHLEICKFLVEESGLDVNSGSHRGACTSMISRALGDINVLIYLLDHGGDPAIPDVGGLLSKGVPVEPLNFRVVRLYLSASEDRVHPMNVRVAQRADVSGVVNHIFSPLMMACCGHSLKCVKLLVEAGADVNGNSTNGPTPLTEAVDDSLTDVVKFLVGAGADPNIPDEQEGRIPIMVAAARGQRELVEILFPRTKPIPCLPDWNVDGIIRTMRTTRIEPQVCSPVEEQVSDAKSKGKEAFAKGDYLTAIYFYTLAMDKSPLDATLFANRSLCWLRQREGDRALLDAQQCRMLRPGWSKAWYREGAALSFMKDYKGAVDAFGEALKLDPMSDEVKNALREAIECLKRAA

SEQ ID NO: 23618 - protein, 642 aa, Oryza sativa
  unsure (1)..(642): unsure at all Xaa locations
  Clone ID: TF_OsC58329_1.pep
MASEIEVLEDTTTTMAASAAPVAPASPSPSPAAAADGEEGEGPAPAAEDDSLKNDVYTAAAYGDLEKLQRLVEGEGHPVTEPDGLGYHALQWATLNNRVAAAQYILEVVPHCASRPSVARFGWPSSSRCLLASEGFGWGFGVFTFSSLAGVLDRLHYLFSCLXHTHGADVNAVDHTGQTALHWSAVRGHIQVAELLLKEGAKVDVADLYGYQATHVAAQYGQTAFIYHIVAKWNADPDVPDNDGRSPLHWGNLEACTVLVQAGKKDDLMVKDKTGLTPAQLAADKSHRQVAFFLDNAKRVYDRGCDGNTNFGKLSKLGLAPVLWCIIVGLLATYIHSVISGQYIMDMTAPFGLFAWSGVFLATAGLVMFYKCSRKDPGYIKANIRDSQNQRDDEPLLKLELDNPALLSGNWSQLCITCKIVRPVRSKHCSTCDRCVEQFDHHCPWVSNCIGKKNKWEFFMFITLEVFAMIITGSAAIIRMVRDPASPASFIPWLSYSAFNHTGALSFFIMDLFLFFGVAVLAVVQASQIAKNITTNEMANSMRYSYLRGPGGRFRNPFDHGARKNCSEFLLNGYNEDIERLDHTSHTDEEMGMIQMTNAVSQNGEGPSHHGNGTGHSCAESHAHSKSHSQIVCVHAEAPLFI

SEQ ID NO: 23619 - protein, 711 aa, Oryza sativa
  unsure (1)..(711): unsure at all Xaa locations
  Clone ID: TF_OsC60113_1.pep
MDHHRQMQDIQLARCSSQHHGSEAAVTARGDSAGGLEMCPALYLAASKGRAEEVMALLLQPRHGGVAQGHLDQVNGTWMVPHNGREVEGPGPGAGRAVQAPWAPPSQGPPDQRHGQCNISEVSAESNTVFHVAAEQGHDELIREVYLRFKESSLLSRRNSSQDTPLHCAARAGHAGAVTAIVQLLALDSILGCKNEAGDTALHLAARNGHGAAVEALVSAAAPELSSELNAAGVSPLYLAVMSKSVTAVKAIITTCSDASPVGPNKQNALHAAVFQISEMVDLVLKWKPALSGQCDVKGSSPLHLASSDGDRSIVSAIVRAAPPSTAFLKDSDGLSAIHVAARMGHHHVVEELMSAWPDAAELRDGRGRTFLHAAAEKGHAPVISLAVKNPMLCGIMNAQDKDGNTALHLAVAAXRVPCKGLAALLSAGDNVRVNIMNNDGYTPFDLAANSSSFLSMSSDLLLETESGKKERKKRDMRTSREDTWSKISLVVTLSAYGAQSCPQRQDHLNQWRGNDTTDWIRKTSNSLAVVAVLVATVAFSATFNVPGGYGDDGKAVLQAKTAYKFFIVFDSVAMTTSVVAVILIVYGKASGSWKSFILALHFMWVSMIGMIVAFWAALVAVMRRRTINIVIYEVIINGIYVLVLSIMILTKPASWISFVKFMFSSLLPERHHRRVARQYPFAGTYSRNYSVFVVTNILAYVGAFLALSKS

SEQ ID NO: 23620 - protein, 265 aa, Oryza sativa
  Clone ID: TF_OsC20490_1.pep
MGRRHGGGGGGGGGRGRGGRGRGGGEEDDLHLHKAARSGDLAAAESLCEANPLALNSRDRLSRTPLHLAAWAGHVELVKCLCKHKADVGAAAMDDTAAIHFASQKGHVEVVRELLASGASVKAKNRKGFTALHFASQNSHLELVKYLVKKGADIAAKTKGGQTALHVAEKDDVRDFLKECEQSLKKGGELPSEKKDDSVSTIAEKPDDDKSSGEATKDEDEAGFGEKRKSDGIAAALRSPELKKAKVSLGHLISANDMEEEEEAD

SEQ ID NO: 23621 - protein, 562 aa, Oryza sativa; identical to SEQ ID NO: 15930
  Clone ID: TF_OsC354856_1.pep

SEQ ID NO: 23622 - protein, 418 aa, Oryza sativa
  unsure (1)..(418): unsure at all Xaa locations
  Clone ID: TF_OsC13066_3.pep
PRVRFLCGHLEFCKDVLSLPQDPTVKKKLLTTVNVMNETPLLTAITSGHVTLAAFLLKYCHEQGFSEVILKQDKHKCNALHHAICNGHKDLALELIATQPALSKDVNKYGESPMYIALMMRDSKFTDIFEKLLGIDGSSHSGTYGYNALHAAIRNGNPDIAKRIXSLNAQIWPQKKIRDGNTPIQLAVPWGKDRHATSVLLKHDRSQGYVINRKNGYPLLLSAAHRGHVAVAREIIKYCPDAPYCKKDGWTCLHKAVKSGNMEFVEFILGEPRLQKLVNMRSSKGKTALHYAIQKCDPKIVAALLDKKIDLTILGSDGNAAAWELRDALDSAKTLNWNEVSMLMIKADPPNAKSVYNLHEEAKEKLINASRKDARSLTQTYTSNTSLVAILIATITFAAAFTLPGGYSSDAGSQGLPI

SEQ ID NO: 23623 - protein, 516 aa, Oryza sativa
  unsure (1)..(516): unsure at all Xaa locations
  Clone ID: TF_OsC13066_1.pep
MAACAASTATIDWELLEAAISGDTRSMKMKYMDSHDPTILLGKNPQGNTCLHISSMCGHLEFCKDVLSLPQDPTVKKKLLTTVNVMNETPLLTAITSGHVTLAAFLLKYCHEQGFSEVILKQDKHKCNALHHAICNGHKDLALELIATQPALSKDVNKYGESPMYIALMMRDSKFTDIFEKLLGIDGSSHSGTYGYNALHAAIRNGNPDIAKRIIVERPNLATEENKDGNTPIQLAMLHIAKKMGGHVFIKLSNQKLVNMRSSKGKTALHYAIQKCDPKIVAALLDKKIDLTILGSDGNAAAWEXRDALDSAKTLNWNEVSMLMIKADPPNAKSVYNLHEEAKEKLINASRKDARSLTQTYTSNTSLVAILIATITFAAAFTLPGGYSSDAGSQGLPIMARNVAFKAFLISDTLAMCASLAVAFICIIARWEDLDFLLYYRSFTKKLMWFAYMATTTAFATGLYTVLAPRLLWLAVGICSVAVLVPILTKVLGEWPVLKLRIRLGQAFKSEFLDMV

SEQ ID NO: 23624 - protein, 259 aa, Oryza sativa; identical to SEQ ID NO: 15933
  Clone ID: TF_OsC1713_4802.pep

SEQ ID NO: 23625 - protein, 657 aa, Oryza sativa; identical to SEQ ID NO: 15913
  Clone ID: TF_OsC2195_1.pep

SEQ ID NO: 23626 - protein, 355 aa, Oryza sativa
  Clone ID: TF_OsC82589_1.pep
METSRRLWPCWSLTPALRALPPRPRAARAPPPPPDSDSGGAGSPLHLAALHGHAECVQLLLDLGASVSEVTINDGSTIDLIGSGSTPLHYAACGGSAVCCQLLVAAGANMRAQNTNGLTPLMVARSWHKSSVEGILTKRPEVPVRILPSSYLSLPLMSIVKIARECGWRKTSVSSVCHDPCAICLDTECTVSAEGCGHEFCTKCALYLCATASSSTSIRGVPGSIPCPLCRHTIVSFVRLTSTTPIKELPWTNKSLALCAAGASTGSKYAGPAAITSSKYAGSLHRRSEMRSLRSSSVDLGCSSFRTASSGKLSSIKLNCTGADETMPCLVNCFRPDVQRSSSYRERIRRYSQFS

SEQ ID NO: 23627 - protein, 123 aa, Oryza sativa
  Clone ID: TF_OsC763_1.pep
WYCILLIVCGGAVILIKALEDGTDMDEEDAEGRRALHFACGYGELKCAEILLEAGAAVNALDKNKNTPLHYAAGYGRKECVDLLLKHGAAVTPQNLDGKTPIEVAKLNNQDEVLKVLEMDAFL

SEQ ID NO: 23628 - protein, 426 aa, Oryza sativa; identical to SEQ ID NO: 15914
  Clone ID: TF_OsC12078_1.pep

SEQ ID NO: 23629 - protein, 444 aa, Oryza sativa; identical to SEQ ID NO: 15915
  Clone ID: TF_OsC306767_1.pep

SEQ ID NO: 23630 - protein, 722 aa, Oryza sativa; identical to SEQ ID NO: 15917
  Clone ID: TF_OsC17869_1.pep

SEQ ID NO: 23631 - protein, 1132 aa, Oryza sativa; identical to SEQ ID NO: 15942
  Clone ID: TF_OsC1991_2.pep

SEQ ID NO: 23632 - protein, 166 aa, Oryza sativa; identical to SEQ ID NO: 15943
  Clone ID: TF_OsC20391_1.pep

SEQ ID NO: 23633 - protein, 368 aa, Oryza sativa; identical to SEQ ID NO: 15949
  Clone ID: TF_OsC341610_1.pep

SEQ ID NO: 23634 - protein, 444 aa, Oryza sativa
  Clone ID: TF_OsC207789_1.pep
MDDLDMALPQAFELLLGRDRDAWPRGAAFLVAAHYGDVREMKRIAKELDEDGKGIEATVANTSFLGMNALHALGWLGKVPAYRYLVEEVKMDVNKADTAQGFTPLEHAVYHGRLPATRYLLDHGADVHQIRSTGNVSLLHSAAVKGFSEVAKFLLSRGVNVDAESEMGTPLALAAFRGYDSTVKVLLEHNADPNKVTNKALGAPLDLALTSSSVSCVKLLVQAGAEVKVEGPNNHLVRAAEKGLTEAIKCMLEAGANPNVPDRLGRMPIELAAEYGTREDVEILFPFSSAIPTVANWSVDGIINHVQSEIKQLEILFTQDDNFIKKRRSDMKQQGDAAFKKQDYLNASVFYTQALKVDPFDGTLFSNRSLCWLRMGDGERALDDANACEKLRPKWAKSYYRQGAALMFLKEYERAHRALGRALELDPESEEIENLYWESMELCG

SEQ ID NO: 23635 - protein, 847 aa, Oryza sativa
  unsure (1)..(847): unsure at all Xaa locations
  Clone ID: TF_OsC16902_1.pep
MGRGIGSKRRVEDDDGENMPGRKKKEEEEEEEDDDGEEEYEVDVVRDRIGSSRGSRLALFGSDLRLGRFRPRRRRVAPVDGDDGIFQDFVIDPDNKWYRLWTRFILVWAVYSSFFTPLEFGFFRGLPRNLFFLDIAGQIAFLIDIVLRFLVAYRDPDTYRMVHNPTSIALRYCKSSFIFDLLGCFPWDAIYKACGSKEEVRYLLWIRLTRAMKVTEFFRSMEKDIRINYLFTRIVKLIVVELYCTHTAACIFYYLATTLPESMEGYTWIGSLQLGDYSYSHFREIDLTKRYMTSLYFAIVTMATVGYGDIHAVNVREMIFIMIYVSFDMILGAYLIGNMTALIVKGSRTERFRDKMKEVIRYMNRNKLGKDIREQIKGHLRLQYESSYTEASVLQDIPVSIRAKISQTLYKPYIESIPLFKGCSAEFIQQIVIRLQEEFFLPGEVILEQGSAVDQLYFVCHGALEGVGIGEDGQEETILMLEPESSFGEIAVLCNIPQPFTVRVCELCRLLRLDKQSFTNILEIFFVDGRRILSNLSESSEYGSRIKQLESDITFHIGKQEAELTLRVNNAAFYGDMHQLKSLIRAGADPKNTDYDGRSPLHLAACKGFEDVVQFLLHEGVDIDLSDKFGNTPLLEAVKQGHDRVATLLFSKGAKLSLENAGSHLCTAVARGDTDFVRRALAYGGDPNARDYDHRAPLHIAAAEGLYLMAKLLVDAGASVFATDRWGTTPLDEGRRCGSRTMVQLLEAAKSGELSRYPERGEEVRDKMHPRRCSGVPXPHPWDGGERRREGVVLGAGEAXLAGSGEGLRLLGEDGARVLDVDMVHDGQKLYLVVGGGGDDGGTEARQ

SEQ ID NO: 23636 - protein, 682 aa, Oryza sativa
  Clone ID: TF_OsC1434_2.pep
MDRWACPRHSPPTIHTYNILIDCYRRVHRPDLGLAIVGRLLKNGLGPDDFSYSLIYGFVKDGEVDKAHCLFLEMMEQGVLPKILICNSIIKELCKMKEMDKAESIVQKMVDSGIAPDLFTYSLIIDGLCKSKAMDKAERVLEQMVEAGTRPNSITYNSLIHGYSISGMWNESVRVFKQMSSCGVIPTVDNCNSFIHALFKHGRTNEAKCIFDSMVLKGPKPDIISYSTMLHGYATATDSCLADVHNIFNLMLTKGIAPNKHVFNILINAYARCGMMDKAMLIFEDMQNKGMIPDTVTFATVISSLCRIGRLDDALHKFNHMVDIGVPPSEAVYGCLIQGCCNHGELVKAKELISEMMNKDIPPPGVKYFSSIINNLCKEGRVAEGKDIMDMMVQTGQRPNVVTFNSLMEGYCLVGNMEEAFALLDAMASIGIEPNCYIYGTLVDGYCKNGRIDDALTVFRDMLHKGVKPTSVLYSIILHGLFQARRTTAAKKMFHEMIESGTTVSIHTYGVVLGGLCRNNCTDEANMLLEKLFAMNVKFDIITFNIVISAMFKVGRRQEAKELFDAISTYGLVPNIQTYSMMITNLIKEESYEEADNLFISVEKSGHASDSRLLNHIVRMLLNKAEVAKASNYLSIIGENNLTLEASTISLLASLFSREGKYREHIKLLPAKYQFFEGAWQD

SEQ ID NO: 23637 - protein, 395 aa, Oryza sativa; identical to SEQ ID NO: 15950
  Clone ID: TF_OsC216950_1.pep

SEQ ID NO: 23638 - protein, 1026 aa, Oryza sativa; identical to SEQ ID NO: 15953
  Clone ID: TF_OsC40453_2.pep

SEQ ID NO: 23639 - protein, 732 aa, Oryza sativa; identical to SEQ ID NO: 15982
  Clone ID: TF_OsC12642_1.pep

SEQ ID NO: 23640 - protein, 387 aa, Oryza sativa; identical to SEQ ID NO: 15958
  Clone ID: TF_OsC341609_1.pep

SEQ ID NO: 23641 - protein, 126 aa, Oryza sativa
  Clone ID: TF_OsC68618_1.pep
KGRSVIHHTASVGDVEGLKKALEEGVDKDEEDSGGRRGLHFACGYGELKCAQVLLEAGAAVDAVDKNKNTALHYAAGYGRKDCVALLLDHGAAVTVQNLDGKTAIDVAKLNNQEEVLKLLEKHAFV

SEQ ID NO: 23642 - protein, 797 aa, Oryza sativa
  unsure (1)..(797): unsure at all Xaa locations
  Clone ID: TF_OsC413415_1.pep
MSRRRAAAVAAAAREEEEASPAQRLVEAALRGDVVTMEACLAAAAAAAAADDDTDDGVPAASRVGVARLRVRCAEVALREEAAGEVIVESRELKTDVSPLFAAAHAGHAEVVRTLLSGGGGKVAGVSSCKKVYCSVFEVAGADVNQKLFLGYATTAAAREGNIHILEMLLQAGVTREACEDSLSEAALFAEAEAVRLLVCSEMIQPEAAAHALVTASSRGFDDVVVILLQNGVDVNSMARVLLRSVKPALHANVNCTPLVAAVMSRQISTVKLLIEEGSYLDCLVQVGSWCWDSATGEELRVGACLGEKYNAIWCAVEYYECSGEILKLLLDKAPWLLETPRKGRNLLCHAILCQNPNAVSVLLNAGANPRFPIMMTNGTHVSYPIHFAARLGHAPVLKQLMLDGANINAQTSTGDTPLMVSARCGHSDCFLELIKSGADLGIVNNAGDTAIMLAKKSSFSSTIIDILSRALSCGGCITSSDITVFSPLHFFAASDSAEALLMTLHYSAADLNRPDGSGLTPVMVAAESGHADIFRLLVMAGADIAATSAEGKSAMSIIRSRAPETRDRFEQILLQASLADAIAGQQPSFRPLHYAARIGDTSSLTQLLKMGHDPNAMDEDGYTPLMHAAAAGKLEACRALVSRGGAADAGSETALSVARRSGRSNKATEEWLLDHVARAXVLAGEELTKHTRGGRGPPHRKAVRMMRSGVLTWGATRRRNVACREARAGPSAAFRRNRRIIRTGSEEQLILMVETVTGREIHFEATSASSVELWVRGINLIVQDCAWSRPDEAEQA

SEQ ID NO: 23643 - protein, 340 aa, Oryza sativa
  unsure (1)..(340): unsure at all Xaa locations
  Clone ID: TF_OsC359_7318.pep
TPLLSRRLANDIIIPDPAPXGWMCYTFLDKYDQLEPIFIKDSARCFLRLFKNWKGYTMSWNLTITAQTLTCMVSFNSLRCAKVVLEGRAPELLGVHANPNCVTKYGYFPLHEAAERFSIEMIKLLLRHGASANVRTVGDDVIDGLLLLHIAIENTCLHKYLEDNLSPGQDHLDYIYKLFHLLCLPEMKIFLDTTRLLAGKTNNLLEELWNYIENGKLIQTAILLLAAQEQIRGRKKNGYDIMYKRILRLSFALRWGKVSNGMAQKLREEKRALIDCTGLLVDVISQAGEPLSAYVQAHSEAPHVEVLEHVSTILKEYGFYPTAEVIDTMNLYFSLYCFTQ

SEQ ID NO: 23644 - protein, 630 aa, Oryza sativa; identical to SEQ ID NO: 15956
  Clone ID: TF_OsC349299_1.pep

SEQ ID NO: 23645 - protein, 546 aa, Oryza sativa; identical to SEQ ID NO: 15940
  Clone ID: TF_OsC298449_1.pep

SEQ ID NO: 23646 - protein, 466 aa, Oryza sativa; identical to SEQ ID NO: 15941
  Clone ID: TF_OsC309277_1.pep

SEQ ID NO: 23647 - protein, 461 aa, Oryza sativa
  unsure (1)..(461): unsure at all Xaa locations
  Clone ID: TF_OsC26711_1.pep
MGNSLGCSASGERLVSAARDGDAVEARMLLELSPALARYSTFGGLNSPLHFAAAKGHLDIVTLLLEKGADVNVRNYCGQVFHFRTAQAWRWTRGNSRILTGLAAQACSGAEEAATGRSSVMQRSMLDSFFFLVVNISGFIAAQXWEMSSGYFFCLPSCVSFPYXAKIFLIGEVNPAAFGCCSFYCIVAFWLQMCVVPVILDSPKITSYSSLXVCKLQELVGICFLSKLNIARPDYVLCRIAIISETVKLGREFGLLHTVASVDDSDLCAVCLERSCSVAAEGCCHEFCIKCALYLCSTSNTRVEFTGPPGSIPCPLCRNGIMSFTKLPSTPTEGLKSSSALTFCNPCMLNTRSVDSPATISKAEIRRNRVAAVSSELVCPLTCSPFPSSALPTCRCSDDDPCDAIETQDGSEVQSPQPSHCASMEMDKREQQDLDRTSCSGMFWSRRSCHREEQCNAEINA

SEQ ID NO: 23648 - protein, 252 aa, Oryza sativa
  Clone ID: TF_OsC45222_1.pep
MSATMDIDGAAASAAAGGGRHSEKELFSAAESGDAAAFSSLSPADLAAALALRDEDGRSLLHVAAASGHAQVVRVLAAMGGDAAASVVNGKDEEGWAPIHTAASSGKAEIISILLDQGANVDLTTDAGRTALHYAASKGRLNIAETLIAHSANVNKKDKFGCTPLHRAASTGNAELCEFLIEEGADVDAVDKTGQTPLMHAVISEDKAVALLLVRHGADVAIEDKEGYTVLGRASDSFRPALIDAAKAMLEG

SEQ ID NO: 23649 - protein, 308 aa, Oryza sativa; identical to SEQ ID NO: 15968
  Clone ID: TF_OsC35821_1.pep

SEQ ID NO: 23650 - protein, 191 aa, Oryza sativa
  Clone ID: TF_OsC1528_2259.pep
MHTPSMDQPAASNGDEAPRMEMCPSLYRAARSGRAEEVMALLLQQRPGDGAAAHRQVAGIIQHRQCNVLEVTAERNTILHVAAEKGHGELIQELYHRFIRDNSLLSRRNSAMDTPLHCAARAGHAGTVTILVNLAQDCEENILGCQNAAGDTALHMAARHGHGATVEALVVARAKATVLVSMKGSDHVMTT

SEQ ID NO: 23651 - protein, 210 aa, Oryza sativa
  Clone ID: TF_OsC97704_1.pep
MTTQQASGADAESGMDLDGVTTEGNTALHVVATCGDGPGYLRSAGVIYSRSQHLMLVQNNNGDTPLHCAVRAGHSKMVDHLIDLVETKDNSPSSARLEELLRKENCRKETAFHDAVCIGNKDIITNLLKYYSELAGFLMDATGTSPLYLAVLHQQVDIAKLLHQMTDGNLSYSGPNRQNALHAAVLQDQGAYAIYICCFEFHSSYIPYLF

SEQ ID NO: 23652 - protein, 329 aa, Oryza sativa; identical to SEQ ID NO: 15972
  Clone ID: TF_OsC763_2.pep

SEQ ID NO: 23653 - protein, 930 aa, Oryza sativa
  unsure (1)..(930): unsure at all Xaa locations
  Clone ID: TF_OsC35544_2.pep
MPIKRLEIEKVTAQDAVLAFKNDGIGLLHAAACQGQLNVCKFLVEEWGGDVNMAGAQGLTPVMAAAESDAVPILKGXLDHGGDVTNADVIGGTVIHHPAETSXWMETELSLSKAIPVKIDSDLGTPLFHAANDDKDKTPNILMYHNAAXKLGIGVLHAAACQCHLIVCKFLVEELGGDVNIAGKEDITPFMAAAEFGDIPTLEYFRNHSGDVTKGDVRVXNIPERCGCGIISHAKVKDIRPMTIDHGPTTVLYTNRSICRLLMGDGEDAQSDGNRSRMMRPNWEKACYRWSAGHMLLKEYKQLWDALMDAQKLDPGSVEIEKEQREYDIQESKDVVESKVGLYDKPTASYGVKPPNVSSVMGKTQIDTCKDVVFLKEEVEKRMRLDVSGSFFVYQMSTLEAGIPLSSYAGKTWNGNIDMDGLIVVHGRVRIKKKPWKGLNSSKMNSDCTKLTSMIREMFVKKNVHPPYLKHLLGKLEALAVDVFTVRQQLAFDYHISLIPSLNRVNLVYQIKRCYDGWDDREKMYFRFVADNCTVPEDWCNTLMSKHLFRLVILEGQKRNIIYGSNGMSAFHLVRNYNTHAPEHSWIHVFVDSKIEHYQWFQCDSGIELMVPKYLGDFLAEAVFKFIEDEFDLTHVKPNITKCNSGIPTLLRHNFHEGSECNSHDKLSSPFDGMGQKVMPSETFDRSVVYVAIIYGEALDRLASSSAMCSNGDFSVCSQVTRINEFMDRPTCISKCGKSDHDVKTHGLSLILHINAVLALNKHGIGVLHAAACQGHLNVCKFLVEELGGDVNIAGKEDITPFMAAAESGDVPTVEYFLDHSGDVTKADVRGCTVLHHAAGTDLWPISFIAGCCKSNVIVNNGAGSPLMSSLIYRSLKCMKLLIKAGADVNGKGTVVTPLMLAASQGGYTNFIQFLLKAGANPNIPDDVCF

SEQ ID NO: 23654 - protein, 416 aa, Oryza sativa
  Clone ID: TF_OsC60712_1.pep
MGNSLGCVGLGERLAAAAKDGDAAEAQRLLAANPGLARCTTFGNLNSPLHVAAAKGHHEIIYCNNMLNDQITDEIAALLLENGADVNARNIYGQVWRVENLSGRTALHMAAAGGHVKCVRLLVADAAGDRDGYVNKAANGGVTALHLAALHGHVECVHLLIDERASLAAQTLPCAAPPMASIGAGSTPLHYAACGGEVKCCQILVSRGADRTAINCNGIVVVRWIPIDAARIWGCNWLEHVLSPKSHLPCTGTPPSGYLSQPLPSLIAIAREQGLNLSSEVSDGFDEGADACAVCLERPCTVAAEGCDHELCVKCAMDLCSVIKSYDSAGIAGEIPCPLCRTGIASFRTTAAPPPPSLAGSPARRSRRNNSGGGGGEHEASNSGGSEKGYGSIDPDAGAVVPLYYAPPFAPSAILT

SEQ ID NO: 23655 - protein, 671 aa, Oryza sativa
  Clone ID: TF_OsC339703_1.pep
MDFGPCNETLDTELLHVLTSGDEVRMADLLGRERRGHGHSLSQVAIRVDDDDDGRAPAGASRLLGVTTGNGNTALHVAATRGHAALAALVCATAPALAATRNRFLDTPLHCAAKSGHRDVAACLLSEMLRAGGAASAALPLRRATNCLGATALHEAVRNGHAGVVALLMAEAPELASVANDGGVSPLYLAATVGSVDIVRALLHPLPDGTPSPASAAGPDGRTALHSAATTSKEPSLALVCDIQGSFPLHVAAVMGSVRIVVELIQKCPNNYNDLVDDRGRNFLHCAVEHNKESIVRYICRDDRFGILMNAMDNEGNTPLHLAAEYGHPRMVSLLLETMSVDVAITNRDGLTAADLAYRHLQPGLHYFLNPRAVVKNLFYCTRAPVTLEGDHARTGIPSAMEDADAPKDSGGVTSTGTVASVLIATVTFAAALTVPGGYVADDHPNAGTAASAGRFAFRAFAVSDTMAFLCSIVGTCLLVVGEAREVRPSRGRLRAYQGSAWALVTAGAQFMVAAFAFGLQVALGGGADSRWLVVFVHALCSASVLLCFPGIWAPFCLGKACVDLEPATRAWRSPKCAAASARKEACHAGTRRSYNWRFSFFQRFRSASTWLALGLLGHGRRPPLPALILAMGATAGSLPPNQRLPIANASLPQLPSPAQQQLHGGSLVDF

SEQ ID NO: 23656 - protein, 785 aa, Oryza sativa; identical to SEQ ID NO: 15976
  Clone ID: TF_OsC264249_1.pep

SEQ ID NO: 23657 - protein, 695 aa, Oryza sativa; identical to SEQ ID NO: 15977
  Clone ID: TF_OsC1713_3839.pep

SEQ ID NO: 23658 - protein, 860 aa, Oryza sativa
  unsure (1)..(860): unsure at all Xaa locations
  Clone ID: TF_OsC658_1.pep
LPSLGARSNRRIKLRRFIISPYDRRYRIWETFLIVLVVYSAWVSPFEFGFIPKPTGALATADNVVNAFFAVDIILTFFVAYLDKMSYMLEDDPKKIAWRYSTTWLVLDVASTIPSEFARRILPSKLRSYGFFNMLRLWRLRRVSSLFSRLEKDRHFNYFWVRCAKLICVTLFAVHCAACFYYLLADRYPVPTSTWIGNYMADFHERSLWIRYVTSVYWSITTLTTVGYGDLHAENTREMIFNIFYMLFNLGLTAYLIGNMTNLVVHGTSRTRNYRDTIQAATSFGVRNQLPPRLQDQMISHISLKYRTDSEGLQQQEILDSLPKAIKSSISQYLFFHLVQNVYLFQGVSNDLIFQLVSETNAXYFPPREDVILQNEAPTDFYILVSGSVELVEQQNGADQVIQVATSGEVVGEIGVLCYRPQLFTVRTRSLCQLLRLNRTAFLSIVQSNVGDGTIIMNNLIQFLKEQKENSVMAGVVKEIESMLARGNLDLPITLCFAVTRGDDFLLHQLLKRGMDPNESDNDGHTALHIAASKGNEQCVRLLLEYGADPNARDSEGKVPLWEALCEKHAAVVQLLVEGGADLSSGDTGLYACIAVEESDTELLNDIIHYGGDVNRARRDGTTALHRAVCDGNVQMAELLLEHGADIDKQDGNGWTPRALAEQQGHDDIQLLFRSRKAATASGHHHVPSSTTTRVAPAAAAASLIGRFNSEPMMKNMIHEDADLPSRVLPEKLRRKRVTFQNSLFGVISSSQAQRETDHPLSRGGLAATGSPNPSSGSRNAVIRVTISCPEKGNTAGKLVLLPQTLDMLLELGAKKFDFAPTKVLTVEGAEVDEVELIRDGDHLVLVSNEWDAEKMKGKS

SEQ ID NO: 23659 - protein, 943 aa, Oryza sativa; identical to SEQ ID NO: 15978
  Clone ID: TF_OsC658_2.pep

SEQ ID NO: 23660 - protein, 415 aa, Oryza sativa; identical to SEQ ID NO: 15983
  Clone ID: TF_OsC254554_1.pep

SEQ ID NO: 23661 - protein, 820 aa, Oryza sativa
  Clone ID: TF_OsC5083_1.pep
MEKPASCCCYFPLRWESTGDQWWYASPIDWAAADGHYDIVRQLLHLDPNLLIKLTSLRRIRRLEALWDDDARFAGAAGHRAGVARSLLLECECSKNGGAAAAAENTLLRAGYGGWLLYSAASAGDMAFVQELMERDPLLVFGEGEYGVTDMFYAAARGGNAEVFRLLLDHAMSPRCSTNCPNGGEGARGGGGGRSSVFRLEMMSRAVHAAARGGSVEMLRELIERRSDVSEYLDFRGSTVLHAAAGRGQLEVRHLLLGHCLLHYFCKMHHSELLFVPICMDDKVVKYLMATFDIVDSTDNQGNTALHVAAYRGHLPVVEALVAASPSTISAVNRAGDTFLHSAIAGFRTPGFRRLDRQMELMRHLIRGRTSNIQKIINLKNDAGLTVLHMAVVGCVHPDLVELLMTTPSIDLNAEDANGMTPLALLKQQLRSSTSDKLIRQIVSAGGVLNSTVLRTRSAIVSQIKMQGGIASSPGTTFKISDAEIFLYSGIGTAESRRPSSCSSNGKCDHAHHGDAKCGNAENHGSSEKRLSSASRAKDRLKLMLKWPDAEIFLYSGIGTAESRRPSSCSSNGKCDHAHHGDAKCGNAENHGSSEKRLSSASRAKDRLKLMLKWPRQKMSRGHKKSDDGDAMDSIKKLSEQAPPPPQSGKMKGTKTTALNNKRTLAVKTSTPSSATKKKLNSKLILGEPSSSGSSVNDDASAEMPARRHGCGNGRLINICFGAQGLTVEDSASGQQTSKMFKQQYNDDDDDAMGEPSSSGSSVNDDASAEIPARRARVRQREADQHLLRRAGPHRGGLGQRAADQQDVQAAVPQGVLTPE

SEQ ID NO: 23662 - protein, 206 aa, Oryza sativa
  unsure (1)..(206): unsure at all Xaa locations
  Clone ID: TF_OsC26711_2.pep
MGNSLGCSASGERLVSAARDGDAVEARMLLELSPALARYSTFGGLNSPLHFAAAKGHLDIVTLLLEKGADVNVRNYCGQTALMHACRHGHWEVVQMLLLFRCNVTRADYLSGRTALHFAAHDGLVRCVRLLLADFVPSAPLEDGASSTVDGGXECQTNSGSSPCSSLGLKFNESARLRYINXPAVGGVTALHMAALNGHFDCMQLV

SEQ ID NO: 23663 - protein, 1601 aa, Oryza sativa
  Clone ID: TF_OsC359_8351.pep
MGSVSGIDDLVFPPGQTFRFGSLDFVTNNFGKISLLDSESNQSGENRLSVPFGFPNAAESYFKTISTESASNHSAEIASSPTTPDQDDGAYPPVLMKLPDDLVAVSIATASSSRRPRRKSASTLISPSFREVGVILQPLGTVSTDQLDGDYSSPTVDSRPTNIVEYDEFSSRYHDPDLDDFDGSLDDNYTPLYFGVFMANNETEEQRQARETEARRETERRRLEEEHQAQEQERLRREQQERERTAKEAEDRRQRALEAGRRARDLIGQQDVEGTPVFRTPQQNAVAAITLLDTLLNQNELNQSDHVVNILNQTKTMIAASVPVNSESVHTPTGSRVPHFRSHDYRHPSLSITGAGSNRRSRGHDERSIHSPPDQYRERRVERPRSPPRRRPVDLRDTIIQRRAARGHHHSPNRHDDDLDGVAAFTDDLRRVDWPAGFKPTGIEKYDAGGDNKAMANYLPVALADSARSWLHGLPRGTIGSWAELSDHFIANFQGTFERPGTQYDLYNVIQKSGESLRDYIRRFSEQRNKISDITDDVIIAAFTKGIRHEELVGKFGRKPPRTVKLMFEKANEYAKAEDAVTASKQSGPSWKQNKGTPATGGGGSNNHKDRKRKPAELVATASHSSRQRSRVNTFDKIMNSQCPHHPNSNHVAKDCFVYKQFADQYTKTARKNSDEEQSTSRKKDDGDTPAGFQDHRKELNHIFGGPLAYESKRKQKLTEREINAVQPDTPQYLRWSEIAIKFDRSDHPDRVVHPGRYPLVLDPVVRNVKLRRTLIDGGSALNILFAKTLDDMQIPRSELKPSNAPFHGVIPGLSATPLGQITLPVTFGTRENFRTENISFEVADFETAYHAILGRPALAKFMAVPHYTYMMMKMPGPRGVLSLRSDIKQAVTCDKESCDMAQTHEMASARENNKDIFAWKPSDMPGIPREVIEHSLHVKEDAKPIKQRLRRFAQDRKDAIKEELTKLLAAGFIKEVLHPDWLANPVLVRKKTGQWRMCVDYTDLNKSCPKDPFGLPRIDQVVDSTAGCELLSFLDCYSGYHQIRLKESDCLKTSFITPFGAYCYVTMPFGLKNAGATYQRMIQRCFSTQIGRNVEAYVDDVVVKTKQKDDLILDLEETFASIRAFRMKLNPEKCTFGVPSGKLLGFMVSHRGIQANPEKVTAILNMKPPSTQKDVQKPTGCMAALSRFVSRLGERGMPFFKLLKKTDNFQWGPEAQKAFEDFKKLLTEPPVLASPHPQEPLLLYVSATSQVVSTVLVVEREEEGHVQKVQRPIYFVSEVLADSKTRYPQVQKLLYGILITTRKLSHYFQGHSVTVVTSFPLGDILHNREANGRIAKWALELMSLDISFKPRISIKSQALADFVAEWTECQEDTPAENMEHWTMHFDGSKRLSGTGAGVVLISPTGERLSYVLWIHFSASHNVAEYEALLHGLRIAISLGIKRLIVRGDSQLVVNQVMKEWSCIDDNMMAYRQEVRKLEDKFEGLELSHVLRHNNEAADRLANFGSKRETAPSDVFVEHLYTPTVPHRDTTQDADTHDVAMVEADWREPFIRFLTSQELPCHAQKFPNRIPSRMCIKTPVQDQPGYTNDNVDIQIHVLQTL

SEQ ID NO: 23664 - protein, 345 aa, Oryza sativa
  unsure (1)..(345): unsure at all Xaa locations
  Clone ID: TF_OsC359_7958.pep
GYGGGGGGGVGVCERERERGGAQRRGDWGAPFFSSTADPEKERDWVGDWVVGGEMARGLDTGQGEAAVVAAVEGSGFGHRALHMAASGGSVDVLRYLVEDLCLGVNQSCFSXAGQTPLFLSSIHGRAAATRYLLDHGSNPAIDKIVLPLHGAAVKGHCEIVELFLSKGVDVDLYSIAGTPLLAAAISGQHSTMKILLEHHADPNRVFNLDGTPLIMSIVSGSLECVKLLIKVGADMNFRDSNGVTCVMVAANHGSSVIMKCLLDAGANPNIPDEQFNTTPIEVAANHGRRDIVEMLFPLTSPISTLSDWSIDGIISHVENFGLKPRVFVPLSAHLQLHIIVYHHY

SEQ ID NO: 23665 - protein, 1050 aa, Oryza sativa
  Clone ID: TF_OsC134_92.pep
MVSPTLFLPVHWCRLPAATRRVEFNTRSGTFPHMPRRRHPLGADEDRAWRGHHDAYADGQAIVRWEAQRKRDGLRLLHQAHGLLLAMALLAVALLAAALHADAAPASAAPGSSFPDAYGDRARAAQLPPRKQQPQVAYALRRASATSSAHLHGATSRSFTGVATEDLVARHGGVGEAGLREENGDRSSVEASGGGHWPTIVKLASSIGTVVPVALSIVPYFYQVYTGNFERTIEVYGAPAMLAGSINSIIWLTYSIMASKKDLNLALILMHALLCMSTFTYLMCICACKRATKEGSVPKRSQKVATGFDLILSCITNLVTFIITFHDHPEHTTSLITSGVGFVLNVVEIVLLVIVTIMVRGLLPDFAMLFVEVIQRTMMRIERDHYIQILLQASGIAGQEPDASPSIRGRKRGGSVPLLVYYRCAAVLDVDTARAQAGETPLLLVATFGHTARRGGRPTYLLERAAGPSTPDPDVRRRHHNAAAASCLALQAPSKQAMSPMAMPAANLPGAPRRVVSESAARRRAGLGMGCRTRENGLHNCIVVYSFVSGENVTNGSSSSEMNVLCPSSSAATPPPPAPAAGAPGVGVAVGGEAREEERRRQCYYYRCAGALLRAAVLGDLHHLARMAAEVDAAAPGGGEGAGGVRSRCGRGALHLAAANGRTHVCRFLLERLGLPVDALSASGAPPSRPAAAARSSHVSSMLAERLISCFVFDAAAHAGETPLLLAATFGHTSTAAYLLDRGADPSTPDPNGGDTPLHWAAYNGDRELAKLLLLRGADVGAANPRGTALHVAAARGHAAVVSVLLNHGADVRGRAQQDCQYRLHTVGFFTFGGIIGMHEVAHSACSRTGSIGFIKCLVESGADPNIPDELDRLPIEIAAIHAEREVIEVLLPLTHQVPTLLDWSVGGIIRYVKYPAYKEWARNASCKRKDELKLQGNSSFNNEDYDAAILLYSMVTTFAHSRFFMLMFGCKCFFSSKGAKYCFAMKFDNTDAKLYSNRSACWLNLGIGDEALSDAQICSKMQPDWAKGYYRQGMAFSLLQVTIMYHPCS

SEQ ID NO: 23666 - protein, 245 aa, Oryza sativa
  Clone ID: TF_OsC22948_1.pep
VRIPGSTTRPAASAASGTSVPEQAQLQLYGLYKIATEGPCTAPQPSALKLKARAKWNAWHKLGAMPTEEAMQKYITVVDELFPNWSMGSSTKRKDEDTTVSASSSKGPMGPVFSSLMYEEEDQGNDSELGDIHVSAREGAIDDIAKHLAAGVEVNMRDSEGRTPLHWAVDRGHLNSVEILVNANADVNAQDNEGQTALHYAVLCEREDIAELLVKHHADVQIKDEDGNTVRELCPSSWSFMNLAN

SEQ ID NO: 23667 - protein, 203 aa, Oryza sativa; identical to SEQ ID NO: 15997
  Clone ID: TF_OsC35544_4.pep

SEQ ID NO: 23668 - protein, 1484 aa, Oryza sativa
  Clone ID: TF_OsC9301_1.pep
MDRYAGSVQTEMRQNGGRLTLEQILRYGADIARGVAELHAAGIVCMSIKPSNILLDTNGHAVVSDYGLSAILKNLTSRRVSDDSNMVGLDATLLSPNYTAPEAWVPLKKSMNLFWDSANGILPESDAWSFGCTLVEMCTGAVPWAGLSAEEICKSVVKERKPPPQYSRVVGVGLPGELWKMIGDCLQFKPSRRPSFQDMLKTFLRHLLDIPRSPPASPENDFTNASMPNGTDVPPASVLDMVQDNPNALHHLVCEGDAAGVRNLLAEAASDGNGRLIRSLLEAQNADGYTALHLACRRGSAEIVEAIVAYQENVDLLDKNENPPIIFAMAAGSPQCVRALVRRSSDVNSRLREGLGPTLAHVCAHHGQPECMRELLMAGADPNAIDGEGESILHIAVAKRYTDCAIVLLENGGCRSMGIPNSVNKTPLHLCIKTWNADVVKRWVEVASEEEIAEAIDVPSPVGTALCMAAALKKEHEKEGRELVRVLLSAGADPTAQDDPHCRTALHTAAMINDAELVKIILEAGVDVNIRNAQNTTPLLVALNRGANSCVGLLLAAGANCNLQDDDGDNAFHIAADAAKMIRENLSWIVQMLQQPSPAVDVRNHRQVYDVSGVKLNLLQYNVMQSKRGWTLRDFLERLPREWISEELMETLEEKGVHLTPTIYEFADWVKFRRTVTEPAFGWQAHARFRSVLIMIVLKVYTDVLDVVKNDGILVVPKKENDARCKCCSSAYCKKANFKNLIIGATVLIFMSMLMRIPSINILTEDLWRMSHGSNNKFTHLSRFGWRGQSRDSIGTVLCVDDDGILRVGFPGASRGWRADPAEIVRVEEYKVGNWVRIRPSLTVAVHGMESITPGSVGIVYSIRPDSSLLLGLCYLSSPWLCEPEEVEHVDPFKCEAHVSSNFQIGDQVCVKRSVAEPRYAWGGETHHSVGKIIDIESDGLLIIDIPNRAVHWQADPSDMEKIEKFKVGDWVRVKAAVPSPKYGWEDVTRSSIGVVHSLEEDGDMGVAFCFRSKPFSCSVADVEKAQPFEVGEKIHVLPSISQPRLGWSNETAATIGAISRIDMDGTLNVKVSGRNSLWKVAPGDAERLSAFEVGDWVRLKSSIGSRPTYDWSVGKISIAVVHSIQDSGYLELAGCFRKGKWLTHNTEIDKVEPLKIGHHVRFRAGITEPRWGWRDAKPDSRGIIAGVHADGEVRVAFFGVPGLWKGDPADLEIEQVYEVGEWVRLRNNADDWKSLKPGSIGVVHGIGYEDDVWDGTIHVAFCGEQERWIGPSSQLEGVSKFVVGQRVRVKLCIHQPRFGWSNHNHSSIGTISSIDADGKLRIHTPAGARAWLIDPAEVEKVEEEEEVCVGDWVKVKDCVATPTYQWGDVNHNSIGVIHRAEDGELWVAFCFCERQWLCKRWEVEKVRPFRLGDRVRIRPGLVTPRWGWGEETYESKGEVVGVDANGKLRIKFRWRDGLWIGDPADIVLDDIPSLTEASNGFCS

SEQ ID NO: 23669 - protein, 56 aa, Oryza sativa
  unsure (1)..(56): unsure at all Xaa locations
  Clone ID: TF_uC-osflm202110g02b1.pep
TTILVVSHDDGSADVVTILLEVXADPNIRDEDGTITIMTAATSGQLVLVEIVFPTT

SEQ ID NO: 23670 - protein, 359 aa, Oryza sativa; identical to SEQ ID NO: 15999
  Clone ID: TF_OsC116644_2.pep

SEQ ID NO: 23671 - protein, 593 aa, Oryza sativa
  Clone ID: TF_OsC3304_1.pep
MADATAALSARSKVQAFLEAAMAGDPASLKKLAAALDEEGKGVAAVAAAVKDANKRTALHFAAREGRTHVCHFLISDLALPVDPKDDDGNLDLMKLFLSKGVDVESESDAGTPLIWAAGHGQQEAVKLLLQHDAKASLCLALNHLSISRSCGLSLTFLLKLVIAWQPNTENDDGITPLLSAVAAGSLPCLDILIQAGAHPNIRAGGATPLHIAADGGNMEIINCLLKAGSDPNACDDDGLKPIQVAALRNNREVVELLLPLTSPIPGVSSWSIDGIIEYTKSVEEKAQVKEATTQKADRLQVPQLVEVSSEAKERSLEAKSRGDDAFRNKDYLVAVDAYTQAIELNPNDATLHSNRSLCWLRAGQAERALEDARACRALRPDWAKACYREGAALRLLQRFEEAANAFYEGVQLEPENGELISTKLIDQLARDDEKIKKKTRKPKPKKTVKQHQQEPQDNSRELPASEPKAPPGWPLQPPMYLPVTPAPPPPPPAFSELEAIRAVLEESEKVQEKLDKQHAGMRDELIKKSKDLRDKEFKLPYQNPTPCTEERSNCRQCYVSNAQDPLKCAEAVKRFEACVRLARQRGNTKVAQ

SEQ ID NO: 23672 - protein, 210 aa, Oryza sativa
  Clone ID: TF_OsC10700_1.pep
MAVPGRRDDLVGDDLVDDDGIGEEYMAPSDDEEAQLPDELFRLADAAQSGNVAALRAALDNYSGNIDDPIEDGDTLLHIACLYGHLPCVQLLLERQASLECKDEEGAIPLHDACAGGFSDIVQYILNFAANIDGCVTRMLNTVDSEGDTPLHHAARGEHLGIVDLLLKAGACAKKENTYGQVPAEMADEGTEVRKLLIQEQVEASTHTSN

SEQ ID NO: 23673 - protein, 445 aa, Oryza sativa
  Clone ID: TF_OsC10700_2.pep
MAVPGRRDDLVGDDLVDDDGIGEEYMAPSDDEEAQLPDELFRLADAAQSGNVAALRAALDNYSGNIDDPIEDGDTLLHIACLYGHLPCVQLLLERQASLECKDEEGAIPLHDACAGGFSDIVQYILNFAANIDGCVTRMLNTVDSEGDTPLHHAARGEHLGIVDLLLKAGACAKKENTYGQVPAEMADEGTEVRKLKVVTVPSSNPHPCHQLPIRHSPNHDDGGGAAPSPSSRRPSSAVPRTMEDERDERVVSMDGTYDADEKPVLLFSRGDGVVRVHDLPSLKKRGDILCYDEVKTISIRSRGVVFTGDASGEVPSTGVMFAKLNADTSEIKLTEKQDDDTEDDKKKVNGSMKIPRVWLSLSDCWEKMKVSIFEFMIDTSGKKEAIYTVYSYIAIGIILSLNCFWKVWREASNSDEKPSGFKAFFITIVCMVGKKLYDSLKTTK

SEQ ID NO: 23674 - protein, 613 aa, Oryza sativa; identical to SEQ ID NO: 15828
  Clone ID: TF_OsC566_5.pep

SEQ ID NO: 23675 - protein, 468 aa, Oryza sativa; identical to SEQ ID NO: 15832
  Clone ID: TF_OsC47742_1.pep

SEQ ID NO: 23676 - protein, 1031 aa, Oryza sativa
  Clone ID: TF_OsC40453_1.pep
MAETRKFLMPNQPPDISQMVLEARKRWLRPTEICEILSNYRSFSLSPEPPNRPGSGSLFLFDRKTLRYFRKDGHNWRKKKDGKTVKEAHEKLKAGSIDVLHCYYAHVEDNEKFHRRTYWLLEEDFAHIVLVSYLEVMGVKQSFSRAKEEIMPLSGADSPSCSNSITSQNQMTPQIMDAAESPISGQISEYEGAEPAKFGAADNCPASSRYNPLIEMQQPLDGIVMDNILYPSSSAICNQVSGYHGELPPGTSNLNGHTFSHSDIARMFDDSSSGLRDISRTLFDSMPYDEHFSGYANGFMEPTLHSSFSMIEANNLEDSSLLETYTSEALYTNNLSQKEADALSFAGISSPEVNGNKYTEGSTKHPLLKQLSLDLFKIESSGLKKHDSFSRWMSKELGEVVDLGIKSSSDALWSSIEIVNAADGPSAPTNEQLDAYAVSPSLAQDQLFSILDISPSCSYIGLKTKVLVTGTFLASKENVENCKWSCMFGDVEVPAEVLADGSLRCYAPEHQSGRVPFYVTCSNRIACSEVREFEYRDSDAQYMETSHSQANGINEMHLQIRLEKLLTLGPDDNQLLVCGNEKLELINAINSLMLDEKWSDQGSPSGSKDVVTPRNQSLKKLMKEKLHCWLIYKIYDCEKGPNILGKEGQGIIHLAAALGFDWAIRPILVAGVNVNFRDAHGWTALHWAASCGRERTVGVLIANGAAAGALTDPTSEFPSGRTPADLASTNGHKGIAGFLAESALTSHLSALTLKESKDSNADEACRLTIPEDLPEMNYGQLAVQDSHAESLKDSLSAVRKSAQAAARIFQAFRVESFHRKKVVEYGDDDCGLSDEHTFSLISLQKVKQGQHDTRLHSAAVRIQNKFRGWKGRKEFMIIRQRIVKLQAHVRGHQVRKNYKKVVWSVGIVEKVILRWRRKGRGLRGFRPEKQLEGQTQIQPAKTEDEYDYLQDGRRQAEGRLQRALDRVRSMTQYPEAREQYRRLTTCVAEMQQSRMMQDEMLSEAAGADGSDFMNGLEDLICRDDPQMSAIW

SEQ ID NO: 23677 - protein, 1161 aa, Oryza sativa
  Clone ID: TF_14346031.pep
MLLMGDVDVNEADPEGNTALHWCLSGSSSTQEPRIVWLLLKNGARVFQGNKLGLTPVHSAAAKGNYKALQSLLLHAQDCVDTPSKTKETPLFLAVKNGSLDCVKLLLRSGASTKVQNLRKQRPIDVATSQDMHFILTSANVVPWNRSSHPKKIVTNKESCKEFLDDNFVDYDSDDLNESFTGLKTSASHRDFRSSNGSAQGGKSKNHCAPKQGSKFVPRPNHWLKHDYTRKIFVGGLPLSVGAEYLTEFFTAEFGPVEEAVVIGIRMGDRVQSRGFGFVKFKREEDVISAKETHHVYMLGKRVEVKDAVARGFLPAEIQKTASFRHHSQEVPKVAHHMLDGELKEEHYIRKWRPLPEKCLPSWFFIFRKWLPGFLADATERLGDRYPLSSLKGDFRAICRMELDHGTFGYPKLSDFMRSLPGICRMCVVPVGSGPATHMVLLPPVSRPKYVPLLEPFSFDHDELPESVSDHQSPRSPLTTNITEDSLRNTDSQKGDTCSESNVQSHQGDECCGSNTESQQYSASTDNGSLPSEVAFGTTDLVELVQTREHDLIAPASTRRFDFLEPVSTREPNVIETVSLNQKIVSEPLTDLLQSGHTRRVGLIDSRSTCLGDFLVERVAEIPTRHINEDSNAQIFVVGCHGQLTLHVDLKKKTSSMIQAYEEKTGINHEYQYFIYERKVIDPDDTLSCYGIEKGSTIHACSRLRGGASMTLGQYLNRYKDDLLEDVILPDGRAYPVMKPEPSGVLRSWLKCFTTAFSKGYCWGENFLLSNFKVVNGKVEVIKEAKHQIRTDFLQAHLRKIDETIRWYFCRDGERFPPYLDELCDFLKLRRGLVLSEDAKEFIDDHVCFMNSYERGMLGIKLYKKLNSLSPGQKLKLLRALGKIAWDLSLMDDVDKLPLLCDIIVQAKAEGKPFPRTILGGFRLLRDYFAHIPEHQYDKATKPWKRKFRIYIGIELMIPVHLKKLLPRIIKCFLDAKIDIKRELLSSHTMRCSICYSAGTSSTVPRFSATPETRQTAGGITKSINELGTSSKAVASSTTPQTGHATKGTIGTSNELGTSSKAVGSSTTPQTGQDTKRTTRSSNELGTLSTAVGFSTTPQTGQPTKGTIRSSNELETSSTAQRNTWSTGQAARNLFAHSSGAPSAVQQQSQDDWETVQKRKG

SEQ ID NO: 23678 - protein, 450 aa, Oryza sativa; identical to SEQ ID NO: 15840
  Clone ID: TF_OsC286871_1.pep

SEQ ID NO: 23679 - protein, 292 aa, Oryza sativa
  unsure (1)..(292): unsure at all Xaa locations
  Clone ID: TF_OsC9959_2.pep
MDTGMRVALHRQVSSGSLKESGELRRQSSLESPRTGRAATRFLFGRQSSMDPNRRRGRSQSPVGLAEDLTVPDNLDATMQLLFLACHGXDAAGVEALLRGGVDVNSINLDGRTALHIASCEGHPDVVRVLLTWKANIDARDRWGSTAVADAKCYGHTEVYNLLKARGAKIPRNRRTPMMVSNPGDVPEYELNPSELQFKKGDXXWSRGVYQVAKWNGTKVHVKILDRECYCDQEVINSFRHELXTVLEKVRHPNVVQFVGAVTQNIPMMIISEYLPNGELSSCISRKGKLHG

SEQ ID NO: 23680 - protein, 495 aa, Oryza sativa
  unsure (1)..(495): unsure at all Xaa locations
  Clone ID: TF_OsC238283_1.pep
IEETHKSLSMDXLKERINGQGFSGVTFDVEGRRXMVFRELVXGHAADQPDTPPGAXILDHPGPRSPSAGALTSSPCDVGGFAATGAATAPGAVIPVSSFRYEVFLLLLHILHAGRVSMLRLKGEPGPGCGDRGCSHTLCFAAFVCALDAVAAARSLGVVELDHLTQKQLAGMVEKASIEDVMKVLMASRKQDLHQLWTTCSHLVAKSGLPPEVLAKHLPIDVVAKIDELRLKSMSRRSPFLSHHHHHPHAAAAGIEASSAAELDDHHKIRRMRRALDSSDVELVKLMVMGEGLNLDDALALHYAVENCSREVVKALLELGAADVNHPAGPAGKTPLHVAAEMVCPDMVAVLLDHHADPNVRTVDGVTPLDILRTLTSDFLFKGAVPGLAHIEPNKLRLCLELVQSAAMVMSREDAQTAAVNAAPIYGESPGGGGGGGVYNASGTSSSMVNLSLDNRMVYLNLGMDAQFGKMNDGGDGDDGGSRGPSSLFSPHGFP

SEQ ID NO: 23681 - protein, 728 aa, Oryza sativa
  unsure (1)..(728): unsure at all Xaa locations
  Clone ID: TF_OsC23574_1.pep
MFFTRLDDSPMFRKQIQSLEEGSELLRERCLRFHKGCRKYTEGLGEAYDGDIAFASSLEAFGGGHNDPISVAFGGPVMTKFTIGREXAMDQIDWIEKITGVIASLLSSQSPERRLLSSPKVARQNLTIPLVKTSIAGKELWKRTALSNIEAKKRFEFLEAVSGTMDAHLRYFKQVLAYAQQSRERSNYEQAALVERMQEFKRQIDRESRWSPNGINDSPNGDGIQAIGRSSHKMIEAVMQSASKGKAHISAWKFMSYFKSGYTNQRSSAPSEHGSGLLSRWFSSHYHGGVHDEKSVARHTVNLLTSTIKADADQSDLRFCFRIISPTKNYTLQRLLSSPKGSGHNRTASESSSFSSSTELDHSISEDCMLERNSGSGYFDHSGRAIQHHRTSMKPDKPIDLLRKVVGNNICADCGAAEPDWASLNLGILLCIECSGVHRNLGVHISKVRSLTLDVRVWEPSVINLFQSLGNTFANTIWEDMLPSSSSVDHGDNSRADGLENTSHNLIFSKPKHSDHIAVKEKFIHAKYAERDYVRKLNMDDSLVAQQMWENVSSNNKKGVYSLIVGSNADVNLTYGQTSFNSALTLGKALLLQEQPTSPSDGSSRCFDRSSLERISPRDSLSLASTSARIDELDDCVEGLSLLHLACRVADVGMVELLLQYGANVNSADSRGRTPLHHSILKGRHMFAKLLLSRESTDRDGRTALQYAIDSGTIDDEEILVLLEDPSR

SEQ ID NO: 23682 - protein, 525 aa, Oryza sativa; identical to SEQ ID NO: 15844
  Clone ID: TF_OsC199536_1.pep

SEQ ID NO: 23683 - protein, 450 aa, Oryza sativa
  Clone ID: TF_OsC506_1.pep
MGHGVSCARTGDEHDFFRAAQLGDLDALAALLAADPSLARRATLYDRLSVLHIAAANGRIEVLSMFLDRGAPPDAVNRHKQTPLMLAAMHGKIDCVLKLLQADANILMFDSVHARTCLHHAAYYGHVDCLQAILAAAQTTPVADSWGFARFVNVRDDHGATPLHLAARQGRPGCVQVLLENGAIVSALTGSYGFPGSTSLHLAARSGNLDCIRKLLAWGADRLQRDSAGRIPYSVALKRNHGACAALLNPTSAEPMVWPSPLKFISELEPEAKALLEAALMEANREREKKILNGTKYSLPSPSPGDDSADDDACSEVSDTELCCICFDQACTIEVQDCGHQMCAPCTLALCCHNKPNPTTLTPPSPACPFCRGSISRLVVAQTRSACDPDKPSSLQLTRKRSRRSHNLSEGSSSFKGLPSAMGSFSKLGRGSSRMADSDSSNLDKPEHDL

SEQ ID NO: 23684 - protein, 127 aa, Oryza sativa
  Clone ID: TF_OsC35544_3.pep
RPVVRRPTDDGTSGTNGYLGRLEGCFLSSSSPCPSHPIDLLDMGKGKARDAVLARKKDGIGLLHAAACQGHLTVCKFLMEELGGLPCLRLVMIKDAHSSPPCCWHRSPSISSSFLYILPIVLLYKAL

SEQ ID NO: 23685 - protein, 494 aa, Oryza sativa
  Clone ID: TF_OsC3119_1.pep
MSSEDSLKSLSLDYLNLLINGQAFSDVAFSVEGRLVHAHRCVLAARSLFFRKLFCGLDPNHQPPPPPPPLNWPMAGGGGGGSGGGGRGGAGGGGGAPATPELVIPVSSIRYEVLVLVLQFLYSGQASVAAPKSGPLPGCGARGCWHTRCGAAVDLALDTLAAARSFGVEQLALLVQKQLESMVKEASVDDVMKVLMASRKFEMQELWATCSHLVARSGLSADLLAKHLPIDVVAKIEEIRAKSPLAAVAAPRSPFLTHHYLPMNPASSAADRDNKIRRMRRALDAADIELVKLMVMGEGLDLDDALAVHYAVQHCNRDVVKALLELGAADVNSRAGPTGKTALHLAAEMVSPDMVSVLLDHHADPNSRTLDGVTPLDVLRSLTSEFLFKGAVPGLTHIEPNKLRLCLELVQSAVMVTTRDDGAPVTGGAEAGGSDGGNFPRSDADDSLVSLTMNSTLMYQGQEMAAAVAAGEGRKSNNGRGSPPPAMYFPNGFA

SEQ ID NO: 23686 - protein, 633 aa, Oryza sativa; identical to SEQ ID NO: 15855
  Clone ID: TF_OsC5805_1.pep

SEQ ID NO: 23687 - protein, 1667 aa, Oryza sativa
  Clone ID: TF_OsC1528_2163.pep
MDTPLHCAARAGHAGTVTILVNLAQDCEENILGCQNAAGDTALHMAARHGHGATVEALVVARAKATVLVSMKVVESVDQFPKRSILMASSSSTAATNPFQGHPISEKLGKANHALWKVQVSAAVRGARLQGHLTGATKRPPAEIAVTKDGATKKEPNPAHEDWEATDQQVLGYLLSSLTREVLMQVATCDTAAEVWSAIEQMYSTHTRARAINTRFALTNTKKGNMSTPEYFAKMKSLGDEMATAGGRPIDEEELIQYIITGLGEGYSEVVSAVCARVEPISVSDLYSQVLNFEARQAIYRGAQEVTVNVANRGGFSHGGRGNSNGGQGGSRGGGGGGHGRGNGGGGRGRGRTPGGVDKRPICQVCFKRGHTAADCWYRYDEDYVPDAKHVAAAAVNSYGVDTNWYIDTGATDHVTGELDKLTMKEKYNGGEQIHTASGAGHIYISRDVVFDENIFPFTELHANASARLRSEIDILTPELLGPIRSVGNEQCMHPVTNPLSADVSAALSNRANEPHRDGAVHPADAEDPPATPPLDASFGPEPDRVVHHSPAATSSGRHPGPTPGSVPRGVASSLAEETAEDSVSQAVQEQESQVVQEQEQSSPAQEHAQAVTDETNTLQHADVTDTGSEAPAGPRTRLQSGVRKEKVYTDGTIKYKHSWFTASGEPTNDLEALKDKNWKLAMDSEYDALVKNKTWHLVPPQRGRNIIGCKWVYKIKRKADGTLDRYKARLVAKGFKQRYGIDYEDTFSPVVKAATIRIILSLAVSKGWSLRQLDVQNAFLHGYLEEEVYMLQPPGFEDPTKPHHVCKLDKALYGLKQAPRAWFSRLSKKLMDLGFKGSKADTSLFFLNKGDITMFVLVYVDDIIVASSSEKATAALLQNLKGEFALKDLGELHYFLGIEVSKVQNGIVLNQDKYANDLLKKVGMIDCKPANTPLSVSEKLSLHEGSLLGPEDASHYRSVVGALQYLTLTRPDIAFSVNKVCQFLHAPTTVHWIAVKRILRYLKQCTRLGLEIHKSGSTLVSGFSDADWAGCLDDRRSTGGFAIFLGSNLVSWNARKQATVSRSSTESEYKAIANATAEIMWVQTLLAELEIKSPKAAKIWCDNLGAKYLSANPVFHARTKHIEVDYHFVRERLLSRFINLGFGCSQLRRTLYRHDGGCSHHIYINTKATHRISAIVSTQTNSQTELNKAGVSPLYLAVMSRSQAQNKNVFVNSIDKFVSLAEMVHLLLQWKPELASQVDCNGSTPLHFAASDGNRKIVHAILAIVPTGTVYMKDSDGLSALHVAARLGHANVVKQLIGICPDAVELRDGHGETFLHTAVREKQSSIVSLAIKKHKQVGGLLDAQDGVGNTPLHIAVVAGSPDIVNALLHKGKVQSDVLNDDGHSPLDLASTSTNLFNMVSFVVILVAFGAQGRPQRNDHLKPWSGRDIGKGIERTTDSLAVVAVLIATVAFAAGFNMPGSYGDDGTANLKGRFSFKWFMVLDTVAVAASVVAVILLVYGKASRSAGSWKSFVAALHFIWVSLVSLILAFFAAFRATMRTSRAVSIVFMVIYVCLIVLVVNVGTWVEPVTTMRIFWRFVWRSHRTNAVKRQYPLAVASIYNWLLFFHITYIMFAGLGVVHNHSNSDRGGLSSTLEPEPYLTCPCTYVIRALPQYFSYILRVLFLLCY

SEQ ID NO: 23688 - protein, 281 aa, Oryza sativa; identical to SEQ ID NO: 15857
  Clone ID: TF_OsC35544_1.pep

SEQ ID NO: 23689 - protein, 323 aa, Oryza sativa
  Clone ID: TF_OsC8940_1.pep
PVLVLSISGKRMDQAGRKKYVKQVTGRHNDTELHLAAQRGDLEAVRQIIAEINAQMTGTGEEFDSEVAEIRAAVVNEPNEVEETALLIAAEKGFLDIVVELLKHSDKESLTRKNKSGFDVLHVAAKEGHRDIVKVLLDHDPSLGKTFGQSNVTPLITAAIRGHIEVVNLLLERVSGLVELSKGNGKNALHFAGRQGHVEIVKALLDADPQLARRTDKKGQTALHMAVKGTSAAVVRALVNADPAIVMLPDRNGNLALHVATRKKRSEIVNELLLLPDMNVNALTRDRKTAFDIAEGLPLSEESAEIKDCLSRAGAVRANDLNQ

SEQ ID NO: 23690 - protein, 656 aa, Oryza sativa
  unsure (1)..(656): unsure at all Xaa locations
  Clone ID: TF_OsC50099_1.pep
QGVWFFSVNLIHYTSPLTSADSTSANHGLNQVNANHFGALKHQGDQTQSLLASDVDSQSDQFISSSVKSPMDGNTSIPNEVPARQNSLFHRASXPVTNERLLEINEISPEWAYSTETTKVVVIGNFYEQYKHLAGSAMFGVFGEQCVAGDIVQTGVYRFMVGPHTPGKVDFYLTLDGKTPISEICSFTYHVMHGSSLEARLPPSEDDYKRTNLKMQMRLARLLFATNKKKIAPKLLVEGTKVANLMSALPEKEWMDLWNILSDPEGTYVPVTESLLELVLRNRLQEWLVEMVMEGHKSTGRDDLGQGAIHLCSFLGYTWAIRLFSLSGFSLDFRDSSGWTALHWAAYHGRERMVATLLSAGANPSLVTDPTPESPAGLTAADLAARQGYDGLAAYLAEKGLTAHFEAMSLSKDTEQSPSKTRLTKLQSEKFEHLSEQELCLKESLAAYRNAADAASNIQAALRERTLKLQTKAIQLANPEIEASEIVAAMKIQHAFRNYNRKKAMRAAARIQSHFRTWKMRRNFINMRRQVIRIQAAYRGHQVRRQYRKVIWSVGIVEKAILRWRKKRKGLRGIASGMPVVMTVDAEAEPASTAEEDFFQAGRQQAEDRFNRSVVRVQALFRSYKAQQEYRRMKIAHEEAKVIFFKTFSNNCWHVP

SEQ ID NO: 23691 - protein, 615 aa, Oryza sativa; identical to SEQ ID NO: 15861
  Clone ID: TF_OsC47045_1.pep

SEQ ID NO: 23692 - protein, 855 aa, Oryza sativa; identical to SEQ ID NO: 15854
  Clone ID: TF_OsC168710_1.pep

SEQ ID NO: 23693 - protein, 300 aa, Oryza sativa; identical to SEQ ID NO: 15868
  Clone ID: TF_OsC116644_1.pep

SEQ ID NO: 23694 - protein, 1029 aa, Oryza sativa; identical to SEQ ID NO: 15869
  Clone ID: TF_OsC60670_1.pep

SEQ ID NO: 23695 - protein, 135 aa, Oryza sativa
  Clone ID: TF_LIB4506-035-R1-K1-H9.pep
TRPDGSSRCFDRSSLERISPRDSLSLASTSARIDELDDCVEGLSLLHLACRVADVGMVELLLQYGANVNSADSRGRTPLHHSILKGRHMFAKLLLSRGADSQATDRDGRTALQYAIDSGTIDDEEILVLLEDPSR

SEQ ID NO: 23696 - protein, 58 aa, Oryza sativa
  Clone ID: TF_jC-osflLIB3479017f08a1.pep
TKIQNRGVRKLPSMRYAAEIRNPTKKTPIWLGTLYSAEVAARTYYDSYRSLRGPTERT

SEQ ID NO: 23697 - protein, 147 aa, Oryza sativa
  unsure (1)..(147): unsure at all Xaa locations
  Clone ID: TF_uC-osflcyp004g06b1.pep
RKGIRQRTWGKWADQILGPXSKGVRVWLATYNTVEEADTAYDAKARKNRVMNAKVNFPDDPNVAQKLHLKQNAVMHDKLASPLKTCGDDAFFQLNSSYNDLXAMLAKAPAKSAETAELCPXVKPVAFTVKFLINMLFDSSXNSFGSS

SEQ ID NO: 23698 - protein, 277 aa, Oryza sativa; identical to SEQ ID NO: 16006
  Clone ID: TF_OsC172723_1.pep

SEQ ID NO: 23699 - protein, 127 aa, Oryza sativa
  Clone ID: TF_uC-osflM202047f04b1.pep
MEAAGIHAPTTTTSSDSGSCVTNGTREKREISKHKQLKRKRSTSPAPPPGCGGGQGQEAAVETDADAGAAGEEESSSVAAAGAGEGERKRGDAGRHPSYRGVRRRSWGKWVSEIREPRKKSRMWLGT

SEQ ID NO: 23700 - protein, 742 aa, Oryza sativa
  Clone ID: TF_OsC75926_1.pep
MKNGARKDAGGGGGGVFVPCVDIKSFVLSLAFLTVFVALWQLQPYGSLLTAARSTASVSASPCSLIATPAAAAASAGVIRSENSTADTAKTAPAAVASAVPARLARAARPARVEDPNKRELRPYGSAAALFVQMGAYRGGPRTFAIVGLASKPTHVFSNPYFKCEWLPNPTAGNPSPRPVRTKAYKMLPDWGYGRVYTVVVVNCTFPSNPNADNAGGKLLVHAYYSTTSRRYERFVALEEAPGSYDESRFSPPFPYDYLYCGSSLYGNLSASRMREWVAYHAHFFGPRSHFVFHDAGGISPEVKAVLDPWVRAGRLTVQDIRAQAEYDGYYYNQFLVVNDCLHRYRHAANWTFFFDVDEYIYLPNGQTLDQVLGKLSGYSQFTIEQNPMSSKLCVQDPSKDYSREWGFEKLVFRNSITKVRRDRKYAIQARNAYSAGVHMSQNVYGRTTHKTESLIRYYHYHNSINVMGEPCREFVPVPVNGSKLMFEGIPYVYDDKMKRLAGQIKREELGGLEEKEGEPVVGERVVEAALGGGAGGGRVEGGVDVGEEGVGDGDVDEEEEGEREDEGGGDAGEERAVGDDDDELRRRWLEGESGGGGGRAPLTSPASRRRRCPRPDPASPGRIWPPRRHSDDDDPAVFYLRGRSARLNFPEEISLLASPSEGGGAGEPREPDGGTLSAASIRKKAIEVGSHVDALQTGMMVAPTHHREQQKHHHHPHLQPHGEEQHHHEDWISSKYEDIHT

SEQ ID NO: 23701 - protein, 129 aa, Oryza sativa
  unsure (1)..(129): unsure at all Xaa locations
  Clone ID: TF_uC-osroM202039a06b1.pep
LISGHVRRSNHLRVHPAVGRCGGEEEEDDDDVVVVVPPPAAARFVVRAAAKAAPPTADGMLTTKLVQHDGPTARSAKHKRKNQYRGIRQRPWGKWAAEIRDPXKGGRVWLGTYNTAEEAARAYDAEARK

SEQ ID NO: 23702 - protein, 95 aa, Oryza sativa
  unsure (1)..(95): unsure at all Xaa locations
  Clone ID: TF_uC-osroM202016h11a1.pep
SPDSGVGEGGGAGAAGVGTGQHLRGVRKRPRGRYAEEIRDPAKKSRVWLGTXHTGEEAARSYDAVAREYRGAKAKTNLPYPNGAPAVRVNSGSSN

SEQ ID NO: 23703 - protein, 310 aa, Oryza sativa
  Clone ID: TF_OsC337824_1.pep
MEDEVVGGGGGSHGVKLEWRRPTAAIGRASDRALGGGNNRNSSLSCQQGSSWAQAAERRPGERRRWGKQRHGQCPARELLPAAVAVELEVGPGVMEVDTVDSEPRPTPAPHPPSLRVLAVNPRPISSLFARGLAAGASVERGSPPAGCRMPRLLLWTAAVVGELARAALERRDAEVGGRHRRKKREMLWVLEDAGWRRREAQTVGCEELGRALLELQGATDQDFDAVTVQPRHGTAVPGPGRRASGHMASIPRGAWNRTRFWLGSFGRTNYVALAYYQAAYRFRGNTAWLNLPDNAASRGLLHASVDAKL

SEQ ID NO: 23704 - protein, 113 aa, Oryza sativa
  Clone ID: TF_OsC1517_1590.pep
IDLVSTACLKKKEVQTKSSKRKRNWLDKMHKSTEKGSKKGGKKKEKGSKEQGTIKKGGKKKEKEATVQDSAAVQNIYPNTSLPMEELSEPYMAINTFSQILTGPITDDVLADF

SEQ ID NO: 23705 - protein, 409 aa, Oryza sativa
  Clone ID: TF_OsC331943_1.pep
YPYPRSDHREAAAGGGSSSTAASAASKVIVDDNDSYSDPDATDSDSDSDSADAGDHDISSRSSRTNAAAASPGGGRWTSGTASSRSGNGSARSPPRRRPGPPTTPSRCRYRASLSRGGAGASSPAVAIAPSPARVKIQLPAPRPSPSSKEAPPPSSSASAATPPPLNPPPFVVDTFLGEDDHLAADEDDRFGFGLADLGHLPLPRREPRRRLADARVVQRHEAPAARRVVGVLPALVVVVHVAPVPVAPPPPTPLLVAAASSLLLAVGVVVVVAVVVILVAAAATAAPRLEPVPAAPAAVIDRSGLSQSNARRRSHLPHPLPLSALPETRTHPLSRVHPKNHAAPPSHQLHSDASSQPLRPRIAPPSISASRASLHAACHQIGVTVADIDLAPLSESQTSAINPRLSGV

SEQ ID NO: 23706 - protein, 192 aa, Oryza sativa
  Clone ID: TF_OsC9802_9.pep
QLQVTGFAFYSLFSSTCNLYFFLMFGPSFPPLPACQFPQARHPGRSVTQPPDHLHLTFCWMLEQSAQKLSTDEARRPLDLAAACGVGASGCRRSESCARTRASGSARLPPPCHQGPRHPRPLQLTGDRARASPLGFGSPQRRESHTALATAMDDPDPAAVAAAPRQKATGLDRDSRIRRLRHRRPCRRKEQR

SEQ ID NO: 23707 - protein, 218 aa, Oryza sativa
  Clone ID: TF_OsC778_1.pep
MEVEEAAYRTVWSEPPKRPAGRTKFRETRHPVYRGVRRRGGRPGAAGRWVCEVRVPGARGSRLWLGTFATAEAAARAHDAAALALRGRAACLNFADSAWRMPPVPASAALAGARGVRDAVAVAVEAFQRQSAAPSSPAETFANDGDEEEDNKDVLPVAAAEVFDAGAFELDDGFRFGGMDAGSYYASLAQGLLVEPPAAGAWWEDGELAGSDMPLWSY

SEQ ID NO: 23708 - protein, 91 aa, Oryza sativa
  Clone ID: TF_uC-osrocyp021d02b1.pep
SCGRTRGLCTMAIVGFDGPAAKLAKRKRKNQFRGIRQRPWGKWAAEIRDPRMGVRVWLGSFNSAVEAVRAYDAEALKICGKKAKVNFTEAS

SEQ ID NO: 23709 - protein, 189 aa, Oryza sativa
  Clone ID: TF_OsC18518_1.pep
MELDMGAGGGGGVVGGGRAEAHYRGVRKRPWGRYAAEIRDPWKKTRVWLGTYDTPVEAALAYDRAAVALRGVKARTNFGSGSSGGGGVGGHGHGHSHAQLPQLHHRMHPPRPPQGPGHFGGLDISHPSPWHYVYFPARVQAMAPAAAGHVAAHVAASLPSTTLELRTGPSAGELPFDLNEPPPALLFGS

SEQ ID NO: 23710 - protein, 494 aa, Oryza sativa
  unsure (1)..(494): unsure at all Xaa locations
  Clone ID: TF_OsC917_1.pep
MDMDTSHHYPWLNFSLAHHCEMEEEERGAAAELAAIAGAAPPPKLEDFLGGGCNGGSSGGACPPVQTTAPTAAELYESELKFLAAGFQLSGAAGAAPPVPALLPAAALEQTDETKQLALPPQAAVAPPPEQKKAVDSFGQRTSIYRGVTRHRWTGRYEAHLWDNSCRREGQSRKGRQGGYDKEEKAARAYDLAALKYWGPSTTTNFPVAEYEKELEEMKHMTRQEFVASLRRKSSGFSRGASIYRGVTRHHQHGRWQARIGRVAGNKDLYLGTFGTEEEAAEAYXDIRGDQVPVRLNAVTNFEIGRYNVESIISSNLPIGSMAGNRSTKAGLELAPSSSADAIAATEANHTGVAPPSTLAFTALPMKYDQADYLSYLALQHHQQGNLQGLGFGLYSSGVNLDFANANGNGAMSNCYTNVSLHEQQQQHQHQHQQEQQQDQQDDQSQSSNNSCGSIPFATPIAFSGSYESSMTAAGTFGYYPNVAAFQTPIFGME

SEQ ID NO: 23711 - protein, 379 aa, Oryza sativa; identical to SEQ ID NO: 16075
  Clone ID: TF_OsC302166_1.pep

SEQ ID NO: 23712 - protein, 247 aa, Oryza sativa
  Clone ID: TF_OsC319797_1.pep
MAAIDLYKYQLSSSSSSSSSDQELMKALEPFIRSASPTSTSTSTSTSTPLFYSSSSISTTTTTPFSYSSPLPQESYYLPASSSYAAIVPPPTTTTNTTTSFSELPPLPPSSSSFASPANAAAVGLAHLGPEQIQQIQVQFLMQQQLQQRGMAASASASAAASYLGPRAQPMKQAGAAAAAAAGGKMYRGVRQRHWGKWVAEIRLPKNRTRLWLGTFDTAEDAALAYDKEALRLRGDYVLLTSALFAL

SEQ ID NO: 23713 - protein, 509 aa, Oryza sativa; identical to SEQ ID NO: 16107
  Clone ID: TF_OsC48348_2.pep

SEQ ID NO: 23714 - protein, 293 aa, Oryza sativa
  Clone ID: TF_OsC120_1.pep
MEAAAIHAPTTTTSSDSGSCVTNGTREKREISKHKQLKRKRSTSPAPPPGCGGGQGQEAAVETDADAGAAGRGGGAGEEESSSCGGAGAGEGERKRGDAGRHPSYRGVRRRSWGKWVSEIREPRKKSRIWLGTFPTAEMAARAHDVAALAIKGRAAHLNFPSLAHTLPRPASTSPSDIQAAAALAAAAAATDQCESSSSAVAAATATDAEAAESTSSAAASPCAATSSVEENALFDLPDLLLDLSDGLWCSPVWTTAPADQYDAGDDGDDAAAPLLWAEQCWMDAPAAPVQPD

SEQ ID NO: 23715 - protein, 344 aa, Oryza sativa; identical to SEQ ID NO: 16108
  Clone ID: TF_OsC251239_1.pep

SEQ ID NO: 23716 - protein, 150 aa, Oryza sativa
  unsure (1)..(150): unsure at all Xaa locations
  Clone ID: TF_OsC2721_1.pep
LGSYDTEEKXARSYDVAALKYWGQNTKLNFSVSEYERELEDIRDMSREECVTYLRRRSSCFSRGASIYRGVTRRQKDGRWQARIGLVAGTRDIYLGTFKTEEEAAEAYDIAAIEIRGKNAVTNFDRSNYMEKGMHCIEGAGLKLLASKPE

SEQ ID NO: 23717 - protein, 329 aa, Oryza sativa; identical to SEQ ID NO: 16088
  Clone ID: TF_OsC156_1.pep

SEQ ID NO: 23718 - protein, 550 aa, Oryza sativa
  Clone ID: TF_OsC21519_1.pep
MSLILSRRRLAAAVRRSGPAALASRWMHTPPFATVSPQEISGSSPAEVQNFVQGSWTTSGNWNWLVDPLNGEKFIKVAEVQEAEIKPFVESLSNCPKHGLHNPLKAPERYLMYGDISAKAANMLGQPVVSDFFAKLIQRVSPKSYQQALAEVQVSQKFLENFCGDQVRFLARSFAVPGNHLGQSSNGYRWPYGPVAIITPFNFPLEIPLLQLMGALYMGNKPVLKVDSKVSIVMDQMLRLLHACGMPAEDVDFINSDGITMNKLLLEANPKMTLFTGSSRIAEKLAADLKGKIKLEDAGFDWKILGPDVQEVDYIAWVCDQDAYACSGQKCSAQSILFMHKNWSSSGLLDKMKSLSERRKLEDLTIGPVLTVTTSSMIEHMKNLLKIPGSKVLFGGEPLENHSIPEIYGAFKPTAVFVPLSEILKSGNFELVTREIFGPFQVVTEYSDDELELVLEACERMNAHLTAAVVSNDPLFLQEVLGRSVNGTTYAGIRARTTGAPQNHWFGPAGDPRGAGIGTPEAIKLVWSCHREIIYDIGPLPKNRALPSAT

SEQ ID NO: 23719 - protein, 291 aa, Oryza sativa; identical to SEQ ID NO: 16092
  Clone ID: TF_OsC4061_1.pep

SEQ ID NO: 23720 - protein, 622 aa, Oryza sativa
  unsure (1)..(622): unsure at all Xaa locations
  Clone ID: TF_OsC70902_1.pep
MASADNWLGFSLSGQGNPQHHQNGSPSAAGDAAIDISGSGDFYGLPTPDAHHIGMAGEDAPYGVMDAFNRGTHETQDWAMRGLDYGGGSSDLSMLVGSSGGGRRTVAGDGVGEAPKLENFLDGNSFSDVHGQAAGGYLYSGSAVGGAGGYSNGGCGGGTIELSMIKTWLRSNQSQQQPSPPQHADQGMSTDASASSYACSDVLVGSCGGGGAGGTASSHGQGLALSMSTGSVAAAGGGGAVVAAESSSSENKRVDSPGGAVDGAVPRKSIDTFGQRTSIYRXHRWTGRYEAHLWDNSCRREGQSRKGRQXSNYEKELEEMKHMTRQEYIAHLRRNSSGFSRGASKYRGVTRHHQHGRWQARIGRVAGNKDIYLGTFSTEEEAAEAYDIAAIKFRGLNAVTNFDMSRYDVKSILDSSTLPVGGAARRLKEAEVAAAAAGGGVIVSHLADGGVGGYYYGCGPTIAFGGGGQQPAPLAVHYPSYGQASGWCKPEQDAVIAAGHCATDLQHLHLGSGGAAATHNFFQQPASSSAVYGNGGGGGGNAFMMPMGAVVAAADHGGQSSAYGGGDESGRLVVGYDGVVDPYAAMRSAYELSQGSSSSSVSVAKAANGYPDNWSSPFNGMG

SEQ ID NO: 23721 - protein, 342 aa, Oryza sativa; identical to SEQ ID NO: 16097
  Clone ID: TF_OsC338711_1.pep

SEQ ID NO: 23722 - protein, 190 aa, Oryza sativa; identical to SEQ ID NO: 16099
  Clone ID: TF_OsC19805_1.pep

SEQ ID NO: 23723 - protein, 274 aa, Oryza sativa
  Clone ID: TF_OsC143164_2.pep
MVPRVERGGGGFHLPNSEREDSLFMRALISVVSGDTTVPTLLPEPTMATVVAGAATCARCGVDGCIGVDCEVVVLAAAAGSSCSDEEDEGECTTGAVAIGGVTGGVGKMMPRRRSGGEGSRYRGVRRLPWGKWAAEILDPRRAVCKWLGTFDTAEDAARAYDVAALEFRGQRAKLNFPASTAAQQPRPLFHHNFCENCGSNASSPVHAPEHARTAAAAKDQEIWDGSTGDHDARRRQLLVHAMIDDLSPISLLDRCFISCSILNRILKPLLLFS

SEQ ID NO: 23724 - protein, 487 aa, Oryza sativa
  Clone ID: TF_OsC183204_1.pep
MAKRSSPDPASSSPSASSSPSSPSSSSSEDSSSPMSMPCKRRARPRTDKSTGKAKRPKKESKEVVDPSSNGGGGGGGGKRSSIYRGVTRHRWTGRFEAHLWDKNCSTSLQNKKKGRQGAYDSEEAAARAYDLAALKYWGPETVLNFPLEEYEKERSEMEGVSREEYLASLRRRSSGFSRGVSKYRGVARHHHNGRWEARIGRVLGNKYLYLGTFDILYNLSQNYRFKNLFYKNTDSVASFITKLQLSDTEAKLPADTQEEAAKAYDLAAIEYRGANAVTNFDISCYLDQPQLLAQLQQEPQLLAQLQQELQVVPALHEEPQDDDRSENAVQELSSSEANTSSDNNEPLAADDSAECMNEPLPIVDGIEESLWSPCLDYELDTMPGAYFSNSMNFSEWFNDEAFEGGMEYLFEGCSSITEGGNSMDNSGVTEYNLFEECNMLEKDISDFLDKDISDFLDKDISISDRERISPQANNISCPQKMISVCN

SEQ ID NO: 23725 - protein, 125 aa, Oryza sativa
  Clone ID: TF_uC-osflcyp034f01b1.pep
MAEHFSHAGMYIGYTADAAASSSSSSSSSSSSSSEMLRFDTGWPDETPAPSSVAGRRRSAGGDHRQGRGQTEAAAAFIGVRRRPWGRFAAEIRDSTRNGARVWIGTFDSAEAAAMAYDQAALSRV

SEQ ID NO: 23726 - protein, 429 aa, Oryza sativa
  Clone ID: TF_OsC1760_6.pep
MKKLEKELKHQELLKNEQYQMKLQKCNERRLALIKSSLDIVVAIGLLQLAPKKVPRALLYPSPPSPSPLVVGNALASWDLAPPSLQPCAAAVPVVAVAREGRHRGRRRVSVLVRPFAVAEDRRSTVAAVNPKSVAASSSSSSPSVDLPPLFWSPATASHLDHGHVSVALYTCELPLPPSAETNTKGNGEAVRRSDERRRVGTPATAPPAATHTTDMEYYEQEEYATVTSAPPKRPAGRTKFRETRHPVYRGVRRRGPAGRWVCEVREPNKKSRIWLGTFATAEAAARAHDVAALALRGRGACLNFADSARLLRVDPATLATPDDIRRAAIELAESCPHDAAAAAASSSAAAVEASAAAAPAMMMQYQDDMAATPSSYDYAYYGNMDFDQPSYYYDGMGGGGEYQSWQMDGDDDGGAGGYGGGDVTLWSY

SEQ ID NO: 23727 - protein, 253 aa, Oryza sativa
  Clone ID: TF_12581491.pep
MEKNTAASGQLMTSSAEATPSSPKRPAGRTKFQETRHLVFRGVRWRGCAGRWVCKVRVPGSRGDRFWIGTSDTAEETARTHDAAMLALCGASASLNFADSAWLLHVPRAPVVSGLRPPAARCATRCLQGHRRVPAPGRGSTATATATSGDAASTAPPSAPVLSAKQCEFIFLSSLDCWMLMSKLISSSRAKGSLCLRKNPISFCMVTNSYTALLLEYIILQMNSMIVLIHELSKYQVFLLLTMITHHLFQWRR

SEQ ID NO: 23728 - protein, 144 aa, Oryza sativa
  Clone ID: TF_uC-osrocyp005g12b1.pep
VRDMNGLKLAGFSTTKLGLGSSRKRTTRRRGIRQRPWGKWAAAITDPSKGMRGWLGTFGTGEDGVMAYDMKARRIRRKKAKVNLRDTVADGPKRPRRSSAKHSPHKQKARSSAPSTASLNASDAKSKTNNNRVSSGGSRTDTTD

SEQ ID NO: 23729 - protein, 273 aa, Oryza sativa
  Clone ID: TF_OsC272545_1.pep
MDASLRTLPPASFPGEVRSAVSSLLLSPGGSALDTVFSHLPPPVTIPPLGSSVYYRQSELLRHFAASQAAQAQSATAAASSSSAAAAGLDDGAPRKLYRGVRQRQWGKWVAEIRLPQNRVRVWLGTYDSPETAAHAYDRAAFKLRGEYARLNFPGVMDGRDCPDNLRQLRDAVDAKIQAIRVRMARKRARARRQREESKKSQRAEDAKAATPSRPVASERAASETTTTTTTTSSSYGSPDGVLSMSAASVDGDCPLERMPSFDPELIWEMLNF

SEQ ID NO: 23730 - protein, 466 aa, Oryza sativa
  Clone ID: TF_OsC44972_1.pep
MDMDMSSAYPHHWLSFSLANNYHHGLLEALSTTSAPPLGEEGPAEGAPKMEDFLGGLGGGGGAVAAAPAAAPEDQLSCGELGSIAAGFLRRYPAPENAGGVTIAMATDAAAELADPARRTAETFGQRTSIYRGVTRHRWTGRYEAHLWDNSCRREGQSRKGRQGGYDKEEKAARAYDLAALKYWGPTTTTNFPVANYETELEEMKSMTRQEFIASLRRKSSGFSRGASIYRGVTRHHQHGRWQARIGRVAGNKDLYLGTFSTQEEAAEAYDIAAIKFRGLNAVTNFDMSRYDVDSILNSDLPVGGGAATRASKFPSDPSLPLPSPAMPPSEKDYWSLLALHYHHHQQQQQQQQFPASAFDTYGCSSGVNVDFTMGTSSHSGSNSNSSSSSAIWGTAAGAAMGRQQNGGSSNKQSNSYSGNNIPYAAAAAMTSGSALYGGSTGSNGTWVASNTSTAPHFYNYLFGME

SEQ ID NO: 23731 - protein, 238 aa, Oryza sativa
  Clone ID: TF_OsC2061_1.pep
MCGIKQEMSGESSGSPCSSASAERQHQTVWTAPPKRPAGRTKFRETRHPVFRGVRRRGNAGRWVCEVRVPGRRGCRLWLGTFDTAEGAARAHDAAMLAINAGGGGGGGACCLNFADSAWLLAVPRSYRTLADVRHAVAEAVEDFFRRRLADDALSATSSSSTTPSTPRTDDDEESAATDGDESSSPASDLAFELDVLSDMGWDLYYASLAQGMLMEPPSAALGDDGDAILADVPLWSY

SEQ ID NO: 23732 - protein, 261 aa, Oryza sativa; identical to SEQ ID NO: 16115
  Clone ID: TF_OsC270762_1.pep

SEQ ID NO: 23733 - protein, 208 aa, Oryza sativa
  Clone ID: TF_OsC75926_2.pep
MQGEYHRSSSEDSAASAAAAAAAAAAAMAPLAAAAAAVAAKEEQAAAAAVLPLQQQQPRRQYRGVRMRKWGKWVAEIREPHKRTRIWLGSYATPVAAARAYDTAVFYLRGRSARLNFPEEISSLASLSEGGGASEPREPDGGTLSAASIRKKAIEVGSRVDALQTGMMPHGEEQHHHHEQKHQRTAWSGRAKNPDLNQAPSPENSDAE

SEQ ID NO: 23734 - protein, 205 aa, Oryza sativa; identical to SEQ ID NO: 16117
  Clone ID: TF_OsC313387_1.pep

SEQ ID NO: 23735 - protein, 362 aa, Oryza sativa; identical to SEQ ID NO: 16125
  Clone ID: TF_OsC126_1.pep

SEQ ID NO: 23736 - protein, 185 aa, Oryza sativa
  Clone ID: TF_OsC264665_1.pep
GLQEFGTRATRSHSLGQAPPSLDRSRAAVDMAGHEVNSSSSSSGAESSSSSSGRQQYKKRPAGRTKFRETRHPVYRGGRRRGGAGRWVCEVRVPGKRGARLWLGTYVTAEAAARAHDAAMIALRGGAGGGGAACLNFQDSAWLLAVPPAAPSDLAGVRRAATEAVAGFLQRNKTTNGASVAEAMD

SEQ ID NO: 23737 - protein, 237 aa, Oryza sativa; identical to SEQ ID NO: 16126
  Clone ID: TF_OsC101322_1.pep

SEQ ID NO: 23738 - protein, 490 aa, Oryza sativa; identical to SEQ ID NO: 16128
  Clone ID: TF_OsC399311_1.pep

SEQ ID NO: 23739 - protein, 374 aa, Oryza sativa
  Clone ID: TF_OsC53745_1.pep
MTVDQRTTAKAIMPPVEMPPVQPGRKWRARGSRGDPASVQETVKRWAELNNQQELDPQGPKKARQAPAKGSKKGCMKGKGGPENTRCDFRGVRQRTWGKWVAEIREPNRQSRLWLGTFPTAEAAACAYDEAARAMYGPMARTNFGQHHAPAASVQVVAQAAVKCALPGGGLTASKSRTSTQGASADVQDVLTGGLSACESTTTTINNQSDVVSTLHKPEEVSEISSPRGAPPAVLEDGSNEDKAESVTYDENIVSQQRAPPEAEASNGRGEEVFEPLEPIASLPEDQGDYCFDIDEMLRMMEADPTNEGLWKGDKDGSDAILELGQDEPFYYEGVDPGMLDNLLRSDEPAWLLADPAMFISGGFEDDSQFFEGL

SEQ ID NO: 23740 - protein, 275 aa, Oryza sativa
  Clone ID: TF_OsC77854_1.pep
MATVQPAASDPAPPPPPETEEQPAAAGGEEIAALDEQLAVADGGGDDGKAAAAAEGGGGGGGGKLVAETMRKYAAPRSSRYHGVTRLKWSGKFEAHLWDNSSQVEGRKRKGKHGSYVTEENAARAHDLAALKYWGAGPNTKLNFNVSDYEKEIERMKTMSQDEFVVYIRRQSSCFSRGTSSYRGVTRRKDGRWQARIGRIGESRDTKDIYLGTFETEIEAAEAYDLAAIELRGAHAVTNFDISNYCEDGLKKLEASSEVPKLLEGPSKAAKLAGR

SEQ ID NO: 23741 - protein, 112 aa, Oryza sativa
  Clone ID: TF_OsC154008_1.pep
SVRPYKGVRMRSWGSWVSEIRAPHQKRRIWLGSYATPEAAARAYDAALLCLKGSDAVLNFPSSASSRRRLDIHRGGTDSAAGDMSPRSIQRVAAAAAGAFDAAAAAVVLRRR

SEQ ID NO: 23742 - protein, 483 aa, Oryza sativa
  Clone ID: TF_OsC6832_1.pep
MRSSSSKATPTTSPAFPVLGFPPSAKSPRPNKGEDGGGEAEASHRRGKGDAMWDLNDSPAAEAAPPPLSPSADDSGASSSSAAAVVEIPDDADDDSAAVVVVTRQFFPPAVPGGGGDPAPGNARAGWLRLAGAAPPVAAAGPAASAAVSKKSRRGPRSRSSQYRGVTFYRRTGRWESHIWDCGKQVYLGGFDTAHAAARAYDRAAIKFRGVEADINFSLEDYEDDLKQMSNLTKEEFVHVLRRQSTGFPRGSSKYRGVTLHKCGRWEARMGQFLGKKYVYLGLFDTEEEAARAYDRAAIKCNGKDAVTNFDPSIYAGEFEPPAAATGDAAEHNLDLSLGSSAGSKRGNVDGGGDDEITGGGGGGAGSDQRVPMAFDLDWQTAAARSTKAKFLSNGDPGTAGGLSLTIGAGMAGHWPPQQQQGWGNAGGMSWPLPPHPPPPPTNAAAAATATAAAASSRFPPYIATQASTWLQKNGFHSLTRPT

SEQ ID NO: 23743 - protein, 397 aa, Oryza sativa
  Clone ID: TF_OsC58470_1.pep
MSSSLGPYSSIPTSSVTVASVPSSSSAASSSSGYGAPAEHGEAVQWTSWPDAQLQPAPARAEQTTGGATTPTTRAHAGFFVLFFFFFCFHPRDPTPPTTSVSLASSSSRSTATSYHLEASGSFGKEAAPRAALPGLAMPEEKEYAPVPLGQAPEAVDPEDPVKSPPRPTSPANSTRKACFAVLQSWVSRKFMTGCVVLFPVAVTFFITWWFVKFVDGFFSPLYAKLGFDIFGLGFLTSLLFIFLVGIFVSSWVGSTVFWIGEWFIKKMPFVRHIYSASKQVSTAVSPDQNTTAFKEVAIISHPRIGEYAFGFITSTMILQTDKGDEELCSVYVPTNHLYIGDIFLVRSEEIIRPNLSIREGIEIIVSGGMTMPQVIAAPGQTPHKGQSTRLNRMMSA

SEQ ID NO: 23744 - protein, 274 aa, Oryza sativa
  Clone ID: TF_OsC2062_1.pep
MERGEGRRGDCSVQVRKKRTRRKSDGPDSIAETIKWWKEQNQKLQEENSSRKAPAKGSKKGCMAGKGGPENSNCAYRGVRQRTWGKWVAEIREPNRGRRLWLGSFPTALEAAHAYDEAARAMYGPTARVNFADNSTDANSGCTSAPSLMMSNGPATIPSDEKDELESPPFIVANGPAVLYQPDKKDVLERVVPEVQDVKTEGSNGLKRVCQERKNMEVCESEGIVLHKEVNISYDYFNVHEIVEMIIVELSADQKTEVHEEYQEGDDGFSLFSY

SEQ ID NO: 23745 - protein, 358 aa, Oryza sativa; identical to SEQ ID NO: 16136
  Clone ID: TF_OsC45729_1.pep

SEQ ID NO: 23746 - protein, 282 aa, Oryza sativa
  unsure (1)..(282): unsure at all Xaa locations
  Clone ID: TF_OsC3062_1.pep
MRPPAMSPADSLAAGRSRRVGASMPRPKRVRVYFVDADATDTDSSGDEXLQAARPGGHRHRRRGRLAGAGAEAPEAAGSDGDGGAGPAXRAGMAASRRFRGVRRRPWGRFSAEIRDPSLQKRLWLGTFDTAEEAAAVYDDAALRIKGSHAVTNFPSDSDTPSAKAKQMKLHPRRHTTPDKTPSSSTAAAAKASVPDPTPAPPEEDRANDSSFNPFASPTSVLRYAAADEVTAPSFEHLLVELGDLSAPPPSTKAAEFDWLPWWEGEDFVTAGLTASNAVSVK

SEQ ID NO: 23747 - protein, 180 aa, Oryza sativa
  Clone ID: TF_OsC329744_1.pep
MAALFEAAETAAIVAALTRVIADGGRGGGGAVCVPPPAPSLAAAAVVVAAPATARRYRGVRRRPWGKWAAEIRDPRKAARVWLGTFRTTEDAARAYDAAVLRFRGRRAKLNFPEEASRPRRPWKGHDVDHMSCSPPSIANARFLGSWIFGPPPPSRSVAAATTTLLGGSHGSNGADNGRE

SEQ ID NO: 23748 - protein, 216 aa, Oryza sativa
  Clone ID: TF_OsC198236_1.pep
MCGGAIISDFIPQREAHRAATGSKRALCASDFWPSASQEAADFDHLTAPCTFTPDQAAEEPTKKRERKTLYRGIRRRPWGKWAAEIRDPAKGARVWLGTSGRAEAAARAYDRAARRIRGAKAKVNFPNEDPPLDDPAADGHSHGGAAIPCREFMDYDAVMAGFFHQPYVVADGVPAVPAEEAPTVAYVHHHLPPQPQQDAGLELWSFDNIHTAVPM

SEQ ID NO: 23749 - protein, 72 aa, Oryza sativa
  Clone ID: TF_LIB3433-061-P1-N1-C8.pep
HNNGVNRRPWGKYKVKIRDQTRHGARLWLGTFGTPEKAAAAYDRAAFRMRGAKAMLHLPPAVAGDGARRGAA

SEQ ID NO: 23750 - protein, 294 aa, Oryza sativa
  Clone ID: TF_OsC3842_1.pep
MPPCAAGKRSSIYRGVTRHRWTGRYEAHLWDKSTWNQNQNKKGKQGAYDDEEAAARAYDLAALKYWGAGTQINFPAYVHYVFAYLGKDITLDGKFAGTFGLERKIDLTNYIRWWLPKKTRQSDTSKMEEVTDEIRAIESSMQRTEPYKFPSHGLHSNSKPSSVVLSACDILTQSDAFKSFSEKSTKLSEECTFSKEMDEGKTVTPVPATGHDTTAVNMNVNGLLVQRAPYTLASVTAQMKNTWNPADPSADPLFWTNFILPASQPVTMATIATTTFAKNEVGDNILHVYGFPSS

SEQ ID NO: 23751 - protein, 126 aa, Oryza sativa
  unsure (1)..(126): unsure at all Xaa locations
  Clone ID: TF_286671.pep
RARSLCKQNAPTLPRASGSAPSPPPRRXPAPTTAPPAASAGPRPRSTSPTRTRHSTTRPPTAQPRRRRHPVQGVHGLRXRHGGLXXPALXXXRGLSXVRXRRXXGXVREXXLXXXRSRTXGLEFGV

SEQ ID NO: 23752 - protein, 373 aa, Oryza sativa
  Clone ID: TF_OsC23083_1.pep
MEEGFVALKRTEHVEVTSLAVAVEATPSAKGGKGKVVVGGGGAGGGVGPTRVRVFCDDFDATDSSSDEDEEEVTARRRVKRYVQEIRLQRAAAVAVPPVKVKGEEVFPAAVSAKMAEAAKARVVLAAGRKRKAGGVDGAEPRFRGVRRRPWGKYAAEIRDPWRRVRVWLGTFDTAEEAAKVYDTAAIQLRGRDATTNVHQSGDSASLDVPPEVAERVPQPPGASKNASPATSYDSGEESHAAAASPTSVLRSFPPSAVVATADTANKKQPPPPPLVVRETDESVDVFGCSFSDDGGFAGELPPLYTDFDLLADFPEPPLDFLSNLPVEPFSLAPFSSNNGSPDLHLDDAPSPAAAQVDDFFQDITDLFQIPVV

SEQ ID NO: 23753 - protein, 274 aa, Oryza sativa
  Clone ID: TF_OsC6641_1.pep
MTEKVIPAMAAARQDSCKTKLDERGGSHQAPSSARWISSEQEHSIIVAALRYVVSGCTTPPPEIVTVACGEACALCGIDGCLGCDFFGAEAAGNEEAVMATDYAAAAAAAAVAGGSGGKRVRRRRKKNVYRGVRHRPWGKWAAEIRDPRRAVRKWLGTFDTAEEAARAYDRAALEFRGARAKLNFPCSEPLPMPSQRNGNGGDAVTAATTTAEQMTPTLSPCSADAEETTTPVDWQMGADEAGSNQLWDGLQDLMKLDEADTWFPPFSGAASSF

SEQ ID NO: 23754 - protein, 237 aa, Oryza sativa
  unsure (1)..(237): unsure at all Xaa locations
  Clone ID: TF_OsC6832_2.pep
EEFVTCSRQEHGVPXGSSKYRGVTLHKCGXWRLGMGQFLGKKYVYLGLFDTEEEAARAYDRAAIKCNGKDAVTNFDPSIYAGEFEPPAAATGDAAEHNLDLSLGSSAGSKRGNVDGGGDDEITGGGGGGAGSDQRVPMAFDLDWQTAAARSTKAKFDQNSNHPQMPPVLQVTHLPFSPRHHHQFLSNGDPGTAGGLSLTIGAGMAGHWPPQQQQGWGNAGGMSWPHPPHPPPPPTNA

SEQ ID NO: 23755 - protein, 342 aa, Oryza sativa; identical to SEQ ID NO: 16145
  Clone ID: TF_OsC7160_1.pep

SEQ ID NO: 23756 - protein, 168 aa, Oryza sativa
  Clone ID: TF_jC-osroLIB3475060g11b1.pep
MMQPPYTYSNSYHHIHSSLPPEMSDRDVDMHILTALMADMADSSSSSSSSSSSSSSDDSDMRASAAAAEPEHRRSPAPPTPPRQQQMIGVRKRPWGKFAAEIRDSTRKGARVWLGTFDSPEAAAMAYDQAVFSVRGAFAVLNFPLHRVSGVASRPLPFGRRPGGNRPG

SEQ ID NO: 23757 - protein, 326 aa, Oryza sativa
  Clone ID: TF_OsC703_1.pep
MCGGAILADFTPARVPRRLTAAELLPVTPTPPAAERRTTRKRKSDVDFEAEFELFEDDDDDDEFELSDDGDESLAVSCVSSPKSKAVPSFSFSSDVSSSSRPRRRVAAAAAGRRKASKKSKYRGVRRRPSGRFAAEIRDPKKGRRVWLGTYGSAEEAAMAYDREARRIRGKGARLNFPRDGDGSPRRSNDRPCWTIDLNLPAAAVSGDDDDAMAVDAADADAGSAGRAAAYADQEALSAAKCKIKQCPRDEQMASATPELMEEDASSSRNMVPLSMALQLQYAAMIAECDREMEEIAAVERDLERRRRQVFERRGHLVRQASLLLD

SEQ ID NO: 23758 - protein, 280 aa, Oryza sativa
  Clone ID: TF_OsC4185_1.pep
MAAAIEGNLMRALGEAPSPQMQKIAPPPFHPGLPPAPANFSSAGVHGFHYMGPAQLSPAQIQRVQAQLHMQRQAQSGLGPRAQPMKPASAAAPAAAAARAQKLYRGVRQRHWGKWVAEIRLPRNRTRLWLGTFDTAEEAALTYDQAAYRLRGDAARLNFPDNAASRGPLDAAVDAKLQAICDTIAASKNASSRSRGGAGRAMPINAPLVAAASSSSGSDHSGGGDDGGSETSSSSAAASPLAEMEQLDFSEVPWDEAEGFALTKYPSYEIDWDSLLNNNN

SEQ ID NO: 23759 - protein, 396 aa, Oryza sativa
  Clone ID: TF_OsC819_1.pep
MCGGAIISGFIPPSAAAAAAAAAAKKQQGRRVTADVLWPGMLRKGKAAAAEEDFEADFREFERGMSDDEAEGGGGEEEEDDDDVVVVVPPPAAARFVVRAAAKAAPPTADGMLTTKLVQHDGPTARSAKHKRKNQYRGIRQRPWGKWAAEIRDPSKGVRVWLGTYNTAEEAARAYDAEARKIRGKKAKVNFPDEPAVAQKLSLKQNAAKQEKLAPPLKTCGDDAFFQLNSSDNDLFAMLAKVPAKPAEPVDLMPPVKPLASTETFEMNMLSDTSSNSFGSSDFGWEDDTLTPDYTSVFVPNAAMPAYGEPAYLTGGAPKRMRNNYGIAVPQGNGMPNLAQNMPTFDPEMKYLPLPYVESSSDESMDNLLQNDATQDGASNEGIWSLDELLMAAGAY

SEQ ID NO: 23760 - protein, 393 aa, Oryza sativa; identical to SEQ ID NO: 16163
  Clone ID: TF_OsC45661_1.pep

SEQ ID NO: 23761 - protein, 98 aa, Oryza sativa
  Clone ID: TF_OsC149947_1.pep
MRKSKQPQPQPSPEIRYRGVRKRPSGRYAAEIRDPAKKTPIWLGTFDSAEVAARAYDDAARSLRGPTARTNFPLAAPSAPPPRPPAAAAAAATSSHSS

SEQ ID NO: 23762 - protein, 172 aa, Oryza sativa; identical to SEQ ID NO: 16164
  Clone ID: TF_OsC160593_1.pep

SEQ ID NO: 23763 - protein, 72 aa, Oryza sativa
  Clone ID: TF_2799366.pep
HEDPKKRGSRVWLGTYDTAIEAARAYNRAAFRMRGAKAILNFPNEVGSRGADFLAPPPPPPPPITSTHGKRK

SEQ ID NO: 23764 - protein, 207 aa, Oryza sativa; identical to SEQ ID NO: 16156
  Clone ID: TF_OsC363381_1.pep

SEQ ID NO: 23765 - protein, 277 aa, Oryza sativa; identical to SEQ ID NO: 16157
  Clone ID: TF_OsC60460_2.pep

SEQ ID NO: 23766 - protein, 318 aa, Oryza sativa; identical to SEQ ID NO: 16161
  Clone ID: TF_OsC267094_1.pep

SEQ ID NO: 23767 - protein, 351 aa, Oryza sativa; identical to SEQ ID NO: 16176
  Clone ID: TF_OsC143388_1.pep

SEQ ID NO: 23768 - protein, 75 aa, Oryza sativa
  unsure (1)..(75): unsure at all Xaa locations
  Clone ID: TF_569065.pep
HYRGVRQRPWGKWAAEIRDPKKAARVWLGTFDTAEDXAIAYDEAXLRFKGTKAKXNFPEXFQGRTDLFLVTRGIP

SEQ ID NO: 23769 - protein, 260 aa, Oryza sativa; identical to SEQ ID NO: 16166
  Clone ID: TF_OsC407003_1.pep

SEQ ID NO: 23770 - protein, 338 aa, Oryza sativa
  Clone ID: TF_OsC19777_1.pep
MAAAIDMYKYNTSTHQIASSDQELMKALEPFIRSASSSSASSPCHHYYSSSPSMSQDSYMPTPSYPTSSITTAAATTTSSFSQLPPLYSSQYHAASPAASATNGPMGLTHLGPAQIQQIQAQFLAQQQQQRALAGAFLRPRGQPMKQSGSPPRAGPFAAVAGAAQSKLYRGVRQRHWGKWVAEIRLPKNRTRLWLGTFDTAEDAALAYDKAAFRLRGDLARLNFPTLRRGGAHLAGPLHASVDAKLTAICQSLATSSSKNTPAESAASAAEPESPKCSASTEGEDSVSAGSPPPPTPLSPPVPEMEKLDFTEAPWDESETFHLRKYPSWEIDWDSILS

SEQ ID NO: 23771 - protein, 94 aa, Oryza sativa
  Clone ID: TF_uC-osflcyp143g12b1.pep
FRPTDRKKRPRRSRDGPTSVAETIKRWAELNNQQELDPQGPKKARKAPAKGSKKGCMKGKGGPENTRCDFRGVRQRTWGKWVAENSEPDRQSRL

SEQ ID NO: 23772 - protein, 207 aa, Oryza sativa; identical to SEQ ID NO: 16170
  Clone ID: TF_OsC116_2.pep

SEQ ID NO: 23773 - protein, 195 aa, Oryza sativa
  unsure (1)..(195): unsure at all Xaa locations
  Clone ID: TF_8955884.pep
IGTSGDTIVFSRSAYGPDKLLFIDCKKNNAAAAAQQSSRYXGVVXHPNXXWGAQIYQRHXRVWLGXFPHKKAAARAYXXAALXXRGRDXATNFPRAAASXAXLPFLSAHSKXEXVHMLXXHTYPHKLXQGLPXGAAXAPXPXHPSWAREXLFQKGVTPXXXXTQXLLVPQHTPKKXPPAGPISHKGFHFKRKSVL

SEQ ID NO: 23774 - protein, 315 aa, Oryza sativa; identical to SEQ ID NO: 16171
  Clone ID: TF_OsC164210_1.pep

SEQ ID NO: 23775 - protein, 334 aa, Oryza sativa; identical to SEQ ID NO: 16173
  Clone ID: TF_OsC3461_2.pep

SEQ ID NO: 23776 - protein, 178 aa, Oryza sativa
  unsure (1)..(178): unsure at all Xaa locations
  Clone ID: TF_OsC160593_2.pep
MARPQQRYRGVRQRHWGSWVSEIRHPLLXSSVALGTFETAEDAARAYDEAARIMCGPRVRTNFPHDVADEAAPPPPPHSAAAASSSFLSAALVAKLHRFNLASVQAAQRGNSNDDDSTTSSSAAASSRAVIPSLPAAAGALGNAAATAEWSGGFLEEQYVDQMIEELLDSNFSMEISC

SEQ ID NO: 23777 - protein, 365 aa, Oryza sativa; identical to SEQ ID NO: 16180
  Clone ID: TF_OsC1774_1.pep

SEQ ID NO: 23778 - protein, 370 aa, Oryza sativa
  unsure (1)..(370): unsure at all Xaa locations
  Clone ID: TF_OsC1713_4843.pep
MEQEAAMVVFSCNSGSGGSSSTTDSKQEEEEEEELAAMEEDELIHVVQAAELRLPSSTTATRPSSRYKGVVPQPNGRWGAQIYERHARVWLGTFPDEEAAARAYDVAALRFRGRDAVTNRAPAAEGASAGELAFLAAHSKAEVVDMLRKHTYDDELQQGLRRGSRAQPTPRWAREPLFEKAVTPSDVGKLNRLVVPKQQAERHFPFPLRRHSSDAAGKGVLLNFEDGDGKVWRFRYSYWNSSQSYVLTKGWSRFVREKGLRPGDTVAFSGSGXYGPDKLLFIDCKKNKHGGRPPATRSQITSRRSNTASVRLFRHGHHRRRRQIARKRERQVEMGQEAVLDEEAMQWFISSTPALGAPAVITSNQFIYTS

SEQ ID NO: 23779 - protein, 282 aa, Oryza sativa
  Clone ID: TF_OsC6641_2.pep
MTNRISAMGGNQEYMIRFDGHIDDASPSSATAEPPPPLPPPRPFAGRAISAEREHSVIVATLLHVISGYRTPPPEVFPAARAEVCGVCGMDQCLGCEFFAGESGVVSFDGAEKVAAAAAAAAAGAAAGQRRRRKKKNKYRGVRQRPWGKWAAEIRDPRRAVRKWLGTFDTAEEAARAYDRAAVEFRGPRAKLNFPFPEQLSAHDDSNGDASAAAKSDTLSPSPRSADADEQVEHTRWPQGGGGGGGGGGGETGDQLWEGLQDLMQLDEGGLSWFPQSSDSWN

SEQ ID NO: 23780 - protein, 727 aa, Oryza sativa
  unsure (1)..(727): unsure at all Xaa locations
  Clone ID: TF_OsC48348_1.pep
MATTTWCCGCCCSCLATARSRSSVLNSGDAGGGGGGGGGGGLFRFDLLASSPDDDECSGEQHQLPAASGIVTRQLLPPPPPAAPSPAPAWQPPRRAAEDAALAQRPCHTRHESSPTRLPRRHRRRRRSRSLXAAKKSRRGPRSRSSQYRGVTFYRRTGRWESHIWDCGKQVYLGGFDTAHAAARAYDRAAIKFRGVEADINFNLSDYEEDMRQMKSLSKEEFVHVLRRQSTGFSRGSSKYRGVTLHKCGRWEARMGQLLGKKYIYLGLFDTEVEAARAYDKAAIKCNGREAVTNFEPSTYDGELPTDAAAQGADVDLNLSISQPAASQQSPKRDSGSLGLQIHHGSFEGSEFKRAKNDAAPSELASRPHRFPLLTEHPPIWTAQPHPLFPNNEDASRSSDQKRKPSEGVAVPSWAWKQVSHHHPAPPHTLPLPFFSSSSSSPSSSSAAASSGFSKAATTAAAAQHTATLRFDPTAPSSSSSSRHHHHLDKKKKPSPTEICGNRQFFSGRPGVSTFSSAPAGGRVFLVVISXLGFMTVFASTHKTPKKCSKGSYRRRRRSRPASYNVDALPDAGNEAIVDGDLDLDLRISQPNARDSKSDVATTGLQLTCDSPESSNITVHQPMGSSPQWTVHHQSTPLPPQHQRLYPSHCLGFLPNLQERPTARRAEQGPMPFPTQAWQMQAPSHLPLLHAAASSGFSAGAGAGVAAATRRQPPFPADHPFYFPPTA

SEQ ID NO: 23781 - protein, 318 aa, Oryza sativa
  Clone ID: TF_OsC34060_1.pep
MMVPSSRKVRVFCSDPDATDSSDEDDQNKKERRFSREILIPMENSKASKPVKTLVQCGTKTVKDSEKEPTSKYRGVRRRAWGKWAAEIRDPVRKSRKWIGTFNSEEEAAAAYLAQSNQFHEELMALKIQSSVSEQEDLSSSVTISCVSSSQSCDQKIQAKPQEHKRVSVVVNRETVEQKFKAQPQAQKIKAQPEVQKRVSVKISHETEDEHLLNLPSTPKGKEISMGAVLGRIDEIPVSNCVGHIDEFPPDDFTRLADAFPVSDFIGMADVPLGDDYIGLADISHLPLPITDLKFDLNAELNWDGFDFASLEQELNCL

SEQ ID NO: 23782 - protein, 232 aa, Oryza sativa; identical to SEQ ID NO: 16079
  Clone ID: TF_OsC111_3.pep

SEQ ID NO: 23783 - protein, 328 aa, Oryza sativa; identical to SEQ ID NO: 16177
  Clone ID: TF_OsC393619_1.pep

SEQ ID NO: 23784 - protein, 318 aa, Oryza sativa; identical to SEQ ID NO: 16178
  Clone ID: TF_OsC393619_2.pep

SEQ ID NO: 23785 - protein, 498 aa, Oryza sativa; identical to SEQ ID NO: 16024
  Clone ID: TF_OsC917_2.pep

SEQ ID NO: 23786 - protein, 69 aa, Oryza sativa
  unsure (1)..(69): unsure at all Xaa locations
  Clone ID: TF_3106746.pep
PWGKWAAEIRDPKKAARVWLGTFDTAEDAIAYDEAXFKGTKAKLNFPXXXQGRTDLFLVTRGIPPHPPP

SEQ ID NO: 23787 - protein, 241 aa, Oryza sativa; identical to SEQ ID NO: 16023
  Clone ID: TF_OsC2775_1.pep

SEQ ID NO: 23788 - protein, 330 aa, Oryza sativa; identical to SEQ ID NO: 16025
  Clone ID: TF_OsC143164_1.pep

SEQ ID NO: 23789 - protein, 340 aa, Oryza sativa
  Clone ID: TF_OsC1639_1.pep
MAPSKQQQQLMLLKKVMAKKPKTKRLSGFGLKPSAAFSRPHVPSAAASLQPSRRVRVVFEDPDATDSDSDDDEDAGAASKKRYFELFIGKPASSTKQASPASTVAAYANIGKVGSTCYRGVRLRKWGKWAAEIRNPFTGHREWLGTFDTADAASAAYQSASRNFAEEKRRRGVASSASPASSATPTPTASSSSSTSAAPFAHPSPSSVLEATKPAPKPESPPLPEQAATPLLVEATNETAELPDDPEFYKDILRGLQLPDIDPMDFRAGLDALDISDVPAYMNGEQDVLFTEDMLLGDFAEEDDLDLDDIGDDFCEDFPEIPSGYDFGRGDMFRQVDFCV

SEQ ID NO: 23790 - protein, 233 aa, Oryza sativa
  Clone ID: TF_OsC257865_1.pep
HESPLLSPPARGPFPIPTASIPIPISSIPELGAGMRRGGAAEEDAEAARFRGVRKRPWGRYAAEIRDPAKKARVWLGTYDSAEDAARAYDAAARALRGAKAKTNFPLSLPHAQPQLHHHHHHHLTYPAAAVVAARPATSSLSSTVESFGTRPRPVLPPRPPPPPPIPDGDCRSDCGSSASVVDDDCADAAASPSCRLPFQFDLNLPPGGGGGGGGGFGCAYDDEELRLTALRL

SEQ ID NO: 23791 - protein, 106 aa, Oryza sativa
  Clone ID: TF_OsC366234_1.pep
MERSEARSVADGGGSKSRKCCPLRRSRKGCMKGKGGPENQRCPFRGVRQRTWGKWVAEIREPNRGARLWLGTFNTALDAARAYDSAARALYGDCARLNLLLAGICC

SEQ ID NO: 23792 - protein, 198 aa, Oryza sativa
  unsure (1)..(198): unsure at all Xaa locations
  Clone ID: TF_OsC155_1.pep
MCGGAIIADFVPPAGARRAAASXSPTTPSSPLPVPVTSRSRRPRRRRRXRKTAYRGIRRRPWGRWAAEIRDPRKGARVWLGTYATAEEAARAYDVVARDIRGAKAKLNFPPTIGAAAAPPPPKKRRKAAAAANHHHHHHQQESSGSSSASSLPPTPPPAAEHQLRECMSGLEAFLGLEEEEDDGGAGEPWDAVDMMLE

SEQ ID NO: 23793 - protein, 250 aa, Oryza sativa; identical to SEQ ID NO: 16034
  Clone ID: TF_OsC111_1.pep

SEQ ID NO: 23794 - protein, 221 aa, Oryza sativa
  Clone ID: TF_OsC111_2.pep
MCGGALIPNDYGDDDWEAAFREFIAGDDDDDDGGVSMFPSGAGTMETTTEVAPAAAVVERPRRRRRVRRSYPYRGVRQRPWGRWASEIRDPVKGARVWLGTFDTAVEAARAYDAEARRIHGHKARTNFPPDEPPLPAPSQAPFCFLLDDDDDDDGVARGNSPASSSAPDRASACTTSSTVASGERGDELILLECCSDDVMDSLLAGFDVSSEPRSVLGMVN

SEQ ID NO: 23795 - protein, 297 aa, Oryza sativa; identical to SEQ ID NO: 16042
  Clone ID: TF_OsC10760_1.pep

SEQ ID NO: 23796 - protein, 1628 aa, Oryza sativa
  Clone ID: TF_OsC396045_1.pep
MDPEERVAEAMKGLLVEYSQQSARLAVQVRGNEYRRAAAAGGGGGFLLSPGERERLRAGSGLELVIVPVMEGDQVVSSSASAEVLVSPLVEGEVRVVPAVERRRWRRQAAAEEWEEIDPETKYRGVRVRFGTRYVAEIHNPTGAGRLWLGTFDTAEQGAWAYDAAARVLRGEAAATNFGDPAQTPSPLSAEMRSMLAFFDRARARRERVVEERGAAAAEAEASEAPAPAPLLLLPAPPPSSDVSPVTVQVAAPPSSSDAAPVPATLLSDASPVIVQVPVPPSSDAAPVPAPTLSDASPVPVQVPAPPSSDVALVPVPVQVPAPTSSGSDEAAFVGGRGRGAGAGVGGGRGLGRGGGGGRGRGGKRAPTTAVTVVAPPPPVPTPAAGAAAPTLAPASAAAHAPALSVEPDALVSPASIAPAYAAPAPAPAPAALEALAPPPPAAPASLSASGGERGCVAIANAAVAGRGRGRGSGAKRAPTAVTVGAPPPQARTPAAAPAKAFVSAPAPAPSSVISPVLAASASAAAAFAPAPAPAAAEVIPPPPLPAAASTAAAPAAERKRKLLTASSLSSSGGERGRGRARGRGRVADAAIAGGSRGRGRGCGLTPAVVTVGAPPPPSAAPAPAPASAPSLEPNDIIAPVVSSTLAPGASAAAAAAPAVAPPAAALEAILIPMPPPAAAAAAAAPVPKKRKVRTASTLSGSGGPGRGRGRVAEATFVGRGRGVWSVRGRGRGRIPTEVTVGTPSPSAPTPAPASATAPLIQSNVVISPVPPTLAASGVAAWPPVPAIPELTTAAAAPLPEKPVLTAHDVVMATLFPNGVFSYTAGSSHAPPPPVASGSFFQEVIPPGGVPTNYAIHEAPDFDPNVFFADVPDGEQDELVLLSLTSTLLDIDNSLTLVADDAASSAQAAVDVASSSAQAAIDVPSSSVLAVVDIPSSSAQAAIDVPASLAQAATDVASSSTQGAFVGGRGSGRGASVGVGGGRGLLRGVGTGHGRGGGGGRGRGGKCAPTAVTVVAPPLPVPTPAVHAPAPPVEPNAVISPPSSALAPAYAVPAPAPSLAALEALAPPPATPATLSASSREHGLGRGRGCVAIANAAGRGHGRGSETKCAPTVVIVGAPPPPAPIPAATPAKALVSAPAPAPISTVSSTLAASASAAAAFAPAPVAAEAIPPPPPPLPAAATAVAAPAPDRKRKLQTASTLFASGGERGRGRARGRGRVADAAVAGGNRGRGRGCGLTSAVVTAGAPLPPSAAPVPVPASAPTMEPNATISPGSSTLAPGASAAAPAVAPPTAVPEAILVPMPPPAVAAAAAAPVPKKRKLQTASTLSKSGGPERGRGRVAEATFASRGRGVWNGRGRGRGRIPTAVTVGTPSPSAPTPATEPALVPASASALATAPLMQPNVVISPVPSTLAASGAAAPPPVPATPELATAAATPLPEKRVLTAHEVVMATLFPNGVFSYTAGPSHAPPPPPAARPAASDSFFQVVIPPGGVPTNYAVHEALDFDPNIFFADVPDGEQGEPVLLSSMSMLLDVDTSSSLAADDASSSAQAAVDVASLSAQAAVDVPSSSVQAFINVPSSSAQAAIDVPSSSAQAATDVASSLTQGAAGNERPIVFDFDLNEPSSNYE

SEQ ID NO: 23797 - protein, 180 aa, Oryza sativa
  Clone ID: TF_OsC332429_1.pep
MSTTNSSSSVSVPAMDAHGQEEEEEPMQVQQQQAFRGVRKRPWGKFAAEIRDSTRNGVRVWLGTFDSAEEAALAYDQAAFAMRGSAAVLNFPMEQVRRSMDMSLLQEGASPVVALKRRHSMRAAAAGRRRKSAAPAPADQEGGGGVMELEDLGPDYLEELLAASQPIDITCCTSPSHHSI

SEQ ID NO: 23798 - protein, 399 aa, Oryza sativa; identical to SEQ ID NO: 16043
  Clone ID: TF_OsC341110_1.pep

SEQ ID NO: 23799 - protein, 224 aa, Oryza sativa; identical to SEQ ID NO: 16028
  Clone ID: TF_OsC251034_1.pep

SEQ ID NO: 23800 - protein, 289 aa, Oryza sativa; identical to SEQ ID NO: 16048
  Clone ID: TF_OsC303620_1.pep

SEQ ID NO: 23801 - protein, 235 aa, Oryza sativa; identical to SEQ ID NO: 16046
  Clone ID: TF_OsC375_1.pep

SEQ ID NO: 23802 - protein, 225 aa, Oryza sativa
  Clone ID: TF_OsC120_4.pep
MDDSSFGSEPTTSSSGGEAPASPPSTASSSSDGAGGKKKRPRKDGHHPTYRGVRMRSWGKWVSEIREPRKKSRIWLGTFATAEMAARAHDVAALAIKGRAAHLNFPDLAHELPRPATAAPKDVQAAAALAAAADFPASSANAGASNNPDGSDDASAGSASPPPPPDAADDALFDLPDLLLDLRYGPPSSGLSCASSWEDEVGLISGAGAAAAGVFRLEEPLLWEY

SEQ ID NO: 23803 - protein, 456 aa, Oryza sativa
  Clone ID: TF_OsC7483_1.pep
MSTKKRARWDPPPEEENGGPTRQSAQVRYYSTARLPVGPSGLRWGAVAAVLQPHPPTPCTRSTVRLPLPADGPYLSVKVLFPVHVSLSLLDSISNFRVLSSSNASKTELVKKYCQTMDGILDHLEVALNRAFPQITPDGELSKVLEELGATINEATELVGGWNQMMSKIYFVIQADSIIAKMQIYVFELCQIVNSLMQIESMHLEDLEHDSCGKISDVIREASRALAGEVMPNSEEFGKIQTTLSLSTNQELLMEYVALVKIKTKGNHEDNKEMDDINDIVELVNHMLDKHVEEKQTRSINGVTIPADFCCPLSLELMSDPVIVASGQTYEHVFIRKWFDLGYNICPKTRQILGHTKLIPNFTVKQLIENWCEMIECHHLGRVVRDGGGLRRGVGPQPQPLPRAGHPDLRHPLPPPPPPHAPVPAPLLLLAAAALRPAHCLLRRAEINLTVISLRS

SEQ ID NO: 23804 - protein, 377 aa, Oryza sativa; identical to SEQ ID NO: 16049
  Clone ID: TF_OsC371165_1.pep

SEQ ID NO: 23805 - protein, 318 aa, Oryza sativa
  unsure (1)..(318): unsure at all Xaa locations
  Clone ID: TF_OsC16652_1.pep
MTARSMLRNHPEASVLDTIRQHLLEEPRGGGGGEAAEASFGSLVADMWSDSLPFRDDDADDMVVFGAMRDAFSCGWLPDGVFAEVKPEPLLSPDSSSYDGSSCCFGFADVSEPVTPSDAASGAAEAAAAAAAATAEHGKEEEAAAAVARGKHYRGVRQRPWGKFAAEIRDPAKNGARVWLGTFDTAEDAALAYDRAAYRMRGSRALLNFPLRIGSEIAAAAAAAAAAAAGDKRPSPEPATSESSFSSSSSCTTTTTSSSTSSSGSPKRRKRGEAAAAXMSMPLVPPPSQLNWPVQAWYPAAAPVEQVAITPRVEQLVI

SEQ ID NO: 23806 - protein, 323 aa, Oryza sativa; identical to SEQ ID NO: 16057
  Clone ID: TF_OsC418377_1.pep

SEQ ID NO: 23807 - protein, 321 aa, Oryza sativa; identical to SEQ ID NO: 16060
  Clone ID: TF_OsC343773_1.pep

SEQ ID NO: 23808 - protein, 119 aa, Oryza sativa
  Clone ID: TF_rsiced_10763.y1.abd.pep
MDWAYSGNSYGYGYYSSGTSSPPAGGEDAYMTVSSAPPKRRGGRTKFKETRHPVYKGVRSRNPGRWVCEVREPHGRQRIWLGTFETAEMAARAHDVAALALRGRAACLNFADSPRRLRV

SEQ ID NO: 23809 - protein, 222 aa, Oryza sativa
  Clone ID: TF_OsC16240_1.pep
MAPRNAAEAVAVAVAEGGGDGMEPRFRGVRKRPWGRYAAEIRDPARKARVWLGTFDTAEAAARAYDSAALHFRGPKAKTNFPVAFAHAHHHAPPPPLPKAAALAVVSPTSSTVESSSRDTPAAAPVAAAAKAQVPASPSLDLSLGMSAMVAAQPFLFLDPRVAVTVAVAAPVPRRPAVVSVKKEVARLDEQSDTGSSSSVVDASPAVGVGLDLNLPPPIEEA

SEQ ID NO: 23810 - protein, 111 aa, Oryza sativa
  Clone ID: TF_jC-osflLIB3479036h12b1.pep
MDAHGDESFAAAKAPAPGRKTAYRGIRRRPWGRWAAEIRDPRKGARVWLGTYATAEEAARAYDVAARDIRGAKAKLNFPPTIGAAAPPGAKKRRKAAAAANHHHHHHQQES

SEQ ID NO: 23811 - protein, 397 aa, Oryza sativa; identical to SEQ ID NO: 16206
  Clone ID: TF_OsC11135_2.pep

SEQ ID NO: 23812 - protein, 120 aa, Oryza sativa
  Clone ID: TF_LIB4309-024-R1-K1-C1.pep
MAAAATAAASPVEGLTGGGGGGGGGVDGLFVELWRACAGPLVTVPAVGERVFYLPQGHIEQVEASTNQVAEQQGAPLYNLPWKIPCKVMNVELKAEPDTDEVYAQLTLLPGEQQDGNGSG

SEQ ID NO: 23813 - protein, 867 aa, Oryza sativa; identical to SEQ ID NO: 16185
  Clone ID: TF_OsC1713_3674.pep

SEQ ID NO: 23814 - protein, 852 aa, Oryza sativa
  Clone ID: TF_OsC788_1.pep
METKQQRARRNRRGSQDMEEEWPYPLLSKEIDARHRAKKIYDGNSCSSLAVLIPRTAGWLSAAGLLTFVQMTQARMHYDAREPKQKLMGAHSKRRQNIDKSLLMALVDRWRPETHTFHLPCGEMTITLQDVSMLTGLPLAGQAIVLPDPPEDWRDDIVSRYACILSRYATGDTDDDEDKIFFSEKETHGPTLKWLSQFEVRYMPDDVQEYQLTLYLEAYLLWLFGWVMFTGSHGNPVDARLIPLARQIAEGNISPSTQFTWGSAILAATYRGFCDACIKTGQREAIFTGCPLLVMLWSYERFSFGRPYMSVAVAHKDDYTDAVDDRPTFGTRWCYGPPQWARIQVHNVYEYFTEAFESLRENEVRWTPYTNEEAILRAPHGVSILCYRDEAYWMTRKMLVYDIFVEGQNRQADNRFCRSMHSRMTPWIEAWSQALNDVVHETRAYDHNTYKQYMAWYTSQTRIRLLAPEDPDERGPPTIDQIYDMQLAPPAHLTTDIAGELVKEAKTLWEKLRDGMAGTNQEVMAAVDSLRRKGKRIMRLASCRHSSDIYNPATSRRTFEPMRERPSTSSRPSTSSRPSASARRSSDGRVGVRSTSFREPPTIPTIPKITEISERLGGFGSTQAQPEWVPPYSSTPITSQWQGESASFAEGTRMVRPVPHMPPARPQMIRQMAPDVPTSHWQGGFAPFAGTSQGIPTIPQMSADFIGQGGFTSLGGPTQPVPLHAPTYGTNPWQGQSMDYGGSFRPELMSGFRPYTTSYGDMSCFGGGSSSVPNELRTSQTDDAPQVTQPIQPEVGEGNDNDPRRSNRERHEPNRLSLSGPRHAVGQRKKTTKKRGGTSMTTTDHDDDDEYN

SEQ ID NO: 23815 - protein, 908 aa, Oryza sativa
  Clone ID: TF_OsC789_1.pep
MKLSPSAGGVSDQPPSPPEVAEEQKCLNSELWHACAGPLVSLPAVGSRVVYFPQGHSEQVAASTNKEMESQIPNYPNLPPQLICQLHNVTMHADAETDEVYAQMTLQPLSPQELKDPFLPAELGTASKQPTNYFCKTLTASDTSTHGGFSVPRRAAEKVFPPLDFTQQPPAQELMAKDLHGNEWKFRHIFRGQPKRHLLTTGWSVFVSAKRLVAGDSVLFIWNDSNQLLLGIRRANRPQTVMPSSVLSSDSMHIGLLAAAAHAASTNSRFTIFYNPRASPSEFVIPLAKYVKAVYHTRISVGMRFRMLFETEESSVRRYMGTITGISDLDPVRWMNSHWRSVKVGWDESTAGERQPRVSLWEIEPLTTFPMYPSPFPLRLKRPWPTGLPSLYGGKEDDLASSLMWLRDSQNTGFQSLNFGGLGMSPWMQPRLDSSLLGLQPDMYQTIAAAAALQNTTKQVSPAMLQFQQPQNIVGRSSLLSSQILQQAQPQFQQMYHQNINGNSIQGHSQPEYLQQPLQHCPSFNEQKPQLQPQQQQQESHQQQPQHQQMQQQKHLSNFQTVPNALSVFSQLSSTPQSTPSTLQTVSPFSQQHNFPDTNISCLSPSNVSSMHDTLRSFPSEAASDLPGVPRITPVPVSDPWSSKRVAVESTITSRPHDISSQIENFDLTPSSIPQNSTLAPLPGRECLVDQDGSSDPQNHFLFGVNIDSQSLLMQDGIPSLHNENSSSTIPYSTSNFLSPSQDDYPLSQTLTTPGCLDESGYVPCSDNADQVKRPHATFVKVYKSGTVGRLLDITRFSSYHELRSEVGRLFGLEGQLEDPLRSGWQLVFVDREDDVLLVGDDPWQEFVNSVSCIKILSPQEVQQMGKPGIELFSTSARRLGNSCDNYMSRQESRSLSTGIASVGSVEF

SEQ ID NO: 23816 - protein, 808 aa, Oryza sativa
  Clone ID: TF_OsC788_8.pep
MPPAAMAPPPPPQGSSTGDPLYDELWHACAGPLVTVPRVGDLVFYFPQGHIEQVEASMNQVADSQMRLYDLPSKLLCRVLNVELKAEQDTDEVYAQVMLMPEPEQNEMAVEKTTPTSGPVQARPPVRSFCKTLTASDTSTHGGFSVLRRHADECLPPLDMTQSPPTQELVAKDLHSMDWRFRHIFRGQPRRHLLQSGWSVFVSSKRLVAGDAFIFLRGENGELRVGVRRAMRQLSNVPSSVISSQSMHLGVLATAWHAINTKSMFTVYYKPRTSPSEFIIPYDQYMESVKNNYSVGMRFRMRFEGEEAPEQRFTGTIIGSENLDPVWPESSWRSLKVRWDEPSTIPRPDRVSPWKIEPASSPPVNPLPLSRVKRPRPNAPPASPESPILTKEAATKVDTDPAQAQRSQNSTVLQGQEQMTLRSNLTESNDSDVTAHKPMMWSPSPNAAKAHPLTFQQRPPMDNWMQLGRRETDFKDVRSGSQSFGDSPGFFMQNFDEAPNRLTSFKNQFQDQGSARHFSDPYYYVSPQPSLTVESSTQMHTDSKELHFWNGQSTVYGNSRDRPQNFRFEQNSSSWLNQSFARPEQPRVIRPHASIAPVELEKTEGSGFKIFGFKVDTTNAPNNHLSSPMAATHEPMLQTPSSLNQLQPVQTDCIPEVSVSTAGTATENEKSGQQAQQSSKDVQSKTQVASTRSCTKVHKQGVALGRSVDLSKFSNYDELKAELDKMFEFDGELVSSNKNWQIVYTDNEGDMMLVGDDPWEEFCSIVRKIYIYTKEEVQKMNSKSNAPRKDDSSENEKGHLPMPNKSDN

SEQ ID NO: 23817 - protein, 899 aa, Oryza sativa; identical to SEQ ID NO: 16208
  Clone ID: TF_OsC790_1.pep

SEQ ID NO: 23818 - protein, 783 aa, Oryza sativa; identical to SEQ ID NO: 16209
  Clone ID: TF_OsC794_2.pep

SEQ ID NO: 23819 - protein, 238 aa, Oryza sativa
  unsure (1)..(238): unsure at all Xaa locations
  Clone ID: TF_LIB4506-019-R1-K1-E8.pep
MSSQGAGGGVGDPELFAELWRACAGPLVEVPQRDERVFYFLQGHLEQLQEPTDPALLAEQIKMFQVPYKILCKVVNVELKAETETDEVFAQITLQPDPDQENLPTLPDPPLPEQPRPVVHSFCKILTPSDTSTHGGFSVLRRHANECLPPLDMSMATPTQELITKDLHGSEWRFKHIYRDCSSFMCMLALIRXILGSLGQPRRHLLTTGWSTFXVTSKKLISXDAXFVYLRSETGEQR

SEQ ID NO: 23820 - protein, 917 aa, Oryza sativa; identical to SEQ ID NO: 16210
  Clone ID: TF_OsC789_2.pep

SEQ ID NO: 23821 - protein, 712 aa, Oryza sativa
  Clone ID: TF_OsC785_1.pep
MTGIDLNTVEEDEEEAAEEVAANGSSPAPARAGAVCLELWHACAGPVAPLPRKGGVVVYLPQGHLEHLGDAPAAAAAAAAVPPHVFCRVVDVTLLADAATDEVYAQLSLVPEKEEVARRADDGEGEDGDGMKQRFARMPHMFCKTLTASDTSTHGGFSVPRRAAEDCFPPLDYSQQRPSQELVAKDLHSTEWRFRHIYRGQPRRHLLTTGWSAFVNKKKLVSGDAVLFLRGDDGELRLGVRRAAQLKNGSAFPALYNQCSNLGTLANVAHAVATESVFNIYYNPRLSQSEFIVPYWKFMKSLSQPFSVGLRFKMRYESEDATERRYTGIITGSGDTDPMWHGSKWKCLLVRWDDDAEFRRPNRVSPWEIELTSSVSGSHLSTPHSKRLKPCLPHVNPEYMVPRGGGCPDFAESAQFHKVLQGQELLGFKSHGGTAAATSQPCEARHLQYIDERSCSSDASNSILGVPRLGDRAPLGNPGFSYHCSGFGESHRLQKVLQGQELFRPYRGTLVDASMGSNGFHQQDSPRAPGVVNKWQAQLHGRAAFHGPPALALPSQSSSPPSVLMFQQANSKMPRLEFGHGQLDKHENDRRVRFGPSEGIERREQRIPLQPYPTSGEVIDGQVTVEKSHSPGRHGKDGPDNKAVGTNSCKIFGISLTEKVPAREELDDGDANYSLQSLKQVPKSLGNSCATVHEQRPVVGRVIDISTMDMMI

SEQ ID NO: 23822 - protein, 699 aa, Oryza sativa
  Clone ID: TF_OsC795_1.pep
MSSQGAGGGVGDPELFAELWRACAGPLVEVPQRDERVFYFLQGHLEQLQEPTDPALLAEQIKMFQVPYKILCKVVNVELKAETETDEVFAQITLQPDPDQENLPTLPDPPLPEQPRPVVHSFCKILTPSDTSTHGGFSVLRRHANECLPPLDMSMATPTQELITKDLHGSEWRFKHIYRGQPRRHLLTTGWSTFVTSKKLISGDAFVYLRSETGEQRVGVRRLVQKQSTMPASVISSQSMHLGVLASASHAIKTNSIFLVYYRPRLSQSQYIVSVNKYLAASKVGFNVGMRFKMSFEGEDVPVKKFSGTIVGEGDLSLQWSGSEWKSLKVQWDEVTNVNGPERVSPWEIETCDGTAPAINVPLQSATKNKRPREPSETIDLQSLEPAQEFWLSGMPQQHEKTGIGSSEPNCISGHQVVWPGEHPGYGAVSSSVCQNPLVLESWLKDFNSSNKGVSPTLSEISQKIFQVTSNEARIATWPARSAYQAEEPTSKLSSNTAACGYRTEEVAPNASKVVEGKKEPAMFRLFGVDLMKCTSISTTTDDKSSVGAGEASAKGTGSHEDSGQLSAFSKVTKEHIAADESPQEIQSHQNYTARTRIKVQMHGNAVGRAVDLANLDGYEQLMNELEEMFNIKDLKQKWKVAFTDDEGDTMEVGDDPWLEFCQMVRKIVLYPIEDEKKIEPHPKLLSSANPEQDQKTGF

SEQ ID NO: 23823 - protein, 668 aa, Oryza sativa; identical to SEQ ID NO: 16212
  Clone ID: TF_OsC86356_1.pep

SEQ ID NO: 23824 - protein, 559 aa, Oryza sativa
  Clone ID: TF_OsC12032_1.pep
MGIDLNNTASGGEEDAPAPGPVCRDLWHACAGPVVSLPRRGSAVVYLPQGHLSAAGAGGGIRGEVAVALPPHVACRVVDVELCVFERNLHGGGIEREDDMEDGDEERKSRMLHMFCKTLTASDTSTHGGFSVPRRAAEDCFPPLDHKQLRPSQELVAKDLHGAKWRFRHIYRGQPRRHLLTTGWSSFVNKKKLVSGDAVLFLRGDDGELRLGVRRATQLKNEAIFKAFSSESSKMRTLSAVADSLKHGSVFHICYNPRATASEYVVPYWKFVKSFNHPVCIGMRFKFHFESEDVNERRSGMIAGVSEVDPIRWPGSKWRSLLVRWEDATDCNSQNRVSPWEIEIVGGSISVAHSLSASSSKRTKLCPQGNLDVPALYGNGRPDSVETEKFPRVLQGQELMGSRTHRATCSPQSIDITKIQQADFQCSTLAIPTNLLMLYQTGVPQLELASKNNDKSGNDSQPALRQHKLLSETSWDQFKIGKASTPGNATKPGNGGREVDRTSCRLFGFSLTEKIIPTDKDGEKEVRIRTCGDAATPRFIPDVNGIGLVMVPPFLMLCM

SEQ ID NO: 23825 - protein, 1096 aa, Oryza sativa
  Clone ID: TF_OsC792_1.pep
GATKVNQELWYACAGPLVSLPPQGSLIVYFPQGHSEQVAASMRKDADAQIPSYPNLPSKLICILHSVTMLADPDTDEVYARMTLQPVSNCDKETLLASELALKQTRPQTEFFCKTLTASDTSTHGGFSVPRRAAERIFPRLDFSMQPPAQELQARDLHDNVWTFRHIYRGQPKRHLLTTGWSLFVSGKRLLAGDSVLFIRDAKQQLLLGIRRANRQPTNLSSSVLSSDSMHIGILAAAAHAAANNSQFTIYYNPRASTSEFVIPFAKYQKAVYGNQLSLGMRFRMMFETEESGTRRYMGTITGISDLDPVRWKTSHWRNIQVAWDEAAPTERRTRVSLWEIEPIIAPFFIYPSPLFTAKRPRLPGMTDDETEMDGLLKRAMPWVGEEICKKDLNIQNSVVPGLNLAQWMNMQHSSSLPGTVVQPELLNSLSGKPVQNLAAADLSRQISFHPQFLQQNNIQFNTALVPQQNQQTEQLAKVIPTPNQLGSVIIPQKVVQDCNSEQRQHVVTQPVQGSQPNINIPQPQLVVQAQLQQPQVILQAQLQQPQVVVQAQLQQTQPSVQSHTVLQGGLQQIQLLQQQQPHVQHQQIPQQLHHQQQQTQQLQPVQQVQQSVQEHQQIKIQPVHVSMDASMNTQVADHQMKLQLLKALQPQQPLISEQQKMLLDLQQQVINSQSAPQQCVQVTNQAISLHNSNTIQYPTQQKVQSHQVQDLTGNVIPNSKSDIATSMGASSLHVAGGRQLLKTDDVPSTSTSPSTNSNPVLLQSIPSSSKNQSLTTAGKTSQSSVVLGPTIEQDTKPYQNVKQTVMIPKTTEQRPATGQDCINNNPQMDYLDTSSSATSVCLSQADGSLQQNFPPSSFHQHHLLKDTVPDSEFEVTDPRNNLLFGVNIDGQLGLPLNADLLANDIGTDKYMDQLPGNGISNFISSKDSQQELSSSMISHSFGVADMAFNSIDSAINDTPFLNRNSRSAAGPAHQRMRTYTKVHKRGAVGRSIDINRYSGYDELKHDVARMFGIEGQLGDQNRVGWKLVYEDHEKDVLLVGDDPWEDFVKCVRCIRILSPQEEMQMRLVGDFGDSFLPNQACSSSDGGHPWRITGD

SEQ ID NO: 23826 - protein, 182 aa, Oryza sativa
  unsure (1)..(182): unsure at all Xaa locations
  Clone ID: TF_LIB3475-006-P1-K1-D7.pep
PRVRPRVRFQVPYKILCKVVNVELKAETETDEVFAQITLQPDPDQENLPTLPDPPLPEQPRPVVHSFCKILTPSXTPTQELITKDLHGSEWRFKHIYRGQPRRHLLTTGWSTFVTSKKLISGDAFVYLRSETGEQRVGVRRLVQKQSTMPASVISSQSMHLXGVLASASHAIKTNSIXLVYY

SEQ ID NO: 23827 - protein, 1055 aa, Oryza sativa; identical to SEQ ID NO: 16216
  Clone ID: TF_OsC21910_1.pep

SEQ ID NO: 23828 - protein, 82 aa, Oryza sativa
  unsure (1)..(82): unsure at all Xaa locations
  Clone ID: TF_8856660.pep
VRTHGXQWCPGMRFKMAFETEDSSRISWFMGTVAGVQASDPVRWPQSPWRLLQVHLHGTNMRQPQLDHDRVVEFLINWPPRR

SEQ ID NO: 23829 - protein, 925 aa, Oryza sativa
  Clone ID: TF_OsC793_1.pep
MSSSSAASIGPPQPPPPPAPPEEEKKCLNSELWHACAGPLVCLPTVGTRVVYFPQGHSEQVAASTNKEVEGHIPNYPNLPAQLICQLHDVTMHADVETDEVYAQMTLQPLNPVRRLGFLHDVCSAEVLMQEQNDAYLPAEMGIMSKQPTNYFCKTLTASDTSTHGGFSVPRRAAERVFPPLDFTQQPPAQELIARDIHDIEWKFRHIFRGQPKRHLLTTGWSVFVSAKRLVAGDSVLFIWNEKNQLLLGIRRASRPQTVMPSSVLSSDSMHIGLLAAAAHAAATNSRFTIFYNPRTSPHYLWEFYNWASIKIHNILMRPMHTLMKHRYMGTITEVSDADPVRWPSSYWRSVKVGWDESTAGERPPRVSLWEIEPLTTFPMYPSLFPLRVKHPWYSGVASLHDDSNALIWLRGVAGEGGFQSLNFQSPGIGSWGQQRLHPSLLSSDHDQYQAVVAAAAASQSGGYLKQQFLHLQQPMQSPQEHCNLNPLLQQQILQQASQQQIINPDAQNIQTMLSPSAIQQQLQQLQQMQQVQNDQKQKIQPDQSYQVPTSAVLPSPTSLPSHLREKFGFSDPNANSSSFITSSSSDNMLDSSFLQGSSKAVDLSRFNQPVASEQQQQQAWKQKFMGSQSVSFGGSVLHNSPTSKDGSVENKIGRDVQNQSLFSPQVDSSSLLYNMVPNLTSNVSDGNLSTIPSGSTYLQNAMYGCLDDSSGLLQNTGENDPATRTFVKVYKSGSVGRSLDITRFSNYAELREELGQMFGIKGQLDDPDRSGWQLVFVDRENDVLLLGDDPWEFINIYMNVSNAKKSYIMKRREYNTLVSWFPQLIAYRGKTVLPSIICVGQSLYVDAQLPKTLRLGQMFGIKGQLDDPDRSGWQLVFVDRENDVLLLGDDPWESFVNSVWYIKILSPEDVHKMGKQGNDPRYLS

SEQ ID NO: 23830 - protein, 1430 aa, Oryza sativa; identical to SEQ ID NO: 16220
  Clone ID: TF_OsC787_1.pep

SEQ ID NO: 23831 - protein, 443 aa, Oryza sativa
  Clone ID: TF_OsC1528_1701.pep
MAVKDRFTGNPGRLTVLTTSGSGSKAIAGWIPGLLSWGERLIMINSVMSAIPNYFMSCIKWPDKTIEAVDRLRRAFLWKGDKKVKGGQCLVAWPTVTLNKEQGGLGIGDLRAHNLALLMRIGCRLLSDSSEPCFQWLRTQHMANEIPIKAKPTETPIWKTVCSVIEPIIASTKVTIGNGQLVQFWRDHWTAAGRFNLIYPTLASYATNINCTVSSQHTNGTWTIDLHPVLSSRAQTELQSLMDILLDQHIQQNVPDKRTLLLGSTDITTSANYNLLTYHGILWQPATLIWNKAIPNTCRIFLWLAFRDRLNTNANRVNKKWDSNPHCMSCPAIETANHIILRCKLAGEVWKKLNLYETAVRSSNIQDFVESILDTLPEHQKPGCPACFAACSHGLWKARNQLVFKLTETSVAYILPLWPDGWQLAILNSPYEVHSHAWSKPGA

SEQ ID NO: 23832 - protein, 529 aa, Oryza sativa; identical to SEQ ID NO: 16225
  Clone ID: TF_OsC378934_1.pep

SEQ ID NO: 23833 - protein, 702 aa, Oryza sativa
  unsure (1)..(702): unsure at all Xaa locations
  Clone ID: TF_OsC794_1.pep
MITFVDSAAKERERESDKCLDPQLWHACAGGMVQMPPXVSSKVYYFPQGHAEHAQGHGPVEFPGGRVPALVLCRVAGVRFMADPXDTDEVFAKIRLVPVRANEQVYAGDADDGIGASLSGTTSPAATGNSSLNWNTEKGASEGSGSGVIQNSPTDNTSFGEAPVVQGEQHRLRARAGVVWKFRHIYRGTPRRHLLTTGWSTFVNQKKLVAGDSIVFMRTENGDLCVGIRRAKKGGVGGPEFLPPPPPPPPTPAAGGNYGGFSMFLRGDDDGNKMAAAARGKVRARVRPEEVVEAANLAVSGQPFEVVYYPRASTPEFCVKAGAVRAAMRTQWFAGMRFKMAFETEDSSRISWFMGTVSAVQVADPIRWPNSPWRLLQVSWDEPDLLQNVKRVSPWLVELVSNMPAIHLAPFSPPRKKLCVPLYPELPIDGQFPTPMFHGNPLARGVGPMCYFPDGTPAGIQGARHAQFGISLSDLHLNKLQSSLSPHGLHQLDHGMQPRIAAGLIIGHPAARDDISCLLTIGSPQNNKKSDGKKAPAQLMLFGKPILTEQQISLGDAASVDVKKSSSDGNAENTVNKSNSDVSSPRSNQNGTTDNLSCGGVPLCQDNKVLDVGLETGHCKVFMQSEDVGRTLDLSVVGSYEELYRRLADMFGIEKAELMSHVFYRDAAGALKHTGDEPFSEFTKTARRLNILTDTSGDNLAR

SEQ ID NO: 23834 - protein, 531 aa, Oryza sativa
  Clone ID: TF_OsC2423_3.pep
MEMAANPGGSGTCSDALFRELWHACAGPLVTVPKRGERVYYFPQGHMEQLEASTNQQLDQYLPMFNLPSKILCSVVNVELRAEADSDEVYAQIMLQPEADQSELTSLDPELQDLEKCTAHSFCKTLTASDTSTHGGFSVLRRHAEECLPQLDMSQNPPCQELVAKDLHGTEWHFRHIFRGQPRRHLLTTGWSVFVSSKRLVAGDAFIFLRGESGELRVGVRRLMRQVNNMPSSVISSHSMHLGVLATASHAISTGTLFSVFYKPRTSRSEFVVSVNKYLEAKKQNLSVGMRFKMRFEGDEAPERRFSGTIIGIGSVPAMSKSPWADSDWKSLKVQWDEPSAIVRPDRVSPWELEPLDASNPQPPQPPLRNKRARPPASPSVVAELPPSFDVDSDQISQPSNGNKSDAPGTSSERSPLESQSRQVRSCTKVIMQGMAVGRAVDLTKLNGYGDLRSKLEEMFDIQGDLCPTLKRWQVVYTDDEDDMMLVGDDPWENASTMVHASCIADPGPVWIPCQEGWLGRQHFHHLALPA

SEQ ID NO: 23835 - protein, 955 aa, Oryza sativa
  Clone ID: TF_19352036.pep
MASSQEKAKTGVLRNAAALLDEMQLMGETQGAKKVINSELWHACAGPLVCLPQRGSLVYYFPQGHSEQVAATTRKIPNSRIPNYPNLPSQLLCQVHNITLHADKDTDEVYAQMTLQPVNSETDVFPIPTLGAYTKSKHPTEYFCKNLTASDTSTHGGFSVPRRAAEKLFPQLDYSMQPPNQELIVRDLHDNMWTFRHIYRGQPKRHLLTTGWSLFVGAKRLKAGDSVLFIRDEKSQLLLGVRRATRQQTMLSSSVLSTDSMHIGVLAAAAHAASSGSSFTIYYNPRTSPSPFVIPVARYNKATYMQPSVGMRFAMMFETEESSKRRYTGTVVGISDYDPMRWPNSKWRNLQVEWDEHGYGERPERVSIWDIETPENTLVFPSSTLNSKRQCLPGYGVSVPGMEIGSANMSSFPRAQGNPYGSLQHIPAVGSELAIMLLNQSGQTLGSPLSFHQSSYSSIIQNVKQNYIPPLTVSTSACLTKQESLPSDDAQHQFHMANMQNGDLEGSEVQPVIDSISESKLNATSRDPRNTDSYTSRSTSEQNSKGEPRGKTRRSKKGLPHKTVSEKSDLSSAPSWICDNQQVGLESKLVGCDEQVNCGNIEDSSGALTQGNFVGQPHGHQVEQKGVLSPPKVESSKSPDGGKSVNSFPNQGCFSQFIDGLDWMTQPSYYQDSNVIQPAGVSENIFSSSADIPPSMIADTMETFQASCLSDCLPNSIQEFISSPDLNSLTFLSPDMQNLEVQLQHDGSNLPSTSNSFVQMSFSEESASQSANLSGLHMESTHRSINTTSCSQPMSTGGFDAGMYSKLPRLKESQILSLPEIHTNSMGTSACSMDATEYSLDRSAKPMKPPVRTYTKVQKQGSVGRSIDVTGFRNYHELRSAIACMFGLQGKLEHPGSSEWKLVYVDYENDVLLVGDDPWEEFINCVRCIRILSPSEVQQMSENGMHVLNDCIQAA

SEQ ID NO: 23836 - protein, 860 aa, Oryza sativa
  Clone ID: TF_OsC436_1.pep
MWGPGGGMARAEVGGGGGERSAAPADVSRNPEAQGQGGGVGEDALFTELWSACAGPLVTVPRVGEKVFYFPQGHIEQVEASTNQVGEQRMQLYNLPWKILCEVMNVELKAEPDTDEVYAQLTLLPELKQQEDNGSTEEEVPSAPAAGHVRPRVHSFCKTLTASDTSTHGGFSVLRRHADECLPPLDMSRQPPTQELVAKDLHGVEWRFRHIFRGQPRRHLLQSGWSVFVSAKRLVAGDAFIFLRGENGELRVGVRRAMRQQTNVPSSVISSHSMHLGVLATAWHAVNTGTMFTVYYKPRTSPAEFVVPYDRYMESLKRNYSIGMRFKMRFEGEEAPEQRFTGTIVGMGDSDPAGWPESKWRSLKVRWDEASSIPRPERVSPWQIEPAVSPPPVNPLPVPRTKRLRPNATALPADSSAIAKEAATKVVVESEPNGTQRTFQTQENATPKSGFGNSSELESAQKSIMRPSGFDREKNNTPIQWKLGSDGWMQMSKPESYSEMLSGFQPPKDVQTPQGFCSLPEQITAGHSNFWHTVNAQYQDQQSNHNMFPSSWSFMPPNTRLGLNKQNYSMIQEAGVLSQRPGNTKFGNGVYAALPGRGTEQYSGGWFGHMMPNSHMDDTQPRLIKPKPLVVAHGDVQKAKGASCKLFGIHLDSPAKSEPLKSPSSVVYDGTPQTPGATEWRRPDVTEVEKCSDPSKAMKPLDTPQPDSVPEKPSSQQASRNMSCKSQGVSTRSCKKVHKQGIALGRSVDLTKFNGYEELIAELDDMFDFNGELKGPKKEWMVVYTDNEGDMMLVGDDPWIEFCDMVHKIFIYTREEVQRMNPGTLNSRSEDSHANSMERGSVGREMRGCLSTSSLNSENC

SEQ ID NO: 23837 - protein, 760 aa, Oryza sativa
  unsure (1)..(760): unsure at all Xaa locations
  Clone ID: TF_OsC445_6.pep
MVISRTLVVRGFDELWETIRPVLVSSDGPASMSKNGLLLVVSEEFWIGKVWWVSGDRIWGLEMKEVGEVEEVRCLDPQLWHACAGGMVQMPAPRSRVYYFAQGHAEHADGGGGAAAAAAELGPRALPPLVLCRVEGVQFLADRDSDEVYAKIRLAPVAPGEAEFREPDELCPLGAAGDAAEPSPEKPTSFAKTLTQSDANNGGGFSVPRYCAETIFPKLDYRADPPVQTVLAKDVHGVVWKFRHIYRGTPRRHLLTTGWSTFVNQKKLVAGDSIVFLRTRHGELCVGIRRAKRMACGGMECMSGWNAPGYGGGGFSAFLKEEESKLMKGHGGGGYMKGKGKVRMADVVEAASLASSGQPFEVAYYPRASTPDFVVKAASVQAAMRIQWCSGMRFKMAFETEDSSRISWFMGTISSVQVADPNRWPLAPGKRAPVTWDEPDLLQNVKCVSPWLVELVSSIPPIHLGPFSSPRKKLRVPPHPDFPFEGHLLNPIFHGNPLGPSNSPLCCYPDTAPAGIQGARHAQFGLPLTDHQLNKLHLGLLHSGSFNRLDAITPPSRISKGFVVSSAPAHDNISCLLSISTPQVAEKSDDRKTTPHIMLFGKAIFTEQQITSSGSTETLSPGVTGNSSPNGNAHKTGNASDGSGSSICIGFSSQGHEASDLGLEAGHCKVFMESEDVGRTIDLSVFGSYEELYGRLADMFGIEKEEIINHLHFRDAAGVVKHPGEVPFRXFMKAARRLTIIAGDRERIERPLIECLVEQA

SEQ ID NO: 23838 - protein, 822 aa, Oryza sativa
  Clone ID: TF_OsC793_3.pep
MSSSSAASIGPPQPPPPPAPPEEGGWLEKKCLNSELWHACAGPLVCLPTVGTRVVYFPQGHSEQVAASTNKEVEGHIPNYPNLPAQLICQLHDVTMHADVETDEVYAQMTLQPLNPQEQNDAYLPAEMGIMSKQPTNYFCKTLTASDTSTHGGFSVPRRAAERVFPPLDFTQQPPAQELIARDIHDIEWKFRHIFRGQPKRHLLTTGWSVFVSAKRLVAGDSVLFIWNEKNQLLLGIRRASRPQTVMPSSVLSSDSMHIGLLAAAAHAAATNSRFTIFYNPRASPSEFVIPLSKYIKAVFHTRISVGMRFRMLFETEESSVRRYMGTITEVSDADPVRWPSSYWRSVKVGWDESTAGERPPRVSLWEIEPLTTFPMYPSLFPLRVKHPWYSGVASLHDDSNALMWLRGVAGEGGFQSLNFQSPGIGSWGQQRLHPSLLSSDHDQYQAVVAAAAASQSGGYLKQQFLHLQQPMQSPQEHCNLNPLLQQQILQQASQQQIINPDAQNIQTMLSPSAIQQQLQQLQQMQQVQNDQKQKIQPDQSYQVPTSAVLPSPTSLPSHLREKFGFSDPNANSSSFITSSSSDNMLDSSFLQGSSKAVDLSRFNQPVASEQQQQQQQAWKQKFMGSQSVSFGGSVLHNSPTSKDGSVENKIGRDVQNQSLFSPQVDSSSLLYNMVPNLTSNVSDGNLSTIPSGSTYLQNAMYGCLDDSSGLLQNTGENDPATRTFVKVYKSGSVGRSLDITRFSNYAELREELGQMFGIKGQLDDPDRSGWQLVFVDRENDVLLLGDDPWESFVNSVWYIKILSPEDVHKMGKQGNDPRYLS

SEQ ID NO: 23839 - protein, 1123 aa, Oryza sativa
  Clone ID: TF_OsC791_1.pep
GEKTKAPAINSELWHACAGPLVSLPPAGSLVVYFPQGHSEQVAASMQKDVDAHVPSYPNLPSKLICLLHNVTLHADPETDEVYAQMTLQPVTSYGKEALQLSELALKQARPQTEFFCKTLTASDTSTHGGFSVPRRAAEKIFPPLDFSMQPPAQELQARDLHDNVWTFRHIYRGQPKRHLLTTGWSLFVSGKRLFAGDSVIFVRDEKQQLLLGIRRANRQPTNISSSVLSSDSMHIGILAAAAHAAANNSPFTIFYNPRASPTEFVIPFAKYQKAVYGNQISLGMRFRMMFETEELGTRRYMGTITGISDLDPVRWKNSQWRNLQVGWDESAAGERRNRVSIWEIEPVAAPFFICPPPFFGAKRPRQLDDESSEMENLLKRAMPWLGEEICIKDPQTQNTIMPGLSLVQWMNMNMQQSSSFANTAMQSEYLRSLSNPNMQNLGAADLSRQLCLQNQLLQQNNIQFNTPKLSQQMQPVNELAKAGIPLNQLGVSTKPQEQIHDASNLQRQQPSMNHMLPLSQAQTNLGQAQVLVQNQMQQQHASSTQGQQPATSQPLLLPQQQQQQQQQQQQQQQQQQQQKLLQQQQQQLLLQQQQQLSKMPAQLSSLANQQFQLTDQQLQLQLLQKLQQQQQSLLSQPAVTLAQLPLIQEQQKLLLDMQQQLSNSQTLSQQQMMPQQSTKVPSQNTPLPLPVQQEPQQKLLQKQAMLADTSEAAVPPTTSVNVISTTGSPLMTTGATHSVLTEEIPSCSTSPSTANGNHLLQPILGRNKHCSMINTEKVPQSAAPMSVPSSLEAVTATPRMMKDSPKLNHNVKQSVVASKLANAGTGSQNYVNNPPPTDYLETASSATSVWLSQNDGLLHQNFPMSNFNQPQMFKDAPPDAEIHAANTSNNALFGINGDGPLGFPIGLGTDDFLSNGIDAAKYENHISTEIDNSYRIPKDAQQEISSSMVSQSFGASDMAFNSIDSTINDGGFLNRSSWPPAAPLKRMRTFTKVYKRGAVGRSIDMSQFSGYDELKHALARMFSIEGQLEERQRIGWKLVYKDHEDDILLLGDDPWEEFVGCVKCIRILSPQEVQQMSLEGCDLGNNIPPNQACSSSDGGNAWRARCDQNSGNPSNGSYEQFE

SEQ ID NO: 23840 - protein, 829 aa, Oryza sativa; identical to SEQ ID NO: 16198
  Clone ID: TF_OsC793_2.pep

SEQ ID NO: 23841 - protein, 763 aa, Oryza sativa
  unsure (1)..(763): unsure at all Xaa locations
  Clone ID: TF_OsC2423_1.pep
MAGSVVAAAAAAGGGTGSSCDALYRELWHACAGPLVTVPRQGELVYYFPQGHMEQLEASTDQQLDQHLPLFNLPSKILCKVVNVELRAETDSDEVYAQIMLQPEADQNELTSPKPEPHEPEKCNVHSFCKTLTASDTSTHGGFSVLRRHAEECLPPLDMTQNPPWQELVARDLHGNEWHFRHIFRGSPHHSLILGQPRRHLLTTGWSVFVSSKRLVAGDAFIFLRGENGELRVGVRRLMRQLNNMPSSVISSHSMHLGVLATASHAISTGTLFSVFYKPRTSQSEFVVSANKYLEAKNSKISVGMTPTNSWLSPGTGLKMRFEGDEAPERRFSGTIIGVGSMSTSPWANSDWRSLKVQWDEPSVVPRPDRVSPWELEPLAVSNSQPSPQPPARNKRARPPASSSIAPELPPVFGLWKSSAESTQGFSFSGLQRTQELYPSSPNPIFSTSLNHFYWPMRETRADSYSASISKVPSEKKQEPSSAGCRLFGIEISSAVEATSPLAAVSGVGQDQLAASVDAESDQLSQPSHANKSDAPAASSEPSPHETQSRQVRSCTKVIMQGMAVGRAVDLTRLHGYDDLRCKLEEMFDIQGELSASLKKWKVVYTDDEDDMMLVGDDPWPEXCSMVKRIYILMRWTLTTLLQCLILLSRVLVNAALLILYIQRAVLFNGLCFQIHWINAGGFGGWKEGYSTKRASGVCREPVVDAIDVEGPQGIDMLAIALRKHSLNVAQGSNLEALPFITELIIEILVVQTQRKTYIEVLS

SEQ ID NO: 23842 - protein, 437 aa, Oryza sativa
  Clone ID: TF_OsC2629_1.pep
MASSWRDFQAAKDVHYCIVVKPKPTPPSYQHRTNRSAAPRRAASPAMDSDYGVPRELSEVQKKRALYQPELPPCLQGTTVRVEYGDAAIAADPAGAHVISHAFPHTYGQPLAHFLRKTANVPDATVISEHPVVRVGVVFCGRQSPGGHNVIWGLHEAIKAHNPNSKLIGFLGGSDGLLAQKTLEITDEVLSSYKNQGGGYDMLGRTKDQIRTTEQVNGAMASCQALKLDALVIIGGVTSNTDAAQLAETFAEAKCATKVVGVPVTLNGDLKNQFVETTVGFDTICKVNSQLISNVCTDALSAEKYYYFIRMMGRKASHVALECALQSHPNMVIVKAYELVETKLFQHSLDGRHVTETLVLVQFEGPGGETKPISLCVEDRDYMGRIKQLQEYLEKVKSIVKPGCSQDVLKAALSAMASVTEMLTIMSSPSFSGQATI

SEQ ID NO: 23843 - protein, 622 aa, Oryza sativa
  Clone ID: TF_OsC59278_1.pep
GEQVLKKKEETHSCHALMSVVQSSVSHTWDAFQLAHASFRLYCVRNNHVQSVKLGPRLLGDAPKINITPPENEMVEEEGSSDVFPAIKIYDDDINMKFLLCGVPSTPDPCLLGSLEDGLNALLNIEIRGCKLQNRISASPPPLHAASLPRGMVTMRCDITTCSSSHVSLLVSGSAQTCFDDQLLESHIKDEIIEKSQLVHALPNNDDKLSSSVPFTSMSTACGASTFEVWMTLPKWAAQVLKHLAPDISYRSLVALGIGCINGTPVASFDRRDADRLLFFCTNQHKDLAIENGPYFHLPRWSASLTKERVKVGLESKPKLLGANGIPEDKKRLIEGPSSSSKAKLKPATMRPIPHSRKQQMHPFMGFLEATVHETSQVKPNLPAAPPVKHNSVPAAPATHRKSTSGPSHAQSIIQLNPLPLKKHGCDRLPIQMCSEEDFLKDVMQFLIQRGHNRLVPHGGLAEFPEAVLNAKRLDLYNLYKEVVSRGGFYVGNGINWKGQVFSKMRNHTVTNRMTGVGNTLKRHYETYLLEYELAHDDVDGECCLLCHSSAPGDWVNCGLCGEWAHFGCDRRQGLGTFKDYAKTDGLEYICPHCSLANYKKKPPPQKVANGFANTVSVSRNV

SEQ ID NO: 23844 - protein, 473 aa, Oryza sativa
  unsure (1)..(473): unsure at all Xaa locations
  Clone ID: TF_OsC2705_1.pep
MAQFRSAPVESEAEPGADGPVDEANAVEEEKSGKGEDGIEEAADTVDSVKDSAKPEGMDAKEEAVEQEGGAAADKAKDIPVTSNGKTDAGGNEVAEMKVEKLENGDGHLKADGDSNGDNKGADGEKQLMLASAGEDVEDPVLSKLASNSFMFDYSCGGDDSGTEEEQAAFMKELERFYREKLMEFKPPKFYGEGLNCLKLXKQVTGLFCRQVTRLGSXLGVHEQVTSCKLWRQVGESFKPPKTCTTVSWTFRNFYEKALLEYEKHKIETGEFQVAASNLTERITSESQVGIHASGSGRARRESATRAMQGWHSQRLLGNGEIADPIIKDKGTVSVLKKDKTPKSSGSAKRKRTPTLEDDRIVPYKPDKLQNDSMVLDLGPPADWVKINVRRTKDCYEVYALVPGLLREEVHVQSDPAGRLIVTGEPEQLDNPWGVTPFKKVISLPSRIDPHQTSAVVTLHGQLFVRAPFEQSK

SEQ ID NO: 23845 - protein, 1592 aa, Oryza sativa
  Clone ID: TF_OsC135913_1.pep
MGISAAARGSGVGSSVPEAPVFRPTEEEFGDPLAYVARIRPLAEPYGICRIVPPPSWSPPPALDVCTLSFPTKRQPIHRLLARLAPADPDTFLLDYRRFLHRHRGRKKPKPKLPALSDGRPLDLCRLFHAVKRFGGYDGACAGKRWADVLRLVDDKAPRHAFSVSEHVIAQLYYEHLYQYEHFTNRLPSQSHDDQPPVSASSANISIRRQKKRLRKTSNTMGHCGGSTSAKTAASAPKQKRRKVDATATVVNEAMDQVCEQCNSGLHGEVMLLCDRCDKGWHLYCLSPPLESVPPGNWYCSECMNSDRNCFGFVHRRKTCQVETFRKFEERVRKRWFGHKNPSRVQVEKQFWEIVEGKVGELEVMYGSDLDTSIYGSGFPRLCDPVPSSVDPVMWHKYCSSPWNLNNFPNLPGSVLQTVRDNIAGHLMSNHRAAVSASLFHLHSYSMHVGEPKCWYGVPGAEANAFEKATLRLVMLEYLTFCDLQVMRNALPDLFDAQPDLLFHLVTMLSPSILQANGVPVYSVIQEPGLNCAEAVNFAPADWLPHGGIGAELYRLYRKAPVLSHEELLYVVAKNGVDNESLPYLQGEIERLFVKEKKCREELWITGIVKSNLMPPKNNPNFIGSEEVDLLVYRHLMSCDIDSALIPLILAKFIKSIFSFSQHWKHLCECSPEKHRLLYRHTLAELGDLVCEVSKANLPRENVKQNSLLHSDVFLPTRKDKDQYMSYTQLAEDWLSKADHILHMPFLDTAYATALEDAEQFLWGDHNMDSVRNMSAKLIEGRKWASSVRKCLSQIDGFLHCKENCSEKVNYVEIKELAAVRCKPCYEPSLAQLQVYVDKGEIMINEINNALSSRSKVDYLETLYSRALEFPVELTETSALSCEISSAKSWLKKACDCLEQNKRGIVDIDFLNELKSEELESFLLVVDGANFSIPELNILMQRYSGACSWVNHANNIVGKLLERNDYDNIVEELTGILKDGESLGVKGMLFEEFSVVEEELKKSFCRKQASEALATQTSMEVVKEVLKEASILTIEEEQPFVDLSHNLKAAITWEEKASFILEHSAALPEFENHILCSENIHVILPSELDMKAEVATAKLWMDKCQAYLRPRSDKPASGGFLNVDDLKDLIGQPASMKVILDTSAINSVLNNVIEWEHNSLSLIHSSRSLLDSNVIDSTIDPLKRKLEELQDKINAEIEKGLSLGFEFKVVHELKDSFFTLGWILNALSFCGVTPLLQDAEKLIQQAVNLPASLSDCSLAELLVRGSSWLRKALMFLPGSEMSETSRLLNVENILAEYKASISKFKLIYLIFHALVGDQEIAVPYPMMIAKLEDAINKHNSWAEQCNAFFMFPDHQSWDGLLSLRDSGQSVAFDCTEMDKVVAEIKKIEEWLTHCHCTLFPDGNNSDSLLSALLKIRGSMDNACMLYSDCNQKGLCAICSCDVGDHITPRCMICQARYHSSCVEPLPASTQVTREWTCPFCFHLESGDPLQNRLQEKISKGNRPALPALIGLRSFAKGFYSGIEELDLLEEIAEKAHKFKSYLMQILHDADSYHGEDLSVMHRSLLIALKATSAAGINDRQFSYRFDSLAHED

SEQ ID NO: 23846 - protein, 208 aa, Oryza sativa
  unsure (1)..(208): unsure at all Xaa locations
  Clone ID: TF_LIB4309-005-Q1-K1-A4.pep
MDAKEEAVEQEGGAAADKAKDIPVTSNGKTDAGGNEVAEMKVEKLENGDGHLKADGDSNGDNKGADGEKQLMLASAGEDVEDPVLSKLASNSFMFDYSCGGDDSGTEEEQAAFMKELERFYREKLMEFKPPKFYGEGLNCLKLWRQVTGLGGYDQVTSCXLWRQVGESFXPPKTCTTVSWTFRNFYEKALLXYEKHKIETGEFQVAAS

SEQ ID NO: 23847 - protein, 258 aa, Oryza sativa; identical to SEQ ID NO: 16237
  Clone ID: TF_OsC325_1.pep

SEQ ID NO: 23848 - protein, 268 aa, Oryza sativa; identical to SEQ ID NO: 16259
  Clone ID: TF_OsC151708_1.pep

SEQ ID NO: 23849 - protein, 272 aa, Oryza sativa; identical to SEQ ID NO: 16254
  Clone ID: TF_OsC413392_1.pep

SEQ ID NO: 23850 - protein, 375 aa, Oryza sativa
  unsure (1)..(375): unsure at all Xaa locations
  Clone ID: TF_OsC170713_1.pep
MGQMDGGDGGGGGHPYHYQALLAAVHQQTVPFPNPFPAPSSGAEPPHPHNHNHNHNHNHNIHNSHNHNHNHNAAPHPCHTPTPTPTPRGFADWSASTSAFTSLAAHSSTAPSNAVHYSFSPCYAFWTHYMLNKNAYPTSFPAPHDDHLRLANNNHPRDAPGPASSYGVESFTSPSMAPNICTHMPPIEGPISAKEDKKPEILPRVVKSSDELETRNSNVEFHSETVGTLPESKQGHDSRATKLLNSGEYQVILRKELTKSDVGNVGRIVLPKKDAEASLPPLLQRDPLILHMDDMVLPVTWKFKYRYWPNNKSRMYIGXAGEFLKTHGLQAGDVHILQKTLASWPNFIIPEEEKAHIQPDHKSLDAFGVNCNSVS

SEQ ID NO: 23851 - protein, 530 aa, Oryza sativa
  Clone ID: TF_OsC80572_1.pep
MADARGSSSSSGDGGGGEGNGGAGHGDFVGGGQHNWYHGILGAVPPPNVGRQNIVHHQYPAASLIQQHHQSPTMPLPMAQLPYVPQYTVLPTPAVLPSHHHHHGQSQISQENFQDWVPSNNVAAPHVPSAFQDWRQMCNGSAFMPFGQTAANSNVFYQNLTFNSWTSNNMPRNPVYTSFHPAAIEDHHAPLFHSNNHDIDPEFLGNRHLHGVDIAGAPPAKATSPATAGGLLTNTAPATVSQIHARCRRRQIYRCCGLLPRAPPPSDPCAFARAAITAARSARGLLSHLYGGLVFWLVGKRKLGEKRERKRKVVAGMDPPIVFRRSDMESEKNDDNPDQTPVSEPPSMNQNGENLIIRFNCREYRVILRKELTNSDVGNIGRIVMPKRDAEAHLPALHQREGVTLKMDDFKFETTWNFKYRFWPNNKSRMYVLESTGGFVKHHGLQTGDIFIIYKSSESGKFVSSVPFTSTTYGESDGEDYNGDRSGPGAGEVADEDFRKPEFGWYCCAKINRKESEIREQVSKEKVNSN

SEQ ID NO: 23852 - protein, 728 aa, Oryza sativa; identical to SEQ ID NO: 16256
  Clone ID: TF_OsC159728_1.pep

SEQ ID NO: 23853 - protein, 267 aa, Oryza sativa; identical to SEQ ID NO: 16257
  Clone ID: TF_OsC413391_1.pep

SEQ ID NO: 23854 - protein, 400 aa, Oryza sativa; identical to SEQ ID NO: 16200
  Clone ID: TF_OsC11135_1.pep

SEQ ID NO: 23855 - protein, 449 aa, Oryza sativa
  unsure (1)..(449): unsure at all Xaa locations
  Clone ID: TF_OsC55481_1.pep
GVLPCMDAKARSQLLPRYWPRITDQELQHLSGDSNSVITPLFEKMLSASDAGRIGRLVLPKKCAEAYFPAISQAEGLPLKVQDATGKEWVFQFRFWPNNNSRMYVLEGVTPCIQSMQLQAGDTVTXIDKGALPQKEGPGTSSSSPLPVKRKATSVGPKIKRFHMDSEESMELKITWEEAQELLRPPPKAPSIVVVDGHEFEEYEEPPILGRRTYFVTDQSGENHQWAQCEDCSKWRKLPVDALLPSKWTCSDNKWDSERXTCYFRTXSLLYAVFMISYNRKSAAKKTKGKVDTDNIDVSDGLDTLANLAILGEGESLPSQPTTRHPRHRPGCSCIVCIQPPSGKGPKHKQTCTCNVCMTVRRRFRTLMMRREKRQQSEKDSGVPRKREPGQSSEPVPQXNKRTSSPVKNQIDLNSQPEREDDLEIVKFSSASSASGAVFTTSGTVTSTG

SEQ ID NO: 23856 - protein, 877 aa, Oryza sativa
  unsure (1)..(877): unsure at all Xaa locations
  Clone ID: TF_OsC1713_4735.pep
MADEGERVCIIVDEMEREDSDNEEADDDASSDEEGDVMATNWANEDFSGLVISEGDHVPWEYKENEVIEGARYAHKDEMKEANGWDEKGLPAKWPDIRSRWCMRHMGANFYKQFKNKHLMELFKRLCAQNQEKKFNELWDKLDELTTKQTDEQSRRPQVEGDEPPIPLGALHDDPPTMRSRSGSSIRNFTQWIENEPKEKWSLLFDTDGSRKCDLRGHTYKKCPKNAEVPSGADASPSRQASDGMAYDTPALLNRGIDRNHRSFPSAVEGAQLGTFRPRTSREWLRVDPRHVPWYALVEAAADDRDPAKRWDADRSLLAALVDRWRPETHTFHLPCGEMAPTLQDVSYLLGLPLAGAPVGPVDGVVGWKEDITARFEQTDLLHPDADDYSVRRSLEAYLLWLFGWVMFTSTHGHAVDFRLVHYPRSIADAQPQDVPQWSWGSAMLAATYRALCEACTKTDAGAIIAGCPMLLQLWAAERFAIGRPVVDSAPYGVGRSTQWPEDGPTMGTYWCRRGRRYAHVQVRRGYPDFVFEFDRLQPSDVIWEPYTEEAVAARAPLGLSSLCTRDQAYWLTILPMVFDIFVEPHCPQRVMRQFGLRQVFPGNVQPTVLPADHSLTRRGQLAGALWAPRVQQYVDDWVLATEEVINELFPHTEENYRDYLRWYLPRTRARVTFTPDAPEPHVAAVTDAYPTHRDRDYFVGADAARDISADITAVQVRLNRAPWTSYLQLVRYNHGLARLPSEQDLDLRHLFRTDLVCLRAPLASEQCDLQHRTSSAFERVRRHDRRFRELRRGVRHLFGRVRQLFLSRSVDPSPTRRDLRYWGLFVSRRXGGAPEAHTQEQPEVTPVXAGRVARAVPPDRLTYSQGHIRAQGTLGW

SEQ ID NO: 23857 - protein, 433 aa, Oryza sativa; identical to SEQ ID NO: 16262
  Clone ID: TF_OsC80572_2.pep

SEQ ID NO: 23858 - protein, 313 aa, Oryza sativa; identical to SEQ ID NO: 16264
  Clone ID: TF_OsC255862_1.pep

SEQ ID NO: 23859 - protein, 305 aa, Oryza sativa; identical to SEQ ID NO: 16250
  Clone ID: TF_OsC77518_1.pep

SEQ ID NO: 23860 - protein, 979 aa, Oryza sativa
  Clone ID: TF_OsC29041_1.pep
MRKAFLFLLLLIGVQMAGMAAAAAALVAAKRCMNAACGAPAPSPAGGEWRKGWPLRSGGFAVLCDKCGLAYEQLVFCDIFHQKESGWRDCSFCGKRLHCGCIASKNSFDLLDSGGVQCVTCIKNSAVQSVPSPVVPKLFSSQNNQRLFGKSDDLLSGRPLETSSLMVDARNDDLTIIAKNNLPFMVKNVEAGQSSNILRQKELENGARQIKWELPTLSIGDMGRIPFLTRSQSALESRRDENKDPTTESTTSESLSEACLNMSLGIASNGNKLEATSTVERPMLSPTTGFPEGRELTTALSPFQHAQRARHFLTRPPRVGEGAVFDPTKDMLPHLRVARPPAEGRGRNQLLPRYWPRITDQELQQISGEYPYYIYQLLGDIMHNSNSTIVPLFEKVLSASDAGRIGRLVLPKACAEAYFPPISQPEGRPLTIQDAKGKEWHFQFRFWPNNNSRMYVLEGVTPCIQSLQLQAGDTVTFSRIEPGGKLVMGFRKATNTVSLPDSQISAIANGSILGDTLFSSTNENLAIVSGYSGFLQSIKGAADLHTSSIYDHHVNSADGDVSWLKTDKFGSRPDEGSLQFLKRGRNIGSKSRRLSMDAEEAWELKLYWDEVQELLRPAPTAKPTVVMIEDYEIEEYDEPPVFAKRSIFTIRSTGEQDQWIQCDDCSKWRRLPLNVIVASKWTCADNTIDSKSCSCSAPEELTPKELHIVLQQYEDMRRRRNSFGFKQNIPEMDAVSLDAFATAAVYGDVGNQGSPSVATTTKHPRHRPGCTCIVCIQPPSGKGPKHNPACTCNVCMTVRRRFKTLMMRKKQRQSEREEAEASKKIAWMNRDEPEGSSLSRSPQTVDTTRDGDVTMFDKVDINKGHIDLNFHPTAVRDEERHGGQPRVSMVSLLEVANRPLENYMKQNGLTSLAGEQGSSSTCTGAATVPQPALVESEERTSNNDGGRVATAEQPESMAVDEAGDNQPDKAAGDSAAALA

SEQ ID NO: 23861 - protein, 176 aa, Oryza sativa
  Clone ID: TF_uC-osflcyp024e03b1.pep
WPRITDQELQQISGDSNSTIVPLFEKVLSASDAGRIGRLVLPKACAEAYFPPISQPEGRPLTIQDAKGKEWHFQFRFWPNNNSRMYVLEGVTPCIQSLQLQAGDTVTFSRIEPGGKLVMGFRKATNTVSLPDSQISAIANGSILGDTLFSSTNENLAIVSGYLGILQSIKGAADLH

SEQ ID NO: 23862 - protein, 636 aa, Oryza sativa; identical to SEQ ID NO: 16266
  Clone ID: TF_OsC51357_1.pep

SEQ ID NO: 23863 - protein, 816 aa, Oryza sativa; identical to SEQ ID NO: 16268
  Clone ID: TF_OsC28675_3.pep

SEQ ID NO: 23864 - protein, 560 aa, Oryza sativa
  Clone ID: TF_OsC98543_1.pep
MDGMKDGRDEEVATDAVGAGGVDVGGETSKLIDQDCMAILDVLARRLMSGESEPYIGKIIKIWQQNQAKKVKILWFFLPDEIRKHLSGPVMEKEIFLACGEGVGLADINPLEAIGGKCTVLCISKDERNRQPSPRELAMADYIFYRFFDVNSCTLSEQLPEKIAGVEGNLLLNSKVEQVTSCSDQEVHGVDQKMLNVPVPLPQSTVMEDESPVAAVSLPPSVFKEENVASAIPFPQPVVKEESAAAAIPPPHVALKEESVSKSTENITKPAQKVLPGERPPKRVKFSENVTVQNVPLDVPERPSRTGPLELAGRQADRSKWFKIPWDTRLRNADEQGTLVYIQNLDIQFAAADIEELIRDALQLNCIAKPINHPTYDDPNNGKAYAIFKTKSAADSAISKINSGLVVGGRPLYCSKGLLKVPKPSETLLGHLTINNIRMGIRQREEQVLMLSYEVCSISFLCLNIFAQPLFFLQKKAVSTSHCSQPNTMEYDLALDWMLVRAKQETKFRTLHKLLNAATGLGRLKIDTANSGDRLVGIVGIAKDDHVFVLDALGEPYAGS

SEQ ID NO: 23865 - protein, 812 aa, Oryza sativa
  Clone ID: TF_OsC866_1.pep
MDLSATPSRSKSGLRSSPRKPVAAPAVAQMDLSTPSKPTPRRKPKAPPGGGSDVPRDPVLRPPLLPPPRDADQGNFRDPREAHPNPEAERAAPSPSPKTPTQSEPKRQRQRQRQQPKKPKKRAYYRKVVYDGGEFAAGDDVYVKRRDGAESDAEDPEAEECRVCFRAGAAVMVECDVCLGGFHLRCVRPPLRRVPEGDWACPYCEAERAGKAIERPKPPEGKRIVRTAKEKLLSSDLWAARIESLWREPDGIFWAKVRWYIIPEETAAGRQPHNLRRELYRTNDLADIEMETILRHCYVMSPKEFKDASDQGDDVFYCEYEYDIHWHNFKRLADIDDEPETKEDPGDEPYNAGNDYVSDSDEDSEYDEEEEPTKCSSARTHQSHALAANLRKGRTYGLQKIGIRKIPEHVRCHQKTNLEKAKATLLLANLPKSLPCRDKEMEEISAFVKDAICNDQCIGRCLYIHGVPGTGKTMSVLAVMRRLRSELDSGNLRPYSFIEINGLKLASPENIYKVIYEQLSGHRVGWKKALHYLTEHFSGGTKIGKQANQPIILLIDELDLLLTRNQSVLYNILDWPTRPNSNLVVIGIANTMDLPEKLLLRISSRMGIQRLCFGPYNYRQLQEIITSRLKGIDAFEDQAIEFASRKVAAMSGDARRALEICRRAAEFADYRVKQSGHTSVNRGKNVVCMGDIEAAIQEVFQAPHIQVMKNCPKFGKIILVAMVHELYRSGLGEVMFDKLAATVLSWCHVNRELLPGYDNLLKICCKLGEGKIIFCEEGTKHKLQKLQLNYPSDDVTFALKESPDIPWLSKYL

SEQ ID NO: 23866 - protein, 227 aa, Oryza sativa
  Clone ID: TF_OsC3802_2.pep
MAKTKQGKRDVDSYTISGTNKIVRVGDCVLMRAADSENQPYVGRVERLETDGRGSVRVRVRWYYRPEESKGGRRQFHGAKELFLSDHFDTQSAHTIEGKCVVHSFKNYTKLDNVGPEDFFCRFEYKAATGAFTPDRVAVYCKCEMPYNPDDLMVQCDGCKDWFHPSCMGMTIEQAKKLDHFVCSDCVKENGAKRPSHAYPASSKYEPKWIQGFSLSTGISLLLFHFW

SEQ ID NO: 23867 - protein, 247 aa, Oryza sativa
  Clone ID: TF_OsC97337_1.pep
MAKSRPPKRILESYTIKGSDKVIKHYGSSVSGDCVLMRASDTSKPPYVARVEAIEAAGSRGTNVRVRVRWYYRPEESMGGRRPFHGAKEVFLSDHYDVQSADTIEGKCNVHSFRSYTKLDSVNAEDFFCRFEYKSATGSFVPDRIAVFCKCEMPYNPDDLMIQCEECSDWFHPSCIGMTIKDAKKLEHFFCQSCTAENGKMAENSHEATAQSEEKVTFVLFVMSQGSSWETVPIYSYGSKSGVILQL

SEQ ID NO: 23868 - protein, 1407 aa, Oryza sativa; identical to SEQ ID NO: 16282
  Clone ID: TF_OsC65931_1.pep

SEQ ID NO: 23869 - protein, 1614 aa, Oryza sativa
  Clone ID: TF_OsC13482_1.pep
MVRRGAGGRRGGIGGGDDARLCMGGAKAADGREFRVGDCALFQAVEVPPFIGLIRWIEKKEEGFPKLRVSWLYRPADIKLNKGTQLCAAPNEIFYSFHQDETSAVSLLHPCKVAFLRKGVELPAGISSFVCRRVYDIDNKCLWWLTDQDYINERQEEVNRLLHRTKLEMHAAVQSGGRSPKRLNGPSSAQQKSGSDGAQNCGLSKGKKRDRGEQGTDPAKRDRERPLKAEDGESGNFKVENLKSEITKITEKGGLPHAEAVEKLVHLMQLDRTERKIDLPGRVILADIIAATESPDCLGRFVQLRGLPVFDDWLQEAHKGKSGEGGSPKETDKPMEEPVLALLRALAKLPINLTALQSCSIGKSVNHLRSHKNPEIQKKAKCLVENWKKRVDAEMKSNDVKPVVSGQAVSWPGKPGFPEISSAGNRRSGSSESSLKSPVSQLSSSKALTSKPVAADAAAKSSPVISGSSKLQHMQPGNAVTNLKEQPSKSTGGTCGSELPAVKEEKSSSSSQSLNNSQSCSSEHAKTIGSSKEDARSSTAASGVAYKTSGSSSRVHRRTNNGLLGSGIQKEAAVARSSSLDHSSVQEKVSQSGTACEKGADIQSDQGNSHRLIVRFPNPGRSPARSASGGSFEDPSFTGSRASSPVADKHEQSDRRVKMKTENSNPHLGNDTNAESWHSNDVKGASVSEEGDKSPRAMLTDDSKTTEGAGRDVPVSRVACSSYANEKGICSSETGLTKLFNPMNALIEIKYSEASHSLQAGDDTAMNLLASVAGEISKSELISSSPSPRNSSANEQGCEGDNIGKLKVECDVSLPQHAGPSNEVEKVISEKSEKSGVGLVGKELHREDVNMLSVNNLLSQGDKGTTSAGSSPLPEIDSKAKTENREVEDTDKCSHPPSRGDDGVKSNAKQPIGFKIDTNSNIKSSTTSEYRSAFTVRGKVEDGCTTSSDVGSTLGDQCKLAVSNRKMLPAEEPLCGGDKQAHGLLKPTDQKHLLGLPDYSEHIDKSGDSTANKLKLKPSFSSSTVEVNKADGLLVGSNTVLKEDEKKEHPADVTKLAVATGVKHGPENGISSKESKDNSSESSSHTRPGGTVSQETEHSAQRSSKKSSDDAGGKDDLVSSDDGSSFSAKTRSNATAKLDFDLNEGIPGDEGHLSEPATSPAVCSSAIHLPRPSPFVSPDASGNEDPIAAPDKGPFVPPDNLIRLKSETGWKGSAATSAFRPAEPRKIFEMTLSASGILVSDAAGKNRPALDIDLNVADEQFLEEDVSQSSVQTTGSESGNTRRSNGPVRSVGFKLDLNRADEVAENGQIVSNTNHRVEVPLLSRPLPGVFSSSDANSSRDFDLNNGPTLDEAGTEHAPRSLSSKNTSSIPFLPQVASMRMNSAEMSNISPWFASANACAPVAIKSFLPSRGEQPHPVETAAGSGTQRIITSLADGVQHGSDPSRTPVISTSPTMMFHPPAYQYAGFPFTPSVHLQAPGFSIGSTSYANSAPGGIPYFPTIAPTLVGPAGALPAQHTRQYAINLPEGSSTVGHDNNRKWGRQGLDLNSGPGSVDVEVKDDRVTLPVRQNFIAPPHAFVDEHTRMYQMPPGVGIKRKEPEGSWDAERSSYKQLSWQ

SEQ ID NO: 23870 - protein, 1544 aa, Oryza sativa; identical to SEQ ID NO: 16284
  Clone ID: TF_OsC57123_2.pep

SEQ ID NO: 23871 - protein, 258 aa, Oryza sativa
  Clone ID: TF_OsC33365_2.pep
MAKTRQPQKRVLESFTIKGPDGVIKREDPFLDPFIYLSRFLLFWGKFWIVESRYYLRFRSIVEMNTGDTVLMMAPDSSKKPYVARVEEIEATGPQASQVKIKVRWYYRPEESIGGRRPFHGSKEVFLSDHYDSQSADTIEGKCYVHTFRDYTKLRSVSAEDFFCRFEYKSATGSFVPDRIAVFCKCEMPYNPDNLMIQCEDCSDWFHPSCVEITIKEAKKLEHFYCKSCIAENGKDLQKSNGATVQSEEKGFRFYPYF

SEQ ID NO: 23872 - protein, 1862 aa, Oryza sativa
  Clone ID: TF_OsC57123_1.pep
MVRRASVAACLTCPLCGRLLRDATTISECLHTSYGIFNCVLFRVDHSMQFVRSRIFPFKRRKVENPEIICPVASPVKRKERSLSSLTIPAPQVSIQKCLTKRRTKASCLRNFPLHSTSRGSKDTSKKLGGWRPLGCQLKLGKDKKSLKSSVKDTNRTKSKSGDTDDGAPASKAKAREPFTRYGRAAKRTGRKKLLMLKNKKKRFKAKQPSKKRRFRALWFYLLAAFDQRGVPTLPQLPAKYLRIKDVDLPASIIQKYLAQKLNLSSETEVEVLCGGKVVNQGMTLHDLADCWLEKGPKSRMRSSFCLCLGCLWGFVADRGVVGRADRGRVMRGAMAKSPRSVVTTGTKRRRAKVHKEDEPVENENLESEFDVSKKESNGATEPGNEPVASKRPKRAAACSNFKEKSLDLSEKDSIITIKESRVEEKEIEAVNLTRTGPEDGQPCRKIIDFILHDGDGNLQPFEMSEVDDIFITALIMPLDDDLEKDRGKGICCSGFGRIENWAISGYDEGAAVIWVSTETSDYKCVKPASSYRSYFEHFSEKARVCVEVYKKLARSVGGNPQVDLEELIAGVVRSINSNRSFNGTVTKDFVISSGEFIYKQLIGLDHTAGNDDEMLATLPVLVALKDECKSRAGFTHLPAMPSNGTLRIKDGQDKGLTEDEDAKLARLLQEEEEWKMMKQRGKRGTSQKNIYIKICETEIANDYPLPAYYKPYNQEMDEYIFDSDIGMYSDDVPVRILDNWALYNSDSRLISLELIPMKAGAENDIVVFGSGFMREDDGSCCSTAELAQLHSSSSKSGREDPGVPIYLSPIKEWVVEFGGSMICITIRTDVAWYKLRQPTKQYAPWCEPVLKTARLAVSIITLLKEQSRASKLSFAEVIKKVAEFDSRHPAFISSKAPTVERYVVVHGQIILQQFADFPDESVKRCAFITGLLAKMEESRHTKLAIKKKSQQMRGENLNPSAKMGPILRKKLMRATTTMLISKIWGEYYATYFPGDTKEEDQNEPKEIDDDQEENEDNDAEEEVNVQDEKATRTPPSTRSRKSSADTRKEIKWEGQTAGKTVSGEVLYKCVIVQDLSISVGATVTTEDDSGETIMCFVEYMYEKLDGKNMIHGIILQEGSQTVLGNAANDREVFLTNDCLEFEASDIKELVTVNIQSLPWGHKYRKENSEAKRIEKAKAEERKRKGLPVEYICKSLYWPEKGGFFSLPYDKIGNGTGICSSCERKPVGNEFKLLSESSFVFENITYNIHDFLYIRPEFFSQGEGHETYKAGRNVGLKPYAVCHLLSVHGPAGSRKANPESTKVKVRRFYRPDDISSTKAYSSDIREVYYSEDIISVPVVMIEGKCEVRLKDDLPNSDLPAVVEHVFCCEYLYDPANGALKQLPPNVRLVTLTRKVPASKKNKGKQICDIELGGSDKPKDGQSENCLATLDIFAGCGGLSEGLQRSGLSLTKWAIEYEEPAGDAFGENHPEAAVFVENCNVILKAIMDKCGDSDDCISTSEAAERAAKLSEDKIKNLPVPGEVEFINGGPPCQGFSGMNRFNQSPWSKVQCEMILAFLSFAEYFRPRFFLLENVRNFVSFNKGQTFRLTLASLLEMGYQVRFGILEAGAYGVAQSRKRAFIWAAAPGETLPEWPEPMHVFASPELKITLPDGKFYAAVKSTAAGAPFRSITVRDTIGDLPAVENGAGKPTIQYGSGPVSWFQKKIRSDMASLNDHISKEMNELNLIRCKHIPKRPGCDWHDLPDEKVKLSTGQMVDLIPWCLPNTAKRHNQWKGLYGRLDWEGNFPTSVTDPQPMGKVGMCFHPEQDRIITVRECARSQGFPDNYQFAGNIQSKHRQIGNAVPPPLAFALGRKLKEAVDAKRQ

SEQ ID NO: 23873 - protein, 216 aa, Oryza sativa
  Clone ID: TF_OsC3802_1.pep
MAKTKQGKRDVDSYTISGTNKVVRVGDCVLMRASDTEKPPYVGRVEKMELDGRGSVRVRVRWYYRPEESKGGRRQFHGAKELFLSDHFDMQSAHTIEGKCVVHSFKNYTKLDNVGPEDFFCRFEYKAATGAFTPDRVAVYCKCEMPYNPDDLMVQCDGCKDWFHPSCMRMTIEQAKKLDHFVCSDCVKENGAKRPSHAYAGSSKYEPKAESKRQRR

SEQ ID NO: 23874 - protein, 1761 aa, Oryza sativa
  Clone ID: TF_OsC12270_1.pep
MEAEAEAVADLDEIDREMSRAESRKRQRRTAKEKPGARKGATEWKPEDVEKAAAAEGVAELDEIDREMPRPELRKRQRRTAKEKPSAHEGATEWKPEDVEKAAAQEPEGTELDSGLSPAESRGKRQRGVEKVKRRTRKKTAKEKTKETTEKSAAQAPEKMKVNDAGGALAEDVCADEPDAEQMAMEEEEEAADVLEAEERMGKCVGEGSAEKAATRKRVARPSTARRVEDSDDHFVGDPVPDDEARQRWPVRYSRKGSDSLLKQEPDEDEEMKARCHYLAANVDDEIYHLDDDVYVKAGPDEENYIGRITEFFEGVDRGSYFSCQWFFRTADTVISSKLLKVHDHRHNHKRVFLSKEKNDNLIECIVSKVKIAHVDPNMTPQARAHAISDCDLYYDMSYSVAYSTFANLPADNDGALGSEATSNISCDDADNSSKGKLSADIVAPYSEQTETASLLDLYSGCGAMSTGLCLGFAFSGINLETRWAVDINKYACACLKHNHPYSQVRNEKTEDFLALIQQWDALCRKYVVHKNDTLEPSIDMPLNDADDVNEPLPEDIFDVEELLEICYGDPSNTGKNGLWFKVRWKGYDPSYDTWEPIDGLSDCPERIKEFVEKGHKENILPLPGAVDVICGGPPCQGISGFNRFRKHNDPLEDEKNKQLVVFMDIVKYLRPKYVLMENVVDILKFADGFLGRYAMSCLVAMNYQARLGMMAAGYYGLPQFRMRAFLWGALPSMVLPKFPLPTHDAVVRGIVPTTFSQSVVAYNEVDTRCLRKALLLADAISDLPKVGNDQPKDVIEYSVAPKTEFQRYIRNNRKDIQDYSFRGDDPSEEGKLFDHQPLKLNKDDYERVQRIPVKKGANFRDLKGVIVGPDNTVRLDPNISRERLSSGKPLVPDYAISFVKGKSTKPFGRLWWDETVPTVVTRAEPHNQIILHPSQDRVLTIRENARLQGFPDYYRLIGPLKEKYIQVGNAVAIPVARALGYALGLAYRGESDGDRAVLKLPESFIYADQETVVKSSAGTPGSEIADSEQLFEYFINPNFFCMMFAFLKVNVVIPLILDSRRGLSRRGAEEGEARRAVPFQNILSWEGWNRLDHRRGEIRLDVRREMDDSPLDNLFDGNGLDSSAGADSSSSTGSPPSSTSSSPPSSQSPPPGSSPPPASPPPSTPSAPPTNSSGSAPSPPSPSQSAPPANTGGGGSPPPSHGSPPAPKAVQSQPAPKRSGDGGSSSDSGSSKEGGSSSDRGKSESNGNRPGPEAAIIAGMVIGFFTFALLLAVRACVCCSKKKKRPPHMHMPYYTDENGKVYYANSMPRWQNSVDQGGGWHAQYSPGQAPPSSEMSGSHGAGPLPPPSPGMALGFSKSSFSYDELALATGGFSSANLLGQGGFGYVYRGVLAGSGKEVAVKQLKAGSGQGEREFQAEVEIISRVHHRHLVSLVGYCIAGSSQRLLVYEFVPNDTLEHHLHGLHIFPALFPAIVTRHSEGRAGDGLDDEARHRARLSQGPRVPSRRFLQGQILSVRPSNDLICCIVVVTYEGHPRIIRRDIKAANILLDENFDAKVADFGLAKLTTDTNTHVSTRVMGTFGYLAPEYASSGKLTDKSDVFSFGVMLLELITGRRPVDPTNYMEDSLVDWARPLLARALSEDGSFDELIDQRLENKFDRLEMERMAACAAAAVRHSAKRRPKMKQIVRALEGDASLDDLNEGVKPGQSMMFSTGSEYDSGNYASDINRLRKVAFESSIEDSSEYGTHSSADSGEPPRRQQHR

SEQ ID NO: 23875 - protein, 1536 aa, Oryza sativa; identical to SEQ ID NO: 16289
  Clone ID: TF_OsC13482_2.pep

SEQ ID NO: 23876 - protein, 844 aa, Oryza sativa
  Clone ID: TF_OsC58534_1.pep
MAPSSPSSAAAPTRTSTRKRAASASASAKATDEPSTKRTRRPKAETKPRKKKDEVKEEEKPPMEDDACGEEPDAEEMALGEEAEAEEAEAEQKQLDAPAPGVARKRVAQPSRVRHGSDGDHDPEFVGDPFPAKEARDKWPQRYQRNAATRRPDEEEDIKARCHYSSAKVDGTLYCLHDDVYVKAEEDKADYIGRITEFFEGTDHCHYFTCRWFFRAEDTVISSIMMENADDEKHDLKRVFLSEEKNDNVLDCIISKVKIVYIDPNMESEAKARRLADCDLYYDMSYTVAYSTFANIPLGSEASSVGKATLLDLYSGCGGMSTGLCLGAALAGLNLETRWAVDFNSFACESLKYNHPRTEVRNEKADEFLALLKGWHSLCDEYVKKDIDFSSAGASENEEDDDEPLEKDEFVVEKLAGICYGGSGREDGLYFKVQWKGYGREEDTWEPIENLRDCPLKIKEFVQEGYRRKILPLPGDVDVICGGPPCQGISGFNRFRNRKEPLKDEKNKQMVTFMDIVAYLKPKYVLMENVVDILKFADGYLGRYALSRLVAMKYQARLGMMVAGCYGLPQFRMRVFLWGALPTMVLPKYPLPTHNVVVRGGAPNAFSVNNHQPNEVMEYGSSPKTEFQRYIRLSRKEMLDSSFEGKDGPDLGKLLDHQPLKLNKDDHERVQQIPVKKGANFRDLKGVRVGANNIVEWDPDVPRVYLSSGKPLVPDYAMSFIKGRSLKPFGRLWWDETVPTVVTRAEPHNQARVLTVRENARLQGFPDYYKMFGPIKEKYIQVGNAVAVPVARALGYSLGLAYQRESEGSSPLFVLPDSFTEVGRQAAPARASSVGIPVGEVVEQ

SEQ ID NO: 23877 - protein, 218 aa, Oryza sativa
  Clone ID: TF_OsC33365_1.pep
MAKTRQPQKRVLESFTIKGPDGVIKPGDTVLMMAPDSSKKPYVARVEEIEATGPQASQVKIKVRWYYRPEESIGGRRPFHGSKEVFLSDHYDSQSADTIEGKCYVHTFRDYTKLRSVSAEDFFCRFEYKSATGSFVPDRIAVFCKCEMPYNPDNLMIQCEDCSDWFHPSCVEITIKEAKKLEHFYCKSCIAENGKDLQKSNGATVQSEEKVQSKRRRR

SEQ ID NO: 23878 - protein, 1568 aa, Oryza sativa
  Clone ID: TF_12002700.pep
FLQTEIKSQLCDLETKLHKEELSEEGYLAKVKSLLNKDLSLENGTHTLTQKANGCPANGSRPTWRAEMADSNRSPRSRPKPRGPRRSKSDSDTLFETSPSSVATRRTTRQTTITAHFTKGPTKRKPKEESEEGNSAESAAEERDQDKKRRVVDTESGAAAAVEKLEEVTAGTQLGPEEPCEQEDDNRSLRRHTRELSLRRKSKEDPDREARPETHLDEDEDGKKDKRSSRPRSQPRDPAAKRRPKEAEPEQVAPETPEDRDEDEREEKRRKTTRKKLESHTVPVQSRSERKAALSKSVIPKINSPKCPECGQHLDDPNLKYQQHPEDAVDEPQMLTSEKLSIYDSTSTWFDTYEDSPMHRFTSFSVYCSRGHLCPVDTGLIEKNVELYFSGCAKAIHDENPSMEGGINGKNLGPINQWWLSGFDGGEKVLIGFSTAFAEYILMEPSKEYEPIFGLMQEKIYISKIVVEFLQNNPDAVYEDLINKIETTVPPSTINVNRFTEDSLLRHAQFVVSQVESYDEAKDDDETPIFLSPCMRALIHLAGVSLGQRRATRRVMGATKEKDKAPTKATTTKLVYQIFDTFFSEQIEKYDKEDKENAMKRRRCGVCEVCQQPECGKCKACKDMVKFGGTGRSKQACLKRRCPNLAVKEADDDEEADDDVSEMPSPKKLHQGKKKKQNKDRISWLGQPMKIEENRTYYQKVSIDEEMLEWATGSRSFPDDSSKPLYLARVTALWEDKNGQMMFHAHWFCAGTDTVLGATSDPLELFLVGECENMQLSYIHSKVKVIYKAPSENWAMEGGTDPETTLPGAEDGKTYFFQLWYNHDYARFESPPKTQPTEDNKHKFCLSCIRLAELRQKEMPKVLEQIEEVDGRVYCSSITKNGVVYRLGDSVYLPPEAFTFNIKVASPVKRPKKDPVNETLYPEHYRKYSDYIKGSNLDAPEPYRIGRIKEIHCGKKKGKVNEADIKLRLYKFYRPENTHRSYNGSYHTDINMLYWSDEEAVVNFSDVQGRCTVEYGEDLLESIQDYSQGGPDRFYFLEAYNSKTKNFEDPPNHARSPGNKGKGKGKGKGKGKHQVSEPKEPEAAIKLPKLRTSGVFSGCGGLSEGFHQAGISETLWAIEMWDPAAQAFRLNNPGTTVFTEDCNVLLKLVMAGEVTNSLGQRLPQKGDVEMLCGGPPCQGFSGMNRFTLPHLSPSSNNSLVVSFLSYCDYYRPRFFLLENVRNFVSYRRSMVLKLTLRCLVRMGYQCTFGVLQAGQYGVAQTRRRAIILAAAPGEKLPLFPEPLHVFAPRACQLSVVVDDKKFVSNITRLSSGPFRTITVRDTMSDLPEIQNGASNSEIPYNGEPLSWFQRQLRGSQYQPILQGYLQGHGPLVAARMPHIPLFPGSDWRDLPNIQVRLGDGVIAHKLQYTFHDVKNGYSSTGALRGVCSCAEGKACDPESRQFSTFIPWCLPHTGNRHNHWAGSYGRLEWDGFFSTTVTNPEPMGKQGRVLHPEQHRVVSVRECARSQGFPDSYRFFGNILDRHRQVGNAVPPPLAKAIGLEIKLCLLSSARESASAAVKAKEEAATKD

SEQ ID NO: 23879 - protein, 658 aa, Oryza sativa
  Clone ID: TF_OsC5082_1.pep
MGRRRRFAQLATTSDDDDDDAPAADAPPKAKPPPPPSSSSGPKKPKQRRLSSAAADDDDDVEEDDLELEEEEEDEKDLEEMRRNEEEERREETQTRRRRRRRGRKPKRPAEESEEDEEEEEEEAKAEEAREEENTEAVPIGEPVKITGRGKKQRKHYTSFEYEGNTFELEDPVLLTPEDSKEKPYVAILKDITETEGSLSVTGQWFYRPEEADKKGGGSWKASDTRELFYSFHIDDVPAESVMHKCVVHFIPQHKKIPSRKEHPGFIVQKVYDTVAKKLWNLTDKDYEDNKQHEIDLLVKKTIDRIGQLSDIEPADAPGDNNDQLSNKRGLRKRPVLPIDVSRDDALAGKSEQFGKAETPGSDKLKNYATLVKYKAVTGDQYRDRWLDKLVDTIPLTSKESAGASHADPGGATKSSTNGSSAKEDNEKSYSPDVIVSIMASLERSTYEALGSDFQKYNQKLRQLLFNIKNSPVLRNRLMNKELDPPVLLTMSPDELKVGLTAAERTSEPEESRKLQMTDARCVRCAEKEVGVSDIIHAGHGDRYQKVVASRRENEVVNVGGDRTLRLARLVASGGSVGTAPWATAKFDVMEKQLTSPRDHQPDKPLADALHKSAAPVHAHAGEAEIVRQAQARRALVGASSWPRVDQTVHTHYTSRQN

SEQ ID NO: 23880 - protein, 730 aa, Oryza sativa
  Clone ID: TF_OsC6126_1.pep
MVFQKRSSLEMESGGGSHVAEMPRVPKSARGKRSIRKKESQGQVMCAFDLLATVAGKLLDEGEGSLGNASSGTPAVDASPKDVRVKQEQCDEEAKHFKNEVMDQDSCNESALVSHIAFQRPVNHHGRKGEDPEGSHAVIEDPKAKSEALDKESSMISCTKAELGCNFAAIADRWSPESVESGAFTGDAAAIAMPATTSGFHKNAPDMYNLLDPMDVDVKPPPLVSSDSTGEMPLYGNKIRRSTSFPRVPKGGAGFTVDRDEDDDDKSSGCTHPSTATNRGFRPNCTAGHSRVKKLLACKHRKVAPARMHKGDLSYSGEHCEIPFTFSFFEEHCIDGTHIQTCLLYSYLSSLILLDVDRKPSFRNKKMYYTRQRTQRSTFKRRKMFDRHSAQVSEEYAKANTKFAARDSHAVSLEANKGTNSTAFQKSQESSDCHVKLRIKSFKVPELLIEIPETATVGSLKKTVLEAVNAILGGGLRVGVLHHGKKVRDDNKTLMQAGISHDEVLDNLGFSLEPNCAPHPSQLSPPEDNEFMETVDTTEPLARIAPADSSSKHGEVDASQELALAPLSANYQGSDHDFVHSPGGMSSPDKASTNSRAIVPVTPADSNAGAIVPANKAKRSPEQGQRRIRRPFSVAEVEALVLAVEKLGTGRWRDVKLRAFDNAKHRTYVDLKDKWKTLVHTASISPQQRRGEPVPQELLDRVLAAQAYWSQQQAKLQPKTPPLAEALLLT

SEQ ID NO: 23881 - protein, 58 aa, Oryza sativa
  Clone ID: TF_LIB3431-053-P1-K1-F4.pep
LAYTLRLTASIWPEQPLSQPLPHELLDRDVYGHDYRAQLQAKMHPMTPALAVALLLTL

SEQ ID NO: 23882 - protein, 633 aa, Oryza sativa
  Clone ID: TF_OsC1905_1.pep
MVLQKRLDYGSHGHRAPIKPRVATLAPVKRSTRIRKKQMYALDLLATAAEKLLADQDNLSSGPNINETPEGYVTSMKPVKAEQFDEAFPLRSVAVKKDDCKGCTVGCAGICGFLRQANMCLAENSSTQNLADSVLESLTAKPDVLAKDSFVSSKKSCRLGFGLGTIPEYGSVGVCQPWSTRSAEVKQVHRARPTAIRSQEDSDAAALCALVETMDLDTKPLAEASSGSNSGVHICGPDRGHNSHPSCLAKVQHAADRDDDENSSGCVHPSTSGNNRGYIPHYIGDRRIRRLFASRLRKAARNRICGEMSCKGNKLSLCEKKMPTTRRRVQQTTLKRKRLAQLYSEKSSDEVKLTIKSFNIPELLIEIPENATVGSLKKTVSDAVTTIIERGLRVGILLQGKNIQNDNKTLRQAGIYRGKKLNDIGFTLECEAGQDSHPGVIVPEEMDFVGASVVDKSATVKCEEPAENQQLMQDFPGCSLSDPGSVDYPVEWSTQETSASSQAIVPFADPNSLALANVPLSRSKRPDFGQRRIRRPFTVAEVELLVEAVEHLGTGRWRDVKFRAFENVHHRTYVDLKDKWKTLVHTASIAPQQRRGAPVPQELLDRVLAAQAYWSEQQAKLHGDPPVPEICPT

SEQ ID NO: 23883 - protein, 616 aa, Oryza sativa; identical to SEQ ID NO: 16305
  Clone ID: TF_OsC47793_1.pep

SEQ ID NO: 23884 - protein, 605 aa, Oryza sativa
  unsure (1)..(605): unsure at all Xaa locations
  Clone ID: TF_OsC156600_3.pep
MQSRCPSAAVFTPTTCRLRFRVLHRRFSGGVTAENEDADGGEEEEEADAAAVAGWVEELRELRVAELRREVEKYDLSIGSLQSKVKRLKEEREKSISGETKPPPAAAAVKEEEEDVRKGSPEEAGAVEDRVSGHESGRSCKESNSSDLKRPENDPAVADDDDREAEEEEEAAAAPAAGDIAVKEEASGESVAGSKEADVEKESSDVQSSASPSRRRRRKGGGGGEEAEAASPSVSVPLPAAEAEPLVAFLESVRTSKAGAVFERRLDSQDGERYSGTIRRHVDLETVRSRLVGATAAAAAAACYASASEFYRDMMLLCANALVFFPRGSPEHAAALQLRALVSKQVSKDRQPHAGAKAPAAAAEEEEKKKPAKADADIAGPLLEKAPIIVCRKRSSIAKAAAAAAKGEKAEKAETDKKEKDGSEEKKKAAAAATTATAAATAKDKKARGMRTNKSRGPARNQKTAKLSETGEGTKKSDKKGGGGGGSSSAGAAAGGVAKKRNAVDFLNRMNQNGSPSTERVSLLETLKLSAAATEQQXQSSSSSSGKGDGRKEAGGSGSKKGAAASTPPGRRIGRPPKRAAAPPTPPPXSKRAKDDKPTRKRGKK

SEQ ID NO: 23885 - protein, 494 aa, Oryza sativa
  unsure (1)..(494): unsure at all Xaa locations
  Clone ID: TF_OsC84045_1.pep
MVVVVVGGGGGGGGGGGVKKEEGEEEARGRGGGGGVVGGWGTWEELVLGSAVIRHGGVAWGAVAAEVRSRSPCAFSPEECEAKFSEIQARYSACDAWFEELRKRRVAELRNDLKKSENFIGSLQSMIKSLSNSKHDDGNSECHTSHTESCSNNENTADNNSSSXALSKDRSSAASFTEEESDSQNSDKVQHCDTDSIQVNNTSAEALVKPLVEKKVCAEDGLLWGSRKKRAVRDRRTFLMADNSCRAGENTSTSHIQTDGSSEGYAKKGLKTPNLESGVSVVEKAKPNLAEILKTISTQSDCYMLQRRLDVQRKRTRYKKMIRRHIDFRILHSKIKSGATSSTKELLRDILLFVNNVLAFYPKATLEHMAAIELRNIAFRTVQESASMPSKSCGVTGAATAPLVKKNTRPVQPGSHGPHDAKRSKVSLKGTGSTVKQGEAKGSRGGSSVTANVKTMQRNPPAKKRGVGRPPKNGQKRAAAQQDSPNKGRKRTRR

SEQ ID NO: 23886 - protein, 224 aa, Oryza sativa
  Clone ID: TF_jC-osleLIB3474035c11b1.pep
TVSLAGEEKGEARLRRRRRRAAEVGLEVLRSLLRLDLPPNPEARGILRGEGGGPYSPAAVSRGGAEAAISLPLSESSGPEKKLKLFFFVKTKKYLFKPNTMTTQACKKRRAVYISSESEDSGTDSEVEGSKLSKKDGVTSVYTCGHQPTSKNKVDPMNTSKSRQCGSILKKLMDHKKGWIFNTPVDPVVYGIPDYFDVIRNPMDLGTVKRKLTSKQYSNPYEFA

SEQ ID NO: 23887 - protein, 558 aa, Oryza sativa; identical to SEQ ID NO: 16293
  Clone ID: TF_OsC18330_1.pep

SEQ ID NO: 23888 - protein, 170 aa, Oryza sativa
  Clone ID: TF_OsC76474_1.pep
PTRPGSWWEGRVSAVKPKSLDFPESPWEKYVIQYKNDGSDHPHSPWELHDTGNLWVPWKHPHIDLGIKDKLLSELDNLLELSHRNQDRYGVLKLNSVAEKSDFINRFPVQFSIEVIRIRLENNYYRTLEAIRHDATVMLANAQSYFSKSTDMTKKIRRLSDWIEQTFSSL

SEQ ID NO: 23889 - protein, 219 aa, Oryza sativa
  Clone ID: TF_jC-osflLIB3477P007b02b1.pep
RNPMDLGTVKENLAFGRYPSHEAFATDVRLTFSNALRYNPADHHVHRYASNLLATFEGLYKEALSWFEQECQRLEPPMPLALPPPPQPPVPMPMQAPPRIGGGGRRPKPKAREPNKREMSDEEKHKLRVEIGNLPEEKMGNVLQIVQKRNTDPALMGEVVELDFDEMDVETLWELDRFVVNCKKALSKSRRTVAMNGDAVDATAIVPIEDDTVQVDVHH

SEQ ID NO: 23890 - protein, 111 aa, Oryza sativa
  Clone ID: TF_LIB3434-060-P1-K1-C1.pep
QQLTNLMRSLLKNMNEHPDAWPFKEPVDSRDVPDYYDIIKDPIDLKTMSKRVESEQYYVTLEMFVADMKRMFSNAKTYNSPDTIYYKCASRLESFFSNKVASQLAQASTKN

SEQ ID NO: 23891 - protein, 1117 aa, Oryza sativa
  Clone ID: TF_OsC51154_1.pep
MVGMEGKGDASVTPVRTSDRLRKRPKYFGRNYMYYNPAIRKKMKSKKRAAASQIAKKLLRKSAARAPPADSALEIIERVDRVILDLLGIIVSVWSNLRRSTRKRRMSVNLEDYDTDSSSMEDDDLMRPRYRSSKNKVDDEVSARPKRKKLSNSSSIPRREGLRPRRSIRGQRLHPYQESEDDQESSEEQPAQDRRENGNDIEEDGNEEEVDGGDEAEADGDDEDGEEEQEGRRRYDLRDRSEVRRPSPRKEGKHRTQSPRRVLVHGIGPKNSKYLKKGGSRMHKRPRFSLPDDSDDSLLVDEPDEGPSMPWMRGGRGGMPWFLGGLDMHCPGAWGLNVGASGWGHQGDNTVSTSSLMPGIQTAGPSSKGGADIQPLQVDGSVSFNDIGGLSDYIDALKEMVFFPLLYPDFFANYHITPPRGVLLCGPPGTGKTLIARALACAASKAGQKVSFYMRKGADVLSKWVGEAERQLKLLFEEAQKNQPSIIFFDEIDGLAPVRSSKQEQIHNSIVSTLLALMDGLDSRGQVVLIGATNRIDAIDGALRRPGRFDREFFFPLPGYEARAEILDIHTRKWKDPPPKELKTELAASCVGYCGADLKALCTEAAIRAFREKYPQVYTSDDKFVIDVDSVRVEKYHFLEAMSTITPAAHRGSIVHSRPLSPVIAPCLKRHHEKIMERIADIFPFLSSVDVSKFSALSYGSSIPLVYRPRLLMCGGVSVGLDHVGPAVLHELEKFSVHSLGLPSLLSDPSAKTPEEALVHIFGEARRTTPSILYLPQFHLWWDTAHEQLRAVLLTLLNELPSNLPVLLLGTSSVAFGDLEEECASIFSSRNVYEVDQPSDDDRMRYLHALFESLLSFQMEESRSKSKDQKSSVDLPKAPKEVDGPKLSELKAKAEAEQHAVRRMRMCLRDICNRILYNKRFDVFHCPNSVALFSDYRSVVHNPMDMATVLQQVDSGQYLTRASFMKDIDLIVSNAKTYNGSDYNGSRIVSRACELRDVVQGMLSQMDPSLVSFCDKIAEQGGPLQVTDDGDSSILQAAPVAQLVSGTRMSARLRNVQPEVNLSRSYEALKRQKKSTETEQGMVKESTTRDDKSLGDVDLSKPISPEEAPKEPVQMVF

SEQ ID NO: 23892 - protein, 563 aa, Oryza sativa; identical to SEQ ID NO: 16307
  Clone ID: TF_OsC57969_1.pep

SEQ ID NO: 23893 - protein, 714 aa, Oryza sativa
  Clone ID: TF_OsC1956_1.pep
MTPTVLMEFGQQRQIKRGYDEMAFRGMASAAPRGYAETVGESEGAAGSPVRVDSEDSSAPKRKCISLNSDGFDVKREIFVPAKMSSSERRHLRKRFRTELDSVRNLLKKPEFAVPVPVNRAPALSSSAAPRGKKGQRGNHVVRGAKGRFLPTKPRPEASTVLTEDAIFKQCDAILKKLMTQKCSNIFDSPVDAVKLNIPDYFQIIKKPMDLGTIRNKLDSGSYTSPSEFAADVRLTFSNAMTYNPRGHVVHDYAIQLNKMFESRWRTIEKKLASIATEAHVEVDRADSKRRKTPPVDCSEVSTECVRPTESVRPTESVKPKMTFEEKESFGNCLASLSEDPEVPSHIIDLLQQCIDNNTDQLGDGEIEIDIHAVSDDLLFELKKHVDKYLQEREQSQQAKSEPSENEAANVSGLSHSSTNPCKGGDPVEEDVDICGNASPILIEKDAHNNPNKCGSPSSSSSDSGSSSSDSESGSDSESEQEKGGSPGKPKGSKRSEQLVEQEKSDVISPVDAIRPADDVELREQDNESKPAPEGENSKPDRQVSPDKLLRAALLRSRYADVIVKAQGILSQGGDKQEELEKLQKEEKARLLAEGNAAMEARRAEAEAEAKRKRDLEREKARQALQEMERTVEINDNLHLKDLEMLGTATTEHIVSSVDETSPEHSQDGMPSFLPGSGNPLEQLGLFMKADEEEEEEDPSSVPSTKDAEEGEIN

SEQ ID NO: 23894 - protein, 734 aa, Oryza sativa; identical to SEQ ID NO: 16310
  Clone ID: TF_OsC1956_2.pep

SEQ ID NO: 23895 - protein, 1824 aa, Oryza sativa; identical to SEQ ID NO: 16311
  Clone ID: TF_OsC48901_1.pep

SEQ ID NO: 23896 - protein, 167 aa, Oryza sativa
  Clone ID: TF_OsC48683_1.pep
LSWPFLEPVEGVILTIPDYFDIIKNPMDLGTIKQNLESGSYTTVNQWIADVRLVWSNAMLYNPPGNEFNTMAKTLSDTFEKKLAQMVHKLSYSSSQKRDQLRSTLETLVAQYKNYESELGMLTKQAEDEAREHPDLSPPIKPSSALLRSPLNFNEKMKLYHNINSLD

SEQ ID NO: 23897 - protein, 583 aa, Oryza sativa; identical to SEQ ID NO: 16314
  Clone ID: TF_OsC105877_1.pep

SEQ ID NO: 23898 - protein, 722 aa, Oryza sativa; identical to SEQ ID NO: 16313
  Clone ID: TF_OsC35984_1.pep

SEQ ID NO: 23899 - protein, 181 aa, Oryza sativa
  Clone ID: TF_uC-osroM202030e06a1.pep
MGLPDGSAKGEKTRKATDGSEEPSDSGPTTPLPDKKLLVFVLDRLQKKDTYGVFSDPVDPEELPDYHDIIKHPMDFSTIRKKLNKGAYGNLEQFEDDVFLLTSNAMCYNSPDTIYYRQARAIQELAKKDFENLRQDSDASEPEPEPEIKPDPEPKPQPRRGRPPNKNTIKQKVGKPPVERA

SEQ ID NO: 23900 - protein, 516 aa, Oryza sativa
  Clone ID: TF_OsC34269_2.pep
MALAQPTLTLTQRCGPARYGESLPLSESSGPEKKLKLFFFVKTKKYLFKPNTMTTQACKKRRAVYISSESEDSGTDSEVEGSKLSKKDGVTSVYTCGHQPTSKNKVDPMNTSKSRQCGSILKKLMDHKSGWIFNTPVDPVVYGIPDYFDVIRNPMDLGTVKRKLTSKQYSNPYEFAADVRLTFSNAMKYNPPGNDVHGIADQLNKIFDSEWKLLERKWKDRNLVQEQPSLKVLKAQPAVTPKPVLPKGVTAGTNSAVSKTLATALSSKVKIKFSVRGSELTSSKDTPLQAVGRRDGTINQSLPCTKDNAKTPRIQSSEDRSESTGDEYLPGDDASPSKALRAAMLKSRFAGTIVKAQQKALLDHGKKIDPAKLQLEKERLEKRQQEEKARIEAQVKAAEAAAQLKLDEEMRMKREQERRAARLALHMMKKTVDIDNSDFLKDLENLSKKWELNPPGKLIVDFVDGIDLPPGLGSPLERLGLFMKKDLEEEVEHEMEDSVSPSTEIDVEEGEISFCQ

SEQ ID NO: 23901 - protein, 791 aa, Oryza sativa; identical to SEQ ID NO: 16320
  Clone ID: TF_OsC6193_1.pep

SEQ ID NO: 23902 - protein, 590 aa, Oryza sativa; identical to SEQ ID NO: 16321
  Clone ID: TF_OsC11739_4.pep

SEQ ID NO: 23903 - protein, 620 aa, Oryza sativa
  Clone ID: TF_OsC11739_1.pep
MKRKRGRKMGKKGKLKASITADASPMSPSSPSTVDASSKSPSSPSTEENGTSPAHHQADNAPVIAPPPVPEPAPPEPEKPAVSTDVQNAKPKVYSRVRLKFKSAKVLETHQGPSEAKAPVDGGGGKPASAAPEASKEVVAEKAIVSPDGQKDAQAAELSGSDKDKVARKVASIKIKSVGLSSVEDKNQDRKADSVSEPLPSKQETVLENVESETALELRSSQELEAIKKVMKMDAAEPFNTPVDPVALGIPDYFDIIDTPMDFGTICQNLERGDKYMNSEDVYKDVQFIWDNCTKYNSKGDYIIELMKRVKKGFMKNWLAAGLYSDVQENAAGEEDGATGGRGRVGILVNVAANPWLSEVALRRVGTSAAMVDRLVEMLTWNGRDKPAARRGRAPTARSGTRSGAIESVSSLLFVADEECNLLGLLFAMQVGPGHLASLHGGRRTVAGVDRRLGGQRRASALRLGGVRLATNGGGWPATSGGTATGVRRAAVGGGSVLLVFLFGGGGRVGRRLPPPPRLRFRSARTPPPPAASSRPRSPPRRDRVPLHPPVRPFANSLLAASSSMESQTRPTGARRERRSGRRRGDGPRRPPLVQLLPLRLRPPARCSAVRGPWRRERER

SEQ ID NO: 23904 - protein, 360 aa, Oryza sativa
  Clone ID: TF_OsC48985_1.pep
MVPGGGVPQGAEGGRAMAAAETAATAAAAGERAPGTEVDAFRRQVEDLVSKTDQLERRVNEVVGFYDGKKHGSGGRKAGRKDSSLSKGMPDLMRQFGTIVRQITSHEWAEPFLKPVDVVGLQLDDYYKIITKPMDFSTIQKKMEGKDDNKYNNVREIYSDVRLIFANAMKYNDERHDVHIMAKSLLEKFEEKWLQLLPKVENEERKQKDEESNGVPKVNISPEEAIAKLAKDTDNELIEINKQLEELRQMVVQKCRKMTTYEKRKLGAGLCHLSPEELTKALEMVAQDNPSFEAKGDELELDMDAQSETTLWRLKFFVREALERQANVASGRTDENAKRKREICNALARTASKRVKQQPN

SEQ ID NO: 23905 - protein, 656 aa, Oryza sativa; identical to SEQ ID NO: 16297
  Clone ID: TF_OsC166303_1.pep

SEQ ID NO: 23906 - protein, 175 aa, Oryza sativa
  Clone ID: TF_OsC59345_1.pep
PSLRPPAATVAPSVPDPSPSGHVTIRPSELSRREAQVLRARLTGELSRVRALLSDIDGWEARRRRPAEPPRQRGHVSPPPALQAAMRKRCTQILTRLRKQKISVWFNSPVDVERLKLHDYHAIIRNPMDLGTVKENLAFGRYPSHEAFATDVRLTFSNALRYNPADHHVHRFTRG

SEQ ID NO: 23907 - protein, 456 aa, Oryza sativa; identical to SEQ ID NO: 16298
  Clone ID: TF_OsC82910_1.pep

SEQ ID NO: 23908 - protein, 948 aa, Oryza sativa
  Clone ID: TF_OsC13486_1.pep
MPRSPSPPPDRHHHHHHPARRRGPAGAAAPPPRSLRPRRAAAPSSRPLVDDFFPFPSSPSSSPSRPPPPQQQQQRRPSPEPSSSDSDGHGGGGGGGGGGSSASDRRRRKLKLVVKLSQLAPDQNHHRRGPPPPSYSDSSGGEQEQEEEEEAGGNGGDDVSGGEERVKPPKKRRIEPRGDRSRHREVRGETANPKLVGGRSDAASAPRTKRLPVPGMARTTPLPDRKALDMILDKLQKKDTYGVFAEPVDPEELPDYHDVIEHPMDFGTVRRKLARNAYRSFEQFELQPNRCNGIALYQINHRFTITSVDFVFLLDDVFLICSNAMQYNAPDTIYFRQAHSIHELARKKFQELRDEGIPTENLIKSEQKIRPHPSNREPIKKPPVRMNSQDALGSDVSAATIASAGDDSNGLSMSQANAVEPQDCIAANGFMDKDISSPLDEIRSEKPDDISARESSVKPSYKSIVVDETRRKTYDTYEEQPSSESDTIFDVFCEEPKELVNVGPHSEHSYARSLARFAGSLGTQGWRLASERIQRVLPTDVKFGRGWVGEYEPPLPPILFVQNQPRSLVSSEANVQRSASMTRNNERIRPTESVNPKDMSLSLLNRITTGNNVVGVPGPLESPEIKPRLFGVTAEPQQRSTEAPSLHENHRAPGSVAKTKRAPSEQTRKGSSLECAKGASGVHDMPSLNNTSGQPKPFFQSQEAAVPQPRNENTWVYHGRPGDGKYGTTDKSRPMSSMGFITKNQQVNAASFAMNLNGQKNVNDNVKSVGSTVMPVQVNTTNRGPDSSRNIFSAFPPAVRENQSIPSAPVAQSWISFGASSESKPTIVSPTFHDSNSGWKMPFANARPDEAKMTAVPQFFRQPVQMVRESPGQNKGLVIFPQLVQTDFSRSQGQPQWQGLVPPMQQKPNKDMLRPDLNIGFPSPGSPPARQSSGINLEAQQPDLALQL

SEQ ID NO: 23909 - protein, 505 aa, Oryza sativa; identical to SEQ ID NO: 16302
  Clone ID: TF_OsC187148_1.pep

SEQ ID NO: 23910 - protein, 187 aa, Oryza sativa
  unsure (1)..(187): unsure at all Xaa locations
  Clone ID: TF_OsC346887_1.pep
MDGTDVTFDIGQDIFSAHKCILAARSSVFKAEFFGAMSAKAHRTIKIEDMEAGVFRSLLHFIYTDALPETALDVVMAMXQTSALAWRGKNDRYNVERLKLICEEKLSKHIDSNMVATTLALAEQHSCHGLKEACFKFLSSDANLERMKASEGYEHLKVSCPFVLKELIARFISPEMEAAREITMDLQ

SEQ ID NO: 23911 - protein, 347 aa, Oryza sativa; identical to SEQ ID NO: 16329
  Clone ID: TF_OsC60230_1.pep

SEQ ID NO: 23912 - protein, 557 aa, Oryza sativa
  Clone ID: TF_OsC6748_1.pep
IHRFELRHDLFGLINTEGSGNVVCHVCGEVFTAHRGLLAARSPVLGAALNGPRMGSGGLYGGVTIKTNALDPLVDKPLLRYLDTDSLPPQMQQGELEEEGRAMAQHLLAAADRYGMERLRLLCEAQLCKHIEVASVASILILADQHGCSGLKNACFEFLKSPGKFAAAMATQEYDYLKTNHCALADEVVKGNQAKWMLATVETFMRHRLNSKSILETATREIALHASTSNETPPVFLDLEESLRAKGDMTLREEATLKVLKVVATLGKAISTGAIAAVGYYVPGIVGAKFGEPSLPRLPRFAMAAVTSWFAGKVMYYAILQGSTEFILKHGEERMKMELSNIILNKHSDDKTLVEAVKTQFFAEHLFSDQYQDRTLFRWHLRRTYVDSAFMERVKEIEVKSSNDGPGLISGQRIISTRPFGDLMEDPLACILGSPDSNMESNKSAEHTGTIVKRREIACPPAVLVEPIRLQPNVPICSLLARSRTGSNLEVNPVILDLEESLLAKGNMTLEEEVTIRVSKMTASVFKVFATAAFGASSYYALGLGELSLHARARLDL

SEQ ID NO: 23913 - protein, 355 aa, Oryza sativa; identical to SEQ ID NO: 16335
  Clone ID: TF_OsC2144_1.pep

SEQ ID NO: 23914 - protein, 656 aa, Oryza sativa
  Clone ID: TF_OsC3651_1.pep
MGDLSSSDSLLGWANDELDLFASYGASLFPNTRKPLICSEHQPIQSVPPSCRVPNVAIVYVLADVPGGVELAARAAAPAPAAAIGEAVRVMERVRRRIRVRIGVGEAGGAGAAGGEELGGARHGGVAAVRKEQRKKGKWGSSKHKPFGTDSIHKPPYELPLCGVQPPRGSNGNRGSIRRVPHLRHSLHPILSQELPSDITIKVDDAAFNLHKLPLASRCGYIKKQVSGVGGNKATHLEIAGMPGGSKSFELVVKFCYGVNFEITVDNVAMLRCAGEHLEMTEECRPGNLVGRTEAYLEEVALASLEGAVAVLRKAEELLPASEEKARLVARCIDAVASIVCGGDGQFSMSLGTPGGGGGGGYNGVGAAASREVDDWCADELTALRIDTFQRVMIAMKARGFKGIAMGTLIMLYAQKSLRRLDMHGRDRKKMGARQEHEKRVVLETIVSLLPRERNTLSVSFLSMLLRAAIHLDTTLACRLDLEKRMAAQLGQAVLDDLLIPSSSPDAAAATTAYDIDAVQRILAGYLDLDYTGRHLISISPPVSPKTSGATTHLPPWHRRRRDPASARWRRAPRRPPPPRRGAACPPPPTTTPMRRPSGRRSPTPGSSPAPCWRRTTSPRATPTSTSRRRTPICTSVTRSSHGDPMAYLRTSTIKY

SEQ ID NO: 23915 - protein, 588 aa, Oryza sativa; identical to SEQ ID NO: 16364
  Clone ID: TF_OsC359_6807.pep

SEQ ID NO: 23916 - protein, 246 aa, Oryza sativa; identical to SEQ ID NO: 16363
  Clone ID: TF_OsC97452_1.pep

SEQ ID NO: 23917 - protein, 369 aa, Oryza sativa
  Clone ID: TF_OsC299619_2.pep
MATAACGESPSRLGSASAIVADTETRYHLLKIGCYSRTKATTPTGSFLSSGQFTVGGHRWRINYYPNGESADSADYISLYLLLDDKATNSSVKVQAQFKFQISSTDQVKNTPSLASTNVNTYGEDSSWSWGHRKFIKREDFEKSNDLRDDSFTIRCDVAVIGEIRTEKTTEIPSATTFVTVPPSDLNQQLVDLLETEKGADVVFEVSGETFAAHRCLLAARSPVFSAELYGLMKEGDTAGVVRIEDMEAQVFKLLLRFMYTDSLPKMEEEDVMWQHLLVAADRHDLQRLKLICEDRLCNYIGVSTVLNILVLADQHHCDGLKKACFSFLGSLENLSAVVTGDGLEHLSRSYPSLMKELFVVMALPPNHA

SEQ ID NO: 23918 - protein, 370 aa, Oryza sativa; identical to SEQ ID NO: 16374
  Clone ID: TF_OsC243412_1.pep

SEQ ID NO: 23919 - protein, 342 aa, Oryza sativa
  unsure (1)..(342): unsure at all Xaa locations
  Clone ID: TF_OsC389532_1.pep
MASSRPISESTITRSTCATRTARATHQFEIVGYSLKRCLAAGEFVRSSAFAACGYRWSVRVYPGGFGPAHREFVSVFVKMMTNRGKAAARFDLRLIDRATGLPRSVFRAAQPVVFDYSVKHKKCKGKRGTRAFMRRRDLESSAFVRDDRLIVECVIDVVVANGGDDDTAAAASPLAGVPAPDLSRHLGELLERADGVGADVTFDVRGQPFAAHRIVLAMRSPVFMASLYGSMREHRAPRIAVDDMEPEVFDALLRFVYSDTLALPGDLGEGEYKEMVRQLLEAADRYAMDRLRVICELILSRSLDAKTVAATLAMADQHSTXCDALKDVCVQFMAVGLDDHN

SEQ ID NO: 23920 - protein, 354 aa, Oryza sativa; identical to SEQ ID NO: 16376
  Clone ID: TF_OsC389533_1.pep

SEQ ID NO: 23921 - protein, 696 aa, Oryza sativa; identical to SEQ ID NO: 16377
  Clone ID: TF_OsC100212_1.pep

SEQ ID NO: 23922 - protein, 242 aa, Oryza sativa
  Clone ID: TF_OsC951_13.pep
MRRRELEEMGFVRDDRLTIECVVNVVLDPVVTAGDAPELDHPPSNILGHLAGLLGDKGTADVTLVVRGEEFAAHRAVLAMRSPVFKAALYGPMKESTDANAGRVAIDSVEPAVFRALLHFIYTDTTAAMDDLDDDDDDKAQMIMHLLEAADRYDVERLKLICELMLCKSIAVDTVAATLAMADQHHCQKLKEACIEFLATSKKMEGVMESQGYEKMKLSCPSFMVDLWEIIGRKNYKVLSDS

SEQ ID NO: 23923 - protein, 931 aa, Oryza sativa
  unsure (1)..(931): unsure at all Xaa locations
  Clone ID: TF_OsC951_1.pep
MGSGGNDRGLLIHRVVKEAGGPANNPVLMKTNYNVWSLLMKIKLQARCLWGAIDPGEVELHEDRMTLDAICSVVPAEMISTLATKETAKAAWDCIKTMRVVNDRIRKASAQKLRSEYEALAFRDGESVEDFAMRLNTVVTQLSTLGDPEPDDKVVEKYLCVARPRFSQLVLSIETLLDISTLTLEEVTGRLKAVEDSGQSSSSSSPGAGAKLYLTEEEWLERHKKKQQEAKKRNGGGNGRGKRRGGQGHTSGGGGGVGNADSTGVGPARKTDKCRNCGKLGHCAKDCRSKPKQEQAHVVQDEDEPTLMLMTGSCIDEVEETGAQCATPSPLAPQPRPDVIELVEQKVFTALDDATDHDNKCWILDTGASNHMTGSRAAFSDIDTNVAGNVWLGDSLLVRIGGRGTVLFACKNSEHRMLHNTYYLPRLAANIISVGQLDETGFKVVVEDGVMRVWDERRRLLACIARSPGRLYLLDINLARPVCLMARAGEDAWRWHARFGHINFAALRKMGRESLVRGLPVLSQVERVCEACLAGKHRRAPFAQEALHNATELLALIHGDLCGPITPATPSGNRYFLLLVDDYSRYMWLTLLATKDGAPAAIKRVQAAAERKSGRKLWALRTDRGGEFTVGHFTEYCAELGVQRELTAPYSPQQNGVVERRNQSVVGTARSMLKAKGXPRSSSKSIGGKTPYELWNGVPLAVHHLRVXCVAHVKVTAPNMKKLDDRSRPMIFVGYEPGSKAYRVYDPATRRVHVSRDVVFDKEAQWNWDGEAAANVDSGFTIEYTTVYHLATAAPTQIGTEHGGAPASPRSPASGSTPPTPPLAEEPPVEFVSPPPDVEDDLDADHHAAPLRHPRIDDGLRPPKRPGQAVRELLDDLIAARAQAPASVGVLRRHASSIHSVTRIWRSLEDRNWSRVARPMAVQRRGGRKGP

SEQ ID NO: 23924 - protein, 355 aa, Oryza sativa; identical to SEQ ID NO: 16381
  Clone ID: TF_OsC12993_1.pep

SEQ ID NO: 23925 - protein, 307 aa, Oryza sativa; identical to SEQ ID NO: 16387
  Clone ID: TF_OsC356569_1.pep

SEQ ID NO: 23926 - protein, 404 aa, Oryza sativa; identical to SEQ ID NO: 16419
  Clone ID: TF_OsC299619_1.pep

SEQ ID NO: 23927 - protein, 395 aa, Oryza sativa
  Clone ID: TF_OsC299619_11.pep
MGQCAMSHTRSTTAGAAGGKPPIAPPPTSSASAIVADTASGYHLFKINDYSRTRDIFPTGSALKSRAFTIGGHQWRIHYYPNGNTEECGEYISLFLHLDEIVTDKNVYAQHGFRLFDEFAGDNDDDDELQPSSIADLGQVSTFGGNNIGLGRLRFIKREELEKSKYLKNDSFTVRCDVVVTKRIRSEETPLVVRTSPKPKVARLVTVPPSDLHRHLQDLLCAEKGADVVFEAGGETFTAHRCVLAARSPVFSAELFGSMKESDTTVVIRIDDMEAQVFRALLRFAYTDSLPETKEEDEGAMCQHLLVAADRYAMERLKLVCEERLCGRIGVGSVATVLALAEQHHCDGLKKACFDFLSSQENLKAVTAGEGLEHLSRNCPSLVNELIGTLGNLIQ

SEQ ID NO: 23928 - protein, 558 aa, Oryza sativa
  Clone ID: TF_OsC5514_1.pep
MKVEEKKRSITVAPFECAWDEEFRFRETGRGCITFEASAHNDVTLVFREQPGSQHYHYKMDNSRHYIVILGSHRNKRLKIEVDGKTVVDVAGIGLCCSSSFQSYWISIYDGLISIGQGRHPNNNILFQWLDPDPNRNVQYVGLSSWDKHVGYRNISLMPSAPQNSILWSQIECAYVEPDGAGGHTRKQESKDGLDQRALANFLENWDFSDSIFVVGSERKVVPAHKVVLGSCGDFPFNLMMSRPAIELPSVSYPVLHSLLEYIYTGSTQISEWQLVSLLELSSQFKVKPLVMYCEEIIGCLKMSDAVSESSKKIQLSSGGSQAHQFYYFPFKAPLNTQKIEQFLVNGEHSDVNIYVNGHGLVTHAHKLILSLWSMTFDKMFTNGMKESSASNVFFEDVPVEAFFLLIQFMYSGELKVDIEEITPVLVELLLLSDQFGITALQFECCKRIMEFLSKDSLCSVLRAVSSIPSCKLLEEMCKRNFAEHFDYCTTACTDFVLLDEATFKDILQHGHMTVTSEERVLDAILTWCMEACDCFNWTSVHELLSTSRPEKLFGGRL

SEQ ID NO: 23929 - protein, 772 aa, Oryza sativa
  Clone ID: TF_OsC299619_6.pep
MGQCAMSPARSGTTAGSGGGPTPSSSSSRSASTIVAGTASGYHLLKIDDYSRTRDLFPTSTALKSRAFTIGGHRWRIQYYPNGNTPNCGDYISLFLHLDEEVTREVYAQLQFRLLDDELGDKLPPPPPPPSLDANKFFSHASWGQPKFIKKEELEKSRHLKGNSFTVRCDVVVITEFVAKDMPEAATATAARRRTPARGTGSFVSVPPSDLHRHLGELLLGEKGADVVFKVGGKTFTAHRCVLAARSPVFGAELLGSMKESRRKAVVRVVDMEAQVFKALLRFAYTDSLPEMKEKDEGAMCQHLLVAADRYAMERLKLVCEEKLCERIDVSSVATVLALAEQHHCDGLRNACFDFLSSPENLKAAMAGDGFEHLSRSCPSLMTELVAMLAAAATSDGPTLPPVMSHGALSPTTAAAVSASAIVANTSRGYHYLKIDGYSHTKATPTGEALFSCQFAVGGHRWRICYYPNGNVLEAADYISMFLVLDEIVVRNVKAQFQICFAGQVEKQAPSLAWKTVRAFNKQTSSSSSWGYPKFIRREDLEKSEYLRDDSFTIRCDIIVVDNYRAEDASSGAAGFVSVPPSNLHSHLGDLLKNEKGTDVVFEVAGQRFTAHRCVLAARSPVFNAELFGMMMESDTTTNDAIQIGDMAAPVFKALLHFVYTDSLPETMEEREDTMCEHLLVAADRYNLERLKLICEERLCKYIGIGTVMDILALADQHHCKGLKKACFDFLRSPANLSAVTGSESFEHLSRSFPSLMKELVDILGTSHNYAW

SEQ ID NO: 23930 - protein, 353 aa, Oryza sativa; identical to SEQ ID NO: 16408
  Clone ID: TF_OsC356517_1.pep

SEQ ID NO: 23931 - protein, 268 aa, Oryza sativa
  Clone ID: TF_OsC16921_1.pep
MWGYKRFFKRSALETSDYLKDDCLLVNCTVGVVQSHTEGPKIYTIPVPPSNMSQHIGQLLTDGKRTDITFEVDGEVFPAHKVVLAARSPVFRAQLFGPMKDKNMKRITIEDMEASVFKALLHFMYWDELPDIEELTGLNTTWVSTLMAQHLLAAADRYALERLKLLCELKLCEDVAINTVANTLALAEQHHCYQLKTVCLRFVALPENLKAVMQTDGFDYLQQSCPSLLTELLEYVAKVGEHSVSPCLYSNEVLDGGDANGRRVKPRI

SEQ ID NO: 23932 - protein, 267 aa, Oryza sativa; identical to SEQ ID NO: 16359
  Clone ID: TF_OsC109153_1.pep

SEQ ID NO: 23933 - protein, 394 aa, Oryza sativa; identical to SEQ ID NO: 16357
  Clone ID: TF_OsC341870_1.pep

SEQ ID NO: 23934 - protein, 381 aa, Oryza sativa
  Clone ID: TF_OsC341874_1.pep
MAAASTTDQGVAVINDSPLCKLLSSGDGRHVTFRVDYAAARRPAVAGRTLRTTCAIGDSGAYRCEASFRLLIGRRKLAAFAVGVSGPRYRDVHKVVVDLVLVDNARSVALQPPTRSMAIQAAAGSNQGGCGLLVSKDYLEENCVQDGVLVAVCSVLFLPELPPCLWLDSLGHRLAAMSNKKDSTLTDVCFDVDGERFNAHRLVMAAQSEVFRSLLFGSDDAETKTETAVVTIDGISATTFKHMLHYIYCNQLPPPATGDGDDDDGEADHVTRIAELQRLLVAADAYGVEALRQACEDTLCAGINMDTVASTLALTEKGSYPKLRGSCLEFLSNTQIYSVATNDECYEVVQSYPDVLTEIRDSCLIYYRYATFVVVTELEDL

SEQ ID NO: 23935 - protein, 590 aa, Oryza sativa
  Clone ID: TF_OsC404288_1.pep
MATASIASNVAGGGCPTPSRSAAASTVVTTQAYHVLKIDGYSRTLQVHCYRSLSSFPFNAGDRTWYICYYPHGKNDISKDFISIYLVLYDAIAEAVMVQATFSLLDQHGKPVPSHTHATRLLSTSNQDDMANNLGFETFIAKGDLEKSGHVQDDCFAIGVHVVITKETPPPIIAVPPSSDMHLHYGDLLSSKRCADVEFLVGGETFAAHRLVLAVRSPVFVAEHFGPMKEGVNVNDVIEINDMDAQVFKALLNFIYTDTLLEMDQEEDATMAQHLLVAADKYGLERLKVKCEERLSNHIDADSVATLLVLTDKHNCRGLNKACIEFFSSPTALAKIIETDEFQYLTQSHPNILEDIISNIVASQLEKAIFSPENEGGKINKVDIRIQPWQNSNARCGKAAGADCRGRQARRERGGRRRDLAAEREDVDTADVDAVEEHSTRRRLPEAVERAEQRGLAAAAGPDDTDDHPSRHVQVLTVRYYDLRVNTRPPRRHHRRPFFPDAVHDQEVLPDIMLFNSIVDRTCQQHVHWNTKLTQKRRGVLAHLKLSPSERQRRRSKQESGEERKTKIEKTEIAGVDCSNRRPPFCSFRR

SEQ ID NO: 23936 - protein, 510 aa, Oryza sativa
  Clone ID: TF_OsC26378_1.pep
MASMNNLYRLCIRSKQVTKQILQILGDLPALLDLELRSESDDPMEILIISKCIFRCLKIFRLYGSFVGLIFEDGSMQKVREISVVVRAHKAKSAFADHPDLGIRNLTSLMDLNVWINCEGARVQEVKVLEAAIADATALLPNHPTPHFFRENEENMVKDYLPNHPTPHFFRENEEKMYVPNSRLMSCASLLSAAIRRGVAGCRASPPSASAIVSRPATGSHILRIDGYTNTKSILATGESATSRRFAVGGHSFVMRYYPNGLDDGCADSISLFVDVAGGGGCGRSGIAGHARFSVLDHAGSPARRTDDASSEALAAGADAGVVVPPSDLHRHLAELLWSKEGADVVIELDGGDGETTTFHAHRWVLAARSPVLKAKLSASPSSPATLRLAAMDADAFRALLHFIYTDTLPDDDDDDDAMARRLLAAADAYGMERLRLICEDRLRRRVAMGNVAVTLALAEQHHCRALKEACVEFLSSPGNLKAAMATDGFEHLKATCPSVLTELVMKQLV

SEQ ID NO: 23937 - protein, 371 aa, Oryza sativa; identical to SEQ ID NO: 16405
  Clone ID: TF_OsC174949_1.pep

SEQ ID NO: 23938 - protein, 154 aa, Oryza sativa; identical to SEQ ID NO: 16410
  Clone ID: TF_OsC340718_1.pep

SEQ ID NO: 23939 - protein, 365 aa, Oryza sativa; identical to SEQ ID NO: 16412
  Clone ID: TF_OsC391235_1.pep

SEQ ID NO: 23940 - protein, 374 aa, Oryza sativa; identical to SEQ ID NO: 16413
  Clone ID: TF_OsC393414_1.pep

SEQ ID NO: 23941 - protein, 421 aa, Oryza sativa
  Clone ID: TF_OsC45143_1.pep
MKATAGLVEAQRRPARSKAVRRRQGSCGGLDVYGQASVEVEASAPTSPSDVGLDAGMTTTTTAAATALTSSVGAGPPPSRSTTTITAGRTYHILKIEGYSSTLKAGRGQALRTSPFSAGGRTWYISYYPNGGRETNKHCISFFIHLDDDTVNDDVMAQVTFSLLDRHRNPVRSHTVTTTLYNFSVANSSALGFENFIRRDELQRSEYLNDDCFAIAVRLVITEEPPSFTVPPSNMHLDYGDLLSSKEGTDVEFVVGGETFAAHRLVLAARSPVFKAELFRPMEGGTTDVIKIDNMDAQVFKALLVFIYTDTWPEIGQDETTMVQLLVAANKYSLSRLKIMCEDRLCSYIDTSSVVTMLMLADKYQCHGLKKVCFNFLASSRALSLAMKADNFRCLIQGRPTMLKDLIYNIVTHQLEIKLSV

SEQ ID NO: 23942 - protein, 824 aa, Oryza sativa; identical to SEQ ID NO: 16417
  Clone ID: TF_OsC15_30.pep

SEQ ID NO: 23943 - protein, 300 aa, Oryza sativa; identical to SEQ ID NO: 16395
  Clone ID: TF_OsC389531_1.pep

SEQ ID NO: 23944 - protein, 371 aa, Oryza sativa
  Clone ID: TF_OsC346893_1.pep
MANHCNNTSSVTVAEVARGSHVIKIDGYLRTKELMENGKYVSSIPFSVGGHSWFITYFPNGVNTESKDYLSVFLTIDFACAGGVKATFSFALLDKNGRSVQLYSKLYPLHTFTEKGSDWGHSKFMKKTDLERSVHLSNDSFSIMCDLTVMKDICSKETTQKQFVVVPPSDLHQHLGDLLLKNMDSTDVTFNVGQDIFSAHKCILAARSSVFRAEFFGAMSAKARRTIKIEDIEAGVFRALLHFIYTDSLPETAQNIVMAQHLVVAADRYNVGRLKLICEEKLSKHIDSNMVATTLALAEQHSCYGLKEACFEFLASRSNLERMMASDDYEHLKISCPSVLMELVASRPPPPLWSSSSLGKAAVGFAKSSPS

SEQ ID NO: 23945 - protein, 348 aa, Oryza sativa
  Clone ID: TF_OsC951_10.pep
MGTVEGHHRFAIRGYSRLRALLAAGEYVRSAAFTVGGYDWAVVFYPRGATHADRDHAAVYVQLLTDRAAAAATFDLRFVRADSGRALSVHPPLAAPRTFSTVLRSSSAAMYGVKVEAIQALQANYVRRDRLTIDCAVRVVGKPRVSAAAPLTAADVPPPDLAAHLGRLLDLKSHADVTFDVRGVQFAAHRVVLAMRSAVFAAELFGPMRNNAGGAIKVGDMQPAVFKVLLGFIYTDTLAAMDDLDADEDDRRELARHLLVAADRYDMGRLKLICADMLARSLTAQTVASTLALADRHGCRGLREACVEFVIAMGMNDEVVISRHPDQLSCISLFKYFFYQIGSLLKIH

SEQ ID NO: 23946 - protein, 352 aa, Oryza sativa; identical to SEQ ID NO: 16423
  Clone ID: TF_OsC50081_1.pep

SEQ ID NO: 23947 - protein, 614 aa, Oryza sativa; identical to SEQ ID NO: 16424
  Clone ID: TF_OsC299399_1.pep

SEQ ID NO: 23948 - protein, 316 aa, Oryza sativa; identical to SEQ ID NO: 16425
  Clone ID: TF_OsC340717_1.pep

SEQ ID NO: 23949 - protein, 479 aa, Oryza sativa
  unsure (1)..(479): unsure at all Xaa locations
  Clone ID: TF_OsC1713_5345.pep
MGQTTSKSAGDGKPKPKTTSAAAAAAAVVSETATGSMTMRIAGYSQTKGIGVGNSINSSKFHAGGHTWYIAYYPDGDREEYSDWVSVYLCLARPAAGAAADDVVEAKFTLSLLSGTYGAVVEEKICTAKKFSFANGYWPSWGHTRFIKRKKMDSRLWSCLHLDGQSFYIRCNITMDIIRCEAATTAVAVPPPDLHRHLAALLGSGVGADVRIRVGGKLFAAHKNVLAARSPVFMAELFGNNGGKDQKEAKAAAAATGNGVIRIDDMDLRVFRAMLQFIYTDTLPKIDKGDTAFMAQNLLVAAHRYGIERLKSISVDMIRKAARTMNLIAMIIRNNDEGIATQLRTRGRLGLHLPDAPEKPHRCRRLFELTLCYLSLDSTLLIQAAGDASTRSCDLAEMPDVLDLQASPHWSGLTMEEVIGKPPCRSAPRIAGAATDCQDFYPFPCRRSSITHGVETSTMTMEASIAAAQEEGRRGGRRX

SEQ ID NO: 23950 - protein, 284 aa, Oryza sativa; identical to SEQ ID NO: 16437
  Clone ID: TF_OsC299619_8.pep

SEQ ID NO: 23951 - protein, 249 aa, Oryza sativa
  unsure (1)..(249): unsure at all Xaa locations
  Clone ID: TF_OsC346729_1.pep
MRIGRRPGRPQGVRVGRFINAAGTTGFPTGKMDRVDTALPCFSSQCMNISLRTLFPPIFTFLKYILYAGDDDGTIPIPRSNLNGQLDDIADRADGSDVLFSVGSETFHAHRAVLAARSPVFKMELLGSMAESTMPCVTLHNIDPATFKALLHFVYMDALPSPTXRYALERLKLMCAQKLWESVSVETVAMTLGYAPTXERYHCPELKSKWLSFLMAEINFKKVAVTDGYFHLRRDFPLIIEEIKKRIES

SEQ ID NO: 23952 - protein, 434 aa, Oryza sativa
  unsure (1)..(434): unsure at all Xaa locations
  Clone ID: TF_OsC8342_1.pep
MAAPPVSGDGAAAAAPVVALGAAGAVGGPRPYEVAVAAAELRPVDCNLAALCDHVQAEGFGSGAFSDVVVEAMGATYRLHRLIISRSAYFRNMLHVKTMVVMGNVSEMPAGVIFAKVPHWNYERXRFELALYALLAKVTLSDVEVSGNENLNLTSSSANSDHSMRKGKSPMNEAGNIYLTDAHGEGNAVFGPVRVNVRGAVDGLAGIGRGNSNVPGAAWAPTRYVFSRVPYGLGSRNGQQPFANDESEPRVDYNGGSPRVRQESKEHELGSNLETTENTTISLDMKTPLSHFPPFRFGVEFEDVHRLADSQVKHSTEVFYAGSLWKVSVQAFNDEDPHGRRTLGLFLHRRKAEPLDPLRKANMYVDHREKVTARYQLICPSKREVMIFGSLKQAGTLLPKAPKGWGWRTAILFDELGDLLQGGSLRIAAVVQLV

SEQ ID NO: 23953 - protein, 313 aa, Oryza sativa
  unsure (1)..(313): unsure at all Xaa locations
  Clone ID: TF_OsC31069_1.pep
MMQQPPSQPQPGMRGPPPPPQPAPGQPPEWGAVPPPQPYYAAPPPQAMPAPAAADEVKTLWIGDLQPWMDESYIYNCFAATGEVQSVKLIRDKQSGQLQGYGFVEFTSRAAADRILQTYNGQMMPNVEMVFRLNWASAGEKRDDTPDYTIFVGDLAADVTDYLLQETFRVHYPSVKGAKVVTDKMTMRSKGYGFVKFGDPTEQARAMTEMNGMLCSSRPMRIGPAANKKTTGVQERVPNAQGAQSENDTNNTTIFVGGLDPNVTGVVMKPVFAPYGEVIHVXISIGHRCGDGHFVNRLSAVQGLAVLQRSLIG

SEQ ID NO: 23954 - protein, 274 aa, Oryza sativa
  Clone ID: TF_OsC128453_1.pep
PGLQARGARERETRAGSLPRPAPPRLGDLRPAPYRRSVPLFVPIPCWYLSVEKARYVYVRLFPEPGRVAKERPPLARFLLRACWSGPPRRSCVSPVHEHLLRSSEDFFWQLDTMYAGRFTIDVEFLDLKIASNNAAESSTSIWPNESIAVQNIASKSSLGCLSRMLTESIHADVTINTTDGVLKAHKAILASCSPVFESMFLHDLKEKESSTININDMCLESCSALIGFIYGTIKLDQFWKHRLSLLAAANKYSISDIKDCCEESLLEDINSSN

SEQ ID NO: 23955 - protein, 261 aa, Oryza sativa; identical to SEQ ID NO: 16445
  Clone ID: TF_OsC346888_1.pep

SEQ ID NO: 23956 - protein, 392 aa, Oryza sativa
  Clone ID: TF_OsC386240_1.pep
KTTTQQIDRHIQKSIDTTNRFSYYGNTEIGVLDYSATNASAIGDPINSDLFTAGGLTWRVNCYPRGDKADNNGDYISLYLELISKSKNIKAIFDAFMVDEHGNPSDGSNRLVQVYPPAGYPAWGWPRFVKRSNLSSVFVVDGKVRIMCVVGVTGGHLDGGLLPLPPPNIGVHLGGLLDSEDGADVTFAVGGETFHAHRAVLAARSPVFRAELLGSMAEATMPCVTLRDIEPATFRALLHFVYTDVLQIEGSSSTSTTDLLQRLLAAADRFALERLKLMCAQKLWESVSVETVIATLCCAEMHSCPELKNRCIDLVVTKDNFMEVAVTKDYFHLGQSFPSVIEEITGNLPRTMQRGPWGQTWRQHRVSGSLGGVTSSSRVIYSRIMSATKARS

SEQ ID NO: 23957 - protein, 129 aa, Oryza sativa; identical to SEQ ID NO: 16370
  Clone ID: TF_OsC306844_1.pep

SEQ ID NO: 23958 - protein, 541 aa, Oryza sativa
  Clone ID: TF_OsC31069_3.pep
MDIGPHSIQLIAPPSLYHAASAAAMGDHRDPAFPAAAGGCRLPKTSSVSVTESVTAVHDFKVTGYSLIEGLGIGRYVSSSTFTVGGVDWAVRFYPDGSTVTCLGNASAFLYYCGREKEVRTRFTLNLLGKDGKLSQVTNSYMKHTFSPASDNWGFIKFAEKSKLQSSPFLHNDCLTIRCLLTVVRESHTKDVEVNSVVVPPSNLHTDFENMLQDGEGSDVTFTVGGQEFRAHKCVLAFRSPVFKAELFGPMKENGTQCIKIDDMEPEVFEALLHFIYTDRLPDSCRDGKAAAMQHLLVAADPKHRTNQGQPYRNCSYGGILHHSQNKLWRNRRQELRVRGDSVSPMEHVPPWTLSPAHRSREVEDEADRDDGEAAVRGAEGRRPQIEEAVVDVRAPPGTTPPPTPARKRTAAASPLGATPAPAPERKGMAAASLPGATPTPTPATERKGTTAASPRGTQSTTPARKGLAVASPPGKPLPTPGRKRNFVAGDWRGGREKERGNNFPPTRARQRRPRLGRKNGSLQMSNDIYGYGNLDYWDVG

SEQ ID NO: 23959 - protein, 386 aa, Oryza sativa; identical to SEQ ID NO: 16340
  Clone ID: TF_OsC56854_1.pep

SEQ ID NO: 23960 - protein, 370 aa, Oryza sativa; identical to SEQ ID NO: 16344
  Clone ID: TF_OsC191632_1.pep

SEQ ID NO: 23961 - protein, 637 aa, Oryza sativa
  Clone ID: TF_OsC3707_1.pep
MAGSEAAAAQEAEMDPDFSGGGGGGPSFEFAFNSVNFSDRVLRIEVVAGDDDDDDDHAPGSSRDGGAASSSSSSSYRGRRPGSEAAAAQEAEMDPDFSGGGGGGPSFEFAFNSVNFSDRVLRIEVVAGDDDDDDDHAPGSSRDGGAGSLSDWARHRKRRREELLKEKESEAVMPDQINCKVEPEECDAYEENQEEPVAMMDDSPPSVGPDGDDGPSMDSPWSGGVSTPVLRVKNIYISSAILAAKSPFFFKLFSNGMKESDERQATLRITDSEENALMELLSFMYSGKLTSTDPTLLLDILMAADKFEVISCMRYCSQLLTSLTMTTESALLYLDLPCSISMAAAVQPLTDAAKEYLSNKYKDLTKFQDEVMNIPLAGIEAILSSNDLQVASEDAIYDFLIRWARAQYPKSEERREILSSRLLPLVRFSHMTCRKLRKVLICTDLDHEQATKCVTEALLYKADAPHRQRALAADVTTCQKFAERAYKYRPLKVVEFDRPYPQCIAYLDLKREECSRLFPSGRMYSQAFHLAGQGFFLSAHCNMEQQSTFYCFGLFLGMQEKGSMSVTVDYEFAARTRPSGEFVSKYKGNYTFTGGKAVGYRNLFAIPWSTFMADDSLFFLDGVLHLRAELTIKQPTV

SEQ ID NO: 23962 - protein, 605 aa, Oryza sativa
  Clone ID: TF_OsC43419_1.pep
MDPDFSRASRGPSFAFAFNSVNFSDRVLRIEIVAGDDAAGAKGAAGEGCSSLADWAHQRKRRREELRREKAVGKYFGRDPNFDSKKKWATNRDSCFPLRGIALGRPHCRLGASAVRYFRRARSRECESGKYTDLETCKVEAEECDTYEENNEEPVAMIEESPPDIGQDGEDGDSCDSSWSMECTQVLRVKSIYISSAILAAESPFFYKLFSNGMKESDQRHATLRITASDSFYLIIVCLSETEENALMELLSFMYSGKLTTNQPTLLLDILMIADKFEVVSCMRHCSQLLRSLPMTTESALLYLDLPSSISMAAAVQPLTDTAKAFLANKYKDLTKLQDEAMNIPLAGIEAILWSNDLQVASEDAIYDFVIKWARSQYPKLEERREILGTRLLPLVRFCHMTCRKLRKVLACNDLDHEQATKCVTEALLYKADAPHRQRTLAADVLTCRKYAERAYKYRPLKVVEFDRPYPQCIAYLDLKREECSRLFPSGRIYSQAFHLAGQGFFLSAHCNMDQQSAFHCFGLFLGMQEKGSTSVTVDYEFAARTRPSGEFVSKYKGYYTFTGGKAVGYRNLFAIPWSSFMADDSLFFIEGVLHLRAELTIKQP

SEQ ID NO: 23963 - protein, 395 aa, Oryza sativa
  Clone ID: TF_OsC157448_1.pep
MTAAASWSRSVTETVRGSHQYTVKGFSMAKGVGAGRYVSSDTFAVGGYHWAVYLYPDGKNPEDNANYVSVFVALASDGADVRALFELTLLDQSGRGRHKVHSHFDRSLQAGPYTLKYRGSMWGYKRFYRRSLLESSDFLKDDCLVMNCTVGVVKNRLETPKNIHINIPPSDMGRCFNNLLNLRIGCDVSFEVGDERVQAHKWILAARSPVFKAQFFGPIGNPDLHTVIVEDVEPLVFKAMVNFIYSDELPSIHELAGSVSTWTSTVVVQHLLAAADRYGLDRLRLLCEEKLCDELTAETVATTLALAEQHHCTQLKSACLKFTAVRENLGAVMETEGFNYLEETCPSLLSDLLATVAVVDDDAASFNRKRGVGGNEGANPVESVEASDRRIRRRV

SEQ ID NO: 23964 - protein, 451 aa, Oryza sativa
  unsure (1)..(451): unsure at all Xaa locations
  Clone ID: TF_OsC20177_1.pep
HVAVPPPNPRRTTTLSRRASPPPAAAGGGGTGRPVAGHGGAAAPLPRPGGDGAPSPTSSRSVTQTVNGSHRFVIQGYSLAKGMGXCGKHIASETFTVGGYQWAIYFYPDGKNPEDNSAYVSVFIALASEGTDVRALFELTLLDQSGKGKHKVHSHFDRSLESGPYTLKYRGSMWGYKRFFRRTALETSDFLKDDCLKINCTVGVVVSTMDYSKPHSIHVPESDIGYHFGTLLDNQEGVDVICNVAGEKFHAHQLVLAARSSVFRSELFEHESDEEKNEVDTSNEIKEIVIDDMEPKVFKAVLHFMYRDNLVGDDELSASSSDCSIFDTLAGKLLAAADRYELPRLRLLCESYLCKHISVNSVATTLALADRHHAMELKSVCLKFAAENLSAVIRTDGFDYLKDNCPALQSEILRTVAGCEEECSSGGKSQSVWGQLSDGGDTSGRRVRPRV

SEQ ID NO: 23965 - protein, 423 aa, Oryza sativa; identical to SEQ ID NO: 16510
  Clone ID: TF_OsC42903_1.pep

SEQ ID NO: 23966 - protein, 99 aa, Oryza sativa
  Clone ID: TF_13447549.pep
RILANRQSAQRSRVRKLQYISELERSVTTLQMEVSALSPRVAFLDHQRSLLTVGNSHLKQRIAALAQDKIFKDAHQEALKKEIERLRQVYHQQQIKATG

SEQ ID NO: 23967 - protein, 393 aa, Oryza sativa
  Clone ID: TF_OsC728_1.pep
MDDPGAADPGARPHHVSPGQPPVVPRSPTPLDLSSAAAAAAAASYRRLSPSLRPPAHPQARLPSPYPQIPSSSSSAAAGSSGHHARSLSQPLFFSLDSLPPLPYADLAAPPAIPPSPPSSSSDPPPPGLPPRKGGHRRSQSDIPFGFSHLSPPLPPPAPVKREAATAAEGCRSDGDDFALYDLVNSYMDLDGMEALNSSEERHEDRDSRASGTRTGSVADSSENEAESHSTPVERKDGGGKSRHCRSLSVDSFIEKLNFDESPKLPLPSPSGGLSRSGSGSLDGGAASLFGAEFANGEFTEAEKKKIMANERLAEIALTDPKRVKRILANRQSAARSKERKMRYIQKLEHKVQVLQTEASTLSHSLKCCRRTPWTSPQNNELKLGCSMDHSPV

SEQ ID NO: 23968 - protein, 333 aa, Oryza sativa
  Clone ID: TF_OsC593_1.pep
MADASSRTDTSTVLDTDDKNQMVDGQSGAIVPSNSSDRSDRSDKPMDQKVLRRLAQNREAARKSRLRKKAYVQQLESSKLKLASLEQEINKARQQGIYISSSGDQTHAMSGNGAMTFDLEYARWLEEQNKQINELRTAVNAHASDSDLRLIVDGIMAHYDEIFRLKGVAAKADVFHILSGMWKTPAERCFLWLGGFRSSELLKLLVNQLEPLTEQQLLGLSNLQQSSQQAEDALSQGMEALQQSLAGTLAGSLGPSGSSGNVANYMGQMAMAMGKLGTLENFLRQADNLRQQTLHQMQRILTIRQAARALLAIHDYFSRLRALSSLWLARPRE

SEQ ID NO: 23969 - protein, 329 aa, Oryza sativa
  Clone ID: TF_17025921.pep
MADMSPRTDTSTDDTDDNHMLEPGQLALAAASDSDRSKDKHEDQKTLRRLAQNREAARKSRLRKKAYVQQLENSRLKLTQLEQELQRARQQGIFISSSVDQTHSMSGNGALAFDMEYARWLEEHNRQINELRSAVNAHAGDNELRGVVDKIMSHYEEIFKQKGNAAKADVFHVLSGMWKTPAERCFLWLGGFRPSELLKLLSTQLEPLTEQQLSGIANLQQSSQQAEDALSQGMEALQQSLAETLAGSLGSSGSTGNVANYMGQMAMAMGKLGTLENFLRQADNLRQQTLQQMQRILTTRQSARALLVISDYSSRLRALSSLWLARPKE

SEQ ID NO: 23970 - protein, 152 aa, Oryza sativa
  Clone ID: TF_LIB3431-020-P1-K1-E3.pep
PRVRPRVRSKKKRRQMRNRDSAMKSRERKKMYVKDLETKSKYLEAECRRLSYALQCCAAENMALRQSLLKDRPVGAATAMQESAVLTETLPLVSLLWLVSIVCLLPVPGLPNRNPVARSSAGRDLATVTGKKTSSEQQLEETLLLHGRRKGS

SEQ ID NO: 23971 - protein, 544 aa, Oryza sativa
  Clone ID: TF_OsC192_1.pep
MVQGEESSWRMAASTHHERAIPLNQALAYGVQAHASPSVAAAPPASFLDFQPAAAAAAYFGELEEALIHGANAGGVVDPGMIRADVHSKSAAAAATAGYLAARPPTLEIFPSWPMRQQQQLHSGNSQSVGSTTDSSSAQNTMPQMELVSPASIRASSEHQHQQQQPGQEVMMVTTDDYSYKPGLAAASPSFQQQHQLQHHQQQQLHGGGDHDKRKHGSTRKDGKSVDAKTERRLAQNREAARKSRLRKKAYVQNLETSRVRLQQIEQELQRARSQGLFLGGCRAAGDMSSVKSFAGAAMFDMEYARWLDDDSKRLTDLRGGLQAHLLDTNLGLIVEECMQHYDELFQLKAALARSDVFHLLTGTWATPAERCFLWMGGFRPSDLLKILIQQLDPLTEQQMLGIYSLQQSSEQAEEALAQGLQQLHQSLADTVAAGTLNDGPGVPNYMSLMAIALDKLASLESFYQQADNLRQQTLHQLRRILTTRQAARCFLSIGEYYRRLRALSNLWSSRPRENFIGTESVSPTGTELQPMHNQPQQNQYSGF

SEQ ID NO: 23972 - protein, 519 aa, Oryza sativa
  Clone ID: TF_OsC596_1.pep
MEGGRLGGAAASASAAAAADARGGMSGFAAPQHAIVKHGPGSVTHCGGKWTFAELCQSEQIWVLDCYCMQWACKFATNATECHTNLNNVQPTQVTDFGALAQSAGFRIEDLANLSTNGLFNLKSNAHTIINDPLQFENYVKSISPSNITTPPAGSVVDPQTLVPQKGAQLNWVTIRTGNVENWGESTMADTSPRTDTSTDPDTDERNQMFEQGQLAAPTASDSSDRSKDKLDHKTLRRLAQNREAARKSRLRKKAYIQNLESSRLKLTQIEQELQRARQQGIFISTSSDQSHSASGNGALAFDMEYARWLEEHNKHINELRAAVNAHAGDNDLKSTVDSIMAHYNEIFKLKGVAAKADVFHVLSGMWKTPAERCFMWLGGFRSSELLKLLAGQLEPLTEQQLAGIANLQQSSQQAEDALSQGMEALQQSLAETLASGSLGPAGSSGNVANYMGQMAMAMGKLGTLENFLRQADNLRLQTLQQMQRILTTRQSARALLAISDYFSRLRALSSLWLARPRE

SEQ ID NO: 23973 - protein, 362 aa, Oryza sativa; identical to SEQ ID NO: 16453
  Clone ID: TF_OsC100050_1.pep

SEQ ID NO: 23974 - protein, 332 aa, Oryza sativa
  unsure (1)..(332): unsure at all Xaa locations
  Clone ID: TF_OsC239382_1.pep
MAQLPPKIPVAAPGHHQHWASAGGAGDAAWADEFAEFAASRRGAHRRSLSDSVAFVEVAPAGCGAGGEFDRLDDDQLMSMFPDEGGSSAPGSDNGGSDSDGGGDKHAAAQSDDGQHAAGEPTQEQAAATSPTELIRDPKRVKRILANRQSAQRSRVRKLQYISELERSVTTLQKWRQFETDRWTQPHWLAGNSTQCGEEMSESNEVSVLSPRVAFLDQQRTILTVGNSHLKQRIAALAQDKIFKDAHQEALRKEIERLRQAVLACYRLTAPDLLCMIWFPLLGXETTGGEKPAQHIVIVEHRYCSSFKDKSHSVQYNICIIQNLQYMDLDQR

SEQ ID NO: 23975 - protein, 184 aa, Oryza sativa
  unsure (1)..(184): unsure at all Xaa locations
  Clone ID: TF_OsC17917_2.pep
QRPLWKVSSSRLSEYKVEDLAAALLNSFTYNIGQIAYFVANLSGLKRIFFRGAYICGHEKTMDKISHSLXYWSKSQVQTTFLCHEGFLGTLGAFWSYENMGIDGLAAHEVIREVLLGAPYTGQLPSLPLTHQQDNGEDTTIEGEVERLRHDNAVLKAELERLQRENTELKAKLVKSGKPNTFYH

SEQ ID NO: 23976 - protein, 458 aa, Oryza sativa
  unsure (1)..(458): unsure at all Xaa locations
  Clone ID: TF_OsC55794_1.pep
MGEASSSSGHPRQNPHVLGYGFHGAMPNSLPSANLFEQQGGANYFGELEEALMQQVATLRRTQQTATTTSTLHHGDTTPFSTTATAAATARPPPTLDIFPSWPMRSLHTPKEGSNVTADTTDSESSSKNNSNQNASSDQHVLVGDMAGQFDQIPQQEQHKKMATNSPTHSSKTGKALDPKTMRRLAQNREAARKSRLRKKAYIQQLESSKLKLAQMEQDIHRARSQGLLLGAPGGNTSSGAAMFDVDYARWLEEDSQRMAELHGGLHAHLPDSDLRAIVDDTLTHYDHLFNLKGMAAKADVFHLITGMWATPAERCFLWMGGFRPSELLKTLTPQLDPLTEQQVVGICNLQQSSQQAEEALSQGLDQLHQSLAETVAGGSPLDDPNVGSFMGHMAIALGQLSNLEGFVIQIKIGVALSLCXLNFINXVRQAARCFLAIGEYHNRLRALSSLWASRPRE

SEQ ID NO: 23977 - protein, 330 aa, Oryza sativa
  unsure (1)..(330): unsure at all Xaa locations
  Clone ID: TF_OsC594_1.pep
MADASSRTDTSIVVDNDDKNHQLENGHSGAVMASNSSDRSDRSDKLMDQKTIRRLAQNREAARKSRLRKKAYVQQLESSKLKLAQLEQELQKARQQGIFISSSGDQTHAMSGNGALTFDLEYTRWLEEQNKQINELRTAVNAHASDSDLRLIVDGIMAHYDEVFKVKGVAAKADVFHILSGMWKTPAERCFLWLGGFRPSELLKLLANHLEPLTEQQLLGLNNLQESSQQAEDALSQGMEALQQSLADTLAGSLGSSGSSGNVANYMGQMAMAMGKLGTLENFLCQXGQPATADIASNATNSDDPASLACSSCHTRLLFTLACFEFAVAC

SEQ ID NO: 23978 - protein, 480 aa, Oryza sativa; identical to SEQ ID NO: 16457
  Clone ID: TF_OsC65434_1.pep

SEQ ID NO: 23979 - protein, 165 aa, Oryza sativa
  unsure (1)..(165): unsure at all Xaa locations
  Clone ID: TF_LIB3433-057-P1-K1-E1.pep
RTRGGKLLDAKTERRLAQNREAARKSRLRKKAYVQQLETSRIRLQQIEQELQRARSQGLFPGGCSAPGDMSSGAVMFDMDYTRWIDDDSKCMAELQGALQAQLPDGNLGAIVEECMRHYDELFHLRAVLASFRVFHLMTGMWAAPARRCFXXFGAFXPSEILKML

SEQ ID NO: 23980 - protein, 188 aa, Oryza sativa
  Clone ID: TF_LIB4371-001-Q1-K1-H2.pep
MIDATSGVNCNVGAANGTGDTGDAVCHADQEKSLKRRSGQRSRVRKLQYIADLERTVDSLQNIGADLAVRVASLFQLRNALSMENKQLRRQITSLQQAKLIKDGQTQMLKKETERLKQLSVRHRRSRSVTSCFEANSFGGGDPSAINWQMLDMSKLSLNGALLFLLEAATACENLTATTNIACTDLHL

SEQ ID NO: 23981 - protein, 387 aa, Oryza sativa
  Clone ID: TF_OsC739_1.pep
MASSSDEQPKPPEPPAAAAVAGTAVATAAAAVPTHAEWAASLQAYYAAAGHPYAWPAQHLMAAAAAGAPYGAPVPFPMYHPGAAAAYYAHASMAAGVPYPTAEAMAAAAAAAAGAVPEGKGKGKGAAASPEKGSSAAPSGDDASRSGDSGSEESSDTRDDDTDHKDSSAPKKRKSGNTSAEGEPSQATLVPYAAVESPYPLKGRSASKLPVSAPGRAALPNATPNLNIGIDLWSTPPALAVPAGQGEASPGLALARRDGVAHLDERELKRERRKQSNRESARRSRLRKQVGYLYGSGSRWQTWKETLILLGAAIFLAGGIECRIDAYTTDGYDVSTSPDVGLSAHGQYAQQAMLQETDKQHAPHKNTNNNSNGNYVGGSHKPEANSR

SEQ ID NO: 23982 - protein, 150 aa, Oryza sativa; identical to SEQ ID NO: 16459
  Clone ID: TF_OsC207527_1.pep

SEQ ID NO: 23983 - protein, 166 aa, Oryza sativa
  Clone ID: TF_OsC2449_5.pep
MILRMGDRRRWLPLRARRAARPSTTTIGAAAIGNRFDFPPPFFTQNLLVLPKIPKSSGLREAAPTGCGGLREAEGDEQFVLNGFTAANLSFDDMATVTPNGLLMLTNGTNQLKGHAFFPVPLQFHRAPNSTAMQSFSTAFVIGIIGAFEDQGSGNLAAAGGSSRAA

SEQ ID NO: 23984 - protein, 337 aa, Oryza sativa
  Clone ID: TF_OsC2527_1.pep
MSRSPHLPPRCPPLGPQITRRDDSLFTQSCRFPSEDPFVGEPPCWLDDLLADSGKSHTLPPLRRACSDSDAILDVLTSFQSPIYPIDEGDPQPVGEAGESFNAAAEGGGSGAGIEGSCVYGPNSPRQKTRLTSSESSMVNAVLENVPSNPLQYLMIDATSGVNCNVGAANGTGDTGDAVCHADQENEAGWWAVTGRSMGWRRSGQRSRVRKLQYIADLERTVDSLQNIGADLAVRVASLFQLRNALSMENKQLRRQITSLQQAKLIKDGQTQMLKKETERLKQLSVRHRRSRSVTSCFEANSFGGGDPSAINWQMLDMSKLSLNGGAVVPPRGGYGM

SEQ ID NO: 23985 - protein, 419 aa, Oryza sativa
  Clone ID: TF_OsC595_1.pep
MSQLKMLMDVTLHGMMWMKLLVRHTIFEVTMFQGELTIVLGINKLEPGQLALAAASDSDRSKDKHEDQKTLRRLAQNREAARKSRLRKKSRTVPSNSGQLQGIFISSSVDQTHSMSGNGALAFDMEYARWLEEHNRQINELRSAVNAHAGDNELRGVVDKIMSHYEEIFKQKGNAAKADVFHVLSGMWKTPAERCFLWLGGFRPSELLKLLSTQLEPLTEQQLSGIANLQQSSQQAEDALSQGMEALQQSLAETLAGSLGSSGSTGNVANYMGQMAMAMGKLGTLENFLRQVTLIWLSTPQWQYIGFFTVMPAYGLTCTGDPITSIGLWCDWLGYGECAGDDWHVIDCGADCHTSELVIENLKPRCISNARRRAVLRASSSPQWARPSHEKEQQRTDCIESQKSHEYSTKLADFNEIGR

SEQ ID NO: 23986 - protein, 471 aa, Oryza sativa
  Clone ID: TF_OsC1713_5044.pep
EAGQPYQHGGVALRLAEAAPEHARLGVVPRVRAAHGERPPRRGVQPRRQRAPLGAELVRGALQLLHPLPPPRPRPPRRLPVRDLPPQPPPPLLLAVLAAAAAAASAVTVQQHITTTTTPIAGTYHRRQAGGRIRGNTIVSERRRVDAEQAEADVHVREAEVERHGVVEGQHCGDQGPPELLLKIVARSDATTLVCSQTDDATEEADKAAKAGNTDGDGGGGQGGEAGGGIASFRLAVIFPPNVSQSLSSLDRYGHGNSDMKLQKEGDRRLVLGLFLEAFGIDLCICMLTHVFLSVFSLVKRETEQHAYMGVMLRNEDDGSDMQVENGIKVNRSLAIRLAIDELELVVGYTIKLALIEMGQCRMDNAPTAAANRRVHEIAYRFRDADKADGEEIDSSMLCGLEFLFSNNWRPIRFTETVAYAPNYACSFSHLLQQLLRMSIAFFYWEKIFSLAVLLRVRLRKAKIDFHKRFS

SEQ ID NO: 23987 - protein, 163 aa, Oryza sativa; identical to SEQ ID NO: 16487
  Clone ID: TF_OsC2757_1.pep

SEQ ID NO: 23988 - protein, 1437 aa, Oryza sativa
  Clone ID: TF_OsC799_1.pep
TRCKGGQTGVSDKRQELISAVRPEIQSRSDRRQPGDQTGATPSVRLRSVEFEGTNNIKELRRDLFKKEYIKFEMKPGEALDDYLSRFNKILSDLRSVDSSYDVNYTQYEISHHFLNGLDMSIWKMKVTSIQESVDMSTLTLDSLYTKLKTHEMNILSRKVDSNSSVLVSSSTSLDVDSSSSKSSAFALFNAMSDDQLEQFVEEDLVLLSNRLSRAVTNLGRARGEDNGDEKTNDNKPKGTFKGRKIKENLKKAFDQVYTAFEPLSDVDGESGDEDKGNNISGVCFMARGELDSECEDNEVSALEEAINILSAKNMKCEKLYRKQEFIIESLNSEIARLKYLIPNDDDCTNCEVLMNEISKIRDVNAAHDLKNRSSLALSFALHTRTLDELCLTKKLLQKYQIAFHASLMFNMICAKKLKQPHDVLDCSTCTLNKLKLKDALGRVGYMEDVVKTNEVLSCPKCGKSKGVMVDSENCANLEKEVSYLKNSLQRFSDGVGARSGEILVKPDTNKTVFKSAGFVKVNEKFELKNVALVEDLKYNLLSVSQIVDEDFEVHFKKTGSKVFDSCGDSVLNISRYGRVFKADFDNPVSPVITCLVAKFDKDVMFWHRRLGHVGFDYLTRLSSLDLVRGLPKLKKDLDLVCTPCRHAKMVASSHAPIVSVMTDAPGHLLHTDTVGPARVQSVGGKWYVLVIVDDFSRYSWVFFMATKDKAFQHFRGLFLRLNLEFPGSLKRIRSDNGGEFKNSSFEQFCNERGLEHEFSSPRVPQQDGVVERKNRVLVEMTRTMLDEYHTPRKFWAEAVQGEDGHIFEYESDNDDDEVGSAGQTGRQADRTAGTPPVRPAHDVRSDRPGSSGSGTIDADQDGPPEITTSTSTDTERESTSEVAAPLHIQRRHLPEQIIGNIGERTTRSKVMTHDVCANSAFVASFEPKDVSLALTDESWINAMHEELENFEINKVWTLVEPPSRHNIIGTKWIFKNKQNEDGLIVRNKARLVAQGFTKVEGMDFDETFAPVARIEAIRLLLAFAASKGFKLHQMDVKSAFLNGFIQEEVYVKQPPGFENSDFPNHVFKLSKALYGLKQAPRAWYDRLKNFLLTKGFTMGKVDKMLFVLKHGDNQLFVQIYVYDIIFGCSTHTLVVKFAETMRREFEMTMMGELSYFLGLQIKQTPQGTFVHQTKYMKDLLRRFKMENCKPISTPIGSTTVLDPDEDGEAVDQKEYRSMIRSLLYLTASRPDIQFAVCLCARFQASPRASHRQAVKRIMRYLNHTLEFEIWYSTSSSICLSGYSDADFGGCRIDRKSTNGTCHFLGISLIAWSSRKQSSVAQSTAESEYVVAASCCSQILWLLSTLKDYGLTFGKVSLFCDNISAINIAKNPVQHSRTKHIDIRFHVLRDHVEKGDVILQFLDTKLQLADIFTKPLDSNRFAFLRGELGIIHPFGMI

SEQ ID NO: 23989 - protein, 360 aa, Oryza sativa
  Clone ID: TF_OsC411_1.pep
MGNDEAVVTQKMGKAPSPPKDHPALSPYLDWSNMQAYYGPGILPPTFFSPGIAAGHTPPPFILGPQPLVPSAFGKPYAAIYPPGGAFSHPFMPLMVSPLSMEPAKSVNSKDSCSNKKMKEIDGATVSTGSGNSEKTSGDCSLEGSSDGNNQKASGTPKKRSIDDRPKSGVETGGALTPNDRPSEQAALPNLCIPVTAIKPDVSTASDFRVIATPVTEVPTKDDKESKRERRKQSNRESARRSRLRKQAETEELARKVELLTAENTSLRREISRLTESSKKLRLENSALMEKLTETGPDEAQEVPPVKTKAQQARGVENFLSMIDKTGTPRSSGHMDHAIATPKLRQLLGSGLATDAVAAR

SEQ ID NO: 23990 - protein, 753 aa, Oryza sativa
  unsure (1)..(753): unsure at all Xaa locations
  Clone ID: TF_OsC79483_1.pep
MPRTDNAASANSVEPDKSEECLEFDDEEEEVEEEEIEYEEIEEEIEEEEAVEEDEDVVEEVEEVDEEEDEEEDEESDXETEGVSKTXIGVHQKDSYVKRGSDAELLAXLPHGHAPWIAHLTKPPAADKKDDRVPLPSSNGAPLLPSYPPLGYGIMSVPGAYGAAPASTAQPMLYXSKSSSRRSNGSNDVTGWSSRIGNVPHSWTXDDDFRKXVWRNVGPGVLKGALMKVSSANRNRGYGFRQXHARGSAEYARQEMSSPTFKLDSNAPTVSWADPKNNDSGSTSQVKSVYVKNLPKNVTQAQLKRLFEHHGEIEKVVLPPSRGGHDNRYGFVHFKDRSMAMRALQNTERYELDGQVLDCSLAKPPAADKKDDRVPLPSSNGAPLLPSYPPLGYGIMSVPGAYGAAPASTAQPMLYAPRAPPGAAMVPMMLPDGRLVYVVQQPGGQLPLASPPPQQAGHRSGTGGRHGGSGGRYGGGGGSSGSSRPEECVSETRLYLRILPVSQSAESDGALYRQFTPVSHMDYEISGPESEVDSEVWLGWVAQPQIPTSLDDFLPSIRTTCTHTHTCNPPGPSATEHTHTCYHTHTHVFSSDDDSCGGDKAKPKKSRKPLGNREAVRKYRQKKKAHTAHLEEEVKRLRVINQQLVKRLQGQAALEVEVVRLRSLLVDVRSRINGALGSCPIQAQCGVDNVLGCDGMAQCFAGKPELGVRQSCAPSTVNCHISSDSGQNLVVPHALSPSDVIGSFMVSSTSKDE

SEQ ID NO: 23991 - protein, 478 aa, Oryza sativa
  Clone ID: TF_OsC59278_2.pep
MEFGNGGSSSSERRAAAEGATLARQGSVYSLTFDEFQSALAGGGGGGGGGSGFGKDSGSMNMDELLRSIWTAEESQAMASASGSAAGVGVAVGAPPTSLQRQGSLTLPRTLSAKTVDEVWRNLVRDEPPPVGAADGGDMPPQRQSTLGEMTLEEFLVRAGVVRENPPAAPPPVPPPMPPRPVPVVPKTTAFLGNFPGANDAGAAALGFAPLGMGDPALGNGLMPRAVPVGLPGAAVAMQTAVNQFDSGDKGNSDLSSPTEPMPYSFEGLVRGRRNGGGVEKVVERRQRRMIKNRESAARSRARKQAYTLELEAEVQKLKEMNKELERKQADIMEMQKNEVEEMIKDPFGRRKRLCLRRTLTGPWPFTVLHPGLVLWDGTLDFCCRGARTRVSSRNLVSMLSDAGLRQNDVASRGEDWRHARCGRRGFAHACPRSEIQGRNPRYALQIHSHHSKIQGGLAISSDGTAAATRVPDEQGGA

SEQ ID NO: 23992 - protein, 84 aa, Oryza sativa
  Clone ID: TF_OsC59278_5.pep
KVVERRQRRMIKNRESAARSRARKQAYTLELEAEVQKLKEMNKELERKQADIMEMQKNEVEEMIKDPFGRRKRLCLRRTLTGPW

SEQ ID NO: 23993 - protein, 277 aa, Oryza sativa
  Clone ID: TF_OsC78129_1.pep
MGVHAMSCMSCHGGGGGGGEGALSRQGSVYSLTLNEVESHLGEPLRSMNLDDLLRTVLPAAAAAAETAGRKTVDEVWRDIQGASTGRHHATPMGEMTLEDFLSRAGVAVDGAASAAGAHWLRGHYPPPPPPTTTTLQYVGGSGAVVDGVYNRVDGHGVAGFLSQVGVAGRKRGGGVDGVVEKTVERRQKRMIKNRESAARSRARKQAYTNELENKISRLEEENQRLREHKAVADFSTFPSCVDFLKAFLTQKLEPVMQIVPQPEPKQQLRRTTSASF

SEQ ID NO: 23994 - protein, 154 aa, Oryza sativa
  Clone ID: TF_LIB3434-035-P1-K1-D6.pep
EFSTKQAKTAMLHHHYHGEVASLHCLSPASLPFSSHYHSNMITMAPSPFHFPAATCEPIQELLPVVAGNRPAGSGSTDDAYQMAAEEERRRRRMISNRESARRSRMRKQRQLIELRGQVVHLRDANRRLLDELNQAMRGCSDVHCENTLLMKER

SEQ ID NO: 23995 - protein, 389 aa, Oryza sativa; identical to SEQ ID NO: 16498
  Clone ID: TF_OsC11304_1.pep

SEQ ID NO: 23996 - protein, 224 aa, Oryza sativa; identical to SEQ ID NO: 16499
  Clone ID: TF_OsC7199_1.pep

SEQ ID NO: 23997 - protein, 426 aa, Oryza sativa; identical to SEQ ID NO: 16502
  Clone ID: TF_OsC207355_1.pep

SEQ ID NO: 23998 - protein, 390 aa, Oryza sativa; identical to SEQ ID NO: 16503
  Clone ID: TF_OsC1437_1.pep

SEQ ID NO: 23999 - protein, 163 aa, Oryza sativa; identical to SEQ ID NO: 16505
  Clone ID: TF_OsC175078_1.pep

SEQ ID NO: 24000 - protein, 274 aa, Oryza sativa
  Clone ID: TF_OsC21252_1.pep
MASSRVMAAAAASSSSSPPPPPPAAAAAGGAADLARFRSTSSGIGSMNMDDILRNIYGEAAPPPGAAGSAPAPPPAGEAAGAPVGEVDAPRTAEEVWKEISSSGGLSAPAPAPAAGAAGRGGGPEMTLEDFLAREDDPRATAVEGNMVVGFPNVTEGVGTAGGGRGGGGGGRGRKRTLMDPADRAAMQRQKRMIKNRESAARSRERKQAYIAELEAQVAELEEEHAQLLREQEEKNQKRLKEKWHVFMQIKEQAVAVVIRKKTQDLRRTNSMEW

SEQ ID NO: 24001 - protein, 189 aa, Oryza sativa
  Clone ID: TF_OsC15853_3.pep
MLLQDSHSKENDVKEDGSSQNGISHTALNQNMSMAPTQTGVVIGGVAPTTNLNIGMDYWGAAGSSPVPAMHGKASSGSVRGEQWDERELKKQKRKQSNRESARRSRLRKQAECEELSVRADNLRAENSSLRAELERIKKEYEALLSHNASLKEKLEGNSDSIPYMNEQNDTNGTHQKQQDSDAQPNDAP

SEQ ID NO: 24002 - protein, 124 aa, Oryza sativa
  Clone ID: TF_435943.pep
MASTRLSLELGKVGIQSSPPCSSSSSAGHPAMQPAAAATAAPGYGPRPRHMLTEAEKEAKRLRRVLANRESARKTILRRQAIRDELARKVADLSSQNETMKKEKDVVMQEYLSLKETNKQLKEQ

SEQ ID NO: 24003 - protein, 324 aa, Oryza sativa; identical to SEQ ID NO: 16508
  Clone ID: TF_OsC341905_1.pep

SEQ ID NO: 24004 - protein, 318 aa, Oryza sativa
  Clone ID: TF_OsC782_1.pep
MNMDELLRSIWTAEESQAMASASAAAAAAEGGLHKQGSLTLPRTLSVKTVDEVWRDLQREASPGAAAADGGGGGGEHHQPRRQPTLGEMTLEEFLVRAGVVRENTAAAAAMVAAAAAPPVAPRSIPAVNNSSIFFGNYGGVNDAAAAAAGAMGFSPVGIGDPTMGNRLMSGVAGIGGGAITVAPVDTSVGQMDSAGKGDGDLSSPMAPVPYPFEGVIRGRRSGGNVEKVVERRQRRMIKNRESAARSRARKQAYTMELEAEVQKLKEQNMELQKKQEEIMEMQKNFFPEMQKNQVLEAVNNPYGQKKRCLRRTLTGPW

SEQ ID NO: 24005 - protein, 368 aa, Oryza sativa
  Clone ID: TF_OsC1049_1.pep
MNREKSPIPGDGGDGLPPQATRRAGPPAAAAAAEYDISRMPDFPTRNPGHRRAHSEILSLPEDLDLCAAGGGDGPSLSDENDEELFSMFLDVEKLNSTCGASSEAEAESSSAAAHGARPKHQHSLSMDESMSIKAEELVGASPGTEGMSSAEAKKAVSAVKLAELALVDPKRAKRIWANRQSAARSKERKMRYIAELERKVQTLQTEATTLSAQLALLQRDTSGLTTENSELKLRLQTMEQQVHLQDALNDTLKSEVQRLKVATGQMANGGGMMMNFGGMPHQFGGNQQMFQNNQAMQSMLAAHQLQQLQLHPQAQQQQVLHPQHQQQQPLHPLQAQQLQQAARDLKMKSPMGGQSQWGDGKSGSSGN

SEQ ID NO: 24006 - protein, 301 aa, Oryza sativa; identical to SEQ ID NO: 16513
  Clone ID: TF_OsC173090_1.pep

SEQ ID NO: 24007 - protein, 295 aa, Oryza sativa
  Clone ID: TF_OsC1936_1.pep
MMKKCPSELQLEAFIREEAGAGDRKPGVLSPGDGARKSGLFSPGDGEMSVLDQSTLDGSGGGHQLWWPESVRTPPRAAAAFSATADERTPASISDDPKPTTSANHAPESDSDSDCDSLLEAERSPRLRGTKSTETKRIRRMVSNRESARRSRRRKQAQLSELESQVEQLKGENSSLFKQLTESSQQFNTAVTDNRILKSDVEALRVKVKMAEDMVARAAMSCGLGQLGLAPLLSSRKMCQALDMLSLPRNDACGFKGLNLGRQVQNSPVQSAASLESLDNRISSEVTSCSADVWP

SEQ ID NO: 24008 - protein, 409 aa, Oryza sativa
  unsure (1)..(409): unsure at all Xaa locations
  Clone ID: TF_OsC103554_1.pep
MASHAGGSGGGGGGSGRDAGSAQRGPMQGLARQGSLYGLTLNEVQSQLGEPLLSMNLDELLKSVFPDGADLDGGGGGGGIAGQSQPALGLQRQGSITMPPELSKKTVDEVWKGIQDVPKRGAEEGGRWRRVMMSIVNFVDYMGSAHIFRILXAVGKIDXLEIPSSPSSRWWFRACKHQHGQSPSHVAPAADLFGGFVTSQYAYMATHLAPQPLAVATGAVLDPIYSDGQITSPMLGALSDPQTPGRKRCATGEIADKLVERRQKRMIKNRESAARSRARKQAYTNELENKVLRLEEENERLKKQKPTFILSSKVSRKQVTKAMRSATICVLCICILMILQCFASISAVDLGDAAASASGGEGLIRPRKLLQNAPAARSPPSRSAAAVEVEVNASLGKQKPSSKSNPRQN

SEQ ID NO: 24009 - protein, 104 aa, Oryza sativa
  Clone ID: TF_OsC11304_2.pep
PVPYPFDTALRVRKGPTVEKVVERRQSRMIKNRESAARSRARKQAYIMELEAEVAKLKEQKAELQKKQVEMIQKQNDEVMERITQQLGPKAKRFCLRRTLTGPC

SEQ ID NO: 24010 - protein, 425 aa, Oryza sativa; identical to SEQ ID NO: 16516
  Clone ID: TF_OsC405_1.pep

SEQ ID NO: 24011 - protein, 142 aa, Oryza sativa
  Clone ID: TF_OsC65391_1.pep
MAEQLGGVGSPQLSLSSCSSFLSISSAGTSAADGAPHLSLGVGGAEELDLLLQVGIGGGGGGGGDEEEEERKTIRMMKNRESALRSRARKRAYVQELEKEVRRLVNENLKLKRHCKQLKTEMAALIQQPTNKQSSHRRSSST

SEQ ID NO: 24012 - protein, 436 aa, Oryza sativa
  Clone ID: TF_OsC1934_1.pep
MEHVFAVDEIPDPLWAPPPPVQPAAAAGVDDVGAVSGGGLLERCPSGWNLERFLEELDGVPAPAASPDGAAIYPSPMPAAAAEAAARWSRGYGDREAVGVMPMPAAALPAAPASAAMDPVEYNAMLKRKLDEDLATVAMWRASGAIHSESPLGNKTSLSIVGSILSSQKCIEGNGILVQTKLSPGPNGGSGPYVNQNTDAHAKQATSGSSREPSPSEDDDMEGDAEAMGNMILDEEDKVKKRKESNRESARRSRSRKAARLKDLEEQVSLLRVENSSLLRRLADANQKYSAAAIDNRVLMADIEALRAKVRMAEESVKMVTGARQLHQAIPDMQSPLNVNSDASVPIQNNNPMNYFSNANNAGVNSFMHQVSPAFQIVDSVEKIDPTDPVQLQQQQMASLQHLQNRACGGGASSNEYTAWGSSLMDANELVNMELQ

SEQ ID NO: 24013 - protein, 469 aa, Oryza sativa
  Clone ID: TF_OsC1934_2.pep
MEHVFAVDEIPDPLWAPPPPVQPAAAAGVDDVGAVSGGGLLERCPSGWNLERFLEELDGVPAPAASPDGAAIYPSPMPAAAAEAAARWSRGYGDREAVGVMPMPAAALPAAPASAAMDPVEYNAMLKRKLDEDLATVAMWRELLGHIPLEDEIILVEKKKLLYWNLASGAIHSESPLGNKTSLSIVGSILSSQKCIEGNGILVQTKLSPGPNGGSGPYVNQNTDAHAKQATSGSSREPSPSEDDDMEGDAEAMGNMILDEEDKVKKRKESNRESARRSRSRKAARLKDLEEQVSLLRVENSSLLRRLADANQKYSAAAIDNRVLMADIEALRAKVRMAEESVKMVTGARQLHQAIPDMQSPLNVNSDASVPIQNNNPMNYFSNANNAGVNSFMHQVSPAFQIVDSVEKIDPTDPVQLQQQQMASLQHLQNRACGGGASSNEYTAWGSSLMDANELVNMELPRVRHILTT

SEQ ID NO: 24014 - protein, 134 aa, Oryza sativa
  unsure (1)..(134): unsure at all Xaa locations
  Clone ID: TF_OsC12563_1.pep
STHGVRSDGMSAMTHADMMNCIGNGMMIENGTRKRPHREDGCAEKTVERRQRRMIKNRESAARSRARKQAYTVELEAELNYLKQENARLKEAEKTVLLTKKQMLVEKMMEQSKEKMNANRGGSXQLRRSGSCMW

SEQ ID NO: 24015 - protein, 298 aa, Oryza sativa
  Clone ID: TF_OsC1243_2.pep
MKKCPSELNFEAFFHGERGEDDADAAADQKPGGGPHPPPFAMFSAADLSSFGFADSVTSTITGVIPNHIWPQSQSLNARHPAVYTIESQSSICAAASPTSATTLNMKESQTLGGTSGSDSDSESLLDIEGGPCEQSTNPLDVKRMRRMVSNRESARRSRKRKQAHLADLETQVDQLRGENASLFKQLTDANQQFTTAVTDNRILKSDVEALRVKVKMAEDMVARGALSCGLGHLGGLSPALNPRQGACRVPDVLTGLDYAGDDPFTGLSPPEQVQMPGGGEVGDAWGWDNHSNGAMSK

SEQ ID NO: 24016 - protein, 272 aa, Oryza sativa; identical to SEQ ID NO: 16522
  Clone ID: TF_OsC271_2.pep

SEQ ID NO: 24017 - protein, 397 aa, Oryza sativa
  Clone ID: TF_OsC196_1.pep
MELYPGYLEDHFNIHKLSISSASPPEYMTSASTQFAAPVRMGAYDRPPPVGMWSHEQFKVDNGQATSASTIMEAEMKFENRLEEIPQVVLEEGRNVDQEASKPPDKVLRRLAQNREAARKSRLRKKAYIQQLETSRLKLAQLEQELQRARQQAVYANGSLREPNLGFTGPIDPGALGFEIKYSHWVDEQNRNTGELRNALLQGQTTDQDLELKLLVEAGLDNYNRLFEMKEEAANSDVFYIMSGMWKTPTERFFLWIGGFRPSEVLKNLRPQLEPLTDKQVVEVGGLQQTSMQVEDALSQGMDKLKQTIADSLTAADPFDSPEAYMVHMANAVEQLRSLVQFVTQADHLRQQTLQEMHRILTTRQAARGLLALGDYFQRFRALSSLWAARPRDSGIS

SEQ ID NO: 24018 - protein, 182 aa, Oryza sativa
  Clone ID: TF_OsC285906_1.pep
QRRENCGGDAVIIMWRPRASRWSARRRRASAAASARRRAFWHRAARPWRATACSLAASSRFSARRRALSPRSSSSRCCFRARDRRADSRFDTFRRCRLRSSSSSTSPFSSSAAAALSSSDDDGEGDADDAISCSKVGHVSAAHGVNPNPDVIASRSKSSASCTDSIFLTLPSPNTQKRRTRD

SEQ ID NO: 24019 - protein, 167 aa, Oryza sativa
  Clone ID: TF_OsC1713_4810.pep
MANYHHQEYYQMAAAAAVAWPREPDSPQLSIMSGCSSLFSISTLRDDDDGGGVRLAGAALPATPVSLAGIAGGASTPGGDEVDMEVRQQSGGSGDDRRTIRMMRNRESALRSRARKRAYVEELEKEVRRLVDDNLNLKKQCKELKQEVAALVMPTKSSLRRTSSTQF

SEQ ID NO: 24020 - protein, 148 aa, Oryza sativa
  Clone ID: TF_OsC60_1.pep
MSSPSRRSSSPESNTSGGGGGADERKRKRMLSNRESARRSRARKQQRLEELIAEAARLQAENARVEAQIGAYAGELSKVDGENAVLRARHGELAGRLQALGSVLEILQVAGAPVDIPEIPDDPLLRPWQPPFAAQPIVATAMADAFQF

SEQ ID NO: 24021 - protein, 203 aa, Oryza sativa; identical to SEQ ID NO: 16530
  Clone ID: TF_OsC31203_1.pep

SEQ ID NO: 24022 - protein, 180 aa, Oryza sativa; identical to SEQ ID NO: 16529
  Clone ID: TF_OsC32579_1.pep

SEQ ID NO: 24023 - protein, 266 aa, Oryza sativa
  Clone ID: TF_OsC2044_1.pep
MMASRVMASSSPSHTASDLARFAAGRGGGGSAGLGSMNVEEILRGIYADMPTPALPLVGGDRPMSPLPAPDVAAAPRTAEEVWKEITGAGVAAAAGGVVPPAAAAAAAPAVVAGAGAGTGAEMTLEDFLAREGAVKEDEAVVTDPSAAKGQVVMGFLNGAEVTGGVTGGRSRKRHLMDPMDRAAMQRQKRMIKNRESAARSRERKQAYIAELESLVTQLEEENAKMFKEQEEQHQKRLKELKEMVVPVIIRKTSARDLRRTNSMEW

SEQ ID NO: 24024 - protein, 646 aa, Oryza sativa; identical to SEQ ID NO: 16537
  Clone ID: TF_OsC11088_1.pep

SEQ ID NO: 24025 - protein, 360 aa, Oryza sativa; identical to SEQ ID NO: 16531
  Clone ID: TF_OsC2449_1.pep

SEQ ID NO: 24026 - protein, 139 aa, Oryza sativa
  Clone ID: TF_rsiced_11007.y1.abd.pep
STTISKNKSKIITKQQQQQQEIDEEEESEWRGEHPLQSPPHRRRHLHRLPQLLVLDAEHLVLLLELLHLGLPVVDAGLLARAGPRRGLAVLDHPPLAAVPGGGTPAGAADETSSRSVSLPPLSKQARKLSVSVTQTHRE

SEQ ID NO: 24027 - protein, 145 aa, Oryza sativa
  Clone ID: TF_OsC3007_1.pep
MSSSSLSPAGSSDGDSAGVVVAADHRREKRRLSNRESARRSRLRKQQHLDELVQEVARLQADNARVLARASEIAGQYARVEQENTVLRARAAELGDRLRSVNEVLRVVEEFSGVAMDIQEECPPDDPLLRPWQIPCPAAAHMLQY

SEQ ID NO: 24028 - protein, 238 aa, Oryza sativa; identical to SEQ ID NO: 16532
  Clone ID: TF_OsC542_34.pep

SEQ ID NO: 24029 - protein, 368 aa, Oryza sativa; identical to SEQ ID NO: 16535
  Clone ID: TF_OsC359_7290.pep

SEQ ID NO: 24030 - protein, 191 aa, Oryza sativa
  Clone ID: TF_OsC799_2.pep
HASVPDYAKKAMPAERIAELALIDPKRAKRILANRQSAARSKERKIKYTSELERKVQTLQTEATPLSAQLTLLQRDTSGLTAENRELKLRLAVHGKSKLTTVMLWNEALREEVQRLKIAAGQAPNMNGNPFNGGLQQQIPPYYTQQQQQQQQMPYLGGHHAQQRHPSHQQSSSNGGQSLSGQSLNDSMDFM

SEQ ID NO: 24031 - protein, 383 aa, Oryza sativa
  Clone ID: TF_OsC737_3.pep
MGKGEVATRSKSQKSSATQNEQSTPTNPPTAYPDWSQFQAYYNPAGTAPMTPPGFFHPNVAPSPQGHPYMWGPQMMPPYGTPPPYAAMYAQGTPYQQAPMLPGSHPYNPYPGQSPNGTVQTPTSAGGTETDKSGKSKRKTPLKRSKGSLGNLDVVATKNKKAPAKPSASSSNEGSSHSESGSGSSSEGSSTNSKSGSRTKDGSEHGQGNDASNKGATAQSSAVEPVQASTGPVVLNPMMPYWPVPPPMAGPATGVNMGMDYWGTPTSVPMHNKVIAAPASAPSSNSRDVVLSDPAIQDERALAWQKRKQSNRESARRSRLRKQAEWEEVANRADLLKQENSSLKEELKQLQEKCNSLTSENTTLHEKLKELEGEKSNGNWYKE

SEQ ID NO: 24032 - protein, 176 aa, Oryza sativa; identical to SEQ ID NO: 16539
  Clone ID: TF_OsC342012_1.pep

SEQ ID NO: 24033 - protein, 548 aa, Oryza sativa
  unsure (1)..(548): unsure at all Xaa locations
  Clone ID: TF_OsC15853_1.pep
MGFFRRIAGMFGISRDDADHHPHHHHHDGAAGDSAAAAEVPQDKVVAAAAAAAAAGNVQRRGFSVQVPVPVERPGPGPVLVPCPQGDGGVQGFRWYTRKLRIDEDGDVADEFLDEVVPEISINNDSTPAGRYQVKYNTKSAALAMRKQISVIDGDICHSLEYQGRLRWNCQSLLAKGLQEFDMRVCLGASQECGSVEFLVDASFLNLSVLGCLMGTNDPGTPSKATKASEPEQSPATTSGTTAPVYPEWPGFQAYSAIPPHGFFPPPVAASPQAHPYMWGAQGVHPFNHYPMLANGNVETAGTAPGASEINGKNELGRTSGPSANGITSHSESGSESESEGSDANSQNDSHSKENDVKEDACSQYQIIHTAFTKKILMAPSQPEAVMGGVAPTTNSNIPTEXSGAAGSAPFPAMQCKATSASVRGEQWDETELKKQTRKXSNPALARRSRLRKQNIMDRLIEAPNYLSQPECEELSVRADNLRAENSSLRAELERIKKEYEALLSHNASLKEKLEGNSDSIPYMNEQNDTNGTHQKQQDSDAQPNDAP

SEQ ID NO: 24034 - protein, 406 aa, Oryza sativa
  unsure (1)..(406): unsure at all Xaa locations
  Clone ID: TF_OsC1438_2.pep
MPPRSVLPSPASVCSDPPRRAVDPTPMRPPAPATTAGAGGKVTPNLAMDAEGTRLLNLTVLQRLDPAVEDILITAAHVTLYDFNIELNQWSRKDVEGSLFVVKRNKQPRFQFIVMNRRNTDNLVEDLLSDFEFELQPPYLLYRNAAQEVNGIWFYNQQDCDAVAGVFGRILNAYAKVXKSPKYLSTKSEFEELEAVPTSAAIDGPLEPSSSSTVLVSNAPDESLTDYFSGAVNVGNVSITPMVGRTHQPIESVASSHVPLIIPSAAPTHQMGVPSGAASAPPLPVIDTNVHSSHSTNLVTPAFFAPPSSSSASLVAPASSFMPTASPFHPTSADAHRPAYGHGTPLLQPLPPPTPPASLTPVHNDEPVISRDKVKDALLRLVQLWLLFISDVREEIVQLCLDALLM

SEQ ID NO: 24035 - protein, 156 aa, Oryza sativa
  Clone ID: TF_OsC7438_1.pep
EVTMSSGTSSGSSQGTRSSRSEDDLNLQAQMEKKRKRRKESNRESARRSRMRKQQHLDELTSQVNQLKNQNQQLSMALSLTTQNLVAVQAQNSVLQTQELELQSRLCALTDILMCMNNTSATPTPTIPATTTSACDIFGASSWNQPPIDLYQYQCF

SEQ ID NO: 24036 - protein, 177 aa, Oryza sativa
  Clone ID: TF_OsC1517_1366.pep
FVLAQFLVETGLSSHQGSGGVSRQGSLCGLALSEVEGQLHGVNLDDLLRTGGGGAGAGAAAAGRKTVDVGLGAGPVLDALYHDGPVSGSKRAPAAGEGAAAEKTVERRKKRMIKNRESAARSRARKQAYTNELENKISRLEEENKRLRMHKAPEPVVQYVPQQEPKNQLRRVNSADF

SEQ ID NO: 24037 - protein, 330 aa, Oryza sativa
  unsure (1)..(330): unsure at all Xaa locations
  Clone ID: TF_OsC20200_1.pep
MQEPKHTDPAAMRGAHHRRARSEVAFRLPDDLDLGGGGAGAFDEIGSEDDLFSTFMDIEKISSGPXPRGAPTGTAPRETSSPPRPKHRHSSSVDGSGFFAAARKDAAASLAEVMEAKKAMTPEQLSELAGIDPKRAKRILANRQSGARSKERKARYITELERKVQTLQTEATTLSAQLTLFQRDTTGLSAENAELKIRLQAMEQQAQLREPLNDALKQELERLKLATGEMTNSNETYSMGLRHLTSTHPFLPSXPSIMQPARTVEPSCHHNVQPPRPNVPNHMLSHPNGLQDIMQQDPLGRLQGLDISKGPLVVKSESSSISASESSSTF

SEQ ID NO: 24038 - protein, 469 aa, Oryza sativa; identical to SEQ ID NO: 16493
  Clone ID: TF_OsC340_1.pep

SEQ ID NO: 24039 - protein, 935 aa, Oryza sativa; identical to SEQ ID NO: 16494
  Clone ID: TF_OsC1713_5475.pep

SEQ ID NO: 24040 - protein, 278 aa, Oryza sativa; identical to SEQ ID NO: 16477
  Clone ID: TF_OsC1243_1.pep

SEQ ID NO: 24041 - protein, 363 aa, Oryza sativa
  unsure (1)..(363): unsure at all Xaa locations
  Clone ID: TF_OsC14251_1.pep
MDFPGGSGRQQQQQQLPPMTPLPLARQGSVYSLTFDEFQSTLGGVGKDFGSMNMDELLRSIWTAEESHAVGAATTTTATTASVAAAEHAAVGAPPVQRQGSLTLPRTLSQKTVDEVWRDMMCFGGGGASTAPAAAEPPPPAHRQQTLGEITLKEFLVRAGVVREDMSVPPVPPAPTPTAAAVPPPPPPQQQTPMLFGQSNVFPPMVPPLSLGNGLVSGAVGHGGGGAASLVSPVRPVSSNGFGKMEGGDLSSLSPSPVPYVFKGGLRGRKAPGIEKVVERRQRRMIKNRESAARSRQRKQAYMMELEAEVAKLKELNDELQKKQDEMLEQQKNEXVRWQHLMSRQVGPTAKRICLRRTLTGPW

SEQ ID NO: 24042 - protein, 154 aa, Oryza sativa; identical to SEQ ID NO: 16480
  Clone ID: TF_OsC1713_4787.pep

SEQ ID NO: 24043 - protein, 380 aa, Oryza sativa; identical to SEQ ID NO: 16481
  Clone ID: TF_OsC87823_1.pep

SEQ ID NO: 24044 - protein, 195 aa, Oryza sativa
  Clone ID: TF_435945.pep
MSDDHSGGGGEQRQCRRGFAVDVVELGAALALADMAGAAVKPAMQLQLQPTAAQEEDEEMATTRLSLQLGNNVGSIIQSSSCSSSGSSAGLPAPPAAAAAPATAYGTKPLHMLTEEEKEAKRLRRVLANRESARQTILRRQAIRDELARKVADLSTQNESMKKERETVMQEYLSLKETNKQLKEQAQHHLSLSLF

SEQ ID NO: 24045 - protein, 442 aa, Oryza sativa
  Clone ID: TF_OsC39545_1.pep
MEQTLDVPRSLRLLAPKAQQQMDEFWRDRQKEIETTKDFSEHAIPMARLKKIVSSQKGNMMMTFDMPAFLSKMCELFVQELAVRAWASAQSHNRCIILDTDIAKAIASTESYDFLVDILHNHRVKHKSTPCSTLTTKRCRLVDQPSTSHMPYQHQLPQFAPTYTPAIPITPSLMPPISHYIPFQYPSLSQEVSPMMASAPIVNRSMLLIHNIARGLGLQGNNISTFANNNIPDNIVGCSSPTVLASMMSPALLEVAGTSLNPPNSHSICTMNMINSSDPSGSSIGDINVANQASLAPSGRFNPAILRESSCPSFLYSNNDTIVAIPEGVDISGTMDVASDVAAIVINGQEEHERETNVEHHQQNEIYESIDIGIINASVADDNKYSISWDELGMADDSLLDKFLEEFQVRNDGVLRTGIELHEDPFLGDVMLANPSTSNANK

SEQ ID NO: 24046 - protein, 223 aa, Oryza sativa
  Clone ID: TF_LIB4830-003-R1-N1-A5.pep
MKQTLDVHRSLRPPMPMAQQQMDESWRDRQKEIEMTKDFSEHMIPMARLKKIVSSQKGNMMMTFDMPAFLSKMCELFVQELAARAWACAQSHNRCIILDMDIAEAVASTESYDFLVDILHNHSVKQKSTPCSSTKRCRLVDQPSTSHIPHRHLLPQFAPTYTLAIPITPSLMPLISQCTPSSFPSLPQEKFPLMAPTPIVNRSMLFINNIARGLGLQGNNINA

SEQ ID NO: 24047 - protein, 335 aa, Oryza sativa; identical to SEQ ID NO: 16542
  Clone ID: TF_OsC36885_1.pep

SEQ ID NO: 24048 - protein, 289 aa, Oryza sativa; identical to SEQ ID NO: 16544
  Clone ID: TF_OsC321147_1.pep

SEQ ID NO: 24049 - protein, 150 aa, Oryza sativa; identical to SEQ ID NO: 16552
  Clone ID: TF_OsC353113_1.pep

SEQ ID NO: 24050 - protein, 259 aa, Oryza sativa
  Clone ID: TF_OsC44121_1.pep
MEPSSQPQPVMGVATGGSQAYPPPAAAYPPQAMVPGAPAVVPPGSQPSAPFPTNPAQLSAQHQLVYQQAQQFHQQLQQQQQQQLREFWANQMEEIEQTTDFKNHSLPLARIKKIMKADEDVRMISAEAPVVFAKACEVFILELTLRSWMHTEENKRRTLQKNDIAAAITRTDIYDFLVDIVPRDEMKEEGLGLPRVGLPPNVGGAADTYPYYYVPAQQGPGSGMMYGGQQGHPVTYVWQQPQEQQEEAPEEQHSLPESS

SEQ ID NO: 24051 - protein, 250 aa, Oryza sativa; identical to SEQ ID NO: 16556
  Clone ID: TF_OsC179782_1.pep

SEQ ID NO: 24052 - protein, 285 aa, Oryza sativa; identical to SEQ ID NO: 16550
  Clone ID: TF_OsC117223_2.pep

SEQ ID NO: 24053 - protein, 177 aa, Oryza sativa; identical to SEQ ID NO: 16558
  Clone ID: TF_OsC91871_1.pep

SEQ ID NO: 24054 - protein, 530 aa, Oryza sativa; identical to SEQ ID NO: 16557
  Clone ID: TF_OsC210306_1.pep

SEQ ID NO: 24055 - protein, 241 aa, Oryza sativa; identical to SEQ ID NO: 16559
  Clone ID: TF_OsC265473_1.pep

SEQ ID NO: 24056 - protein, 205 aa, Oryza sativa; identical to SEQ ID NO: 16560
  Clone ID: TF_OsC68950_4.pep

SEQ ID NO: 24057 - protein, 185 aa, Oryza sativa
  Clone ID: TF_OsC26303_1.pep
MADGPGSPGGGGGSHESGSPRGGGGGGGGGGGGGPRVRQDRFLPIANISRIMKKAIPANGKIAKDAKETVQECVSEFISFITSEASDKCQREKRKTINGDDLLWAMATLGFEDYIEPLKVYLQKYREMEGDSKLTAKAGDGSVKKDVLGSHGGSSSSAQGMGQQAAYNQGMGYMQPQYHNGDVSN

SEQ ID NO: 24058 - protein, 250 aa, Oryza sativa; identical to SEQ ID NO: 16562
  Clone ID: TF_OsC83094_1.pep

SEQ ID NO: 24059 - protein, 186 aa, Oryza sativa; identical to SEQ ID NO: 16564
  Clone ID: TF_OsC1960_1.pep

SEQ ID NO: 24060 - protein, 254 aa, Oryza sativa; identical to SEQ ID NO: 16566
  Clone ID: TF_OsC197894_1.pep

SEQ ID NO: 24061 - protein, 296 aa, Oryza sativa; identical to SEQ ID NO: 16547
  Clone ID: TF_OsC712_1.pep

SEQ ID NO: 24062 - protein, 900 aa, Oryza sativa
  Clone ID: TF_OsC1528_1899.pep
MIDAGLITPSMSPYASPVLLVKKKDGSWRFCVDYRRLNALTIKSKFPMPVVDELLDELSGTKFFSKLDLKAGYHQIRMVETDEAKTAFKTHHGQFQFRVMPFGLTNAPSTFQCLMNSVLAPFIRKFVLVFMDDILVYSPDLDSHLHHLQQVFVILRQHQLFARRSKCSFACTQLEYLGHIISDKGVSTDPEKTAAMLAWPVPTSVTELRGFLGLTGYYRKFVQGYSIIARPLTLLLKKKAFLWTDAAQLAFDQLKTAMSNTPMLALPNFQLPFTLETDACAYGLGAVLSQQGHPIAYYSKTLGPVNQKLSIYEKEFLAIMMAVDKWRCYLQRGPFIIKTYHKILCHLDDQILGTELQQKAMTKLMGLQYSFQYKRGVNNIVADALSRMPSSSQFCAFSVVQPIWIQEMINSYTVDPQAQQLLAELAVHSPNSQGYSLTQGIIRFQNKIWIGSNAGLHTKLIQAFHASALGGHSGIAATYHRIKKLFAWPGLKLDVENFVKQCQVCQQAKHEHCRLPGLLAPLPIPKEAWQDISMDFIEGLPRSDGYNAILVVVDRFTKYANFIPLRHPFTASQVAHLVDKTVFKTHGIPRSIVSDRDRLFTSKFWTTLFATWDTQLQMSTAYHPQTDGQIERVNQCLEMYLRCMTQANPKKWSHWIHLAEFWYNTNYHTYLGCSPHKALFGVDPHYSQVPDLTLATLPDVVDVQTERQHLSEFLQQQLTRAQLRMKNKVDKGRSDRVFAVGDAVFLKLQPYAQSSVVNRPYPKLAYKFFGPFTVLERIGVAAYRLDLPASSTVHPVFHVSQLKAQVPDHTPVYTSLPSQVVLDAADVVPEAILERRLVKRSNAAHVQVLLKWSSLPADHATWEDYHVVKTRFPDAPAWGQAETPAGGTVMTGNGDTEKEV

SEQ ID NO: 24063 - protein, 1141 aa, Oryza sativa
  unsure (1)..(1141): unsure at all Xaa locations
  Clone ID: TF_OsC351798_1.pep
MPPARGGRRGRGRGRRGGRGGAASRARGENVVDVEPIKLGDDDAKVDPQTKSPNEEITSAEVCEVETSEASPLGAPEEDEGKPGSTRNLKRLRKTITIDSAAAEEHGAESDDEEFDVLATASCQELAPCRRSKRLRCKPTRKRSKPTGKRDLGGKESEDDVFANSSSSSQDDAGKLASRRSKRLRERLTSDYFDGDXENCSAPRRGSKRLRNRLGPRNISYADDDSDTDDTYRKKIVPCRRTSKRLQEKRKAHDVSEESYTEASSCMLSTSSSSDDELLHNSIKPGRRNSGGPSCSICKIGIACSFLIKCKNSTCSRSFHTFCLDPPLQEIIGTWECSWCKSNAAPAVKVTEVLTSKKIQRLVGHRRILQEADFQYQFLVKWQSLSHHHDCWVPLEWLHVSDPLRVQSYLNKNCLPKEVYSEDQRKLEWFEVDHAIACRRKFHHEGLCDVLATFQDNQDFDGYEFLVKWKGLDYCEATWEPCCTDGVQQAVSMLVRRHKNASKRVNISQTCLDGSKIEEVHCGALYDYQLQGLQWLIDNFKTRRSVILADEMGLGKTVQVVCFLYHIIKESLTASPALILAPKSILLQWEKEFCQWASDLNVIVYQGDRDSRKCIQVHEMYSSDGKPLFDALVTSYEFVQIDKAVLQKFKWSTIVIDEAHRMKKLDCNLAACLKRYCSEFRLLLTGTPLQNNIMELFSLLHYIDPDEFSDPKADGLFSPIESGRDLTMDEKVARIHNILKPRMLRRMKSDVLTDSMPVKKWVEVPCALADSQRELYINILERNYSKLNSAIRNGRKLSLNNILMELRKCCNHPVGLEVGQQATEDVFLSLIASSGKLQLLHKLLPRLKERGNRVLIFSQMTRMLDILEDFLCSLGYKYARIDGQTSLSARQESIEEYKNIDSETFIFLMSTRAGGMGVDLPGADRVIIYDPDFNPFMDLQAQSRAHRIGQTRPVVVYQLITKCSVEEKILQKSKQKLAIENMLMNSSKKPSADELQSILLHGAKTIVDRKISATSIHYDNEAIENLLKLDPSTGEKCSSDDNGYLGSIVSFAHGVEDEAPSSPKVEDLKVLKPATPKVDLGRGKRQRKVVNYADEVENEDSDDMYAPEGSSTSEFSSSSSDDETDSALQLQIVTVPDIDAD

SEQ ID NO: 24064 - protein, 1391 aa, Oryza sativa; identical to SEQ ID NO: 16570
  Clone ID: TF_OsC113064_1.pep

SEQ ID NO: 24065 - protein, 1058 aa, Oryza sativa; identical to SEQ ID NO: 16571
  Clone ID: TF_OsC321575_1.pep

SEQ ID NO: 24066 - protein, 1288 aa, Oryza sativa
  unsure (1)..(1288): unsure at all Xaa locations
  Clone ID: TF_OsC136280_1.pep
MPARTRSVNSLDSVDGFDARAEILQLRREMTDLSNLRGEMGEIKDLLKSICTALPGFHSAGASTSGTAGAGGSAGTQAMAGASVSAGAQAATGTGALIAPLVPPGFSSVAPILSTGGMQSGVALPQTADETQVNSTNAIPSSQIHAGMGSVFPSTSLPPIFPIHMSGAVPSVGHVNFSIEPNTVNPNFAPIFTSAPIFTSATRTQAGHLPGGLNIHGVESQEDVGMNHYGIETNQPWRYPQMQPTARPHLNATGIHMANGGGPVWPEGPRHLFGGMPNPYADMTLRSQRLELTIFNGEDAIGWLQQCEKFFEMTGTPVEQWVNLATGHLVGRAGKWFRNLGIPWHYINWPQFYLMISDRFTEANAHEAVEQLQNVRQTGSVMHYIDKFEDSVALVKRDHPYLIEYYILSCFIGGLRADIKHDHKCRTGKVIHMMEEVEDEEEESGSPEENQEGEYQTAPGSPAKKEDDNEEQLMQISTHAIQGTYGINTFSLITYVKGRKVVALVDSGSTNTFMNYEFALRSGCEIIEFDHNRVMVAGGGILNSTAKTEVIQYKTLEMENVPVPDSVATILAGFAEVFAEPKGLPPRRECDHAIPLKMGAEPPNQRPYRVPHQQKNAMEEIIKELLESEEIRPNLSPYSSPAVMVRKRDGSWRMCVDYRQLNARTIKNKFPMPIVEDLLDELNGAKVFSKLDLRSGKNLEEHEKQLQCVLSILRSHKLYAKRSKCTFAAPSVEYLGHIVSGEGVATKPSKIKDVLEWAVPVNITKLRGFLRLTGYYRRFVQGYGAICRPLHDLLKKDNFHWGPEQQKAFDQLKKIMTTCPVLALPDFSKPFVLETDACGSSIGAVLIQEGRPIAYYSKALGQRAAGSSTYEKEAIAILEALKKWRHYLLGNQVIIRIDQQSLKYMATHKLSEGIQHKLLLKLLELDYNIEYKKGKENAAADALSRRDTKEVEEKEKCYAITLVYPEWIEDVKSSYLNDAQYMKLVDGEELNEEXQFFFGCWNTKIQKQDIFKVTYHRIKKIFYWPQLKKEVEKIVSECPTCQITKAEHVHSPGLLDPLQIPEMAWTHISMDFIEGLPKSQGKDVTPYEALYGVHPPQNGEQAIPGNVTEEIRITAQQREELMLRLKDNLLRAQNRIRKFADRLRSERSFQEGDMVYLKMQPYRQNAFGLRGSLKFRAQFCGPFRILKRIGKVAYHLQLPEEAGIHPVFHVSQLKKHVGNLVVPLPNLPLVDEDGNIKTEPVAVLARRVVPRRNEPVTQWLVHWENLSPEDATWEDSAFIQATFPHFRP

SEQ ID NO: 24067 - protein, 1463 aa, Oryza sativa; identical to SEQ ID NO: 16577
  Clone ID: TF_OsC22007_1.pep

SEQ ID NO: 24068 - protein, 504 aa, Oryza sativa; identical to SEQ ID NO: 16579
  Clone ID: TF_OsC448_2.pep

SEQ ID NO: 24069 - protein, 1268 aa, Oryza sativa
  unsure (1)..(1268): unsure at all Xaa locations
  Clone ID: TF_OsC346257_1.pep
MAALKKQVADLKGVRMLDQQRNIYLGQAGEGNQYAEAVLKGPRLEIPLFSGEDPIDWLKQCEKFFEITGTPLDQWVNLAVAHLNGRALKWFGGIGLPWQVIAWPQWCSMVCTRFSAASEHEAIELFQNVKQFGTTVEQYIDKGVLXVDLVKRDHPYLQEQYLTSCFIGGLRADIKYDVXWAANARKMVGNFNRNRNQNPLGGNQGRNANHRGQNRGEGDRREEKKCWFCKEPWFPRHQXYALRNSYPLKNTDTKKVVVAGGGELKTDVMVPDISYEIQGECFTNQFKLLPLKGYDIIWGADWIYNYSPISLDLKQRILGITKGNKVILLQDFTKPNKHFQISGKRLEKMLKKGALGMVIQVNVMSETVEEEGHVIPEDISDIIQQFPAVLKEPKGLPPKRECDHVINLQSGAVPPNIRPYRVPHYQKEAMENIINELIESKEIQTSDSPYSSPAVMVRKKDGSWRMCVDYRQLNAQTVKNKFPMPIIEDLLDELNGARIFSKLDLRSGYHQIRMAEKDVHKTAFRTHLGHYEYQVMPFGLTNDPATFQSLMNHVLAPFLRRFVLVFFDDILIYSKTRAEHLEHVKLVMQALQDNHLVIKLKKCAFGLASVSYLGHVISQDGVATDPKKVGKIKNWPTPKDVTDVRKFLGMTGYYRRFIQGYGTICRPIHDMLKKNGFQWGADQTTAFETLKHKLRTSPVLALPDFDQAFTIEADACGVGIGAVLMQGGRPIAFFSKALGPKAAGQSIYEKEAMAILEALKKWRHYVLGSKLIIKTDQQSLKFMMGQRLVEGIQHKLLLKLMEYDYTIEYKSGKENLVADALSRLPQKEAVADRCHPMTVVIPEWIVDIQRSYENDVQAHKILSLIGTAADPDREYKLEAGXAKIQREDLCGRSHGYQKAIDHNXHSSSFGGHSEIPDMAWTHITMDFIEGLPKSQGKDVILVVVDRLTKYAHFIALAHPYDVEQVVEAFMNNIHKLHGMPMVIITDRDRIFTSSLFQEIFKAMKVKLRFSTAYHPQMDGQTERVNQCLESYLRNMTFQEPHKWYSWLALAEWWYNTTFHTAIQMTPFKAMYGYSPPQINEFSVPCNISEEARVTIEEKEAILNKLKNSLADAQHRMKYFADKNRTERNLEVGDMVYLKLKPYRQSAFGIRGSLKLRSKFYGPFKVLQKIGQLAYKLQLPDDAQIHPVFHVSQLKKHLGKHAIPMSNLPSVGPDGQIKTEPLAVLQRRMVPRKGVAVTQWLILWQNLSPAEATWEDASVIQAMFPSFNP

SEQ ID NO: 24070 - protein, 1370 aa, Oryza sativa; identical to SEQ ID NO: 16586
  Clone ID: TF_OsC15548_1.pep

SEQ ID NO: 24071 - protein, 1347 aa, Oryza sativa
  Clone ID: TF_OsC65320_1.pep
MSIAEGEVVNLNQKVVDLSTNLDRILGSLKGVEAWIPSVDAGMQGLRRSVEGIKARVIKLEAQSSTATPPPNGHRVDNKYQGEATAAESAQERTLVKSKIQIPQSAVNFEVGESSEWGIGNSQFGTQGPRLPKTEFPKFDGDNPKLWKKKSEKYFDMYQVPYATWASFATLHFVGNAALWLQTYEELHAVESWSGVCVAVNGKFGRDRYQQFLEKLDNLKQEGTIEEYYSRFEELMHKVLVYNRGYDETFFVTKFLGGLKTEIKAAIKLHRPGTVDAALSLAKTQEELLMEVNLKAYHKTTIKESFKNNFKVPSLAKGILGPPPDEIKKTEERPKWEEQYDSLNAARRARGECFKCGEKFGPGHKCPKAVQLHVLDELLEVFQFSDEPGQVEESSSDEELLLSENALFGTEGKRTIWLQGLIQQVLILIDSGSSSSFMASHLVDRLHLVPNSIPSALVMIIDGGKLFCDEMAEQVEWWCQGNTFSSNFKILGLGGYDLILGMDWLEAHSPMWIHWGRKTGMHKKGVISQLIQLCSIQEIAANQEAIPREIEAVLQHYQGLFQEPTELPPHRTFDHEIPLLDGAKPVNIKPYRYAPKQKDEIEKQVTQMLQHGVIQPSHSPFASPVLLVKKKDGTWRFCVDYRGLNDITVKNKYPMPVVDELLDELSGLKWFTKLDLRSGYHQIRLVEKDEFKTAFKTHQGHYKFRVMPFGLTNAPATFQGLMNTIFAHAIRKFVLVFVDDILIYSKTLAEHVCHLKSVLTVLQQHQLYIKRSKCSFSQPSLEYLGHIIGAIGVATDPQKVQAIRDWPVPKNLKQLRGFLGLAGYYRKFIRNYGVITKPLIELLKRGTFFFWSTLEHTAFQEVKQCLQQAPVLAMPDFNQQFVIETDASDKGIGAVLMQAGHPIAFLSKALGPKAQGFSTYEKECLAILMAVDKWHQYLQYAEFAILTDHRSLTHLCDQKLSTPMQQKAFLKLLGLQWMEVVVDGYHHDPATKQLLVELSLHPDGVNNFTLVNGIIKFKGRIWLGKHVEAQQAVLLSLHNSGVGGHFGIAATYQRIKSMFAWPGLKRDVKAYVQSCAICQQAKAIISDRDRIFTSALWQELFRLSDVKLNMSSSYHPQTDGQTERLNQCLEAYLHCAVYSSPALFARKPTSFGVIDMGQSTIPDVQQLLVNRAKLNELLHHHLVRAQQRMKAQADKHRSKRQFAPGDMVYLRLQPYVQLTMAKRSCHKLSFRYFGPYKVLERIGAVAYRLALPAGSLIHLVVHISLLKKAVQPDTPVSSDLPLTCSTDEVEVYPKAILRRQLIKRGGSSIPSVLVRWSGLPDTLATWENLADLWRRFPSALAWGQASP

SEQ ID NO: 24072 - protein, 1353 aa, Oryza sativa
  Clone ID: TF_OsC355669_1.pep
MSSTVTNVADDWKKGLAEVLDRLDSIRGKLSDLDNEQQAHHIAIQRLERAGRDRSPRRNNRDRDDDHDNDGRRGDRPPRYHKIDFPKFNGQGDPLHFLNRCEQFFQGQRTPEEEKVWLASYHLLDGARQWYMRIERDLGTPTWRRFSDLLNLHFGPPLRQAPLGKLAACRRKTKVAAYIDRFLDLLARAGPLTEEQQVDLFTTGLQEPLSIDASSSAAPTPSQPDAASSVGQASTQVAGRTVRRLSQSEMDERRRKGLCFNCDELYARGHKKVCKRLFLLDLAYDDDDDEVEGAAPAVEPETLRISLHAVTGVRPSNAMHLHVRLGDATLHALVDTGSTHNFLSQEAAARVHLPLVQRAGLRVTVANGDKVPSPGMFQDARISIDTEVFITDLYVLPLGGYDLVLGMQWLSTLGQILWDFGQLTMSFWHKDHMVLWRGLPTGASPAAHVATTRDLLDDLLTEFADVFATPSGLPPPRHQDHRITLLPDTAPVAVRPYRYSARHKDELERQCRDMEAQGIIRRSSSAFSSPVLLVKKADGSWRFCVDYRALNSRTVKDKFPIPVVDELLDELHGARFFSKLDLRSGYHQVRMRDADVEKTAFRTHDGLYEFLVMPFGLTNAPATFQSLMNEVLEPFLRRFVLVFFDDILIYSPSWSSHLQHLRAVFNTLRAHKLFVKRSKCSFGDTSVAYLGHVVSGQGVAMDASKVQAVVDWPRPCSARALRGFLGLAGYYRKFINDFGAVAAPLTRLLKKDGFLWSPEAEVAFGRLKKALTTAPVLALPDFDQPFIVECDASGTGFGAVLHQDGGPIAYFSRAFAPRHHALAAYERELIGLVQAVRHWRPYLWGRRFVVKTDHFSLKYLLDQRLATLPQHHWVGKLLGFDFEVAYKPGRQNTVADALSRRDEPAASLCAITTPVFDWLQDLHTANDTDPALVALRDQILAGNRTAPWALTDGIVTFKQRMYIPPASALLQTALAMVHDDKHEGIQKTLHRLRREFHTPGDRRVVQEFVKACAVCQRNKTEHLHPAGLLLPLPVPSAVWSDVSMDFVEGFPRVAGKSVILTVVDRFSKYAHFITLSHPYSAESVARAFYTDIVRLHGIPTSIVSDRDPVFTSTFWNALFAATGTKLHMSSAFLDDIRYRLEQAQQHAKKFYDRHHRELQFVVGDWVWLRLRHRVPASLATPVKGKLGPRYYGPYKVLEIINKVAYRLALPAGARLHDVFHVGLLKPFVGTPPTSPPALPSTLHGAALPQPAQVLKSRMARGVHQLLVRWDGLPASATSWEDLDDFRTRYPAFQLADELFVEEGRDVMWGIQYQRRNRRQQPEQAPWDTKEELGVNGFKKGEVNPVCSFLIYGN

SEQ ID NO: 24073 - protein, 2192 aa, Oryza sativa; identical to SEQ ID NO: 16600
  Clone ID: TF_OsC4120_1.pep

SEQ ID NO: 24074 - protein, 1413 aa, Oryza sativa
  unsure (1)..(1413): unsure at all Xaa locations
  Clone ID: TF_OsC25749_1.pep
MAFFSNSGSRADSGGYNLNEKAEDEAAYESVGDRDVDLNSRQWNLNEKAEDAYHSDEEQYDGGRSGPNSSENKSVQNARKINGPSGPWGTNFLKDCGPTQTAKEEQLTSNRGMEYGSAASSHDDMDASGEDDELNRGHGEVPAEEMLSDDYYEQDGEEQSDSLLRGGMRRPSCSTSGAAAESVSSRQKKKPTKYNAYEDEDDDEYNDENDDEDDDDADEDDPDDVDFEPESDTEKAADKDKFVDSENSDEEEDDELELSDDDEDDFVENKRQCKRLKVGGTKTSKGRKLPVQVQRKRGVSFTDEDSSGKDSDAPSDTDISHRAKKPDKLHQKTVGRKDVFSNVDSHEVRTSGRRRTARNISYAESEESDDSEEKLAKQQKVLKEDPEEEEGETIERILWHQPKGVAEEALRNGQSTQPTVISFTSDVDQSWDDVEFYIKWKGQSFLHCQWKTLSELQNVSGFKKVLNYMKRVTDELRYKRSLSREEVEVHDVGKEMELDLIKQYSQVERIFADRVSKVDGDDLVPEYLVKWQGLPYAESTWEKDTDIEFAQDAIDEYKAREAATSILGKTVDFQRKKSKASLRRLDDQPEWLKGGKLRDYQLEGLNFLVNGWRNDTNVILADEMGLGKTIQSVSMLGFLHNAQEINGPFLVVVPLSTLSNWAKEFRKWLPDMNVVVYVGNRASREICQQHEFFTNKKGGRHVKFHTLITTYEVILKDKAALSKIKWNYLMVDEAHRLKNCEASLYTTLLEFSTKNKLLITGTPLQNSVEELWALLHFLDPSKFNSKDIFVERYKNLSSFNETELANLHKELRPHILRRVIKDVEKSLPPKIERILRVDMSPLQKQYYKWILERNFQNLNKGVRGNQVSLLNIVVELKKCCNHPFLFESADHGYGGDSIGDRNKVERIVMSSGKLVLLDKLLMVRMLDILAEYLSLRGFQFQRLDGSTRADLRHQAMEHFNAPGSDDFCFLLSTRAGGLGINLATADTVIIFDSDWNPQNDLQVLDHLVIQKLNAEGRLEKKESKKGGSMFDKNELSAILRFGAEELFKEDKTDEETKKKLESMDIDEILERAEKVETKGGEGEEGNELLSAFKACSVHYHMTCDSDIMLKFYTSVANFSSGEDDATFWSRLIQPDASDMVEETLAPRAARNKKSYVEDHQLDKNSNRKRRGIDAQEKPRRRSSRTMDTAVSLPLIDGSAHQVREWSFGNLSKKDATRFVRAVKKFGNPSQIGLIVDDVGGAIAKSSVDQQLELFTLLIEGCQDAVKNNMDAKGTVLDFFGVAVKAHELIARVEELQFLARRIARYKDPVRQYRIQAPYKXPQWSASCGWTETDDARLMVGIHWYGYGNWEKIRLDPKLSLTAKIAPATLGERETFLPRAPNLDNRASALLQKEFANLRGKSSKAKGGPRQSIG

SEQ ID NO: 24075 - protein, 2630 aa, Oryza sativa
  Clone ID: TF_OsC7793_1.pep
MWKTQPGGTSRDGRGGGSTARANAGTGYPTRSRTSGNPQFSAPTNGANQRAMASLRSPLRGGPDMPTSRRCSPRLSGTQQDEVAEVARVGMLKRASNNASNSSTSRAPTRSSSTTTASSKDVAEEHSSGVGSTSSLSKKRKRMTAKSYRSLFKRSKKASSTERARKILPMGMWQRATLVHQHISIETCPQNKVAESRLEVEGRDRPTGHSRQNSISSLQSAPIPPIHYEEPESGHGDGEPLSIQKEVASSQFKVTASDEMEGNSNICVACGTPGDLNRVCDSGPVMEKAAKEATMFLVWIIGWNICLLRLLFGIHSVADGIESLWNVKEGMQNGKQYLVKYKNLAHVHNRWVPEGVINDTPGGCDLLSLFNKRDHKEKTNWKKEWTEPHHLLRKRPLMPPKEADDFFCSSRANIEHCNVEWLVKWRDLGYEHATWELETACFLRTPQADELKRKYENRRKAAKQSSIPVETKVKHKTFQKLQRLPDEWPPGFDNDHLFSINQLLEFWCKSHGAVLVDDKEYVTKTILFTLTVLPDVCQPLLIVTTPASLSAWEIQFNHLAPFINVVVYDGQKDTLKLIQDLEFYDNRRCMMLQVLLSHPDAILEDIETIERIRWEAVIVDYYENSAFKYFEQLKKISTDFRMVLLGSPIKDNVPEYMNLLAFLNSEDKGYSDYVNADDALVMSKARFTHHIAYERKTDSSKFLEYWVPSCISQPQLEMYCSILLSKSSVLRSEMETDSVGALHDIYLSLKKCCDHPYIVNEFLRSSLSNNSNVTENIDTVVHASGKLLVLDKMLNEIKKKSLRVILLFQSDRAGGNKMGNILEDLMHHRFGPESYERVEYRAVLSRKQAAIDKFNNKTNGRFVFLIENRACLPSIKLSSIDAIIIYGSDNNPLNDLKALQKIKIESQFERVSIFRLYTPFTVEEKSLVLARQGIVIDNNIQDLRTSLKHSLLRWGAAFLFSRLDEVQQDDHASKSSEMERHFIDEVIVEFLTKLSTTVEDSTEVHRKSISKANMSGELYSRNITLMGEKEGISVLEDNPAEFWLNLLDGRSPHVSCISEPLQSRVTKSQTMDEVNAPAEEINEARKKHRKVGEIMGSSSKVVSDKSNDDALPDICTTSGPALQPVDVTQQKSVQSEGSESLMSTPKNLHAQMKQELSKLIKVLQLPNTIQFNGAKIAGQVLIEVDNVTLLVEQFFEYLLNNHVVVQEPKYIFHALNIALCWRVASIHNFKVDHKESLALAEKRLKYECNEELARLVYDSLKRKFPKKAGATGSNCQSTSVEKTKPSQQETSNILRNDHIFPKQRMDLHDNFMNGALQEGSFVAAQMVSEEQELIAVPGTHMECHFSTDELPDIVEKRINLIDNVFSVREYRIFDKQQSQISELEKYTQNKTARLKTVCNLVLEHICRSHADVETRNDTIKQTVQWFTMLMYAFLEHMRLQHSKLESLQSNTWAEERQLKEKLCLEAKSGQLDHTFDQQIALPDSNFVMQEFIHLKEQSSNSHVSGSAVSDCQQLCHDRLKMVNTLVRNVVPSEPISAQTVRNGSVEVVMVAGQPAPEVVDFPENNTCYSPDGIGLQKAKSPSIRPSNDDSINQESSASEYTSTENVERDNANPSTLPGVATSPAIGIYANLESTMVASTQNLTIFPASKEVATQSNLSTLPGSQTVETSQQPPAEAKLTENLGVTAWDVQPEMQTTTSTLDSPSARMCPDNNNQTVHQPDTSTSPLQEGSTSCHLTSVDATAGVTAKVDDTAAADPLDSETQSYTAAHKPAALLVSTEVETQTDQSSMLERQSISVPLVQSSLSSQNPPAEAEPASTLSRETARDVQPERQQSASVLETSLQRMHPDDDSQTKHQLETVLSQRGETCGHLGDAREIVDANDSNTVCDVRAHLESPIFATPQSLVICQGLSEVGSQGNISNMSSQQSTDLSAQQNLAPSPLPPAEAERTGLLTTQPAQNFQPELQPSTSLFDASLESNNISQTDCQSDRAVVFLQEGATTQQHLLDTGVVVDDIVAEEPSHSESPTYIIHETAALVVSTEVETQTCQSNIPIQQNTSHPAQQSPETSRHSIASPVGLEATQEFQPEMQPSTSGQDQSEELEQEGMSSSAIQDLQPEMQPPNSVQGQYPGAVLCIAAAEDLQPLMQSSTPVPNQLAEANQEGMLSAAAAQNLQCETQRLTSTQDAPFERTDLSGIPVPRSITTAHQSVVPSWDLQTGVEPTGALCMETTHERQSELPSGSMQERSAETRANLVQRSCTTETCDLQPQLDLSSTIQTVQLEGIRSEDMNQIGVQSNSALSSEQLTQPLPVAPLVFNYQRFSDEPLKNELERLKHTSNVLSKVHEQKRKQLLVEYNQEMEKLKQKYDSLLQKEDSFYAQKEAELDTIYRKVFINQSLAENFRRKFLPLSAAQGGSTRPTIGQLVQSSQEPSARIVAEQVTASPVTLSSAVRPQVLHSSGPYVQPSLVVQPSSQATQPQSILPGNMYRAMSSSPFSSTPMPMPHGTYRAAGAQPHAPSPHLQQLRMPSPYATSHGNQHQRPSILASLLPFVLPSSSNPSLTAPLSLNTVVHRTSGPLNAGAGSQHAGSQISGVNPSGSSASASLNTWLTARLALTSEARGTVSSTEVVCLSDDES

SEQ ID NO: 24076 - protein, 1364 aa, Oryza sativa; identical to SEQ ID NO: 16615
  Clone ID: TF_OsC18281_1.pep

SEQ ID NO: 24077 - protein, 84 aa, Oryza sativa
  unsure (1)..(84): unsure at all Xaa locations
  Clone ID: TF_uC-osflm202108f08b1.pep
MASVRVKGTVKWFYSTKGFGFITLDDGGXDLLVHQFSLKFDGYRNLNDRYLRVFFAXSGNYGRSNAVDVTEPVGGALSGRSRAS

SEQ ID NO: 24078 - protein, 90 aa, Oryza sativa
  Clone ID: TF_LIB4370-046-R1-K1-B2.pep
HGLGAAVVAGSDGELDDVAVVEAAVAVGLERGLVDEEILAAVVGGDEAEPLGGVEPLHRPLHPLRRHLDLALALSPPPPPQPKTLETLDR

SEQ ID NO: 24079 - protein, 241 aa, Oryza sativa; identical to SEQ ID NO: 16617
  Clone ID: TF_OsC50687_1.pep

SEQ ID NO: 24080 - protein, 197 aa, Oryza sativa
  Clone ID: TF_OsC951_11.pep
MASERVKGTVKWFDATKGFGFITPDDGGEDLFVHQSSLMPRGFPRLNDGDVVEFSVGSGNDGRTKAVDVTAPGGGALTGGSRPSGGGDRGYGGGGGGGRYGGDRGYGGGGGGYGGGDRGYGGGGGYGGGGGGGSRACYKCGEEGHMARDCSQGGGGGGGYGGGGGGYRGGGGGGGGGGCYNCGETGHIARECPSKTY

SEQ ID NO: 24081 - protein, 87 aa, Oryza sativa
  Clone ID: TF_LIB4309-007-Q1-K1-F2.pep
MMAGAPPMHICMDSDWLKGIVPEEHGMGSSSPSAELIACPRAPMQAAAAAADRRLRPQHDQPLKCPRCESTHTKFCYYNNYSLSQPR

SEQ ID NO: 24082 - protein, 431 aa, Oryza sativa; identical to SEQ ID NO: 16629
  Clone ID: TF_OsC69565_1.pep

SEQ ID NO: 24083 - protein, 375 aa, Oryza sativa
  Clone ID: TF_OsC1630_4.pep
MWGLGLVKPMEEMLMGANPNPNGSSNQPPPPPSSAASAQRPIAPPAAGAAAGAGAAGAGAGTERRARPQKEKALNCPRCNSTNTKFCYYNNYSLQQPRYFCKTCRRYWTEGGSLRNVPVGGGSRKNKRSSSSVVPSAAASASTSAAVSGSVPVGLAAKNPKLMHEGAQDLNLAFPHHHGRALQPPEFTAFPSLESSSVCNPGGNLAAANGAGGRGSVGAFSAMELLRSTGCYVPLPQMAPLGMPAEYAAAGFHLGEFRMPPPPQQQQQQQAQTVLGFSLDTHGAGAGGGSGVFGACSAGLQESAAGRLLFPFEDLKPVVSAAAGDANSGGDHQYDHGKNQGGGGGVIGGHEAPGFWNSSMIGNGSSNGGGGGGSW

SEQ ID NO: 24084 - protein, 452 aa, Oryza sativa
  Clone ID: TF_OsC1630_7.pep
MAVLPPSLWASPCPNHRTFSSLSPFCSRNPPAAASGGGARSSSSSSLRFVSSGARRSKNCWGGSEVDAVGEPSCMDAAHWHQGLGLVKPMEEMLMAANAAAGANPNPAATAPSSVTGGALRGGGGGGAPPVAGGAGAGSTERRARPQKEKALNCPRCNSTNTKFCYYNNYSLQQPRYFCKTCRRYWTEGGSLRNVPVGGGSRKNKRSSSSAASASPASASTANSVVTSASMSMSMASTGGGASKNPKLVHEGAQDLNLAFPHHGGLQAPGEFPAFPSLESSSVCNPGGPMGTNGRGGGALSAMELLRSTGCYMPLQVPMQMPAEYATPGFALGEFRAPPPPPQSSQSLLGFSLDAHGSVGGPSAAGFGSSAGLQGVPESTGRLLFPFEDLKPTVSSGTGGGGASGGGAGVDGGHQFDHGKEQQAGGGGGGPGGHDTPGFWNGMIGGGSGTSW

SEQ ID NO: 24085 - protein, 276 aa, Oryza sativa; identical to SEQ ID NO: 16628
  Clone ID: TF_OsC4233_1.pep

SEQ ID NO: 24086 - protein, 175 aa, Oryza sativa; identical to SEQ ID NO: 16630
  Clone ID: TF_OsC373348_1.pep

SEQ ID NO: 24087 - protein, 371 aa, Oryza sativa; identical to SEQ ID NO: 16632
  Clone ID: TF_OsC340203_1.pep

SEQ ID NO: 24088 - protein, 206 aa, Oryza sativa; identical to SEQ ID NO: 16633
  Clone ID: TF_OsC23687_1.pep

SEQ ID NO: 24089 - protein, 493 aa, Oryza sativa; identical to SEQ ID NO: 16637
  Clone ID: TF_OsC265407_1.pep

SEQ ID NO: 24090 - protein, 441 aa, Oryza sativa
  unsure (1)..(441): unsure at all Xaa locations
  Clone ID: TF_OsC50405_1.pep
MGECKVGGGGGCGVCLIKLFGETIPVPEPGACARGDXVDKDLQHSGSSTTEPKTQENTVQDSTSPPPQPEVVDTEDSSADKNSSENQQQQGDTANQKEKLKKPDKILPCPRCSSMDTKFCYYNNYNINQPRHFCKNCQRYWTAGGAMRNVPVGAGRRKSKSVSAASHFLQRVRAALPGDPPLYAPVKTNGTVLSFGSDLSTLDLTEQMKHLKDKFIPTTGIKNTDEMPVGLCAEGLSKTEESNQTNLKEKVSADRSPNVAQHPCMNGGAMWPFGVAPPPAYYTSSIAIPFYPAAAAAVAAYWGCMVPGAWNAPWPPQSQSQSVSSSSAASPVSTMTNCFRLGKHPRDGDEELDSKGNGKVWVPKTVRIDDVDEVARSSIWSLIGIKGDKVGADHGRGCKLAKVFESKDEAKASTHTAISSLPFMQGNPAALTRSVTFQEGS

SEQ ID NO: 24091 - protein, 263 aa, Oryza sativa
  Clone ID: TF_OsC1634_3.pep
MSYMCSDVSMSFFFHRAAGLLGEFGKVIMQCGVSEGTQDKAQGFVVAREKVEPEEEEEEEQRVPAAATSGQRASIKREAADRDEEQRQGGGDAAGQPTQRRLQDSAEARAAAAAPLPCPRCRSRDTKFCYFNNYNVNQPRHFCKACHRYWTAGGALRNVPVGAGRRKNRPLGPLAVAHHNHHHRAAAGFVLGFPNPSSPTSPSPGITNTDRLPTAFFLYTDRWPTPESRRVRNLPWGDLEDHLGRDFLLFACSLSAGFLNLKH

SEQ ID NO: 24092 - protein, 320 aa, Oryza sativa; identical to SEQ ID NO: 16640
  Clone ID: TF_OsC1630_5.pep

SEQ ID NO: 24093 - protein, 403 aa, Oryza sativa; identical to SEQ ID NO: 16636
  Clone ID: TF_OsC66169_1.pep

SEQ ID NO: 24094 - protein, 359 aa, Oryza sativa
  Clone ID: TF_OsC197627_1.pep
MIQELLGGTTMDQLKGASALNHASLPVVLQPIVSNPSPTSSSSTSSRSSAQATQQRSSSATSSPHGQGQGGGAAEQAPLRCPRCNSSNTKFCYYNNYNLTQPRHFCKTCRRYWTKGGALRNVPIGGGCRKPRPMPAPVAKPPMSCKAAPPLGLGGGPVSWASGQQAATAHLMALLNSARGVQGHGGSNVHRLLGLDTMGHLQILPGAPNGAGAGTAASLWPQSAPRPVTPPPPHMDSQLGMGTLGHHDVLSSLGLKLPSSASSSPAASYYSDQLHAVVSNAGRPQAPYDVATASLPCTTAVTSLPSALSSVSAAAPTSNTVGMDLPPVSLAAPEMQYWNGPAAMSVPWPDLPTPNGAFP

SEQ ID NO: 24095 - protein, 230 aa, Oryza sativa
  Clone ID: TF_OsC4233_2.pep
MQEAGRRPAPQFAGVDLRRPKGYPAAAQLTPAAEEAAAGVGDPCPRCESRDTKFCYYNNYNTSQPRHFCKSCRRYWTKGGSLRNVPVGGGSRKSSTSSSSAAAAAASSSSSPSSPAKSPKRSKNSKRRRVSPPPPQPVPAPPPPTTADAADVAAPTAPEATTKKAPEDLTAAAATQPAVALGLGVADGGGGGKEHLDTSPFEWPSGCDLGPYWPTGVFADTDPSLFLNLP

SEQ ID NO: 24096 - protein, 320 aa, Oryza sativa; identical to SEQ ID NO: 16644
  Clone ID: TF_OsC191412_1.pep

SEQ ID NO: 24097 - protein, 647 aa, Oryza sativa
  unsure (1)..(647): unsure at all Xaa locations
  Clone ID: TF_OsC8761_1.pep
MVGVRRRASGFEAFPPLPGKVFVEEAIGAEYGEGFETFRMDGPLKVDVDYLNEKLQECFLQRIRHAMKPDEACGLIFSWDNVIADTDSLKLDAWRQLALEEDSQWYIVCKVCVYLTARDATLILLINLFHAGKDIPNAGHVQKSILHGAADHVLRKVLCWAKDESQMERLKARLIELYYENLFKLDTPVNGLREWLDAVQTAGIPCAVASSLDRRCMIEALDRMELSKYFKAIVTDEDDMESIAHRFLSAAMKACFCSASKYLAVFXDILLTCLSNVSLRGVTAAHNXTMMAVALIGAHPAYELVQADLAIAKVQGALGHHIAKYSELSVINLRRLFAHKGLSFMDLQKQIIERYRQELELAEQLEQIFQRSPPSRLVFLQWEICSGPAKSISRRRIRRDVEIESVADDSANSVQNIRLVIDIGDRTIQVPLNGHTVAQNIGRQAAAAVAGDSSAGGVSEKAGGGGEEWLQEQDGLLSMRGWLMAVATLFAAMAFQAALQPPGWMPRPRDWFAALLAADPAAAAVTRDQAGKAMLYLIVNTCTFATSLAVLLMLLAVGDAGGGGGGCASRRVTARLIANMMTAVALFAAATFALCAADDYRLMAFVGTVVAVYAAVTVVFVRCNLALPFRRGGGGGGHGCCSWVSRL

SEQ ID NO: 24098 - protein, 136 aa, Oryza sativa
  unsure (1)..(136): unsure at all Xaa locations
  Clone ID: TF_LIB4309-022-R1-K1-F5.pep
MQDIHDFSMNGVGGGGXRRGRFXXGXIXXGGGGDRRMRAHXNNILNHHQSLKCPRCNSLNTKFCYYNNYNLSQPRHFCKNCRRYWTKGGVLRNVPVGGGCRKAKRSKTKQVPSSSSADKPTTTXDDHHGEEKSSPG

SEQ ID NO: 24099 - protein, 282 aa, Oryza sativa
  Clone ID: TF_OsC1633_1.pep
MQEFQSIPGLAGRLFGGAAAADIRRAQAQQGPASRCGGIPSPEAVKCPRCESTNTKFCYYNNYNLSQPRHFCKSCRRYWTKGGVLRNVPVGGGCRKTKRSGSSSAASSAPSTPTAATDNAKNQRRASASSPRSSSGGSGNTSPTAAAATTPTTPATPSSNTIAVINHATTTTTTTNPFPTDVPPPAPIFADQAAALASLFAPPPPPPLPVFSFAAQAKTEDGIASVLLAGQTTAPTAATVADMTPFTSLDAGIFELGDVPPAAYWNAGSCWTDVPDPNVYLP

SEQ ID NO: 24100 - protein, 82 aa, Oryza sativa
  Clone ID: TF_LIB3434-040-P1-K1-B11.pep
VVVVTVAELGLPAPAPRARQRLSPSSPSSATATARRLQSLRRPRRRRRRLHHRRRRRMRMRWRLRRRALFHAPLSVGLDHLL

SEQ ID NO: 24101 - protein, 371 aa, Oryza sativa
  unsure (1)..(371): unsure at all Xaa locations
  Clone ID: TF_OsC1630_1.pep
MASGGALSPVEEKPTVVKTTKAEQHEEEAAVAVKSAAEMMKKSSPCCPRCNSIKTKFCYYNNYSMAQPRYFCRECRRYWTQGGSLRNVPVGGGCRKSKRSSASSASASAASPPAPAVGAAPPVVPALSSAISKLLQSEPMAAPCADFPNVLPTFVSTGFELPAAAGDRLSLGSFGAFGNLSAAVAAPGGGGGSSTTTSFMDMLRGVGGLFDGVGNSHQMGGNGGGGGSYYAPLITGAGNGMLMPPPPLPPFSGSLMQHGMQGLFANHAMGGGGGGVMNAGEDGSVMAGLGGGQWPPALGGADEQQGGGDGGEAVMTKDTGGGASSSASRPDYFYGWNXPPAASSLEAASAATPPLPPEQRHGRASSTAARP

SEQ ID NO: 24102 - protein, 476 aa, Oryza sativa
  Clone ID: TF_OsC44472_1.pep
MDDLAAASPPHPPPPPPESHVPPPPQTPEKDSCEDTGDMRISEEKPCTDQELDADQMNSSSFNSSSECENQTPSNDEMTGSESKSEAAQTEGGGSSEEKVLKKPDKILPCPRCNSMDTKFCYYNNYNINQPRHFCKSCQRYWTAGGSMRNLPVGAGRRKSKSSTANYRSILITGSNLAAPAGDAPLYQLSIKGDQTATAVKFAPDSPLCNSMASVLKIGEQSKNAKPTSTAQPRNGETQTCPASGTTSDSPRNEPVNGAVSGHQNGIVGHSGVPPMHPIPCFPGPPFVYPWSPAWNGIPAMAPPVCTAPAEPANSSDNGSTASVQWSMPPVMPVPGYFPVIPSSVWPFISPWPNGAWSSPWIQPNCSVSASSPTSTSTCSDNGSPVLGKHSRDSKPQGDDKAEKNLWIPKTLRIDDPDEAAKSSIWTTLGIEPGDRSMFRSFQSKPESREQISGAARVLQANPAALSRSQSFQETT

SEQ ID NO: 24103 - protein, 485 aa, Oryza sativa
  unsure (1)..(485): unsure at all Xaa locations
  Clone ID: TF_OsC161689_1.pep
MAGSPHLAGFGREGRRKGSGAADSPPSCRAPPCLWWPPPSPSCRLHCYCRRRPVPLFRLDLEGREESAAGHRPPPFLLGPDLGGREGSHSQEQQPPPPLPSPLPPATAPGCATTATGGRGEGRTGGRGGERREEXSSWLGGGRRRRVFDRRRRRLTGPTCAGVHRGTTTTTPRRRRRRRPRRGASARRRSSSSSSPPPARSYPGPRRGVAGAMSSPFLGSSSSSASSPLSYLTPPRPPPPPPPLLMVRHGLARWLTDLDDELMVFDDDLGVQGQGYAAAANGGIGGGGVEAVNAAAAPRQGGRHAGHPPLPRPPPRQCPRCGSANTKFCYYNNYSRTQPRYLCKACRRHWTEGGTLRDVPVGGGRKNSKRAAGGGKAGATASTAASAHVVAPAAAPPTSSSFPDLLRQMLMAPATAGGGGGYSIDLTAWQQMAAFAAPPQAATGDVGGAVGAASTAAPDANCGGGGVQYWNGWLQDDMPGLDGSC

SEQ ID NO: 24104 - protein, 318 aa, Oryza sativa; identical to SEQ ID NO: 16623
  Clone ID: TF_OsC69565_2.pep

SEQ ID NO: 24105 - protein, 493 aa, Oryza sativa; identical to SEQ ID NO: 16660
  Clone ID: TF_OsC7030_1.pep

SEQ ID NO: 24106 - protein, 427 aa, Oryza sativa; identical to SEQ ID NO: 16662
  Clone ID: TF_OsC200145_1.pep

SEQ ID NO: 24107 - protein, 262 aa, Oryza sativa; identical to SEQ ID NO: 16648
  Clone ID: TF_OsC75556_1.pep

SEQ ID NO: 24108 - protein, 294 aa, Oryza sativa
  Clone ID: TF_OsC44865_1.pep
MLHEQHAPPPQPEPEVSLQLSAPATAADDVAAGDDEEVTVVTTYRDIHPLTPPSPTTTTTPPTRLGSAAYSWDTASSHRSVSSEEQFMTMSREFTAMVAAGTTMQTGPNDGNNGGDQLTSIGEDELEETNPLAIVPDSHPIATPARSRASQLEVVPAAGPSPAPPVEARQVKKEEVETKVSAWQTAEVAKINNRFKREEVVINGWETEQVEKASAWLKKIEIALARHQKIERKLDEQRAKALERTQNDIAKARRKAEEKRASAEAKRGLKLAKVLELANFMKAVGRVPTKRSFF

SEQ ID NO: 24109 - protein, 466 aa, Oryza sativa
  unsure (1)..(466): unsure at all Xaa locations
  Clone ID: TF_OsC1311_1.pep
MESKGGKKKSSSSRSLMYEAPLGYSIEDVRPAGGVKKFQSAAYSNCAKKPSXDSPFGFSILCSDQPAPMGVLSAADPPPVSAIGFEGYEKRLEITFSEAPVFADPDGRGLRALSRAQIDSVLDLARCTIVSELSNKDFDSYVLSESSLFIYSDKIVIKTCGTTKLLLTIPRILELAEGLSMPLAAVKYSRGMFIFPSAQPAPHRSFSEEVAVLNRYFGHLKSGGNAYVIGDPAKPGQKWHIYYATQHPEQPMVTLEMCMTGLDKEKASVFFKTSADGHTSCAKEMTKLSGISDIIPEMEICDFDFEPCGYSMNAIHGSAFSTIHVTPEDGFSYASYEVVGFDASTLAYGDLVKRVLRCFGPSEFSVAVTIFGGHGHAGTWAKELNADAYKCNNMVEQELPCGGLLIYQSFDATEDVPVAVGSPKSVLHCFEAENMVNPAPVKEGKLGNLLPWGEDALEENDGVFDE

SEQ ID NO: 24110 - protein, 316 aa, Oryza sativa; identical to SEQ ID NO: 16652
  Clone ID: TF_OsC349_2.pep

SEQ ID NO: 24111 - protein, 130 aa, Oryza sativa
  Clone ID: TF_LIB3432-006-P1-K1-C11.pep
PRVRPRVRGRVGAAKDVAEEKAVIPAPAPPAEEEKPPVDDSKALAIVEKVADEPPAEKPAQGGSNDRDVALARVETEKRNSLIKAWEENEKTKAENKASKKLSAILSWENTKKANIETQLKKIEGQLVKK

SEQ ID NO: 24112 - protein, 203 aa, Oryza sativa; identical to SEQ ID NO: 16654
  Clone ID: TF_OsC339202_1.pep

SEQ ID NO: 24113 - protein, 92 aa, Oryza sativa
  Clone ID: TF_LIB3474-009-P1-K1-H6.pep
RHPDVALARVETEKRNSLIKAWEENEKTEAENKASKKLSAILSWENTKKANIEAQLKKIEVYSCFCYFCFPSERYSFQLAHYLKVTNILSYQ

SEQ ID NO: 24114 - protein, 92 aa, Oryza sativa
  Clone ID: TF_OsC84854_2.pep
MAEVAPPAPAPEPTKDIAEERAAVPAPEESKAMTVVDDAEKAAATGGSHERDALLTTVATEKRISLIKAWEENEKAKADNKAVKKVADIASW

SEQ ID NO: 24115 - protein, 510 aa, Oryza sativa; identical to SEQ ID NO: 16657
  Clone ID: TF_OsC92114_1.pep

SEQ ID NO: 24116 - protein, 208 aa, Oryza sativa
  Clone ID: TF_OsC84854_1.pep
MPRKQAREEADTAEADTRRGTPRGGGHRRPTRAELLEMAEVAPPAPAPEPTKDIAEERAAVPAPEESKAMTVVDDAEKAAATGGSHERDALLTTVATEKRISLIKAWEENEKAKADNKAAKKLADIASWENSKVAEIEAEIKKYQEYLERKKAEQVEKLMNGVAKVHRAAEEKRAATEARRGEEVVKAEEAAAKYRAKGEPPKKLLFG

SEQ ID NO: 24117 - protein, 122 aa, Oryza sativa
  Clone ID: TF_jC-osleLIB3474039a12a1.pep
FFLFRNPRFFPPGPTFFGPTNPLPPWGGERSQPPPGEPFPVCLLGIENFFRPQNTPLFFWEHGRGPRTWVPFPWPLGLSCPPLPQPLVFFPQLSWGPTRLLSLFFLAIPPFFFFKGSSIFFR

SEQ ID NO: 24118 - protein, 426 aa, Oryza sativa
  Clone ID: TF_OsC151462_1.pep
MLLGLEKNQHNGEDTSPEANDSGELDDQSKSTTPEMVLHSSIILIYGFTISLIPSTWGMECSTPTEVSSNSGHGSINRAQDDDRFGSQGGSWVPPLEQKPEAVTALIPPLSRPTRSIWDDAEKWISSPTANRGGRVGSAAGAAPKKSALAFPEHVSRPPAVAKVVAEVPINTGTLVKNSVALAQPISFNPAQSASIVDEPAPAVRSVSMRDMGTEMTPIASQEPSRTGTPIIASSPTSSRTPTPQRNAEISIGEFGPNKMEMSEEELQMNTRKEIMDLGQRLGKTTIAAWASKEEKSTTSFANVITDKAVEIDREARAADWEEAEKAKYLARFQREEVKIQAWENHQKAKIEAEMKRMEAKIEIKRAREQDRLSSKLAAARHKAEARREAAESRKNQEAARTEEQAAQIRKTGHIPSSISCWCWCL

SEQ ID NO: 24119 - protein, 130 aa, Oryza sativa
  unsure (1)..(130): unsure at all Xaa locations
  Clone ID: TF_8954457.pep
ICREHEEQSRDRXXGXLXRRXXWSRXNAARKSXRPRRWQXXXVXPAMLPXNSXGALGPKKIFDSQRXXVKXFXPGCFASFTPPXAXCVCXCXKSPARCVXSGVAVYNILLPXTYVWGXXCLMXDXRPSYV

SEQ ID NO: 24120 - protein, 206 aa, Oryza sativa; identical to SEQ ID NO: 16661
  Clone ID: TF_OsC1311_2.pep

SEQ ID NO: 24121 - protein, 531 aa, Oryza sativa; identical to SEQ ID NO: 16653
  Clone ID: TF_OsC299804_1.pep

SEQ ID NO: 24122 - protein, 175 aa, Oryza sativa
  Clone ID: TF_OsC102438_1.pep
MAEEAKKVEVTKDIAEEKAVVPLPTPPATEHDDSKAIVLVKEAEATGGSAERDAYLAKIVSEKRLVLINAWEESEKARAENRAAKKLSYITSWENAKKAEMEAELKRIEQELEKKKAAYEEKLKNKLALLHKTAEEKRALTTAKRGEELIMAEEMAAKYRAKGEAPTKLFGLLKA

SEQ ID NO: 24123 - protein, 997 aa, Oryza sativa; identical to SEQ ID NO: 16665
  Clone ID: TF_OsC9553_1.pep

SEQ ID NO: 24124 - protein, 149 aa, Oryza sativa
  Clone ID: TF_LIB3433-031-P1-K1-B2.pep
HAGAHCTSDNQGYIDRSGFKRKDSDCSDQQKTGGALWDIFRREDSEKLQDYLRKHASEFRHIHCNPVKNVSHPIHDQTFYLTVEHKRKLKEEHGVEPWTFEQKLGDAVFIPAGCPHQVRNLKSCIKVALDFVSPENVGECVKLTGEFRR

SEQ ID NO: 24125 - protein, 872 aa, Oryza sativa
  Clone ID: TF_OsC160889_1.pep
MRPDEEGRGVATRPGALWERKPPANAFNAPDDDEDVEKTDQLLEPLNKPKRRDAGKKKRPRKKKVDQENIKTHRHNANAVKGKMLVNDKVSKTEKKQREENVDRYPDLPENEFAAKCPYCRKNCNCKACLRMRGVEEPPRKEISKENQIRYACHVLRLLRPWLIELRQEQMAEKELEAKIQGVSVDQIKVEQAELRKGEIPGGEEVEILDPEERDKDYAFGKILSDGENQRDSLKCRSDTQNSESNKGMASDENQKKALLLWKANSNGSIPCPRKEKEDCSFSSLDLKCLFPEKLLPELEDRSEKVFWSETFAKELGRTSELCPCFDHSGKIRSDSKKLRQAANREDSSDNYLYCPVATDIQDADLLHFQMHWAKGEPVVVSDTLKLTSGLSWEPMVMWRAVRERTKGKAEDEQFAVRAVDCLDWCEVEINIHMFFMGYTRGRTHPRTYWPEMLKLKDWPPSSSFDQRLPRHGAEFISALPFPEYTDPRYGPLNLAVKLPGGVLKPDLGPKTYIAYGFSEELGRGDSVTKLHCDMSDAVNILTHTAEVPCETYDAVQIKNTQKKMKMQDDMEIYGMIESGSELKPSACPVELGNKAVGEAPKASCSKENVHTLKDKSNGWWRKYTFGLDINASPPDDAGGDARDEALSYESVVHSDVAQCPNHNHETNNSDDARIGAQRCQKKAKGRPPKTGSGVSEHQESGGALWDIFRREDSEKLQDFLRKHAPEFRHIHCNPVKQVIHPIHDQAFYLTAEHKRKLKEEYGVEPWTFEQKLGEAVLIPAGCPHQVRNLKSCIKVALDFVSPENVGECVRLTKEFRRLPSSHRAKEDKLEIKKMAFHALNEVLNFLDPPSSEGSKEAAEKPRRGRGRPRKH

SEQ ID NO: 24126 - protein, 913 aa, Oryza sativa; identical to SEQ ID NO: 16669
  Clone ID: TF_OsC145726_1.pep

SEQ ID NO: 24127 - protein, 874 aa, Oryza sativa
  unsure (1)..(874): unsure at all Xaa locations
  Clone ID: TF_OsC98891_1.pep
MGLSDYDLMGVAVPGTGVGGPHPEALKERMLCNLWEVYTLAQRNRKFNELLNDEAIMMKPSKESKKRGAGKKQEEEENNTISIEDEMCDANNKKGKKMLTGENALMCHQCQRNDKGRVIWCKSCNNKRFCEPCMKRWYPGLSEVDFAAKCPYCRKNCNCKACLRMIGVEKPPEKKISEENQRRYAFRIVDLLLPWLKELQQEQMKEKELEGRLQGIGGFSNCLFTFLFAGVSMDEVKLEQADCDMDERVYCDRCKTSIVDFHRSCKACSYDLCLACCWELRKGEIPGGEEAKSVQWEERGQKYDTLQSSEKCFSPNSXPDFLLTPSTETCNDMAVAGDPNNPLLLWKGNSDGTSWMSTPSEKFKVLHQGCSXTLFPLKMLVSVLXDRRVVIKREAFDKAINETSDQCPCFYHTSKIRTNATREAANRKGSSDNYLYCPDANNIQEDDLSPEEWGRXPIDESIXKGSLNSEGDLNGDLXLKRALREKKTNGDVEDEHFAVKAVDCLDWNEVEIISLWDRIKVSTVQESPQTSSWXDFVHMWGDCPSLKXCDCLLLIVAIXLGLPFPEYTDPRYGPLNLAVRLPAGVLKPDLGPKTYIAYGCYEELGRGDSVTKLHCDMSDAVNILMHTAEVSYDTEQLDKIAKIKMKMREQDLHELFGVSESGAKGKADDEASKISCNMENKHTSNQSTKGLDINALPPDDSGSDIGDKPSFCQSEVSHPIHDQTFYLTVEHKRKLKEEHGVEPWTFEQKLGDAVFIPAGCPHQSCIKVALDFVSPENVGECVKLTGEFRRLPSDHRAKEDKLEIKKIALNALKEVVNFLDPLPKGSKNRDEVVEVTKPKRKYGNRRGDLKSGEDQPIDESIEERKPKKRGRSKR

SEQ ID NO: 24128 - protein, 308 aa, Oryza sativa; identical to SEQ ID NO: 16686
  Clone ID: TF_OsC80971_1.pep

SEQ ID NO: 24129 - protein, 1441 aa, Oryza sativa
  Clone ID: TF_OsC32958_1.pep
MTMMTPPPLEPEEDEMLVPHQELVAADAAQPMEVVAQTEAASTAESQPAEDPQTSRFTWTIENFTRINAKKHYSDAFVVGGYKWRVLIFPKGNNVDHFSMYLDVADSANLPYGWSRYAQFSLAVVNQIQQKYTIRKDTQHQFNARESDWGFTSFMPLSELYDPSRGYLVDDTVVVEAEVAVRKMVDYWTYDSKKETGYVGLKNQGATCYMNSLLQTLYHIPYFRKAVYHMPTTENDMPSGSIPLALQSLFYKLQYSDNSVATKELTKSFGWDTYDSFMQHDVQELNRVLCEKLEDKMKVTNLRTVVEGTIEKLFEGHHINYIECINVDYKSNRKESFYDLQLDVKGCRDVYASFDKYVEVERLEGDNKYHAENHGLQDAKKGVLFLDFPPVLQLQLKRFEYDYMRDTMVKINDRYEFPLQLDLDRDDGKYLAPDADRSIRNLYALHRYKFDDERVTKEDTKKALEEQYGGEEELPQINPGFNNAPFKFTKYSNAYMLVYIRESDKDKIMCNVDEKDIAEHLRVRLKKEQEEKEHKKKEKAEAHLYTIIKVARDENLKEQIGKDIYFDLVDHEKVRSFRIQKQLLFTTFKEEVAKEYGIPVQFQRFWLWAKRQNHTYRPNRPLSPHEETQSVGQLREVSNKAHNAELKLFLEVELGPDLRPLPPPEKSKEDILLFFKLYNPEKEELCFVGRLFVKALGKPSEILTKLNEMAGFVPNEEIELYEARAKFMMLYLWDNLEEIKFEPNVMCEHIDKKATFRASQLEDGDIICFQKSPIPDSDTQMRYPDVPSYLEYVHNRQVVHFRLLEKPKDDDFSLELSKLHTYDDVVERVARQLGVDDPAKIRLTSHNCYSQQPKPQPIRYRGVEHLLDMLIHYNQTSDILYYEVLDIPLPELQGLKTLKVAFHHATKDEVVIHSIRLPKNSTIADVINDLKTKVELSSPSAELRLLEVFYHKIYKIFPLHEKIENINDQYWTLRAEEIPEEEKNLGPNDRLIHVYHFMKDPLQNQQIQNFGDPFYLAIREGETLAEVKERIQKKLQVPDEEFCKWKFAFISMNRPDYLQDSDVVSARFQRRDVYGAWEQYLGLEHADTAPKRAYTANQKKLTRITAAVSAALGSVIVIADEIFASTYILTILSKKLYLMSRIKFGVTRSIFFSRHYDLNKAPVHLTLQLPTSPMDNPTPSSSSGGGGAAAAANASSDEHRKTSPATAADFFDEEHTFDDILLPVDLFDFTHGLDAGDGCYVDDQAAIGQKPLSPAPEPAAEQQPSPAPEHGDDERLVMYYQGQEYIFDPVQPQKIENIFHHLNGQEMIPQSIRPQPTNLVRPITVPEDFDRFAALTRYREKKRNIKFIKKADYSARKEVALRMKRSKGKFAPRVQTSENSLAHRKGITFCTNCGESSDATPMMRHAPNGTKSFCNACGLMWANSRKIRKIRNPTSGEQEDQ

SEQ ID NO: 24130 - protein, 295 aa, Oryza sativa; identical to SEQ ID NO: 16674
  Clone ID: TF_OsC297303_1.pep

SEQ ID NO: 24131 - protein, 173 aa, Oryza sativa
  unsure (1)..(173): unsure at all Xaa locations
  Clone ID: TF_OsC353595_1.pep
SSAHAAMAAAAAPASAANNGGGNWPGQDSCLTAAPGRGAHSKRSCATAATAAAWHTLGPHPTFXSSLSSSRPSSDFPSSKKLSATRLNGSSGSRGKKSPGPAGVKVGMEAGVXWRCMHCASEKTSXLLTGPLGPKTLCNACGLRFMSGRLMPEYKAAAMPPLWLTTSGGDHSS

SEQ ID NO: 24132 - protein, 353 aa, Oryza sativa; identical to SEQ ID NO: 16682
  Clone ID: TF_OsC179266_1.pep

SEQ ID NO: 24133 - protein, 387 aa, Oryza sativa; identical to SEQ ID NO: 16684
  Clone ID: TF_OsC25297_1.pep

SEQ ID NO: 24134 - protein, 219 aa, Oryza sativa; identical to SEQ ID NO: 16687
  Clone ID: TF_OsC154673_1.pep

SEQ ID NO: 24135 - protein, 309 aa, Oryza sativa; identical to SEQ ID NO: 16690
  Clone ID: TF_OsC84482_1.pep

SEQ ID NO: 24136 - protein, 222 aa, Oryza sativa; identical to SEQ ID NO: 16681
  Clone ID: TF_OsC86749_1.pep

SEQ ID NO: 24137 - protein, 418 aa, Oryza sativa; identical to SEQ ID NO: 16692
  Clone ID: TF_OsC45687_1.pep

SEQ ID NO: 24138 - protein, 136 aa, Oryza sativa; identical to SEQ ID NO: 16693
  Clone ID: TF_OsC98722_1.pep

SEQ ID NO: 24139 - protein, 231 aa, Oryza sativa
  Clone ID: TF_OsC144448_1.pep
PPQDGAYRALPPASYPVRTPTICALSTEALVPVKAKRSKRSRATAWSLSGAPPFSDSTSSSSTTTTSSCSSSASFSSFSPLLKFEWHPLGGTSDLPDDHLLPPGKKSKHGKNGKNKPKKRGRKPKQLPPHPSGAAASAPAPGDRRCSHCGVQKTPQWRAGPEGAKTLCNACGVRYKSGRLLPEYRPACSPTFVSAIHSNSHRKVLEMRRKKEVGSGLLTAAAAAAPAVASF

SEQ ID NO: 24140 - protein, 386 aa, Oryza sativa; identical to SEQ ID NO: 16697
  Clone ID: TF_OsC54448_1.pep

SEQ ID NO: 24141 - protein, 387 aa, Oryza sativa; identical to SEQ ID NO: 16696
  Clone ID: TF_OsC54448_2.pep

SEQ ID NO: 24142 - protein, 659 aa, Oryza sativa
  Clone ID: TF_OsC155692_1.pep
MSLRPSERMGIRQKGYKASMDAAEGRRRREDITVILRKADRDRALKEKRRRPTATAAAEGLPQAAHSSAIEKKLESLPMMVQGLYSDDSSMQLESTTQFRKLLSVDHCPPIDEVIRSGVLPRFVEFLTREEYPQLQFEAAWALTNIASGTAANTMAVIEHGAVPIFVKLLSSPREDAVWALGNVAGDSTKCRNLVLMHGAMLPLLQQLNEHAKLSMLRNSAWTLSNFCRGKPQPDFKHVEPALPVLRELILSQDEEILTDSCWALSYLSDGSNDNIQAVIETGVCDWLVELLSHPSPVVLIPALRTVGNIVTGDDAQTQSKLTKTADTGQNYLQNYGFNPQYYGTTDLVLTLSMCIVGHPQALPCLFNLLTTTQKKSVKREACWTISNITAGTKEQIQAVIDSNIIAPLLHLLQHAEFDVKKEAVWAISNATSGGTFNQIEYLVSQGCIKPLCDLLVHQDSKTVLTCLEALDNILRVGEAKKNLGACNMNIFVPMVDEADGLDKIEDLQNHDNVEIYNKAVYVLESYWVQEDDQQPFLIPSVSESESDNEMFQFGSFGKVSVKCPIWMEMHRSCLFRGLSRIGESSYPSHGLVLLTCYEAAVRRLVHMDYGSPHKGVGTGNWSVGEGHTLACVVGLAISFAFLPLARTRLPVLLYSQPP

SEQ ID NO: 24143 - protein, 450 aa, Oryza sativa
  Clone ID: TF_OsC52874_1.pep
MGKQGPCRHCGVTSTPLWRNGPPDKPVLCNACGSRWRTKGSLTNYTPMHARDDIDAEEPRASKLKPPTLKLKEQKQLKKNPSHITMENGPFSDQNFRKMGDPDLSNRSGSGSALSYSESCAPYGTADASEMTASAQSHAWESLVPSKRRSCVTRPKPSQMEKLAKDLNSIMHEEQLLYLSGSSEEDLIYHSATPVDSFEMGYGSMLLRPNSKSLEEESEASSIPADNKSYITSESYSGSVSFVYSESKATSNQNVITEQPKKFLVQTSDNARRANLHTENQDTLENANSPLVSLHMEGKDSEETRVKTSASNRLTKSTMNPLKRPHDTHFQSSVELRGTMRSPKRVSKYGDAMGLKCQASFMPKPGNGKDLACSDRALNLFMLPPDKLSMLVPPQYANTDSDQDLLLDVPLNARHPEAELLCQPSQLSSVAHSSTSEAGNAGGEGRLKQP

SEQ ID NO: 24144 - protein, 95 aa, Oryza sativa
  Clone ID: TF_uC-osflcyp057d06b1.pep
SEEGRPPYAFECHHCGVNAKATPMMRRGPDGPRTLCNACGLMWANKGMLRDLSKAPPTPIQVVALVNDGNGSAAAPTTELEIPAPATVNGHESST

SEQ ID NO: 24145 - protein, 332 aa, Oryza sativa; identical to SEQ ID NO: 16700
  Clone ID: TF_OsC51531_1.pep

SEQ ID NO: 24146 - protein, 284 aa, Oryza sativa
  unsure (1)..(284): unsure at all Xaa locations
  Clone ID: TF_OsC204425_1.pep
SVAGFGTSFSFFLSFLHNYSLLFSPLLLPFAPRNAAKLRFACLHATICARHSDRSIDRSMGSSDQXGDRDRRGGSGGGGGGWEAVLRRMRRHHHAHVARRPDRPXSLCNACGIRYRKKRRQELGLDKKQQQEHHPHHHQQQQQQYQRQQQQQQQEDHSDAASSVKDSSSSSSNKSSSLQVISEIVISRSKSDCEGAMEGNCVPLKRLVQQVDFLLSSTGITESCQCVAVSCANQMGLQKAANVLLFLVPIRVLTMENNSCDILHIIRIIGRGCGIESKTRIIDR

SEQ ID NO: 24147 - protein, 375 aa, Oryza sativa; identical to SEQ ID NO: 16677
  Clone ID: TF_OsC140039_1.pep

SEQ ID NO: 24148 - protein, 327 aa, Oryza sativa
  Clone ID: TF_OsC156502_1.pep
MSGHHEAKPYQPRRGPAPADEEAAPAAAADEAEAEAEVEAMERYEQEQEYEEGEEGEEEEYEGGEGVPMDADASAAAVAGMDPHGEMVPVAGGEAGGGYPHVASNTLTLSFQGEVYVFESVSAERVQAVLLLLGGRELAPGSGSVPSSSAAYSKKMNFPHRMASLMRFREKRKERNFDKKIRYTVRKEVALRMQRNRGQFTSSKSKAEEATSVITSSEGSPNWGAVEGRPPSAAECHHCGISAASTPMMRRGPDGPRTLCNACGLMWANKGTMREVTKGPPVPLQIVPAATNDVNGIVEATGVEQHNSAVEEAVSAANGHESQSGVA

SEQ ID NO: 24149 - protein, 1484 aa, Oryza sativa; identical to SEQ ID NO: 16679
  Clone ID: TF_OsC64218_1.pep

SEQ ID NO: 24150 - protein, 129 aa, Oryza sativa
  Clone ID: TF_OsC64218_2.pep
ESLSPGCELASQGSGQDFLSRESKCQNCGTSEKMTPAMRRGPAGPRTLCNACGLMWANKGTLRNCPKAKVESSVVATEQSNAAVSPSGIDNKELVVPNPENITASHGEVMGDSTPANEAEIGAPKAQSQ

SEQ ID NO: 24151 - protein, 271 aa, Oryza sativa; identical to SEQ ID NO: 16680
  Clone ID: TF_OsC406373_1.pep

SEQ ID NO: 24152 - protein, 368 aa, Oryza sativa
  Clone ID: TF_OsC321679_1.pep
MEELLGLVRGFVDVLVLAGGRTSSGAAATWRSGDVKKALQWALFFEEVFKNLRDDGQYDESASELDAALVQLASSPNFPKGIEDIRSKTLAMARELVVKHFLKTTNAENLGAVLQAVVEMDMDGISASGECNVCQEYKLDSGSCISLAERELNTLLKSMKKDSFDSAGSTLCTSATAQKTQIIDKFILWKQWKAKCLSYLLDERTIRIMSGTNMIFNAPKEQWMGLFEPLKVSADSSQSGIIEVMELCLLGLVARQWNSLIESIMSHTFSSFPISKQYADLHQLLQGTTQDECQDKLLGFKEMDICEYARQSLESEPYILWLLPPVLTAAAMPPRSSLFKIYLVEIDKQLGEAASKDRKCNCRADVID

SEQ ID NO: 24153 - protein, 291 aa, Oryza sativa; identical to SEQ ID NO: 16702
  Clone ID: TF_OsC95862_1.pep

SEQ ID NO: 24154 - protein, 307 aa, Oryza sativa
  Clone ID: TF_OsC159_1.pep
MYQPNPISSSGQTHGNPTAHEQMELGNNAIVPSNGGNNNPNMAARQRLRWTNELHDRFVEAVTQLGGPDRATPKGVLRIMGVPGLTIYHVKSHLQKYRLAKYIPDPSADDNKDEDKDPRNLLSALEGSSGMQISEALKLQMEVQKRLHEQLEVQRQLQLRIEAQGKYLQKIIEEQQRVIGAGASRATSSEQLPDSEKTNPPTPVPISESPVQGAPHSKNSQSQVEPTKSPSHDDALPCGEPLTPDSSCRPGSPTLSPKHERAAKRQRGSDAGDVTAFADGEFVLPPGIFESSTGSEFQECSMPYSGH

SEQ ID NO: 24155 - protein, 293 aa, Oryza sativa
  Clone ID: TF_OsC159_2.pep
VPSNGGNNNPNMAARQRLRWTNELHDRFVEAVTQLGGPDRATPKGVLRIMGVPGLTIYHVKSHLQKYRLAKYIPDPSADDNKDEDKDPGNLLSALEGSSGMQISEALKLQMEVQKRLHEQLEVQRQLQLRIEAQGKYLQKIIEEQQRVIGAGASRATSSEQLPDSEKTNPPTPVPISESPVQGAPHSKNSQSQVEPTKSPSHDDALPCGEPLTPDSSCRPGSPTLSPKHERAAKRQRGSDAGDVTAFADGEFVLPPGIFESSTGSEFLQAYAHLDAPIFGTKKSLQPCQYVNL

SEQ ID NO: 24156 - protein, 691 aa, Oryza sativa
  Clone ID: TF_OsC19751_1.pep
MAPVEDGGGVEFPVGMKVLVVDDDPTCLAVLKRMLLECRYDATTCSQATRALTMLRENRRGFDVIISDVHMPDMDGFRLLELVGLEMDLPVIMMSADSRTDIVMKGIKHGACDYLIKPVRMEELKNIWQHVIRKKFNENKEHEHSGSLDDTDRTRPTNNDNEYASSANDGAEGSWKSQKKKRDKDDDDGELESGDPSSTSKKPRVVWSVELHQQFVNAVNHLGIDKAVPKKILELMNVPGLTRENVASHLQKFRLYLKRIAQHHAGIANPFCPPASSGKVGSLGGLDFQALAASGQIPPQALAALQDELLGRPTNSLVLPGRDQSSLRLAAVKGNKPHGEREIAFGQPIYKCQNNAYGAFPQSSPAVGGMPSFSAWPNNKLGMADSTGTLGGMSNSQNSNIVLHELQQQPDAMLSGTLHSLDVKPSGIVMPSQSLNTFSASEGLSPNQNTLMIPAQSSGFLAAMPPSMKHEPVLATSQPSSSLLGGIDLVNQASTSQPLISAHGGGNLSGLVNRNPNVVPSQGISTFHTPNNPYLVSPNSMGMGSKQPPGVLKTENSDALNHSYGYLGGSNPPMDSGLLSSQSKNTQFGLLGQDDITGSWSPLPNVDSYGNTVGLSHPGSSSSSFQSSNVALGKLPDQGRGKNHGFVGKGTCIPSRFAVDEIESPTNNLSHSIGSSGDIMSPDIFGFSGQM

SEQ ID NO: 24157 - protein, 257 aa, Oryza sativa
  Clone ID: TF_OsC60587_1.pep
MMYHAKKFSVPFGPQSTQSNDHMSNIGAFGGSNMGSPANPAGSGKQRLRWTSDLHNRFVDAIAQLGGPDRATPKGVLTVMGVPGITIYHVKSHLQKYRLAKYIPESPAEGSKDEKKDSSDSLSNTDSAPGMQINEALKMQMEVQKRLHEQLEVQRQLQLRIEAQGKYLQMIIEEQQKLGGSLKACEEQKLPHSPPSLDDYPDSMQPSPKKPKMDNLSPDSVRDVTQSDFESHLIGPWDQEAAFRVDEFKADPGLNKS

SEQ ID NO: 24158 - protein, 552 aa, Oryza sativa; identical to SEQ ID NO: 16728
  Clone ID: TF_OsC14889_1.pep

SEQ ID NO: 24159 - protein, 852 aa, Oryza sativa; identical to SEQ ID NO: 16727
  Clone ID: TF_OsC77895_1.pep

SEQ ID NO: 24160 - protein, 331 aa, Oryza sativa; identical to SEQ ID NO: 16729
  Clone ID: TF_OsC847_5.pep

SEQ ID NO: 24161 - protein, 432 aa, Oryza sativa
  Clone ID: TF_OsC353740_1.pep
MLQRNLPNLSLRISPPAVSSAAAPVSSGTPTTAARTTLPTGVITDAEGGGEVAAFFGNPSSGSEPPGLSLGLGPTTPAHADAGGGRHGDHHLQPQGCAPFKRAAARASQLPAGSKRSVRAPRMRWTTALHARFVHAAAPPGGRGGATPKSVLELMNVKDLTLAHVKSHLQMYRTVKSTDRSSHIASGEAQLQQQAGMEVAMEAAAGGGGNGGGGGGGVVLPMMPACDDMVGICSSPAPPAAATSSAAAYFLCATTTSTATAPLAVVPSPPAPTIPTRFHECIYGDVDVVIQSISMLINVLLHGIDKSCLALTFLEHRRTDQTPALEKGVAIVDSLHRCQKHNYSPVLQDALHQGAEEDHLITGNLPMGGASAQASIEAMATTNSSSPASSSPSLASLEQLLPEDSFAPNLEISLGRHNWNMDHPEELSLKYL

SEQ ID NO: 24162 - protein, 432 aa, Oryza sativa; identical to SEQ ID NO: 16731
  Clone ID: TF_OsC140091_1.pep

SEQ ID NO: 24163 - protein, 143 aa, Oryza sativa
  Clone ID: TF_jC-osleLIB3474027c12b1.pep
MFPSSSPSPSPSSSKKQQQLSGGVGVGGAAAAASSNDRPPLCVQGDSGLVLTTDPKPRLRWTVELHDRFVDAVTQLGGPDKATPKTIMRVMGVKGLTLYHLKSHLQKFRLGKQHKDFNDHSVKDAMDMQRNATSSLGHYGKEA

SEQ ID NO: 24164 - protein, 235 aa, Oryza sativa
  Clone ID: TF_OsC282077_1.pep
MGARGRRDRMGSAGGCGGSPPVVVRRYNRSEAPRMRWPEELHRRFVHAVRRLGGCHEATPKRIMQLMGAKGVSISHVKSHLQMYRNSNNSSNVNRRHPVTPQIDWTTTAQQDEQQRRQMSSFSFLATRTVPAAGIGSHSHQRPHRRQALHAGDDDGCELTLSISGGAAEESKDGGSSITDDDDELLIQPPAPNIINDDGSTRHGHRHPFACSTQPLPPAAINLELTISSPCCWLT

SEQ ID NO: 24165 - protein, 556 aa, Oryza sativa; identical to SEQ ID NO: 16732
  Clone ID: TF_OsC50227_1.pep

SEQ ID NO: 24166 - protein, 107 aa, Oryza sativa
  Clone ID: TF_OsC11289_2.pep
MSAAAGGGSSAGLVLTADPKPRLRWTADLHDRFVDAVAQLGGPDKATPKTIMRTMGVKGLTLFHLKSHLQKYRLGKQSGQEMAEPSKDASYIFGRSWGRGNTRSRGT

SEQ ID NO: 24167 - protein, 246 aa, Oryza sativa
  Clone ID: TF_OsC11289_3.pep
MFPGLIHHHRLLDADVGGGGGGSSAGLVLTADPKPRLRWTADLHDRFVDAVAQLGGPDKATPKTIMRTMGVKGLTLFHLKSHLQKYRLGKQSGKEMAEQSKDASYILGAQSGTNLSPTVPTPDLKESQELKEALRAQMEVQRKLHEQVEVQRHVQIRMEAYQNYIDTLLEKACNIVSEQLNGFSISDHDLTSAGVMLSSSDTLSPSIFHQLSVSSISLHSPGGKSSPFAADADLFFQKAPEKRKSY

SEQ ID NO: 24168 - protein, 455 aa, Oryza sativa
  Clone ID: TF_OsC1962_1.pep
MLAVSPAMCPDIEDRAAVAGDAGMEVVGMSSDDMDQFDFSVDDIDFGDFFLRLEDGDVLPDLEVDPAEIFTDFEAIATSGGEGVQDQEVPTVELLAPADDVGVLDPCGDVVVGEENAAFAGAGEEKGGCNQDDDAGEANADDGAAAVEAKSSSPSSTTSSSQEAESRHKSSSKSSHGKKKAKVDWTPELHRRFVQAVEQLGIDKAVPSRILEIMGIDSLTRHNIASHLQKYRSHRKHMIAREAEAASWTQRRQIYAAGGGAVAKRPESNAWTVPTIGFPPPPPPPPSPAPMQHFARPLHVWGHPTMDPSRVPVWPPRHLVPRGPAPPWVPPPPPSDPAFWHHPYMRGPAHVPTQGTPCMAMPMPAARFPAPPVPGVVPCPMYRPLTPPALASKNQQDAQLQLQVQPSSESIDAAIGDVLSKPWLPLPLGLKPPSVDSVMGELQRQGVANVPPACG

SEQ ID NO: 24169 - protein, 623 aa, Oryza sativa
  Clone ID: TF_OsC50788_1.pep
MSRPQPPPLLPVLPELGGLQALTSSSASLATWLRGGGREEVAAINLDGGDAVILVVVPPHLAGHGGQGRPPHYSIERRRSQPQFECHAYVKGVKYLVFEFRGVIRLTAIAHGVVGDVFLGSEAPVVTSSISKYAGLVFGGAHRDVSALGEEKLSFFGKSSQQKRISTNQLYNSGIPVTVPSPLPAIPATLDENIPRIPDGQNVPRERELRSTPMPPHQNQSTVAPLHGHFQSSTGSVGPLRSSQAIRFSSVSSNEQYTNANPYNSQPPSSGSSSTLNYGSQYGGFEPSLTDFPRDAGPTWCPDPVDGLLGYTDDVPAGNNLTENSSIAAGDELAKQSEWWNDFMNYDWKDIDNTACTETQPQVGPAAQSSVAVHQSAAQQSVSSQSGEPSAVAIPSPSGASNTSNSKTRMRWTPELHERFVDAVNLLGGSEKATPKGVLKLMKADNLTIYHVKSHLQKYRTARYRPELSEGSSEKKAASKEDIPSIDLKGGNFDLTEALRLQLELQKRLHEQLEIQRSLQLRIEEQGKCLQMMLEQQCIPGTDKAVDASTSAEGTKPSSDLPESSAVKDVPENSQNGIAKQTGARMFLLELNIQTTVPQTRQRRFRVNGMIFRFQKAAQANLH

SEQ ID NO: 24170 - protein, 233 aa, Oryza sativa; identical to SEQ ID NO: 16736
  Clone ID: TF_OsC245016_1.pep

SEQ ID NO: 24171 - protein, 539 aa, Oryza sativa
  Clone ID: TF_OsC1963_1.pep
MLEVSTLRSPKADQRAGVGGHHVVGFVPAPPSPADIADEVDAFIVDDSCLLEYIDFSCCDVPFFHADDGDILPDLEVDPTELLAEFASSPDDEPPPTTSAPGPGEPAAAAGAKEDVKEDGAAAAAAAAAADYDGSPPPPRGKKKKDDEERSSSLPEEKDAKNGGGDEVLSAVTTEDSSAGAAKSCSPSAEGHSKRKPSSSSSSAAAGKNSHGKRKVKVDWTPELHRRFVQAVEQLGIDKAVPSRILELMGIECLTRHNIASHLQKYRSHRKHLMAREAEAASWTQKRQMYTAAAAAAAVAAGGGPRKDAAAATAAVAPWVMPTIGFPPPHAAAMVPPPPHPPPFCRPPLHVWGHPTAGVEPTTAAAPPPPSPHAQPPLLPVWPRHLAPPPPPLPAAWAHGHQPAPVDPAAYWQQQYNAARKWGPQAVTPGTPCMPPPLPPAAMLQRFPVPPVPGMVPHPMYRPIPPPSPPQGNKLAALQLQLDAHPSKESIDAAIGDVLVKPWLPLPLGLKPPSLDSVMSELHKQGIPKVPPAASGAAG

SEQ ID NO: 24172 - protein, 155 aa, Oryza sativa
  unsure (1)..(155): unsure at all Xaa locations
  Clone ID: TF_OsC1713_3708.pep
PCHRHGRRRRRRLPQPPRQHIGRRCTALLLLLRRRQKCKFHKYKCDNQMRQGDERFFTEVRKLAGFLLPVEASQTLPLNHEATARPLRQGVGKMDEHKAQVGGRSDRACAASQTGLMXGQTAVVAPVRPARARRSDCQCGRSGCPCSGRTQWLHR

SEQ ID NO: 24173 - protein, 885 aa, Oryza sativa
  Clone ID: TF_OsC7848_1.pep
MATRGEAAAAAAADRDMELFRSGSAPPTVEGAMASAAAAAGDVFLDDELRADPVYQSYYYSNAHLNPRLPPPLLSKEDWRSAQHRLRSSALGGIGDGRRQPAAAAQGDGLVGLPGIDLDRQGSFSSIFQFHLIQSKESSYQLDMGKQGADRNISDFLDSSRPQYALHRETSRAMGGLQSDSNIQSLAEVQNNDSSAHTYASLLGSSLSRSASPDPELVRRVPSPCLPPIGVKVSADDKKNNGGSSSFRRSSSAIGESDNLIAALSGMNLSSSGAASGQQTVTQSELYQDVDNVRKFLFDRQGDQSNGNQQHSYMKHPEQGHFKAPDGYSANSPNSSMIRNQINAASFTSFDNLSAGSGFASPRIGSRSPGGTLSSRQNLVGGSNFLNYNGIGSPNAATSLQTAIDPSYIQYLQAAEIAAQLAASCDDPLMASGHLGSSYMDLLGPQKAYASPLLQSQKNCGYYGNLGFGLGYSGSPLMSPVLPSSPAAPGSPLRHGERSMRMQSGIRNFGGSFGSWNPDLGGKMNINMMPSLLEEFKSNKSKSYELSEIAGHVVEFSADQYGSRFIQQKLETASTEEKDMVFSEIMPQALTLMTDVFGNYVVQKFFEHGSPTQIKELADQLIGRVLALSLQMYGCRVIQKAIEVVGLDQQTKMVAELDGHVMRCVRDQNGNHVIQKCIECIPQHAIQFIVSTFYGQVVMLSTHPYGCRVIQRVLEHCDDPTTQQIMMDEILQSVCLLAQDQYGNYVVQHVLEHGKPHERSAIIEKLIGQIVQMSQQKFASNVIEKCLAFGNPVERQILISEMLGSTNESEHLEVMMKDQFANYVVQKVLETCDDQQREAILTRIKAHLNTLKKYTYGKHIVARVEKLVAAGEKRLGLQPACTSAA

SEQ ID NO: 24174 - protein, 322 aa, Oryza sativa; identical to SEQ ID NO: 16739
  Clone ID: TF_OsC47644_1.pep

SEQ ID NO: 24175 - protein, 253 aa, Oryza sativa; identical to SEQ ID NO: 16740
  Clone ID: TF_OsC12030_2.pep

SEQ ID NO: 24176 - protein, 84 aa, Oryza sativa
  unsure (1)..(84): unsure at all Xaa locations
  Clone ID: TF_LIB4370-035-R1-N1-F12.pep
NDEVKSHLQKYRLHNRKSPGTASASHSIVLVGDLWASQEVSCSQSGSPQGPLQLSGSGVAVSAATRPXXSCCEDDDKSEGYVRK

SEQ ID NO: 24177 - protein, 1153 aa, Oryza sativa
  Clone ID: TF_OsC7848_2.pep
MAMRGEPWRRQEGEQAQAEADRERELDLFRSGSAPPTVEGSMGALHAAAAADVFLEDELRADPAYHSYYYSNGNINPRLPPPLLSKEDWRSAQRLRPGLGGIGDGRKPRGGGGGRGGGGAGGMGPGDGLIGMPGLEIGRQNSFSGFGTIKRLSVAKVLVLKLLIILFKAKEITSDLYMLQDDSYQHDTDRQGANCNGTDLLSSSKVQYGLHRETGAISGLHSDSKAPCLPENQNESSHSYASIIGSSLSRSASPDPELVRRVPSPCLPPIGVKLGATDKKNNVGSSSFNCSSPNIIESDDLVSALSGMNLSSSRAMNGNTMDQSKLHQDVDDVRKFLFDQYMDQTNGNQRHSYMKRSEQGHVKVPQEYSGASMNPSVMRSQINAGGFTSFNNSSVGSGFASPRLGSRSPGGSLSSRQNLTGASNLPNYVGIGSPTAASAHQMPVDPLYVQFLRAAEIAALAANCEDPLMDRANLGGSYMDLFGPQKAYLSPLLQSQKQYSYYGNLGVGLGYAGNSLTSPILPSSPGGPGSPLRHGDRSMRYPSGMRNFGGSFGSWNSDLGGKMEANLVPSLLEEFKSNKSKSYELSEIAGHVVEFSADQYGSRFIQQKLETASTEEKDMVFAEIMPQALTLMTDVFGNYVVQKFFEHGSSAQIKELADQLIGRVLALSLQMYGCRVIQKAIEVVDLDQQTKMVAELDGQVMRCVRDQNGNHVIQKCIECIPQHAIQFIVSTFYGQVVMLSTHPYGCRVIQRVLEHCDDPKTQQIMMDEILQSVCLLATDQYGNYVVQHVLEHGKPHERSAIIEKLIGQIVQMSQQKFASNVIEKCLAFGNPVERQVLIGEMLGSSNESEHLEVMMKDQFANYVVQKVLETCDDQQREMILTRIKAHLNTLKKYTYGKHIVARVEKLVAAGENPSIMGEEAPEEYELGGGEDERVMEWETGLPGADELTPLSQPLVPAGLAAAFRIPPEPGRTLLDVHRASAATVSRLRRASSSSSSSFPAFASKGAGTGADEAESGGGADGGNGNTNNSSSKRARLVWTPQLHKRFVEVVAHLGMKNAVPKTIMQLMNVEGLTRENVASHLQKYRLYVKRMQGLSNEGPSPSDHIFASTPVPHASLHDQVPSPYHPHPHHHSYNNAAYAATVSSYHHYHHANH

SEQ ID NO: 24178 - protein, 136 aa, Oryza sativa
  unsure (1)..(136): unsure at all Xaa locations
  Clone ID: TF_uC-osflcyp085b05b1.pep
MYEPKPFSSIVLAHNDPVSHNQQIERINNNVVSNSGGNSSNSNFAARQRLRWTDDLHDRFEDAVTQLGGPDRATPKGILRIMGVQGLTIYHVKSHLQKYRLAKYIPDPTADGAKSDXKDLGDLLADIESSXGMDIG

SEQ ID NO: 24179 - protein, 86 aa, Oryza sativa
  Clone ID: TF_uC-osrocyp028f03b1.pep
MSNIGAFGGSNMGSPAHSAGSGKQRLRWTSDLHNRFVDALAQLGGPDRATPKGVLTVMGVPGITIYNVKSHVQKYRPAKYIPQSSG

SEQ ID NO: 24180 - protein, 324 aa, Oryza sativa
  unsure (1)..(324): unsure at all Xaa locations
  Clone ID: TF_OsC102690_1.pep
FPSYGKCRQGGGGGGRRRRCTGGGGQQLRELDDEQXTEEEGSGESRRRTSSSSSVRPYVRSKNPRLRWTPELHLSFVRAVDRLGGQDRATPKLVLQLMNVRGLSIGHVKSHLQMYRSKKIDESGQVIGGESWRSDDHLQMQGGGHGGQAYNLGHLSLPALHHRSITAGSGTIFQSRFGNSWSPWRCHGSYWLPAGHHLLVGSKPYYPPAAEAEAPFRRSSARYVARANTSNHPDFVQGSSSSPDDNIMNHQRPVLKEMICSEGSNHQEGPLNLDLSLDICPRGEKRKRECSWRKQEEDHDHATVAIGADQEAESCATGLSLSLF

SEQ ID NO: 24181 - protein, 166 aa, Oryza sativa
  Clone ID: TF_jC-osroLIB3475017g11b1.pep
PTRPKNPRLRWTPELHLSFVRAVDRLGGQDRATPKLVLQLMNVRGLSIGHVKSHLQMYRSKKIDESGQVIGGESWRSDDHLLVGSKPYYPPAAEAEAPFRRSSASEGSNHQEGPLNLDLSLDICPRGEKRKRECSWRKQEEDHDHATVAIGADQEAESCATGLSLS

SEQ ID NO: 24182 - protein, 355 aa, Oryza sativa; identical to SEQ ID NO: 16745
  Clone ID: TF_OsC43828_1.pep

SEQ ID NO: 24183 - protein, 507 aa, Oryza sativa; identical to SEQ ID NO: 16750
  Clone ID: TF_OsC331400_1.pep

SEQ ID NO: 24184 - protein, 400 aa, Oryza sativa; identical to SEQ ID NO: 16756
  Clone ID: TF_OsC143589_1.pep

SEQ ID NO: 24185 - protein, 543 aa, Oryza sativa; identical to SEQ ID NO: 16757
  Clone ID: TF_OsC226770_1.pep

SEQ ID NO: 24186 - protein, 1196 aa, Oryza sativa; identical to SEQ ID NO: 16758
  Clone ID: TF_OsC4702_1.pep

SEQ ID NO: 24187 - protein, 2135 aa, Oryza sativa
  Clone ID: TF_OsC206290_1.pep
MAPPRELDLSDEVEGEEDGTTDFVFRLAGDPIPLLPTTSSPLPLFDLQSPPSRPLAVSNRRAAVFLAHPNGFMAATTKALIEASKEAREKGKSTTRCARDCCVADIPLPGVSLLELSRDESVLAACAGSVIHFFSASSLLTDKDVEPLSSCTLEGSSTVKDFKWLNHASKAFIVLSKDGLLSQGSLGEGLKDIMENVDAVDCCKEGTHIVLSKKNTLNILSSDFKEICCMPLLFQLWSDDSDSDDASIKVDSIGWVRDDSIVVGSVRLNEEGNEEGYLVQVIRSGGNTFFENSSKSVVFTYVDFFRGIMDDVLPSGVGPNLLLGYLHRWDLMVTSNKKSIDEHISLLKWSSATDDKKTVVYLEMLEDKYSPRIDLQENGDDNVILGFGVENVSLFQKITVTVGPEQKEVAPQHILLYLTGEGKLNIYYLARISDPSELPQTKLSAIEDSDVMKEISPVTVSGKEFTPSATSSLDKSIRPDGAELSSVQPDRDLHGSTDMKNSSPVSKAKEIVASSPAPASFLAPASNLKPGISFSFSTANSVSLSPAGSNTSSELGSSWQQSSSSNFVNNQLGKGSIPSTQPVGAFGGSQNSKKDGNLSFNKSSVFTSDGSTLVKPGERNEPGFGSHPLQSSYTTDKKVPSSVGLSSKSSPSISPIKPSSAGPSSTGFRTGNLEAFPTSRGSPLPQESIDKPHDRTHAVVDHSKNFKLGAMFDTEQDLSKKFYSINDMTKELDTLLSYIEKDGGFRDACITFQERPLSMFEGDLQNFLELLQIFKNKIAEQCSRVEDLRNKMFQGTSTTRVSARQAYMKGIVDQSSDTQYWDIWNRQKLSPEFEAKRQNILKANQNLTNQLVELERHFNNLEMNKFGETGRVASSRRAIYSSKARSSQTQISSVYNALNSQLAAAEQLSDCLSKQISALNISSPSTKRGSVAKELFESIGLDHTMDAAKFSGGTPSKSVKRYPSTREHITSISGPSKTAEPETARRRRESLDRSLASLEPQKTTVKRIAQQQRLKISSDLPFRSNKKIFDSQMAAMSQEKSSSSPTSSIVESYANKLHYPSEVLHEKTKPSGPQHNTLFKWVKESAGPSQGPQHKYPELPGQLKSSDQTPKLGSSSPLSFSYSHKDVWDNISSSNVPSSGTTHTMPKSSTLTFKTTVIPKTNTSTLPDLSPLMTGSKFSLSPLTVKTLSGDSGGASSIITKNKQGGQAMPYLGTTKGLDVSPQNMGGAFRDLNKPSLSPEPPKSALLQGKTVQLGKITETVQSPVKAKPEVAFQPPAFPPTPVAQSSPCSIKPTVPSSATSSSSTMQESAAKTSDVLSPTGPSILPSKESMTKPSSPLPDGTISSSLLSIPMPVKESSTGLNKIVSKPEVVTSEVTGTTVSASTSSSVPITEGKPSSIPATSGSLPSIPVSAPKVVPVSAESVVVTSTGKDVGPSNPSSDEDDMEEEVPSASSDLNLGALGGFGLGSVPSSSPPKSNPFGNSFTTSDNKSSGSSFTLTTSPGQLFRPASLSIPSSQPAQSSQSTSSSTFSSAFSSGLSGFGQSAQIGSAQQSGFGQPSQIGAGQQAGFGQPAQIQSGFGQPAQVGVAQQSGFGQPAQIGTAQQSGFGQPAQFGAQQALGSVLGSFGQSRQLGSFGAGGFGGFASASASGGFSSNSGFAGGATGGGFSAAAAPAGGGFAAAATGGGFAALASKGGGFAAAASSGGGFGGAAQGSGFSSVALMHAPKIVLRALAVAIVELPAPGIDTISQEHFAYLSTSDIRTWVSHQDSLTNLDEIVSNHPTTSRQTFQCWPRSGQMMYHQQQVQSDSQHLSSRPGLPPEKQFLLQGGADSSSGLVLSTDAKPRLKWTSELHERFVEAVNQLGGPDKATPKTIMRLMGIPGLTLYHLKSHLQKYRLSKNLQSQANASRAQGVLGCSTTEIDKPCEGNGSPASHLDLETQTNSSSMHINEALQMQIEVQRRLHEQLEVQRHLQLRIEAQGKYLQSVLEKAQEALGTIAVAETAATANASSSKRLQNEHTQLHHHQQQQQVGDGSVDSCLTACDCEGSHHSRSHGHRGEQDILSIGLPPFEPAAARSGKEHHYLLFPNEPSRRRSCSDERRREMSTLQASELDLSINGRSSSHSHRRENIDLNGAGWS

SEQ ID NO: 24188 - protein, 417 aa, Oryza sativa; identical to SEQ ID NO: 16753
  Clone ID: TF_OsC359_6631.pep

SEQ ID NO: 24189 - protein, 296 aa, Oryza sativa
  Clone ID: TF_OsC14903_1.pep
MSSQQQHAGEAPASAAAAARARLRWTGQLHERFVLAVAELGGADRATPKSVLRAMAVPGLTLYHLKSHLQKYRQAVSRGGNGGGGGSGSLNDRSSSSERQPADHDGDSAADEPRTIAYDGDSDGDAKEGLRDSSRSMVQMQREVQRKLQEQIEVKRHLQLRMEAQGRYLQSVLRRAQQVLADHSLASSPEAATAELSELASAVDIECMSSSSPPRHHRQSAATDSCVTTTSSSEAESKAAGSKRLHTSDCTVEQPVQGKRAFNFLQRHNQADQEEEQEEEYAGAEDGSSSEIDLNS

SEQ ID NO: 24190 - protein, 642 aa, Oryza sativa; identical to SEQ ID NO: 16751
  Clone ID: TF_OsC147013_1.pep

SEQ ID NO: 24191 - protein, 111 aa, Oryza sativa
  Clone ID: TF_rsicek_6595.y1.abd.pep
MGSGGGGCGRNGAVRQYIRSKVPRLRWTGELHCSFVQAIEFLGGQDKATPKLILQLMGVKGLTISHVKSHLQMYRCSRLVSHGTGRRSEMQPQLQRKHSCGADEQVPREFL

SEQ ID NO: 24192 - protein, 181 aa, Oryza sativa
  Clone ID: TF_LIB3434-018-P1-K1-D7.pep
VLQLMNVRGLSIGHVKSHLQMYRSKKIDESGQVIGGESWRSDDHLLVGSKPYYPPAAEAEAPFRRSSARYVARANTSNHPDFVQGSSSSPDDNIMNHQRPVLKEMICSEGSNHQEGPLNLDLSLDICPREKRKRECSWRKQEEDHDHATVAIGADQEAKSCATGLSLSWSDHVPVERCTIT

SEQ ID NO: 24193 - protein, 348 aa, Oryza sativa
  Clone ID: TF_OsC16131_1.pep
MGLDVGEIGMGLDLSLDLKMFAARSAVRMAAAAAKEATGVEACIRSLEEERRKIEMFRRELPLCARLLADVIELMKEEAGKRRKDGDDAEAKAEDGDKTKWMSTAQLWVDSRGSDADSENDRRSGSTSPASRLLGGAEESSSRAVAPPPYFRREERVVLRPAMPLLPPASHRSPPPAAAAAATAAGDDHRHVVASSFATAVPSPVPAALSLQAQAQQQQQQARKSRRCWSPELHRQFVAALQQLGGPQVATPKQIREVMKVDGLTNDEVKSHLQKYRLHNRKSPGTASASHSIVLVGDLWASQEVSCSQSGSPQGPLQLSGSGVAVSAATAGDSCCEDDDKSEGYVRK

SEQ ID NO: 24194 - protein, 130 aa, Oryza sativa
  Clone ID: TF_OsC53221_1.pep
MYHHQQQLQSHNQLLPSRQSFPSERHLLMQGGSVSGESGLVLSTDAKPRLKWTPELHERFVEAVNQLGGPEKATPKTIMRLMGVPGLTLYHLKSHLQKYRLSKNLHAQANAGNVKNALVCTTATEKPSEA

SEQ ID NO: 24195 - protein, 300 aa, Oryza sativa; identical to SEQ ID NO: 16707
  Clone ID: TF_OsC98613_1.pep

SEQ ID NO: 24196 - protein, 696 aa, Oryza sativa
  Clone ID: TF_OsC8440_1.pep
MLLGPRVMEERRGLMGRERDQFPVGMRVLAVDDDPVCLKVLETLLRRCQYHVTSTNQAITALKLLRENRDMFDLVISDVHMPDMDGFKLLELVGLEMDLPVIMLSVNGETKTVMKGITHGACDYLLKPVRIEELRNIWQHVVRRKFGNRERNNLDFSKECNKPQSADTDHGPYQPTCGSSDQNGRSSRKRKELHGEDDDEGDDNDYQENDEPSAAKKPRVVWSVELHRKFVAAVNQLGIDKAVPKRILELMNVEKLTRENVASHLQKYRLYLKRLGAVASQQASIVAAFGGRDPSFLHIGAFEGLQSYQPFAPSAALPSFNPHGLLTRTSAAAAFGLQELAAPSSTIQTSTGNVTVGHCLEENQQANLAQGLTAAIGQPQLQQNWIHQEGNGLSDVFSGSSLTNTLSSTLQRVPSSSLPPQELLECKQAKVSMPPSIRIPPSSSALLERTLGVSTNLGDSSISQQGALPIDGGFSADRLPLHSSFDGAVATKLDTSLAASQREIGQQGKFSVSMLVSPSDNLALAKNAKTGASSSGSTIILPLDTARHSDYLQFGGASNSLQKMDGQKQDHIQSSNIIWSSMPSTQLPSDTQIHNTQNQRLDSGSFNHNIGAHLADQTNASASILPQMKFDTRISEEKMKQKNTYDLGSSKLQGGFNSSGCNFDGLLNSIIKVEKDDLPFMDNELGCDLFPLGACI

SEQ ID NO: 24197 - protein, 231 aa, Oryza sativa
  Clone ID: TF_OsC263764_1.pep
WIPGLQESIGANRNKRQSRKSRDENGDDGDDSGGNSARGGDSSTQKKPRVVWSVELHRKFVAAVNQLGIEKAVPKKILDLMNVENITRENVASHLQKYRLYLKRLSTDASRQANLAAAFGGRNPAYINMNSFGNYNAYGRYRTVPTAGHTQANNILTRMNSPSAFGVHGLLHSQPIQLGHAQNNLSTSLNDLGGLNNGNMIRGAQMSTILTGPSGNSFPNISNGAPLATAN

SEQ ID NO: 24198 - protein, 153 aa, Oryza sativa
  Clone ID: TF_rsicen_8566.y1.abd.pep
MVDAAAASGDACGRVTEWETGLPAPGEMTPVSHQLVPPALAAAFGIDLAAVGVLLPSPSVDSPVSHLFFPVDEDDDEDEEGEGEGGNDDAPAAAAAGGGGGRCGKKARMVWTPELHHRFVEAVAHLGEKGAVPKAIVRLMNVDGLTRENVASH

SEQ ID NO: 24199 - protein, 467 aa, Oryza sativa; identical to SEQ ID NO: 16715
  Clone ID: TF_OsC138612_1.pep

SEQ ID NO: 24200 - protein, 88 aa, Oryza sativa
  Clone ID: TF_LIB3474-012-P1-K1-E2.pep
SGGCQISNSNFAARQRLRWTDDLHDRFVDAVTQLGGPDRATPKGILRIMGVQGLTIYHVKSHLQKYRLAKYIPDPTADGAKSDKERSR

SEQ ID NO: 24201 - protein, 350 aa, Oryza sativa; identical to SEQ ID NO: 16717
  Clone ID: TF_OsC72070_1.pep

SEQ ID NO: 24202 - protein, 194 aa, Oryza sativa
  unsure (1)..(194): unsure at all Xaa locations
  Clone ID: TF_LIB4309-004-Q1-N1-F10.pep
KSRDENGDDGFFFISPVIXNGASSPPKKPRVVWFVXLPPKFVAAVYPLGLEKAVPKKILGFLNVETLPRGNVFCLFQKDRLSLXRLGPYASRRGTLAAAFGGRNPAFINMNSFGNSPAYGXFRPVPTAGHTPANNLFFRMDPPFGFGVHGLLPSPPIPFGHAPNNLGPSLNDLGGGAFPLGKRFPLPWDLPIEA

SEQ ID NO: 24203 - protein, 377 aa, Oryza sativa
  unsure (1)..(377): unsure at all Xaa locations
  Clone ID: TF_OsC25944_1.pep
MATAAATQSQPVRVVLRVRPHLPSEANSAEAPCVGLLGSHPGGEVTVQLKDQYTSRNECYKLDAFFGQESRVCEIFDQEVSAVIPGIFEGTNATVFAYGATGSGKTYTMQGTEDLPGLMXSTVLALCTGTWCSVEISYYEVYMERCYDLLEPKAREIMVLDDKDGNLQLKGLAWVPVRSLEEFHEIYSIGVQRRKVAHTGLNDVSSRSHAVLSIRITTDVVKGKLNLITSXDLAGNEDNRRTCNEGIRLQESAKINQSLFALSNVISALNKKEPRIPYRESKLTRILQDSLGGNSHAVMIACLNPVEYQEAVHTVSLAARSRHVTNHMSSASKXKDKVDMEAKLRAWLESKGKTKSIQRMDGLLSPNAIKTPLSMSQ

SEQ ID NO: 24204 - protein, 339 aa, Oryza sativa
  Clone ID: TF_OsC747_1.pep
MSTSAAAAAAAEQQQEEGEHGPFPIEQLQASGIAALDVKKLKDSGLYTVESVAYTPRKDLLQIKGISEAKVDKIVEAASKLVPLGFTSASQLHAQRLEIIQVTTGSRELDKILDGGIETGSITEIYGEFRSGKTQLCHTLCVTCQLPLDQGGGEGKALYIDAEGTFRPQRLLQIADRFGLNGADVLENVAYARAYNTDHQSRLLLEAASMMIETRFALMIVDSATALYRTDFSGRGELSARQMHMAKFLRSLQKLADEFGVAVVITNQVVAQVDGSAMFAGPQIKPIGGNIMAHASTTRLALRKGRGEERICKVISSPCLAEAEARFQIASEGVADVKD

SEQ ID NO: 24205 - protein, 341 aa, Oryza sativa
  Clone ID: TF_OsC748_1.pep
MSSSGAAAAAAATAEEAAAGGEHGPFPIEQLQASGIAALDVKKLKDAGLCTVESVVYSPRKDLLQIKGISEAKVDKIIEGASKLVPLGFTSASQLHAQRLEIIQVTTGSRELDKILDGGIETGSITEIYGEFRSGKTQLCHTLCVTCQLPLDQGGGEGKALYIDAEGTFRPQRLLQIADRFGLNGADVLENVAYARAYNTDHQSRLLLEAASMMVETRFAIMIVDSATALYRTDFSGRGELSARQMHLAKFLRSLQKLADEFGVAVVITNQVVAQVDGAAMFGPQIKPIGGNIMAHASTTRLFLRKGRAEERICKVVSSPCLAEAEARFQISPEGVTDVKD

SEQ ID NO: 24206 - protein, 339 aa, Oryza sativa; identical to SEQ ID NO: 16762
  Clone ID: TF_OsC83381_1.pep

SEQ ID NO: 24207 - protein, 231 aa, Oryza sativa
  Clone ID: TF_OsC477_7.pep
RATTTSAASTPTTQQDQIRALKHFNVGEDYPVFDGLYSFCQSYAGGCVKLNHSHDIAINALELARTATPPPSSSPGGCRPRQAPSRRPRTSPPPTAAHCSAPHGRCPAPPRQLPPAPSSTPRRRRLPLGPLPLMPPSCPPRRRRGMAELKDGEDGAASWAGAGWRNSRTARAARRWGGGRWRRPRRGGLITRRGCHRCLVGRRSQPCHAARGRPLQPVTGVGITGGGDRGH

SEQ ID NO: 24208 - protein, 129 aa, Oryza sativa
  unsure (1)..(129): unsure at all Xaa locations
  Clone ID: TF_OsC151927_1.pep
MAAATTAAAARXVGLLYDERMCAHATPDGEEHPENPERLRAIWRKXSADGFASRCMIMKAKEAEDKYIASVHSQNHIKLMRSISSKEYDSRRNKIARKFNSIYFNKGSSESAFLAAGSGIEVTXKLLQE

SEQ ID NO: 24209 - protein, 392 aa, Oryza sativa
  unsure (1)..(392): unsure at all Xaa locations
  Clone ID: TF_OsC19780_1.pep
MESSASSSAAVAAEGAPATGEQLAVFWHEGMVAHDAGRGVFDSGRDPGFLDVLDQHPENADRVRNMVSILRRGPIARFISWHSGRPAHAAELLSFHSAEYIEELVQANAVGAKKLCEGTFLNPGSWGAALLAAGTTLSAMKHILDGHAKIAYALVRPPGHHAQPDRADGYCFLNNAGLAVKLALDSGRRKGAGVDIDVHYGNGTAEGFYHTDSVLTISLHMKHGSWGPSHPQSGSVDEIGEGXGSGYNLNIPLPNGSGDAGYEYAMNELVVPAIEKFRPELLVFVVGQDSSTFDPNGRQCLTMDGYRKIGQIMRGMADQHSNGQILIVQEGGYHISYSAYCLHATLEGVLNLQAPLLDDPIAYYPEDEKYTMKVVDIMKKCWKESIPFLKDI

SEQ ID NO: 24210 - protein, 486 aa, Oryza sativa
  unsure (1)..(486): unsure at all Xaa locations
  Clone ID: TF_OsC79201_1.pep
FTPLHSTAVAAALELVDPPGCTNSARVNVPWEHGKCGDAHYIAAWDHVLLPVAEAFNPDILLVSAGFDAALGDPLGGCCITPNGYALLLTKLLXFAQGRILMALEXGYNLRSIPNSVSACAKVLLGDKFRFDTPDMQPFESSWRVIQAVRDELKTSWPVLSNRLPDNISMRSRPSQIGLYPSGSDCXVEDLPDAIASVNIIQITYGIISESLSKLNLDEDKIATKTTSSNVMVEGPTDSVEPQNDGSAAVSTEGISSLSSTWRSELSKVYVWYASFGSNMWTPRFLCYIQGGKAEGMNIPCFGSHDTSPPRGSMWKTVPHRLFFGRSSTPCWGTGGVAFLNPEINHTENSYVCMYKITLEQFNDVLFQENRLVKENGESGKTESPDSPLIGLSEIEFVSRNKGVHLAPIKDSWYSNVLYLGEEDNLPILTMTCPSSDVERCRSGELPLCPPSKTYSATLIRGLMEGKHLDADAAASYINTAATRGL

SEQ ID NO: 24211 - protein, 623 aa, Oryza sativa; identical to SEQ ID NO: 16766
  Clone ID: TF_OsC17811_1.pep

SEQ ID NO: 24212 - protein, 99 aa, Oryza sativa
  Clone ID: TF_13447556.pep
RIAYFYDGDVGNVYFGPNHPMKPHRLCMTHHLVLSYDLHKKMEIYRPHKAYPTELAQFHSADYVEFLHRITPDTQHLYENELRRYNLGEDCPVFDNLFE

SEQ ID NO: 24213 - protein, 384 aa, Oryza sativa; identical to SEQ ID NO: 16767
  Clone ID: TF_OsC8271_1.pep

SEQ ID NO: 24214 - protein, 635 aa, Oryza sativa
  Clone ID: TF_OsC477_3.pep
MDASAGGGGNSLPTVGADGAKRRVCYFYDAEVGNYYYGQGHPMKPHRIRMTHALLAHYGLLDQMQVLKPHPARDRDLCRFHADDYVAFLRSVTPETQQDQIRALKRFNVGEDCPVFDGLYSFCQTYAGGSVGGAVKLNHGHDIAINWAGGLHHAKKCEASGFCYVNDIVLAILELLKYHQRVLYVDIDIHHGDGVEEAFYTTDRVMTVSFHKFGDYFPGTGDIRDIGHSKGKYYSLNVPLDDGIDDESYQSLFKPIMGKVMEVFRPGAVVLQCGADSLSGDRLGCFNLSIRGHAECVRFMRSFNVPLLLLGGGGYTIRNVARCWCYETGVALGHELTDKMPPNEYFEYFGPDYTLHVAPSNMENKNTRQQLDDIRSRLLDNLSKLRHAPSVQFQERPPEAELPEQDEDQEDPDERHHADSDVEMDDVKPLDDSGRRSSIQNVRVKRESAETDAADQDGNRVAAENTKGTEPAADGVARRQRRGNDGSTDLMVVLVHHQAYWSNLPNEDAMVLQDGSTNTKHVKTDLIGCIGDGCSHADVFLPSCVVLMDTNAARDCDLRLLRSDDYVASLPAVLPELWICSLCRFNVDEDCPIFHGFYIYCQTCAGDCARAIIDRYHGAQNVVINKALDGNMADK

SEQ ID NO: 24215 - protein, 528 aa, Oryza sativa
  Clone ID: TF_OsC477_4.pep
MDASAGGGGNSLPTAGADGAKRRVCYFYDAEVGNYYYGQGHPMKPHRIRMTHALLAHYGLLDQMQVLKPHPARDRDLCRFHADDYVAFLRSVTPETQQDQIRALKRFNVGEDCPVFDGLYSFCQTYAGGSVGGAVKLNHGHDIAINWAGGLHHAKKCEASGFCYVNDIVLAILELLKYHQRVLYVDIDIHHGDGVEEAFYTTDRVMTVSFHKFGDYFPGTGDIRDIGHSKGKYYSLNVPLDDGIDDESYQSLFKPIMGKVMEVFRPGAVVLQCGADSLSGDRLGCFNLSIRGHAECVRFMRSFNVPLLLLGGGGYTIRNVARCWCYETGVALGHELTDKMPPNEYFEYFGPDYTLHVAPSNMENKNTRQQLDDIRSRLLDNLSKLRHAPSVQFQERPPEAELPEQDEDQEDPDERHHADSDVEMDDVKPLDDSGRRSSIQNVRVKRESAETDAADQLLWSTCAARWDGNRVAAENTKGTEPAADGVGSSKQTVPTDASAMAIDEPGSLKVEPDNSNKLQDQPSVHQKT

SEQ ID NO: 24216 - protein, 539 aa, Oryza sativa
  Clone ID: TF_OsC477_2.pep
MDPSSAGAGGNSLASASCGDAQKRRVCYFYDPEVGNYYYGQGHPMKPHRVRMTHALLAHYGLLAPAKMQVLRPLPARGRDLCRFHSDDYVAFLRAVTPETQLGQVRALRRFNVGPDCPVFDGLYAYCQTYAGASVGAAVKLNHGTHDIAINWSGGLHHAKKSEASGFCYVNDIVLAILELLKLHERVLYIDIDIHHGDGVEEAFYTTNRVMTVSFHKFGDYFPGTGDIRDIGYSEGKYYCLNVPLDDGIDDDSYQSIFKPIISKVMEMYRPGAVVLQCGADSLSGDRLGCFNLSGKGHAECVKFMRSFNVPLLLLGGGGYTIRNVARCWCYETGVALGEELREKLPYNEYYEYFGPEYSLYVAASNMENRNTNKQLEEIKCNILDNLSKLQHAPSVQFEERIPETKLPEPDEDQDDPDERHDPDSDMLLDDHKPMGHSARSLIHNIGVKREITETETKDQHGKRLTTEHKVPEPMADDLGSSKQVPATSSYATDSCMLLVTYSEVLYDCFFCRSLQITTVSFVEEFQSVQAILDVETLV

SEQ ID NO: 24217 - protein, 456 aa, Oryza sativa; identical to SEQ ID NO: 16773
  Clone ID: TF_OsC56939_1.pep

SEQ ID NO: 24218 - protein, 493 aa, Oryza sativa
  Clone ID: TF_12698879.pep
MDASAGGGGNSLPTAGADGAKRRVCHFYDAEVGNYYCGQGHPMKPHRIRMTHALLAHYGLLDQMQVLKPHPARDRDLCRFHADDYVAFLRSVTPETQQDQIRALKRFNVGEDCPVFDGLYSFCQTYAGGSVGGAVKLNHGHDIAINWAGGLHHAKKCEASGFCYVNDIVLAILELLKYHQRVLYVDIDIHHGDGVEEAFYTTDRVMTVSFHKFGDYFPGTGDIRDIGYSEGKYYCLNVPLDDGIDDDSYQSIFKPIISKVMEMYRPGAVVLQCGADSLSGDRLGCFNLSGKGHAECVKFMRSFNVPLLLLGGGGYAIRNVARCWCYETGVALGHELTDKMPPNEYFEYFGPEYSLFVAASNMENRNTNKQLEEIKCNILDNLSKLQHAPSVQFEERIPETKLPEPDEDQEDPDERHDPDSDMVLDDHKPMGHSARSLIRNIEVKREITESEAKDQHGKRLTTEHKGPEPMADDPGSSKQAPVSRRLLYPSANP

SEQ ID NO: 24219 - protein, 166 aa, Oryza sativa; identical to SEQ ID NO: 16776
  Clone ID: TF_OsC82111_2.pep

SEQ ID NO: 24220 - protein, 413 aa, Oryza sativa
  Clone ID: TF_OsC90813_1.pep
VDPRAAGDNGTSISDTNGVRKDLALPDNLLRDAHILYCTSPAMGHNKEAHPETNKRVPAIVDALEKLELTSKHRGSQVLEIQDFQPASLDDIALVHSRSYITGLEKAMSRASDEGLIFIEGTGPTYATQTVMIYAHSLLFLFPQCFSRWKTFQECLLSAGAGITLVDSVVAASKLGPKPPLGFALVRPPGHHAVPEGPMGFCVFGNIAVAARYAQNQHGLKRVMIIDFDVHHGNGTCDAFYEDPDIFFLSTHQLGSYPGTGKIHQVGQGNGEGTTLNLPLPGGSGDYAMRCAFDEVIAPAAQRFKPDIILVSAGYDAHALDPLAGLQFTTGTFYMLAARIREVAAELCGGRCVFFLEGGYNLESLSSSVADTFRAFLGEPSLAARFDDPAMLYEEPTRKIREAIDKAKHLHSL

SEQ ID NO: 24221 - protein, 179 aa, Oryza sativa
  Clone ID: TF_OsC477_17.pep
HGEQKYKQAHPARDRDLCRFHADDYVAFLRSVTPETQQDQIRALKRFNVGEDCPVFDGLYSFCQTYAGGSVGGAVKLNHGHDIAINWAGGLHHAKKCEASGFCYVNDIVLAILELLKYHQRVLYVDIDIHHGDGVEEAFYTTDRVMTVSFHKFGDYFPGTGDIRDIGHSKGKYYSLNVP

SEQ ID NO: 24222 - protein, 189 aa, Oryza sativa
  Clone ID: TF_LIB4309-015-Q1-K1-H3.pep
MVTNRVDVFWHEGMLRHDAVEGVFDTGYDPGFLDVLEKHPENADRVRNMLSILRRGPIAPHVNWFTGLPAIVSELLMFHTSEYIEKLVEADKSGERCEIAAGTFMSPGSWEAALLAAGTTLSAMQHILDCHGKIAYALVRPPGHHSQPTQADGYCFLNNAALAVKLALNSGSCSRVAVIDIDVHYGNGT

SEQ ID NO: 24223 - protein, 352 aa, Oryza sativa; identical to SEQ ID NO: 16764
  Clone ID: TF_OsC136700_1.pep

SEQ ID NO: 24224 - protein, 161 aa, Oryza sativa
  unsure (1)..(161): unsure at all Xaa locations
  Clone ID: TF_LIB3432-035-P2-K1-D11.pep
SQVLEIQDFQPASLDDIALVHSRSYITGLEKAMSRASDEGLIFIEGTGPTYATQTTFQECLLSAGAGITLVDSVVAASKLGPKPPLGFALVRPPGHHAVPEGPMGFCVFGNNAVAARYAQNQHGLKRVMIIDFDVHHGNGTCDAFYEDPDIFXLSTHQLGS

SEQ ID NO: 24225 - protein, 353 aa, Oryza sativa; identical to SEQ ID NO: 16765
  Clone ID: TF_OsC82111_1.pep

SEQ ID NO: 24226 - protein, 78 aa, Oryza sativa
  unsure (1)..(78): unsure at all Xaa locations
  Clone ID: TF_uC-osrocyp027g06b1.pep
KRLSNCKMPDLKIARMTQSEIQSDLCYQSQAVLDLXKSXETYLVGLLEDTNLCAINDNRVPIFFQVIQLARRICGERS

SEQ ID NO: 24227 - protein, 906 aa, Oryza sativa
  Clone ID: TF_OsC1528_2133.pep
MEMETLQLRAGTGCLWVCLLLCVAPSLVDYSIPLASVHRRSGEQVSGTSAFDVLHREKAAIRFLGSASCDCSLFNRDGSPSSPLACCTPSSTLATASSSCRATGLSATSIRVNLWLTAMKCFWVSTGKPMGVLNADQQKEFDEATTLFVGCILSVLGDRLVEVYMHMTDATELWDALNTKFGATDASNDLYIMEQFHVYKMADNRSVVEQAHKIQTMAKELKLLKCVLPDKFVAGCIIAKLSPSWRGFGTALKHKRQEYFVEGLIASLDVEEKAREKDVASKGDGGQSSTNVVHKAQNKSKGKYKAQQTTNFNKKKKNNNPNQDERTCFVCGQPGHLARKCPQRKGMKAPAGQTSKSANVTIGNTGDGSGYGRTGFHRPNGEWVTCFCSWCWHGRSEVYFGKDRAAEECAAYYWKEDVRSEMDSIIANGTWEVTERPYGCKPVGCKWVFKKKLRPDASHGLLIHQMDVKTTFLNEELDEEIYMDQPDGFVVEGFAVNEADKYVYYRHGGGEGVILCLVCLLLCVASSLVDYSIPLASVHRRSGEQVSGISAFDVLHWEKAAIRFLGSASCDCSLFNRDEGDAADRASNLTDATVDSLIESIIIKDGVKAKFFFNIMSLANSAGEKLLAFSQYILPMKFLERLLVKRLGWHVGKEIFMISGDTSADDREVAMDQFNNSADAKVLFGSIKACGEGISLVGASRVIILDVHLNPSVTRQAIGRAFRPGQQKKVFVYRLVAADSPEVKFHETAFKKEVIPKLWFEWSELCTTEDFKLNQVDIDDSEDELLEANAIRQDIKALYRRVGKGLSAAAAASKRRWTLALAAKKVVGRKLGGPKKPVPRSVKAGLQFLVSRYLENGRHAQRVGTGTPVYLAAVLGVAVAAAARRREGSSSSAGTPMAVAATAARW

SEQ ID NO: 24228 - protein, 99 aa, Oryza sativa
  unsure (1)..(99): unsure at all Xaa locations
  Clone ID: TF_uC-osrocyp032h06b1.pep
MAPKADKKPTAXNPAEEEPVGENAPSAXKKPKAVKRLGGEKGKKGGARXGKKDGRKKGKKSVDTYKSYIRKEMKEDPPIIWICSKAMYIMKSLINDMLE

SEQ ID NO: 24229 - protein, 1116 aa, Oryza sativa; identical to SEQ ID NO: 16782
  Clone ID: TF_OsC1517_1666.pep

SEQ ID NO: 24230 - protein, 46 aa, Oryza sativa
  unsure (1)..(46): unsure at all Xaa locations
  Clone ID: TF_uC-osrocyp032a11b1.pep
PWHGRGKAIGXDAGKKAMSRSSKGSLQHPVGRIARFLKAGKYPERV

SEQ ID NO: 24231 - protein, 79 aa, Oryza sativa
  unsure (1)..(79): unsure at all Xaa locations
  Clone ID: TF_2310729.pep
RQFGRSRFRFPPNPPQEKAKSPPRSEEEMARTKQTXRKSTGGKAPRKXLATKAARKSXPTTXGVKKPHXYRTGTVALRR

SEQ ID NO: 24232 - protein, 101 aa, Oryza sativa
  unsure (1)..(101): unsure at all Xaa locations
  Clone ID: TF_428926.pep
KPKAEKRLPAGKGEKGGAGEGKKAGXEXGXEDLGDXXVLNFXVFXEVXHPXXGXSSXXFSXMDSXINDIFEKLAAEAAKLARYNKKPTITSREIQTSVRLV

SEQ ID NO: 24233 - protein, 105 aa, Oryza sativa
  unsure (1)..(105): unsure at all Xaa locations
  Clone ID: TF_LIB3433-030-P1-K1-H8.pep
FVDINHPGKGGMSLHKXAPRRNRKVLPDNIQGITKPDILMLTRRGCVNRICRLIYKETRGVLKILLENVIRNAGNYTKHARHKTVTDMDVDYALKRAGRTLYSFS

SEQ ID NO: 24234 - protein, 81 aa, Oryza sativa
  Clone ID: TF_LIB4834-009-R1-M1-A11.pep
MSGRGKGGKGLGKGGAKRHRRVLRDNIQGITKPAIRRLARRGGVKRISGLIYEETRRKTVTAMDVVYALKRQGRTLYGFGG

SEQ ID NO: 24235 - protein, 47 aa, Oryza sativa
  Clone ID: TF_OsC724_9.pep
MARTKQAAEAYLVGLFEDTNLCAIHAKRVTIMPKDIQLARRIRGERA

SEQ ID NO: 24236 - protein, 128 aa, Oryza sativa
  Clone ID: TF_rsicef_6944.y1.abd.pep
TRIRNTLASPPFARFVQHQHHHLPISDGAHRGRAMKPAEKKPAEEKAGEKAPAAGKKPKAEKRLPASKGEKGGEGKKERGRKKAQKSVETYKIYIFKVLKQVHPDIGISSKAMSIMNSFINDIFEKLA

SEQ ID NO: 24237 - protein, 168 aa, Oryza sativa; identical to SEQ ID NO: 16805
  Clone ID: TF_OsC408256_1.pep

SEQ ID NO: 24238 - protein, 133 aa, Oryza sativa
  Clone ID: TF_LIB4309-013-Q1-K1-B4.pep
MAPKAEKKPAAKKPAEEEPAAEKAEKAPAGKKPKAEKRLPAGKGEKGSGEGKKDRAGRKKAKKSVETYQIFLFKGLKPVHPDIGIFFKGLFIMDFFINHLFEKVGRQGRQVGRFHQKATLTFREIQNFGRLVL

SEQ ID NO: 24239 - protein, 146 aa, Oryza sativa; identical to SEQ ID NO: 16795
  Clone ID: TF_OsC106861_1.pep

SEQ ID NO: 24240 - protein, 153 aa, Oryza sativa; identical to SEQ ID NO: 16786
  Clone ID: TF_OsC631_9.pep

SEQ ID NO: 24241 - protein, 154 aa, Oryza sativa
  Clone ID: TF_OsC3753_2.pep
MEGLTSEQMVAFQEAFLLFDKNGDGCITLEELAAVTRSLGLEPTDQELNDMMREVDTDGNGIIDFQEFLSLIARKMKDGDGDEELKEAFEVLDKDQNGFISPTELRTVMTNLGEKMTDEEVEQMIREADTDGDGQVNYDEFVIMMKNAERKISG

SEQ ID NO: 24242 - protein, 107 aa, Oryza sativa
  Clone ID: TF_uC-osrocyp002h02b1.pep
VPVRDPGRRPTRAVIFRPEREREDRRPAATFLGRALTKQTGRKSTGGKAPRKQLATKAARKSAPATGGVKKPHRFRPGTVALREIRKYQKSTELLIRKLPFQRLVRE

SEQ ID NO: 24243 - protein, 136 aa, Oryza sativa; identical to SEQ ID NO: 16804
  Clone ID: TF_OsC41976_1.pep

SEQ ID NO: 24244 - protein, 115 aa, Oryza sativa
  unsure (1)..(115): unsure at all Xaa locations
  Clone ID: TF_2442299.pep
AEKSSGEGKKAGRKKAKKSVETYKIYIFKVLKQVHPDIGISSKAMSIMNSFINDIFEKLAGESAKLARYNKKPTITSREIQTSVXLVLPGELXKHXVSEGTKXLTKFTPLDSIYL

SEQ ID NO: 24245 - protein, 139 aa, Oryza sativa
  Clone ID: TF_OsC631_2.pep
MAPKAEKKPAEKKPVEEKAEKKPKAEKRVPGAKEGGGEKKGKKKAKKSVETYKIYIFKVLKQVHPDIGISSKAMSIMNSFINDIFEKLAQEAARLARYNKKPTITSREIQTSVRLVLPGELAKHAVSEGTKAVTKFTSS

SEQ ID NO: 24246 - protein, 132 aa, Oryza sativa
  unsure (1)..(132): unsure at all Xaa locations
  Clone ID: TF_LIB4371-057-QB-K6-B3.pep
THAALLTKKPRDRRRAAAAARXGRGKGGKGLGKGGAKRHRKXLRDNXQGXTKPAIRRLARRGGXKRXXGLXXEETRGXXKXXXENXXRDAXTXTEHARRKTXTAXDXXXAXKRQGRTXXGXGGARREATRGR

SEQ ID NO: 24247 - protein, 159 aa, Oryza sativa
  Clone ID: TF_LIB4371-021-R1-K1-B4.pep
SVQAKYCGRDEARGGSSPRHENADKAPARCKSQAAKRLPAVRSRLAGLMVIRRADDGKKTAIPFDLLFKVLNQVHPDIVIPSTAMCIVNSFMIDFFDMLAGESDMLARYIENPAITFREIHTSVRLVLPGELADHAVSEGTNAVTTFTSAYADCLALTG

SEQ ID NO: 24248 - protein, 159 aa, Oryza sativa
  Clone ID: TF_LIB4371-037-R1-K1-F6.pep
MKRAASMAPKAEKKPAAKKPAEEEPAAEKAEKALAGKKPKAEKRLPAGKAEKSSGEGKKAGRKKAKKSVETYKIYIFKVLKQVHPDIGISSKAMSIMNSFINDIFEKLAGESAKLARYNKKPTITSREIQTSVRLVLPGELAKHAVSEGTKAVTKFTSA

SEQ ID NO: 24249 - protein, 702 aa, Oryza sativa
  Clone ID: TF_OsC631_3.pep
MAALTEDILLQIFSRVGSIKDLFKFAVTCRRWLRRFTDPAFLRGLCLDSGEGHRARLLGFFFQQTRFYRCEKMIKMRVTQQSSVCPPTFLPAPWSPLGLTDRTLTSFLAADDDTFNYAEPLAARCGIVLMRLVPRTALMIACSHLLGVCNPITGECHVLPPLNLSGLHRYLTSYAIITSTDSDLDGKQPPSSSSSGRSTFSQLYLVVQHKKDCNEYFYSYSAATCSWSAPTMCVDGRRFSLVGERSAVVHKGAAHWLFIDRVSSATQDDILYKLTAAVDTSEISLTRLPFGAGGSPLLCVSGDGKLSVACVFPIHMRVWTQQDDTPATWLRTVIRIPLAVPYPDYSHICQPREKWFNFNRGSMLVLYRSNGVFILDLEKKVMEKVMDCLLPLFSDKLNRTAVAYEMDLVEFFVLQLSGYIWKLSLLVITVTGLTPWQKAQNLNPKKEQPTTTALQKRGPLHIFLCNVSDPHGNASQPSNRKGTGRHTFIHVIDPRDKPLHQSAPTFTHYKLTAPVSSFHTAISQHISTHRSKAKPTDPLPLPEKKRAASMAPKAEKKPAAKKPAEEEPAAEKAEKAPAGKKPKAEKRLPAGKGEKGSGEGKKAGRKKGKKSVETYKIYIFKVLKQVHPDIGISSKAMSIMNSFINDIFEKLAGESAKLARYNKKPTITSREIQTSVRLVLPGELAKHAVSEGTKAVTKFTSA

SEQ ID NO: 24250 - protein, 132 aa, Oryza sativa
  unsure (1)..(132): unsure at all Xaa locations
  Clone ID: TF_286949.pep
MARTKQTARKSTGGKAPRKQLATKAARKSAPATGGVKKPHRFRPGTVALREIRKYQKSTELLIRKLPFQRLVREIAQDFKTDLRFQSSVVGALQEAAEATSVVXFEDNNLLAIMARCVTLWPRTIQLACESG

SEQ ID NO: 24251 - protein, 112 aa, Oryza sativa
  Clone ID: TF_OsC1067_12.pep
AARKSAPTTGGVKKPHRYRPGTVALREIRKYQKSTELLIRKLPFQRLVREIAQDFKTDLRFQSHAVLALQEAAEAYLVGLFEDTNLCAIHAKRVTIMPKDIQLARRIRGERA

SEQ ID NO: 24252 - protein, 146 aa, Oryza sativa
  unsure (1)..(146): unsure at all Xaa locations
  Clone ID: TF_4878685.pep
MAPKAEKKPAXKKPAEEEPAAXKAEKALAGKKPKAEKRLPAGKAEKSSGEGKKAGRKKAKKSVETYKIYIFKVLKQVHPDIGISSKAMSIMNSFINDIFEXLAGESAKLXARYNKKPTITSREIQTSVXLVLPGXELAKHXVLRAP

SEQ ID NO: 24253 - protein, 137 aa, Oryza sativa
  unsure (1)..(137): unsure at all Xaa locations
  Clone ID: TF_OsC724_1.pep
MARTKQTARKSTGGKAPRKQLATKXAARKSAPTTGGVKKPHRYRPGTVALREIRKYQKSTELLIRKLPFQRLVREIAQDFKTDLRFQSHAVLALQEAAEAYLVGLFEDTNLCAIHAKRVTIMPKDIQLARRIRGERA

SEQ ID NO: 24254 - protein, 138 aa, Oryza sativa; identical to SEQ ID NO: 16546
  Clone ID: TF_OsC11983_1.pep

SEQ ID NO: 24255 - protein, 136 aa, Oryza sativa; identical to SEQ ID NO: 6937
  Clone ID: TF_OsC1067_10.pep

SEQ ID NO: 24256 - protein, 136 aa, Oryza sativa; identical to SEQ ID NO: 6937
  Clone ID: TF_OsC1067_3.pep

SEQ ID NO: 24257 - protein, 136 aa, Oryza sativa; identical to SEQ ID NO: 6937
  Clone ID: TF_OsC1067_4.pep

SEQ ID NO: 24258 - protein, 136 aa, Oryza sativa; identical to SEQ ID NO: 6937
  Clone ID: TF_OsC1067_7.pep

SEQ ID NO: 24259 - protein, 136 aa, Oryza sativa; identical to SEQ ID NO: 6937
  Clone ID: TF_OsC1067_8.pep

SEQ ID NO: 24260 - protein, 136 aa, Oryza sativa; identical to SEQ ID NO: 6937
  Clone ID: TF_OsC1067_9.pep

SEQ ID NO: 24261 - protein, 122 aa, Oryza sativa
  unsure (1)..(122): unsure at all Xaa locations
  Clone ID: TF_LIB3434-033-P1-K1-D2.pep
MAPKAEKKPAAKKPAEEEPAAENAEKAPAEKKPKAEKRLLVGKGEKGSDEGKKAGRKKGKTSVETYKIYILKVLKQVHLYIDVFSKVMSIMNSFINDIFEKLADEAGXLARYNMKSTMTYRE

SEQ ID NO: 24262 - protein, 276 aa, Oryza sativa; identical to SEQ ID NO: 16808
  Clone ID: TF_OsC1018_13.pep

SEQ ID NO: 24263 - protein, 223 aa, Oryza sativa
  Clone ID: TF_OsC1018_5.pep
MRGLGNRARLPEPRNFQSLPTPQNAKFSTAPARGLHSTENPAKRARSAPPPLTRGSLPDPTAGAAPPHHSRGSLPDPTAAHSPPNSIYIHPSQTNRPPHPNLATKKIPNSAVVFVAVAARMSGRGKGGKGLGKGGAKRHRKVLRDNIQGITKPAIRRLARRGGVKRISGLIYEETRGVLKIFLENVIRDAVTYTEHARRKTVTAMDVVYALKRQGRTLYGFGG

SEQ ID NO: 24264 - protein, 163 aa, Oryza sativa
  Clone ID: TF_LIB4371-007-R1-K1-B9.pep
MAPKAEKKPAAKNPAEEEPAAEKAEKAPAGKKPKAEKRLPAGKAEKGSGEGRKAGRKKANKSVETYKIYIFKELKQVHPDIGISSKAMSIMNSFINDIFEKLAGESAKLARYNKKPTITSREIQTSVRLVLPGELAKHAVSEGTKAVTKFTSAYASPLHLSMC

SEQ ID NO: 24265 - protein, 91 aa, Oryza sativa
  unsure (1)..(91): unsure at all Xaa locations
  Clone ID: TF_2311071.pep
MARTKQTARKSTGGKAXXKQLATKARAXSAXAXGVKKPHRFXPGTXXLREIRKYQKSTXLLIRKLPFQXLVRXEIAQDFKTDLRFQSSAVA

SEQ ID NO: 24266 - protein, 153 aa, Oryza sativa
  unsure (1)..(153): unsure at all Xaa locations
  Clone ID: TF_LIB4309-032-R1-K1-G12.pep
MAPKADKKPAEKKPAEEEPAADKAEKAPAAKKPKAEKRLPAGXGEKGRGEGRRAVRXMGKKSVETYKIYIFKVLKQVHPDIGMSSKAMCIMNSFINDIFEKLAGESAKLARYNKKPTITCREIQTCVRLILPGELAKHAVSQGTKADAKFTHA

SEQ ID NO: 24267 - protein, 326 aa, Oryza sativa
  Clone ID: TF_OsC1067_2.pep
PNPVFTLINRPNPITKLLMKTRSKTRKREGNQQVDHVTSSSLIPPDRFGATQRNRVEGGGLRALAADAAGELDVLGHDGDALGVDGAEVGVLEETDEVGLGGLLEGEHRVALEAEVGLEVLRDLADEALEGELADQELRALLVLADLAERHRPRPVAVGLLHAAGGRSRLPRRLGGELLPRGLAAGGLAGGLLRTGHLLFASRRRLGFLLRWIWGKSKSRATKLAWKGEQSAPEVGLDREGAARSTRRPDCQMAGRLSAGGKTVPGRKRWGFFTPPVAGADLRAAFVASCFLGALPPVDFLAVCLVRAIGDEEERLGLLLQASNAT

SEQ ID NO: 24268 - protein, 153 aa, Oryza sativa; identical to SEQ ID NO: 16809
  Clone ID: TF_OsC631_7.pep

SEQ ID NO: 24269 - protein, 136 aa, Oryza sativa; identical to SEQ ID NO: 6802
  Clone ID: TF_OsC724_3.pep

SEQ ID NO: 24270 - protein, 122 aa, Oryza sativa
  Clone ID: TF_LIB4371-038-R1-N1-A3.pep
KAPRNQLATKGGGKLAPAPGGVKKPPRFRAGPVALRGIPKSQKSPELFIRKLPFQGLVRGIAQGFKTALRFQSSPVPALQGAPEGSLVGLFGAPPLCAIPAKGVPFMPKDIQLGGRIPGGGV

SEQ ID NO: 24271 - protein, 148 aa, Oryza sativa
  unsure (1)..(148): unsure at all Xaa locations
  Clone ID: TF_8334787.pep
MAGRGKAIGSSAAKKATSRSSKAGLQFPVGRIARFLKAGKYAERVGAGAPVYLAVVLEYLTTEVLELAGNAARDNKKTRIGPRYIQVXVRNDEELRGLVGAPSIVKRVRRAEYGGAVPCASRPCLGLLARLVAPWLCIKRTMAVPPRE

SEQ ID NO: 24272 - protein, 140 aa, Oryza sativa
  unsure (1)..(140): unsure at all Xaa locations
  Clone ID: TF_3759981.pep
APKAXKKPAAKKPAEEEPAQEKAEKXXAGXKPKAXKRLPAGKGEKGSGEGKKAGRKKGKKSVETYKIYIFKVLKQVHPDIGISSKAMSIMNFFINDIXFEKLAGESAKLAXYNKXPTXTSGEIQTSVXRLVLPXELSKHA

SEQ ID NO: 24273 - protein, 106 aa, Oryza sativa
  unsure (1)..(106): unsure at all Xaa locations
  Clone ID: TF_uC-osroM202014h03b1.pep
MAPKAEKKPAAKKPAEEEPAAENAEKAPAGKKPKADKRLPAGKAXKSSGEGXKALRKKAKKSVVTYKIYIFKALMQVHPDIWIYSKAMSIMNFFMNDILEKLAGEF

SEQ ID NO: 24274 - protein, 237 aa, Oryza sativa
  Clone ID: TF_OsC1018_3.pep
MSGRGKGGKGLGKGGAKRHRKGLRDNIQGITKPAIQRLARRGGVKRISGLIYEETRGVLKILVASHPRESPPTGQQQSRGEGKKKKKKRRRRRPWRGVRTPPGATPITTTSSPIPLAFLSLSCVEPPESSSSAAMSGRGKGGKGLGKGGAKRHRKVLRDNIQGITKPAIRRLARRGGVKRISGLIYEETRGVLKIFLENVIRDAVTYTEHARRKTVTAMDVVYALKRQGRTLYGFGG

SEQ ID NO: 24275 - protein, 135 aa, Oryza sativa
  unsure (1)..(135): unsure at all Xaa locations
  Clone ID: TF_OsC20534_1.pep
KKAGSRSVKAGLQFPLGRIGRYXLKKGRYAQRIGTGAPVYLAPVLEYLPAKGLELPGNPAKGTKKNRIIPPPVLLGIRKNKELGKLLAGVTLAHGGGLPNNNPGVLPKKTAEKAPPPGKKAKSPKKAPGKSPKKA

SEQ ID NO: 24276 - protein, 494 aa, Oryza sativa
  unsure (1)..(494): unsure at all Xaa locations
  Clone ID: TF_OsC1141_1.pep
KANLLKSKKKKKKKTAKNLRPXXXKKSLSSCQMERAAADRSGAEEGESEWREELRQQQSQVDALRERLVEVKVGMKCSEEDSRKELDHLCRRVKTIATLLAYLKSKARIMAIPHLAHTSCGIRHQDGVGYVDRNGVPLADWSKGGESASCEGLDDETSADSSRVAEHGDANEGDVDVEDILKSIHVVTDVMETLVKRVIVAESEAANEKEKVRMGLEEIRRKTIQVESMSAKVEEMEKFAVGTNGMLNEMRQRVEDMVLETTRQRQRAAENEQELSRVKHDFESLRTYVGTLVNVRETLLSSEKQFETMEKLFDRLVARTNQLESEKAQKEAEVQKVVEENVRLRAMIDKKEAQLQAMSEQCKFMALSQEELQIDVAKQRMVPTAGDLRGHAAQRPTQVVDLVVVKGSRRRLHYYPAGTCTASHTPRPGKTHATPSSSASTRSDLSQSQPWRRLGFGSPPSSSPSSSPPPPSSKLPELSPRKKLLQLKLLMGLI

SEQ ID NO: 24277 - protein, 438 aa, Oryza sativa; identical to SEQ ID NO: 16816
  Clone ID: TF_OsC12950_1.pep

SEQ ID NO: 24278 - protein, 152 aa, Oryza sativa
  Clone ID: TF_jC-osflLIB3479022d02b1.pep
MLGRSRFRFTPTPPKEIAKSALISVEEMAGSKQTDRMYTGGKASRMQLATIVERKSVTTTGGVKKPHRYMPGTVALREIRKYQMSTELLIQKLRLQLLVREIAHDFKTVLLFQSHAVLVLQEAVKAYLFGLFEDTNLCVMHSKRVTIMPNDI

SEQ ID NO: 24279 - protein, 156 aa, Oryza sativa
  Clone ID: TF_OsC3999_2.pep
MDVGVGGKAAKKAVGRKLGGPKKKPVSRSVKAGLQFPVGRIGRYLKKGRYAQRVGTGAPVYLAAVLEYLAAEVLELAGNAARDNKKNRIIPRHVLLAIRNDEELGKLLAGVTIAHGGVLPNINPVLLPKKTAEKADKPAKASKDKAAKSPKKQARS

SEQ ID NO: 24280 - protein, 650 aa, Oryza sativa
  Clone ID: TF_OsC631_4.pep
MAALTEDILLQIFSRVGSIKDLFKFAVTCRRWLRRFTDPAFLRGLCLDSGEGHRARLLGFFFQQTRFYRCEKMIKMRVTQQSSVCPPTFLPAPWSPLGLTDRTLTSFLAADDDTFNYAEPLAARCGIVLMRLVPRTALMIACSHLLGVCNPITGECHVLPPLNLSGLHRYLTSYAIITSTDSDLDGKQPPSSSSSGRSTFSQLYLVVQHKKDCNEYFYSYSAATCSWSAPTMCVDGRRFSLVGERSAVVHKGAAHWLFIDRVSSATQDDILYKLTAAVDTSEISLTRLPFVLEAHRSSAIPLAVPYPDYSHICQPREKWFNFNRGSMLVLYRSNGVFILDLEKKVMEKLLSRHGKATAERPSSSEGYIWKLSLLVITVTGLTPWQKAQNLNPKKEQPTTTALQKRGPLHIFLCNVSDPHGNASQPSNRKGTGRHTFIHVIDPRDKPLHQSAPTFTHYKLTAPVSSFHTAISQHISTHRSKAKPTDPLPLPEKKRAASMAPKAEKKPAAKKPAEEEPAAEKAEKAPAGKKPKAEKRLPAGKGEKGSGEGKKAGRKKGKKSVETYKIYIFKVLKQVHPDIGISSKAMSIMNSFINDIFEKLAAEAAKLARYNKKPTITSREIQTAVRLVLPGELAKHAVSEGTKAVTKFTSS

SEQ ID NO: 24281 - protein, 133 aa, Oryza sativa
  Clone ID: TF_OsC1021_2.pep
PTRPKAPAGKKPKAEKRLPASKASSKEGGAGDKKGRKKAKKSVETYKIYIFKVLKQVHPDIGISSKAMSIMNSFINDIFEKLAQEAARLARYNKKPTITSREIQTSVRLVLPGELAKHAVSEGTKAVTKFTSN

SEQ ID NO: 24282 - protein, 99 aa, Oryza sativa
  unsure (1)..(99): unsure at all Xaa locations
  Clone ID: TF_287205.pep
MARTXQTARKSTGGKXPRKQLATKAARKSAPATXGVKKPHRFRPGTVALREIRKYQKSTELLIRKLXFQRLVREXAXDFKTDXXFQSSAXXXLQEAAEA

SEQ ID NO: 24283 - protein, 136 aa, Oryza sativa
  Clone ID: TF_uC-osrocyp016d02b1.pep
MARTKQTARKSTGGKAPRKQLATKAARKSAPTTGGVKKPHRYRPGTVALREIRKYQKSTELLIRKLPFQRLVREIAQDFKTDLRFQSHAVLALQEALEAYLVGLFEDTYLCAIHAKRVTIMPQDIQLARRIRGERA

SEQ ID NO: 24284 - protein, 155 aa, Oryza sativa; identical to SEQ ID NO: 16791
  Clone ID: TF_OsC631_5.pep

SEQ ID NO: 24285 - protein, 153 aa, Oryza sativa
  unsure (1)..(153): unsure at all Xaa locations
  Clone ID: TF_LIB4831-018-R1-N1-F7.pep
MAPKAEKKPAAKKPAEEEPAAEKAEKAPAGKRPKAEKRLPAGKAEKGSGEGKKAGRKKAKKSVETYKIYIFKVLKQVHPDIGISSKAMSIMNSFINDIFEKLAGESAKLARYNKKPTITSREIQTSVRLVLPXELAKHAVSEGTKAVTQFTSV

SEQ ID NO: 24286 - protein, 135 aa, Oryza sativa
  unsure (1)..(135): unsure at all Xaa locations
  Clone ID: TF_23513677.pep
MTGGGKSGGKASSGKNAXSRSSKAGLAFPVGRVHRLLRKGNYAQRVGAGAPVYLAAVLEYLAAEILELAGNAARDNKKTRIIPRHLQLAIRNDEELNKLLGHVTIAQGGVLPNIHQNLLPKKTGGKGGKNASQEL

SEQ ID NO: 24287 - protein, 171 aa, Oryza sativa
  unsure (1)..(171): unsure at all Xaa locations
  Clone ID: TF_rsiceg_9458.y1.abd.pep
GLQEFGRGHSKRTTTVSLPEKKRAASVGPKAEKKPAAKKPAEEEPAAEKAEKAPAGXRSPRLEKRLPAVQGREGLRXRGEKDRAGRKKAKKSVETYKIYIFKVLKQVHPDIGISSKAMSIMNSFINDIFEKLAAEAAKLARYNKKPTITSREIQTSVRLVLPGELAKHAVS

SEQ ID NO: 24288 - protein, 126 aa, Oryza sativa
  unsure (1)..(126): unsure at all Xaa locations
  Clone ID: TF_8954983.pep
IRPEPRGRTKRRTSPRRQRKRHGEGXKRGGXKRKTLQTYXIYIFKVLKQVHPDXGISSKAMSIMNSFINDIFXKLAGXSAKLARYNKKPTITSREIXTSVRLVLPGELAKHAVSXGTXAVPKFTSA

SEQ ID NO: 24289 - protein, 154 aa, Oryza sativa
  Clone ID: TF_OsC631_6.pep
MAPKAEKEPAAKKPAEEEPAAEKAQKAPAGKKPKAEKRLPAGKGEKGGAGEGKKAGRKKGKKSVETYKIYIFKVLKQVHPDIGISSKAMSIMNSFINDIFEKLAAEAAKLARYNKKPTITSREIQTSVRLVLPGELAKHAVSEGTKAVTKFTSA

SEQ ID NO: 24290 - protein, 152 aa, Oryza sativa
  Clone ID: TF_OsC631_8.pep
MAPKAEKKPAAKKPAEEEPAAEKAPAAGKKPKAEKRLPAGKGEKGGAGEGKKAGRKKGKKSVETYKIYIFKVLKQVHPDIGISSKAMSIMNSFINDIFEKLAAEAAKLARYNKKPTITSREIQTSVRLVLPGELAKHAVSEGTKAVTKFTSA

SEQ ID NO: 24291 - protein, 59 aa, Oryza sativa
  Clone ID: TF_LIB3432-001-P1-K1-F5.pep
MAETMQTGRLSTGLMAPRKQLATKVASKTVPTIEGVTKPNRYRPGTVLLLEIRKLHKST

SEQ ID NO: 24292 - protein, 155 aa, Oryza sativa
  unsure (1)..(155): unsure at all Xaa locations
  Clone ID: TF_OsC631_1.pep
MAPKAEKKPAEKKPAEEKAGEKAXRAGKKPKAEKRXLPASKGEKGGEGKKERGRKKAXKKSVETYQDIHPSKVLKQVHPDIGISSKAMSIMNSFINDIFEKLAGEXAAKLARYNKKPTITSREIXQTSVRLVLPGELAKHAVSEGTKAVTKLTSS

SEQ ID NO: 24293 - protein, 71 aa, Oryza sativa
  Clone ID: TF_OsC631_11.pep
ISSKAMSIMNSFINDIFEKLAGESAKLARYNKKPTITSREIQTSVRLVLPGELAKHAVSEGTKSVTKFTSA

SEQ ID NO: 24294 - protein, 127 aa, Oryza sativa
  unsure (1)..(127): unsure at all Xaa locations
  Clone ID: TF_uC-osflM202054d03b1.pep
MARTKQTARKSTCGKVPRKLLATKAAWKSAPTTGWCXKSHRYRPGSVVLRXSACTQKSTELLIRKLPFERLVREIAQDCKTDLRFQSHAVLRLHEGRLAYLVGLLEDTNLCAMHAKRVIIMPKDMQL

SEQ ID NO: 24295 - protein, 117 aa, Oryza sativa
  unsure (1)..(117): unsure at all Xaa locations
  Clone ID: TF_OsC1021_1.pep
MVSGEEGGGGDKKGRKXAKNSVETYKICIFEVLRQVHPHIGISCKAMSIMNSFINDIFEKLAQEAARLHRYNKKPNVTPRENQTSVRLVLRGGLAKHAVSEGTKAVTKFTEQEGLSL

SEQ ID NO: 24296 - protein, 105 aa, Oryza sativa
  Clone ID: TF_LIB4833-031-R1-N1-C8.pep
RDCSPCTPVWSLSISISPKSTARAKSPPRSEGEMARTKQTARKSTGGKAPRKQLATKAARKSAPTTGGVKKPHRYRPGTVALREIRKYQKSTELLIRKLPFQRLV

SEQ ID NO: 24297 - protein, 90 aa, Oryza sativa
  Clone ID: TF_LIB3431-006-P1-K1-G6.pep
VLDNGGSNRHRKVLLDNIQGITKPAIRRLARRGGVKRIFALIYEETRGVLKIFLENVIRDAVTYTEHARRKIVTAMDVAYSFNARPYSLR

SEQ ID NO: 24298 - protein, 126 aa, Oryza sativa
  unsure (1)..(126): unsure at all Xaa locations
  Clone ID: TF_2442431.pep
LPXELLERFRLXKEFMMDMALEXDADXXVDLLEHLEDVDLVGLNALLRLLPPRLLPLAAALLGLAGXXTLLRLGLLPRQGLLGLXRRGLLLRGLXCRRLLLRLGRHGCRSLLLGEGKGETKXXXHV

SEQ ID NO: 24299 - protein, 257 aa, Oryza sativa
  Clone ID: TF_OsC1067_5.pep
KSKEITRRRRLAFSAAPSSPLLLLADPHEADGVQVRDSRKQLATKATCKSAPATGGVKKPHRFRPGTVALREIRKYQKSTELLIRKLPFQRLVREIAQDFKTDLRFQSSAVAALQEAAEAYLVGLFEDTNLCAIHAKRVTIMPKDAARKSAPATGGVKKPHRFRPGTVALREIRKYQKSTELLIRKLPFQRLVREIAQDFKTDLRFQSSAVAALQEAAEAYLVGLFEDTNLCAIHAKRVTIMPKDIQLARRIRGERA

SEQ ID NO: 24300 - protein, 136 aa, Oryza sativa
  unsure (1)..(136): unsure at all Xaa locations
  Clone ID: TF_jC-osflLIB3477P002f05a1.pep
MARTKQTARLPTXGKAPRKQLATKAARKSAPATGGVKKPHRFRPGTVALREIRKYQKSTELLIRKLPFQRLVREIAQDFKTDLRFQSSAVSALQEAAEAYLVGLFEDTNLCAIHAKRVTIMPKDIQLARRIRGERA

SEQ ID NO: 24301 - protein, 312 aa, Oryza sativa; identical to SEQ ID NO: 16895
  Clone ID: TF_OsC200302_1.pep

SEQ ID NO: 24302 - protein, 202 aa, Oryza sativa
  unsure (1)..(202): unsure at all Xaa locations
  Clone ID: TF_OsC149298_2.pep
RRRGQGADVESSRGFRHMMRERQRREKLSQSYADLYAMVSSRSKGDKNSIVQSAAIYIHELKVARDQLQRRNEELKAQIMGHDEQQPCVTVQFEVDEPSSSIDSMIAALRRLKGMSVKARGIRSSMSGNRLWTEMNVETXQIAACEVEKAVEEALKEVERNQPDSDAPFPFFCPCRYNHTNNSFLSFPLPTSTLALPFSLSH

SEQ ID NO: 24303 - protein, 313 aa, Oryza sativa; identical to SEQ ID NO: 16822
  Clone ID: TF_OsC359_6144.pep

SEQ ID NO: 24304 - protein, 383 aa, Oryza sativa; identical to SEQ ID NO: 16823
  Clone ID: TF_OsC281849_1.pep

SEQ ID NO: 24305 - protein, 85 aa, Oryza sativa
  Clone ID: TF_OsC133207_2.pep
SVRQDALTAILQPHFYQSETKLNASAIFSIIQTSMIYLLTCTWSCSCFRYSMASSSMDALSVCNPQNQHTNTDKFPAQTQQNPSS

SEQ ID NO: 24306 - protein, 412 aa, Oryza sativa
  Clone ID: TF_OsC56584_1.pep
GSEKEMNEKDATDLEERSEASEHGQALSFHGGAMFLQEAQIASPAAANNALTSMANPFPIPPGLWNSTFTQHGSAGAPPPFVATPGFVDSTAGFPCYNGGNLGAMINHPFPGIHQPLGDFQNGVEPCREIEDIEIEGSKNVSQTGEKQQGDGETTHAVDSSSKELSMPGRNGGAGHDEGTRVSCSKKRKRSGQDGGVKHAEGGEQLATVGSAQKNEDDEKGEPKRSSVASGKSSGKQIKDNAGSPKEDYIHVRREKISERMKYLQDLVPGCSKVTGKAVMLDEIINYVQSLQRQVEFLSMKLASVNPTLDFNIERILSKDIFQCRGTTASSAFGFFPDIVHPRLHPPKYTQVGMPSIVNPTDAFGRVIHAPLGTNSAFKEPKHQMPNNLNGEFQDVIEMPFTHDHHGSNDQP

SEQ ID NO: 24307 - protein, 167 aa, Oryza sativa
  Clone ID: TF_OsC260146_1.pep
LSQRFIALSKIVPGLKKMDKASVLGDAIKYVKQLQDQVKGLEEEARRRPVEAAVLVKKSQLSADDDDGSSCDENFDGGEATAGLPEIEARVSERTVLVKIHCENRKGALITALSEVETIGLTIMNTNVLPFTSSSLDITIMATAGENFSLSVKDIVKKLNQAFKLSL

SEQ ID NO: 24308 - protein, 330 aa, Oryza sativa; identical to SEQ ID NO: 16827
  Clone ID: TF_OsC3973_1.pep

SEQ ID NO: 24309 - protein, 88 aa, Oryza sativa
  Clone ID: TF_OsC19797_1.pep
MSSRRSSRGSISEEEINELISKLQSLLPNSRRRGSSQASTTKLLKETCNYIKSLHREVDDLSDRLSDLMATMDHNSPGAEIIRSILRS

SEQ ID NO: 24310 - protein, 317 aa, Oryza sativa; identical to SEQ ID NO: 16829
  Clone ID: TF_OsC76770_1.pep

SEQ ID NO: 24311 - protein, 323 aa, Oryza sativa; identical to SEQ ID NO: 16831
  Clone ID: TF_OsC43374_1.pep

SEQ ID NO: 24312 - protein, 368 aa, Oryza sativa
  unsure (1)..(368): unsure at all Xaa locations
  Clone ID: TF_OsC43754_1.pep
MVPRDRVNAAAAGGGGEGRLVQSGIVNKKCDKKAPKRIHKSEREKLKRDKQNDLFNELGNLLEPDRQNNGKACVLGETTRILKDLLSQVESLRKENSSLKNESHYVALERNELHDDNSMLRTEILELQNELRTRMEGNPVWSHVNTRPALRVPYPTTGVFPVQHLPHLPVTTTAAFPQQLPVIIEQHYAATPRELQLFPESATSEDSEPSQEHGISDHVTRPQPSKDAWQNRSRDAPTVAARESSLNRKIGYKVTLFVLTVFSEMGKSLYSVLXKTIVFKNGMAKSIHHARVLIRQHHIRVGRQLVNIPSFIVRLESEKHIAFSLTSPLGGSPAVRVKRKNQKASGGGGDGEEEEEKELGHRNLSNMI

SEQ ID NO: 24313 - protein, 327 aa, Oryza sativa
  Clone ID: TF_OsC149298_1.pep
MESYYGAFHADEAAFFFPHHVPASPELPFGLIASPEPEPEPEQAAAEARQSAFQEYGGAVHAGAPAAAGAVTTGGTNIHRRVMDVLGRMGGGGGGGEKGEGEEMEEEEEVPQRRRRGQGADVESSRGFRHMMRERQRREKLSQSYADLYAMVSSRSKLQNVRNPPLIPLKWSVYYTGADTKPFSPLQGDKNSIVQSAAIYIHELKVARDQLQRRNEELKAQIMGHDEQQPCVTVQFEVDEPSSSIDSMIAALRRLKGMSVKARGIRSSMSGNRLWTEMNVETTIAACEVEKAVEEALKEVERNQPDSDAPFPGSKGWTQTSHVQNVF

SEQ ID NO: 24314 - protein, 254 aa, Oryza sativa
  Clone ID: TF_OsC51580_1.pep
MQGDHGYYGGRDSPPQGYGYGGGYGYGGGYGYDAGGYYSGGGGGYPSAGAAAAAYEDPMVGRRTHDFPAPMNELEFQPSATCPKNYVIFDQTCTKSRVMFHPSLAHKFGGGSSAYDNNVYGGGGAHDAAKGAYRDSVGYDDDDSCSVRQKEDTDEIDALLSSEDGDEDDVVSTGRTPGYRDGSSPDSTCSSSYGGGQARPGRKKERMKKMVRTLKGIIPGGNQMDTPAVLDEAVRYLKSLKVEVKKLGVRGSDN

SEQ ID NO: 24315 - protein, 466 aa, Oryza sativa
  Clone ID: TF_OsC21243_1.pep
MIVGAGYFEDSHDQSLMAGSLIHDSNQAPASSENTSIDLQKFKVHPYSTEALSNTANLAEAARAINHLQHQLEIDLEQEVPPVETANWDPAICTIPDHIINHQFSEDPQNILVEQQIQQYDSALYPNGVYTPAPDLLNLMQCTMAPAFPATTSVFGDTTLNGTNYLDLNGELTGVAAVPDSGSGLMFASDSALQLGYHGTQSHLIKDICHSLPQNYGLFPSEDERDVIIGVGSGDLFQEIDDRQFDSVLECRRGKGEFGKGKGKANFATERERREQLNVKFRTLRMLFPNPTKFISMMASIVGDAIEYIDELNRTVKELKILVEQKRHGNNRRKVLKLDQEAAADGESSSMRPVRDDQDNQLHGAIRSSWVQRRSKECHVDVRIVDDEVNIKLTEKKKANSLLHAAKVLDEFQLELIHVVGGIIGDHHIFMFNTKVSEGSAVYACAVAKKLLQAVDVQHQALDIFN

SEQ ID NO: 24316 - protein, 100 aa, Oryza sativa; identical to SEQ ID NO: 16845
  Clone ID: TF_OsC341353_1.pep

SEQ ID NO: 24317 - protein, 450 aa, Oryza sativa
  Clone ID: TF_OsC99421_1.pep
MQLFQGEEPAHDFLSLRAGGGSTSSPPFQHREEQHSSHSSRGYGMEIRRSLRPLDLAKQRGRSSGNGTAAGSAVDGASPAGSDSEEHVLPGGVGTFSIRHASGTPSREEAGSHGGVRRSAFAFAPALHGARMENAHETGGRSGSRAHRAPSTMWQDSAIDQRSIGQTPYEAFNSKTISYKYMVQEMCSKMQFFMLSFRLEILRELLPHTDQKRDKASFLSEVIEYIRFLQEKVQKYEEADPERNHEDSKSMPWAKVYYRSCWRNTKNTSQVQGEDLSPSTQDMNNEQYGPKHISAAQPALFNTQSVTSTTTSSSHMATGTPQNLEKNSTPSNQPPWLSMSTMRQESEPGNKMPNKHEKQTLHDENHSISSAYSQGLFNRLTEALKKSGLDPSQANIAVEINLAKRARDNTSDNSKIVCLIIILYLCPDFTSQINEDEEPIQITKRRCNKS

SEQ ID NO: 24318 - protein, 484 aa, Oryza sativa; identical to SEQ ID NO: 16891
  Clone ID: TF_OsC194068_1.pep

SEQ ID NO: 24319 - protein, 256 aa, Oryza sativa
  unsure (1)..(256): unsure at all Xaa locations
  Clone ID: TF_OsC255497_1.pep
MEEHDHQYATPPSPSSSSFRSFSAGTTTTTTSRDDNSSLMLAAAAASCHHQTTEVSSQILLPRPXKQHGGAAAAMAPPPPPPRSGRTPGTXGPKKHLLRRPGAATTATGGGGGQRAFKKAISVLSKIHAARLAQYYQIMEMAARASPAATAGGGGGENQQLQLQHVLSERKRREKLNDSFKALRDVLPPATKKDKASVLMRAKDYVNVLKARIAELEEKNRKLSESQQLQAADPISVCTPTTASTFSLSLPSAAEE

SEQ ID NO: 24320 - protein, 237 aa, Oryza sativa
  unsure (1)..(237): unsure at all Xaa locations
  Clone ID: TF_OsC217180_1.pep
RQPPRLPFWTAGEIDGDGRGVLGGGGEEXGSPAVRSHSEAERKRRQRINAHLATLRTLVPSASRMDKAALLGEVVRHVRELRCRADDATEGADVVVPGEGDEVGVEDEDDDEGERDEGCYVVGGGDRRWRRRVRAWVCCADRPGLMSDLGRAVRSVSARPVRAEVATVGGRTRSVLELDVVVASDAADNDRAVALSALRAALRTVLLNREELLAAAAAAATDGYKRPRFSPRCSSLT

SEQ ID NO: 24321 - protein, 345 aa, Oryza sativa
  Clone ID: TF_OsC2385_1.pep
MGLHGNQRRHDFLSPYDAAATATDYSPLPRHPDSKPSAPAPPPAQDFFLKTHDFLPQVEKRADQTPPPPPPPPPHAAVTAEKQLLHQHALAAAGAFTINHAVAAAATAVKQEPPFAPWCQPVAAVDPRGHQWSLPFAARAVAVASSRPQQQQQQPPPPERKGGGGFMDAGSRSSGGAGFDDDDGHAARREVSSSLKELTVRVEGKGGSCSGSAGTDQMPNTPRSKHSATEQRRRSKINDRFQLLRDLLPHNDQKRDKASFLLEVIEYIRFLQEKVQKYEVSYPEWNQENAKVVPWTNIYFRSSWKNAQNKGQVPADHSPDPPSPFKELSDPASNSQAMGRQLRVG

SEQ ID NO: 24322 - protein, 654 aa, Oryza sativa
  unsure (1)..(654): unsure at all Xaa locations
  Clone ID: TF_OsC252614_1.pep
MPGSREMSIISGGMWSDGNDFAELLWENGQAVVHGRKKHPQPAFPPFGFFGGTGGGGGGSSIRAQERQPCGIDASAKAGGGCSAEVIAPSVHGCGAGFGATMRDNGDLDTVRRIHYPTFVDEDAVAPPAPAVSDEHIISMGTGQCVPAVVVATAMQPXQASPPAHFPHGAIGFGYGMGVIAMSRNPALQMPPVPGAPTTRAEPQPQPQLAAGKLGTSTMPMFGVPVQTIPSSASSVPPFASLAGLPVRPSGVPQVSGAMANMSARPATGVSESTAAMSEQGSYTGSKSRXFTNADHHAGAYTEFAHMVPGVNQNHXMFSDWPGRAKPVHKTEARKAPEATVATSSVCSGNGAGSDELWRQQKRKCQAQAECSASQDDDLDDEPGVLRKSGTRSTKRSRTAEVHNLSERRRRDRINEKMRALQELIPNCNKACYVLQIDKASMLDEAIEYLKTLQLQVQMMSMGTGLCIPPMLLPTAMQHLQIPPMAHFPHLGMGLGYGMGVFDMSNTGALQMPPMPGAHFPCPMIPGASPQGLGIPGTSTMPMFGVPGQTIPSSASSVPPFASLAGLPVRPSGVPQVSGAMANMVQDQQQGIANQQQQCLNKEAIQGANPGDSQMQIIMQNVPVLKRSMAEEFHMVEDATRLQAVILDFQCSFL

SEQ ID NO: 24323 - protein, 475 aa, Oryza sativa; identical to SEQ ID NO: 16902
  Clone ID: TF_OsC101165_1.pep

SEQ ID NO: 24324 - protein, 320 aa, Oryza sativa
  unsure (1)..(320): unsure at all Xaa locations
  Clone ID: TF_OsC51267_1.pep
MMDGRMGLDRCESEVGVRCPRLIRSDAGGDLAALGSSESEQPTRPARPRGKRSRAAEVHNLSEKRRRSRINEKMKALQSLIPNSSKTDKASMLDDAIEYLKQLQLQVQMLSMRNGLYLPPVNLSGAPEHLPIPQMSAALDQNSAKASDPSVVLQPVNQTSGALLPFELASQHKPLFLPGVPNATALEPRFLVESSRSNLQSLRFTEPAEMIYPDEMMLKHRLTSASESTIVPGTDEKSVRQNTYMMNADRFDRYALSKDQLQHIMPKNTESVLDMPHLQRIXAEDSVSSVGQLTIQLPLLDRLQTSDTKVRVEGRIKVNP

SEQ ID NO: 24325 - protein, 253 aa, Oryza sativa; identical to SEQ ID NO: 16901
  Clone ID: TF_OsC21348_1.pep

SEQ ID NO: 24326 - protein, 121 aa, Oryza sativa
  Clone ID: TF_1086541.pep
MSERRRREKLNEMFLILKSLVPSIDKVDKASILAEPIPYLKDLERRFQELESGKKMSSPPKRNPCSETIIGGAARAGPGAVKGHHHWVLSESQEGTPSDVRVIIMDKDELHLEVHCRWKEL

SEQ ID NO: 24327 - protein, 365 aa, Oryza sativa; identical to SEQ ID NO: 16903
  Clone ID: TF_OsC308912_1.pep

SEQ ID NO: 24328 - protein, 236 aa, Oryza sativa; identical to SEQ ID NO: 16909
  Clone ID: TF_OsC6539_1.pep

SEQ ID NO: 24329 - protein, 447 aa, Oryza sativa; identical to SEQ ID NO: 16910
  Clone ID: TF_OsC348863_1.pep

SEQ ID NO: 24330 - protein, 473 aa, Oryza sativa; identical to SEQ ID NO: 16914
  Clone ID: TF_OsC359_7148.pep

SEQ ID NO: 24331 - protein, 567 aa, Oryza sativa; identical to SEQ ID NO: 16913
  Clone ID: TF_OsC2018_9.pep

SEQ ID NO: 24332 - protein, 348 aa, Oryza sativa; identical to SEQ ID NO: 16918
  Clone ID: TF_OsC91_2671.pep

SEQ ID NO: 24333 - protein, 483 aa, Oryza sativa
  unsure (1)..(483): unsure at all Xaa locations
  Clone ID: TF_OsC38156_1.pep
MNCGPPDQLPPATAPSCFLNLNWDQSMDAAAGGHLDPALSSMVSSPASNSTGALHGISPQPHYGGGTPLSSPPKLNLSMMGQFHHYAAPPQVGGGGGGGGGLPILENLMPMGHLDQFLADPGFAERAARLSGFDARGGGGGGGYGGAGPAQFGLPDAGAAGASKEMELGNTRDESSVSDPAPGGAEIPPKGASDGNARKRKASGKGKGKDSPMSTSAAKEDSSGKRCKSTEESNAAAEENSGKGKAAQSNSENGGGKKQGKDSSSKPPEPPKDYIHVRARRGEATDSHSLAERVRREKISQRMKLLQDLVPGCNKVVGKAVMLDEIINYVQSLQRQVEFLSMKLATVNPQLDFNNLPNLLAKDMHQSCSPLQSSHFPLETSGAPLPYINQPQQGNPLGCGLTNGMDNQGSMHPLDPAFCRPMGSHHPFLNGVSDAASXRLVLSGKMISKVLFRWIWGKVRRSPPLPIATMXVANSPHENGALT

SEQ ID NO: 24334 - protein, 323 aa, Oryza sativa; identical to SEQ ID NO: 16922
  Clone ID: TF_OsC156944_1.pep

SEQ ID NO: 24335 - protein, 410 aa, Oryza sativa
  Clone ID: TF_OsC7742_1.pep
MRWHWVIASTCARTTAASGAVEGFWDQRPYPVSSPPAAPTPAASGGGGGHAKAAARRRRRRPKVVKNKEEAESQRRNHIAVERNRRRQMNEYLAVLRSLMPPSYAQRGDQASIVAGAINFVKELEQLLQSLEAQKRRAEHAPPAPPFAGFFTFPQYSTTVGDNNAAGSGAADGEGGCGARPGAADIEVAMAESHANVRVLAPRRPRQLLRMVVALQCLGLTVLHLNVTTTADHLALYSFSLKMEDECRLSSVDEIAGAVNQMMSESEDEKSLSDEITDTSHLPWDPFWTRKCKYPSGGRSDNGWQRTEGWRAVGGASAGRRRGAAGGSEASAGRWVEQWGGRWKWSVGGAVGRATAGTRGGGRSERSGARRREIGETAGGREEHRAVGLPSSPSVIRGEEMGWKRGRSEQ

SEQ ID NO: 24336 - protein, 331 aa, Oryza sativa
  Clone ID: TF_OsC64413_1.pep
MAICSTDNELVELLWHNGGVVAQPQAAQARVVSSSGRGQSASVLTGDDTETAAWFPDTLDDALEKDLYTQLWRSVTGDAFPAAAAAGPSSHHAPPPDLPPPAARPPMRSGIGSSWTGDICSAFCGSNHIPETAAQRCRDAGAALPPERPRRSSTHDGAGTSSSGGSGSNFGASGLPSESASAHKRKGREDSDSRSEDAECEATEETKSSSRRYGSKRRTRAAEVHNLSERRRRDRINEKMRALQELIPHCNKTDMASILDEAIEYLKSPQMYIQIMWTTTRMEPVMVPCAHLFKPPIPLRRNLACMPAPLLRTICFWASSSTAKPDTESVS

SEQ ID NO: 24337 - protein, 267 aa, Oryza sativa; identical to SEQ ID NO: 16926
  Clone ID: TF_OsC547_362.pep

SEQ ID NO: 24338 - protein, 405 aa, Oryza sativa
  Clone ID: TF_OsC71941_1.pep
MDGGRVGGDYISSLLSSSPRLDFGVPVLDAIVAPGGGGGGGDCGLDKLCGDPGFAERAARLSSFNNGGGGVGQRYGGAGAGLFGMPPPAPGDFAGGGSREASSVSDPASSAMKDAAANAKNRKSTAAAAAAAKGKGKEPPVGEEKESDGKRCKTGNGEKESSVKPKAEQAGSDSSVEDGGGGGQKQGKGKNAKPVEPPKDYVHVRARRGQATDSHSLAERVRRERISQRMKVLQDLVPGCNKVIGKALMLDEIINYVQSLQRQVEFLSMKLATVNPLDFSNLPTLLQKDMFQACGPSASSVFSLESSNSAFRFAEQGDVFQQFAQNSMESQCTLNQLDLALSQATNAAQYAFQDGTAGANLQQRNFWEDDLQSVFHIENGQSQENGVSAPNFHGWQQAGHMKMEF

SEQ ID NO: 24339 - protein, 324 aa, Oryza sativa; identical to SEQ ID NO: 16930
  Clone ID: TF_OsC52485_2.pep

SEQ ID NO: 24340 - protein, 90 aa, Oryza sativa
  Clone ID: TF_rsicef_8683.y1.abd.pep
LPTATATTNASPKRSKVAAGAGDDGDADADAAEEKPEPAKDYIHVRARRGQATDSHSLAERVRRERISERMKLLQSLVPGCNKITGKALM

SEQ ID NO: 24341 - protein, 463 aa, Oryza sativa; identical to SEQ ID NO: 16938
  Clone ID: TF_OsC50284_1.pep

SEQ ID NO: 24342 - protein, 891 aa, Oryza sativa
  Clone ID: TF_OsC366116_1.pep
MVSKRCSASTGNRIGRYRIKRRYILVLSSCQARVKNSKLLPYKDGVQNTAIVSINWADLVRSHQLGRYDTSSAYRSIGYRVLTSFYYLSLLVAESNQLSHEHTRTHERRLVLKYKSARRQGLTCRARVYSSSTHQPLGDNTSIIVPRDATYISKSTRDTLHPCARNDRSSCCAAGALRVCRTRSYYVVKHGSSARRDAWELAPRHACTAMENDDDVEHPFYYFVHDDAAAGVDDHEELLASLGFLLPPPPPPPPPPQPDQGRSAFAAYQSTAAMASSSSSSESLSRRYHSSASNVHRRMHRFLRSIYDDAGDDAGATAEMQPAEGEQQQAAPSGGSARFRHIMRERLRRERLSQGYADLQAILPTGASSSKVLVKSLIRNYMSGGKNTIVAAAANYIRELEGRKGWLCAQNELLERTTPKPGAGMVVKVRAESELGSTVDVFEAVLRRLKAMDELQVTAIQSWFGAGGMWMDVAVESKRRAACTYAPPRWKLLRETRRVKRGRSSRIVKLIFLQLSVASTSANDSPIASRHAICTTEYSAFQLDRPPTSRPRHGHAPCSHRPSHARGHGRKIKGSQRFGAFLRGVRACSRLAGGARHVDAHVRTYVYARRYTVGSSNGPTDTCHVRADGAAVDRVRPIAAVSSSCPMHTARGVTPAGESGEGGGQGRDAARRRTHARTPGEQWTAGRHVISHMSPDIRAVVDRETQLLVCFRRRAVRYVLYRNEHDCSIVAGRQDDDGKRQRRDDNVCRGVVGRAGMQSGGGEYVRSSGGPSSPHRRGDAMDELDCGEHQLNGTTSVEIHLEDGPRVCACTALASALRLPALHPLPLHPAQVPIEVGGVEGGDGGKVEAGAVEDVTKEVKGEEEHEEVANGDKESVVDPFLDVEVGGDYRY

SEQ ID NO: 24343 - protein, 243 aa, Oryza sativa
  Clone ID: TF_OsC43939_1.pep
MSCGGAGQSGWLLEYGLVEEEIQGSDFIYMVDDPAAVSSVLLGFDVPRKEDGSGGQDNSASKKRSRPESSAPPGTKACREKLRRDRLNERFNELSAILEPGKPPRADKVSILSDAARLLSQLRAEAQKLKSSNESLQDSIKSLKAEKSELRDEKTRLKAERERLEQMLKGVGAATPAAPAPFVPHHAAAVAAAPAYHPAAFAQAGGKYVPYATSYAPPAAFWQWIPPTSLDTSKDPVMWPPVA

SEQ ID NO: 24344 - protein, 303 aa, Oryza sativa; identical to SEQ ID NO: 16931
  Clone ID: TF_OsC83673_1.pep

SEQ ID NO: 24345 - protein, 149 aa, Oryza sativa
  Clone ID: TF_OsC798_1.pep
MSSGWEESSLMSDTNISGVKRQRDSSEPSQNGGGGGGLAHQFSLPKTSSEMAAIEKFLQFQDAVPCKIRAKRGCATHPRSIAERVRRTRISERIRKLQELVPNMDKQTNTADMLDLAVDYIKDLQKQVKGLNDSRANCTCSAKHQQYSG

SEQ ID NO: 24346 - protein, 161 aa, Oryza sativa
  Clone ID: TF_rsicee_12437.y1.abd.pep
MAACQQQIWQEGKQQQHLHHGGYDDLSSVYRGTVVLPRRQGGLAREPPPPRPSSSSGRSAAAQATAMRIHSEAERRRRERINAHLATLRRILPDAKQMDKATLLASVVNQVKHLKTRATEATTPSTAATIPPEANEVTVQCYAGGEHTAAARTYVRATVSC

SEQ ID NO: 24347 - protein, 451 aa, Oryza sativa
  Clone ID: TF_OsC2018_11.pep
MASAPPVQEEALQPGTNHFRSRLAAAVRSISWSYTIFWSTSTSLPGVLTWNDGFYNGEVKTRKISNLEDLTADQLVLRRSEQLSELYYSLLSGECDHRARKPVAALSPEDIADTEWYYVVCMTYAFRPGQGLPGRSYASNRSVWLCNAQSADSKTFLRALLAKSASIQTIVCIPFMSGVLELGTTDPVSEDPNLVNRIVAYLKELQFPICLEVPSSTPSPDETEDADTVFDGLIEEDQMVILQGEDELGDVVVAECETNGANPETITMETDEFYSLCEELDLDLGSYQLVPTSARETVAAAAAAANDVDGVAYSHASCFVSWKRANPAEKVVAVPMTAGIESQKLLKKAVGGGTAWMSNIDDRGSVAITTTPGSNIKSHVMSERRRREKLNEMFLILKSLLPSVRKVDKASILAETITYLKVLEKRVKELESSSREPSRWRPTEIGQGKAP

SEQ ID NO: 24348 - protein, 205 aa, Oryza sativa
  Clone ID: TF_LIB4370-003-R1-K1-G9.pep
ASLGLDQLAAIGSLYQFIRGGGEGKEAASQEEEQTPKLRKFHNFSERRRRDRINEKLKALQELLPNCTKTDKVSMLDEAIDYLKSLQLQLQMLVMGKGMAPVVPPELQQYMHYITADPSQIPPIRPSEPRPFQITHATQQRQSNVESDFLSQMQNLHPSEPPQNFLRPPKLQLYTPEQQRRGLASSSGHNSGWITERNSSYNFLE

SEQ ID NO: 24349 - protein, 478 aa, Oryza sativa; identical to SEQ ID NO: 16937
  Clone ID: TF_OsC173150_1.pep

SEQ ID NO: 24350 - protein, 589 aa, Oryza sativa
  unsure (1)..(589): unsure at all Xaa locations
  Clone ID: TF_OsC377_1.pep
MEETPLPSGKNFRSQLAAAARSINWTYAIFWSISTSRPGVLTWKDGFYNGEIKTRKITNSMNLTADELVLQRSEQLRELYDSLLSGECGHRARRPVAALLPEDLADTEWYYVVCMTYAFGPRQGLPGKSFASNEFVWLTNAQSADRKLFHRALIAKSASIKTIVCVPFIMHGVLELGTTDPISEDPALVDRIAASFWDTPPRAAFSSEAGDADIVVFEDLDHGNAAVEATTTTVPGEPHAVAGGEVAECEPNADNDLEQITMDDIGELYSLCEELDVVRPLDDDSSSWAVADPWSSFQLVPTSSPAPDQAPAAEATDVDDVVVAALDGSSIDGSCRPSPSSFVAWKRTADSDEVQAVPLISGEPPQKLLKKAVAGAGAWMNNGDSSAAAMTTQGSSIKNHVMSERRRREKLNEMFLILKSVVPSIHRVDKASILAETIAYLKELEKRVEELESSSQPSPCPLETRSRRKCREITGKKVSAGAKRKAPAPEVASDDDTDGERRHCVSNVNVTIMDNKEVLLELQCQWKELLMTRVFDAIKGVSLXCPLGAGINIGWSPWTEDTSQVCLICCRRTWDDYRSSPESYSKLAS

SEQ ID NO: 24351 - protein, 263 aa, Oryza sativa; identical to SEQ ID NO: 16941
  Clone ID: TF_OsC374879_1.pep

SEQ ID NO: 24352 - protein, 485 aa, Oryza sativa; identical to SEQ ID NO: 16942
  Clone ID: TF_OsC1427_102.pep

SEQ ID NO: 24353 - protein, 361 aa, Oryza sativa
  Clone ID: TF_OsC58664_1.pep
MPRLAKKPVRTFPAAPQFGHQNRLFLSPGAVRMALEAVVFPQGHFGYGCGRDSPAYGMPWCDVLAAAGGGGGFGEFYGVDEWDDQLQVASVDEWEVASKDNSDASTEGKAAAAERAEPVAAGRRKRRRTKVVKNKEEIECQRMTHIAVERNRRRQMNEYLAVLRSLMPASYSQRGDQASIVGGAINYVKELEQLLQSLEVQKSLKNRSGAMDAAGDSPFAGFFSFPQYSTSPRTGCSAAASAGSSGSASSVVMDDTAGSAESGRQSAAIADIEVTMVEGHASLKVLARRRPKQLLKLVVGLQQLRIPPLHLNVTTVDAMVLYSFSLKVEDDSKLGSVEDIATAVHQILGSIQQQEAVLSIS

SEQ ID NO: 24354 - protein, 139 aa, Oryza sativa
  Clone ID: TF_OsC264262_1.pep
MFPVEVAAAAAAAGRMQGEAVVPMMLPPFFMDSGIWPAAAGVVDVAASAEEEAAAAAAAQDRALAASRNHREAEKRRRERIKSHLDRLRAVLACDPKIDKASLLAKAVERVRDLKQRMAGIGEAAPAHLFPTEHDEIVV

SEQ ID NO: 24355 - protein, 401 aa, Oryza sativa; identical to SEQ ID NO: 16944
  Clone ID: TF_OsC798_2.pep

SEQ ID NO: 24356 - protein, 555 aa, Oryza sativa
  unsure (1)..(555): unsure at all Xaa locations
  Clone ID: TF_OsC8564_1.pep
MQRYFHGQTDHAVRVRKIHKVKVILDNTLVAMYFACGDVQRARLVFEGMCDRDVISWTSLISGLVQNGSPLQGIQLXRDKKLAGVRPNDVTFLGLLSACNHAGAVEKGWSYFHSMKPDYGIEPQHQHYACVVDLLSRAGQLDRAYQFILNMPIKPEMTVWGALLHGCKMHGHSNMAMAECAAQHIFELEQSNAGHYVQLANMYASAGMWSQVAGMRVTMRERGVTKATGFSFIEVDGEMHSFHAWDHSHPRATEIFAMLCLLSPTPTGVGGVDSEGGWEGWELQWKWFQILRELLPHSDQKRDKATFLLEVIEYIRFLQEKVQKFEASVPEWNQENAKILPWSNIYFRSFWKNSQSKGQNPGDDLPDPSQFIRNGSSSGYNFTGKPDDNHNMVTSAAASGAQELVETDHAASVSYRSAETPTNITNNVTSQAQAQWASPAGVDDCAMNSEMLNNQQLAIDEGTISLSSQYSQQLLGTLTHALESSGVDLSQSSISVQINLGKRAVKRPGADGSSSSKELPSTSANNENMGHQLTMLGGGTEELPHPTKRHKSGNS

SEQ ID NO: 24357 - protein, 70 aa, Oryza sativa
  Clone ID: TF_rsicee_15174.y1.abd.pep
ARGLSSSQRRRDRINEKMRALQELIPNCNKIDKASMLEEAIEYLKTLQLQVQMMSMGTGMFVPPMMLPAA

SEQ ID NO: 24358 - protein, 610 aa, Oryza sativa
  Clone ID: TF_OsC9971_1.pep
MVMKMEADEDGANGGTGGTWTDEDRALTASVLGTDAFAYLTKGGGAISEGLVAASLPVDLQNRLQELVESDRPGAGWNYAIFWQLSRTKSGDLVLGWGDGSCREPHDGEMGPAASAGSDEAKQRMRKRVLQRLHSAFGGVDEEDYAPGIDQVTDTEMFFLASMYFAFPRRAGGPGQVFAAGVPLWIPNTERNVFPANYCYRGYLANAAGFRTIVLVPFETGVLELGSMQQVAESSDTLQTIRSVFAGAIGNKAGVQRHEGSGPTDKSPGLAKIFGKDLNLGRPSAGPGTGVSEADERSWEQRTGGGSSLLPNVQRAPPLQKLPQLQKSHQLVKPQQLVSQQQLQPQAPRQIDFSAGTSSKPGVLTKKPAGIDGDGAEVDGLCKDEGPPPALEDRRPRKRGRKPANGREEPLNHVEAERQRREKLNQRFYALRAVVPNISKMDKASLLGDAITYITDLQKKLKEMEVERERLIESGMIDPRDRTPRPEVDIQVVQDEVLVRVMSPMESHPVRAIFQAFEEAEVHAGESKITSNNGTAVHSFIIKCPGAEQQTREKGRISWGVGATGRGSFTSFAGCRQAASSRLDGHPSTHLSALLIEEVCRQRKKAQILT

SEQ ID NO: 24359 - protein, 406 aa, Oryza sativa
  Clone ID: TF_OsC50455_1.pep
MSDKDIKVALSGPPNILVTTPACVASCISKGIIRGSSIKESLSMMILDEISCDAKDKMLYILVLLKLELIQKKVLIFVNSIDSAFKLRLFLEKFGIRSSVLNAELPQNSRLHIIQAFNARLFDYLIATDDNKSKEERQANKGNKKDSRVSRKQLQQTLDAEFGVVRGIDFKNVFTFPFDLLFLKQVVNYDMPPDPAGYVHRVGRTGRANKTGASISLVSPKENGIFEDIENMLKDVENRDTSCISPFPLLTKNAVESLRYRAQDVARSVTTRDIKEARRQDIKNEILNSEKLKAHFDENPRDLDLLKHDKLLSNKEIPAHLRDVPEYLIDPTTKEASNVVKLSRAAMDIDKPRRRKRMGFKGGSGRSSDPLKTFSADVLFVGKSRRRGRKERDGEQDRRKRKKVES

SEQ ID NO: 24360 - protein, 294 aa, Oryza sativa; identical to SEQ ID NO: 16951
  Clone ID: TF_OsC105357_1.pep

SEQ ID NO: 24361 - protein, 401 aa, Oryza sativa; identical to SEQ ID NO: 16955
  Clone ID: TF_OsC340364_1.pep

SEQ ID NO: 24362 - protein, 236 aa, Oryza sativa
  Clone ID: TF_OsC83673_2.pep
MDFDLFNSYPESQLDLMSTMLQLEQLTALSDQSLFMAAPTSPPVSPMGTPSPQFSPPPQMSVTTTTAGGGYQDQYNSMPATYGAGAGVHQLDFAMSSPGSDSGAPQGSSSSSSSEAMREMIFHIAALQPVEIDPEAVRPPKRRNVRISKDPQSVAARLRRERISERIRILQRLVPGRTKMDTASMLDEAIHYVKFLKSQVQSLERAAAATGAAAHRAAAFGAAYPAALPMQHHAPW

SEQ ID NO: 24363 - protein, 387 aa, Oryza sativa
  Clone ID: TF_OsC134315_1.pep
MNRMTAPHGGMPPPPMPAAGGLARYGSAPGSLLASIADSVIRGRGVGVVDQLHHHQHQHQLPPPPPPQQQQMVGRYFSAESSGLTSCESSCRTTTTTSTAAAADVGRHPLERAYGGSGEIHVDASSAAVPLFRHSSSPAGLLSRLMADPHGNGMAATRGMGGYSGGGGDAGAMAHRRLSSQWSFSRQDLPQISEMGGLIPDIGESIVTGGGGNSSSDGAGHGAQSSSFLSSRNFSMSSWDDTNSIMFSPPSSSKKARVAAAAAGDHGDDMVSSFSNIDSQFGLSKQSSLEMAGMDDFLQLQPDSVACRARAKRGCATHPRSIAERERRTRISKRLKKLQDLVPNMDKQTNTSDMLDIAVTYIKELQGQVEKLKHDQANCTCSGKHDC

SEQ ID NO: 24364 - protein, 310 aa, Oryza sativa
  Clone ID: TF_OsC159138_1.pep
MDAEMAMGESFAYYWETQRYLESEELDSMYLPTQDDSNYESSSPDGSHSSSAPAPAAVGGDAAAAVAGSGGGMTTMMMGGGGGGGDDAGGANKNILMERDRRRKLNEKLYALRSVVPNITKMDKASIIKDAIEYIQRLQAEEQQMLREVAALESAAAASAAPAAANPFAGLGADEEHEYGHHHPSSSSERTKKVKRALSVSSISDALLAAAAPAPPVEIQELRVSEVGDRVLVVSVTCSKRRDAMARVCRALEELRLRVITANITSVAGCLMHTLFVEVDHMDSVQMKQMVEAALSQLVATGSPLSSMSY

SEQ ID NO: 24365 - protein, 279 aa, Oryza sativa; identical to SEQ ID NO: 16950
  Clone ID: TF_OsC335639_1.pep

SEQ ID NO: 24366 - protein, 367 aa, Oryza sativa; identical to SEQ ID NO: 16961
  Clone ID: TF_OsC371684_1.pep

SEQ ID NO: 24367 - protein, 688 aa, Oryza sativa; identical to SEQ ID NO: 16959
  Clone ID: TF_OsC113490_9.pep

SEQ ID NO: 24368 - protein, 351 aa, Oryza sativa; identical to SEQ ID NO: 16963
  Clone ID: TF_OsC58664_2.pep

SEQ ID NO: 24369 - protein, 248 aa, Oryza sativa; identical to SEQ ID NO: 16964
  Clone ID: TF_OsC81947_1.pep

SEQ ID NO: 24370 - protein, 430 aa, Oryza sativa; identical to SEQ ID NO: 16965
  Clone ID: TF_OsC47357_1.pep

SEQ ID NO: 24371 - protein, 338 aa, Oryza sativa; identical to SEQ ID NO: 16958
  Clone ID: TF_OsC3016_1.pep

SEQ ID NO: 24372 - protein, 361 aa, Oryza sativa
  Clone ID: TF_OsC5214_1.pep
MAQCGGGDVSRHRKGHLDTVESLCQGLLDDVMLDDDKCRAMFGYLQEWQDLASMCYGSLGGEPPLAPEASNGSGSSGGGGSFRKRRPDDAKGESNSICKRQRGKQQQQQQPCHPDQMAAAVGKGRPERARPGAKKKAEVASPKDSPATSASTVTAGQKTDYIHVRARRGQATDSHSLAERVRRERISERMRYLQELVPGCNKVTGKAGMLDEIINYVQSLQKQVEFLSMKIAASNPVVNFNIVEDLFGRQLSQAACNPAALPAMALPMAQVEPSCLQMSPLQQMQTSAGSSGYGLEMVVSNQYSPPGGPMSVPAGASVEPCLNVNGAAGWDIGSHGLFSGFDAPFQSVQSDCLLDNLKMEM

SEQ ID NO: 24373 - protein, 836 aa, Oryza sativa; identical to SEQ ID NO: 16854
  Clone ID: TF_OsC340653_1.pep

SEQ ID NO: 24374 - protein, 233 aa, Oryza sativa
  Clone ID: TF_OsC359492_1.pep
MEMTSYNDVDAGDMFAAADYYSAGAGGDLFDMVWPGRRRREEDNTSGCLPLSPPPPPELAVDDQLLAGGDGGGGKPVAVAVAEDDDSGERWTEDQVPTDEGICVMEKRRCKINENLKTLQQLVPVCDKSNNQASTLDKTIRYMKSLQQHAQAMSVGCSMKTAEAAGVTCPFLPPPPSSALLVIVEEGPTRPWDATARSTSAAATSFDHHHHGALIEKLLQVVQCSFAALHAVA

SEQ ID NO: 24375 - protein, 191 aa, Oryza sativa; identical to SEQ ID NO: 16856
  Clone ID: TF_OsC115381_1.pep

SEQ ID NO: 24376 - protein, 347 aa, Oryza sativa
  unsure (1)..(347): unsure at all Xaa locations
  Clone ID: TF_OsC217101_1.pep
GGWIVHGYTNGATATGAGNHGFTCGYAASSYVYGYSCGSWEFEQREQQFISSQIQHXSMHLSMDDDDDQSAGYGVAMVDDLLTPSPSTHHAVAAAAGSFPSSSSSSASFRSASVSYSPDTSSSAAAAAATGFYPELSSQVAPLLPPPPLVRNEPQPGRYTAGLPPPPPPPVTGGAFRRYARHLGPRRAPKPGACGQRMFKTAMSALAKMHMETTYRRRQYYYQQAAAAAEAAPPPPSGNNQLQHTMSERKRREKLNDSFVALKAVLPPGSKKDKTSILIRAREYVKSLESKLSELEEKNRELEARLSTRPDDTKNDEEEVAAPPEAGGEVKREDPVEIEALDNFFIR

SEQ ID NO: 24377 - protein, 291 aa, Oryza sativa; identical to SEQ ID NO: 16865
  Clone ID: TF_OsC80863_1.pep

SEQ ID NO: 24378 - protein, 282 aa, Oryza sativa; identical to SEQ ID NO: 16866
  Clone ID: TF_OsC80863_2.pep

SEQ ID NO: 24379 - protein, 258 aa, Oryza sativa
  Clone ID: TF_OsC123144_1.pep
MAECQPLQLQEGKKLQELQPYDGCNPSVYRGPILLPRQANSAPPAVPPEMSSSSGSGRSATEARALKIHSEAERRRRERINAHLTTLRRMIPDTKQMDKATLLARVVDQVKDLKRKASEITQRTPLPPETNEVSIECFTGDAATAATTVAGNHKTLYIKASISCDDRPDLIAGITHAFHGLRLRTVRAEMTSLGGRVQHVFILCREEGIAGGVSLKSLKEAVRQALAKVASPELVYGSSHFQSKRQRILESHCSIMSI

SEQ ID NO: 24380 - protein, 272 aa, Oryza sativa; identical to SEQ ID NO: 16868
  Clone ID: TF_OsC14042_1.pep

SEQ ID NO: 24381 - protein, 292 aa, Oryza sativa
  Clone ID: TF_OsC10538_1.pep
DVQKKKKKKKKKGRSGGAKRQQCKNLEAERKRRKKLNGHLYKLRSLVPNITKMDRASILGDAIDYIVGLQKQVKELQDELEDNHVHHKPPDVLIDHPPPASLVGLDNDDASPPNSHQQQPPLAVSGSSSRRSNKDPAMTDDKVGGGGGGGHRMEPQLEVRQVQGNELFVQVLWEHKPGGFVRLMDAMNALGLEVINVNVTTYKTLVLNVFRVMVVRDSEVAVQADRVRDSLLEVTRETYPGVWPSPQEEDDAKFDGGDGGQAAAAAAAAGGEHYHDEVGGGYHQHLHYLAFD

SEQ ID NO: 24382 - protein, 117 aa, Oryza sativa
  Clone ID: TF_LIB4830-002-R1-N1-A10.pep
PPPLPARAQPRPKVRARRGQATDPHSIAERLRRERIAERMRALQDLVPNTNKTDRAAMLDEILDYVKFLRLQVKVLSMSRLGGAGAVAQLVADIPISVKLFLHCTLPVITRNVQGFS

SEQ ID NO: 24383 - protein, 293 aa, Oryza sativa; identical to SEQ ID NO: 16870
  Clone ID: TF_OsC33145_1.pep

SEQ ID NO: 24384 - protein, 477 aa, Oryza sativa; identical to SEQ ID NO: 16871
  Clone ID: TF_OsC16721_2.pep

SEQ ID NO: 24385 - protein, 777 aa, Oryza sativa
  unsure (1)..(777): unsure at all Xaa locations
  Clone ID: TF_OsC8567_1.pep
MKLRLRSMDQRGGAGGAAETHRVQLPDTATLSDVKAFLATMLSAAQPVPAESVRLTLKGIEELLTPDPSARLPALGLASGVLLYFTLSPLPSPSPPPPPQPQAQPLPRNPNPDVPSIAGAXADPTKSPVESGSSSSMPQALCTNPGLPVASDPHHPPPDVVMAEAFAVIKSKSSLVVGATKREMENVGGADGTVICRLVVALHAALLDAGFLYANPVGSCLQLPQNWASGSFVPVSMKYTLPELVEALPAVEEGMVAVLNYSLMGNFMMVYGHVPGATSGVRRLCLELPELAPLLYLDSDEVSTAEEREIHELWRVLKDEMCLPLMISLCQLNNLSLPPCLMALPGDVKAKVLEFVPGVDLARVQCTCKELRDLAADDNLWKKKCEMEFNTQGECGCVVWKCIYSDQRKDIVLADKYTCGNYMQKPVTQPGRWLIILVYHSLLCQYITIGLSLLWYHLVDLVQDAPAAGIHFDCIIPLPINPYQLPPSAGACCSTTQASASAKDGGNMYSPPCSAAASSQGHCFAVGANQLASLDLAMDFDEPILFPVHNASLQEGIQFYNPTGDTQLSRNMSIDKCLKGSKRKGSGEGSSSLHSQEETGEMPQRELSMEHAGEKAGDADASREEYVHVRAKRGQATNSHSLAERFRREKINERMKLLQDLVPGCNKITGKAMMLDEIINYVQSLQRQVEFLSMKLSTISPELNSDLDLQDILCSQDARSAFLGCSPQLSNAHPNLYRAAQQCLSPPGLYGSVCVPNPADVHLARAGHLASFPQVYI

SEQ ID NO: 24386 - protein, 361 aa, Oryza sativa; identical to SEQ ID NO: 16876
  Clone ID: TF_OsC349240_1.pep

SEQ ID NO: 24387 - protein, 412 aa, Oryza sativa; identical to SEQ ID NO: 16879
  Clone ID: TF_OsC14034_1.pep

SEQ ID NO: 24388 - protein, 492 aa, Oryza sativa; identical to SEQ ID NO: 16878
  Clone ID: TF_OsC352120_1.pep

SEQ ID NO: 24389 - protein, 494 aa, Oryza sativa; identical to SEQ ID NO: 16886
  Clone ID: TF_OsC189424_1.pep

SEQ ID NO: 24390 - protein, 424 aa, Oryza sativa; identical to SEQ ID NO: 16885
  Clone ID: TF_OsC731_1.pep

SEQ ID NO: 24391 - protein, 363 aa, Oryza sativa; identical to SEQ ID NO: 16882
  Clone ID: TF_OsC150404_1.pep

SEQ ID NO: 24392 - protein, 139 aa, Oryza sativa
  Clone ID: TF_LIB4309-014-Q1-K1-A3.pep
MKGAKSKGAAKPDAKLAVKSKGAEKPAAKGRKGKGGKDPNKPKRAPSAFFVFMEEVRKGVKGKNPKNKSGAGVGKAPRDRWETLARADKGSYVAQGHQLKGGFHKGLGGSLQGGSAAHKGPPPGGEGGLGGICPGSLSR

SEQ ID NO: 24393 - protein, 74 aa, Oryza sativa
  Clone ID: TF_uC-osflcyp019f08b1.pep
MKGAKCKGADKPDAKLAAKSKDAETPAAKGRKGKASKDPNKPKRNPSAFFGFMEEFRKESKERNPKNKSVAAAR

SEQ ID NO: 24394 - protein, 50 aa, Oryza sativa
  Clone ID: TF_2280684.pep
KAPYVAKANKLKAEYNKAIAAYNKGETLPRRTRKEERRREEDLQVQVRVI

SEQ ID NO: 24395 - protein, 112 aa, Oryza sativa
  unsure (1)..(112): unsure at all Xaa locations
  Clone ID: TF_2800810.pep
WIPRAARIRHDVFMDHFTNDYNDNHPNVTHVSVIGNAGGDNWNSMTDADKAPFVTNADKLNADYTNNIDAYNNKHAXGPATSGDSDKSNSDVNTTTTASVTRGGPVPNSPYS

SEQ ID NO: 24396 - protein, 138 aa, Oryza sativa
  unsure (1)..(138): unsure at all Xaa locations
  Clone ID: TF_LIB4833-020-R1-N2-D9.pep
MRHKPARQGDEGDRPLSDPNKSKRTPSAFFSFMEEIRKEFKENNPXKNKSVADAXKADGDMCESLTEADKDPYVAXDNKLKDEYNKGIAVYYKGESAAKNAPDKEEEEDDDERSDESKSEVIDEDDDECIEEDVHDDE

SEQ ID NO: 24397 - protein, 90 aa, Oryza sativa
  unsure (1)..(90): unsure at all Xaa locations
  Clone ID: TF_473985.pep
GSYKPNSPAVRSRSRGEXKARSRSXNCXXXXXVRKXXAEKDPNKPKRPPSAFFVFXEQFXKXFKEXXPNVKXVLVICKACGDKWKSMTYA

SEQ ID NO: 24398 - protein, 151 aa, Oryza sativa
  unsure (1)..(151): unsure at all Xaa locations
  Clone ID: TF_LIB4831-025-R1-N1-E10.pep
MKGVKSKGAIKSDAMLCVKSKGVDNAAAKGRKGKAGKDPNXFKRAPSAFFDFMEEFRKEFQENNPMNKSVAGVGKTTGDRSKSLIEVHKAPYVYXPTSLKAEYNXAIAAYDKGVEHCTRRYPTKXNRIDHEEESDKLKSEVIDEYDDEVSA

SEQ ID NO: 24399 - protein, 92 aa, Oryza sativa
  unsure (1)..(92): unsure at all Xaa locations
  Clone ID: TF_8334942.pep
VVVLEEFLWEFNDNIPTDXAVGAVGKAASDRXKYLTEADNDPYVAXANKLKAEYNKAIAAYKQGREHCXKAPPKEEEDDHQXEFDKSKSEVY

SEQ ID NO: 24400 - protein, 146 aa, Oryza sativa
  unsure (1)..(146): unsure at all Xaa locations
  Clone ID: TF_8955664.pep
MKGAKSKGAAKPDGKLAVKSKGAEKPAAKXRKGKADKDPNKPKRAPSXFFVFIEEFRXEFTEKNPKNXSVAAXGKAAGDRWKSXPQQTRLXYVAKANKLKAEYTKAIAAYNKGESTAXKAPAKEEEEDDEEDLQSKSEVIIRMTTR

SEQ ID NO: 24401 - protein, 641 aa, Oryza sativa
  Clone ID: TF_OsC922_1.pep
MTDGHLFNNILLGGRAGSNPGQFKVYSGGLAWKRQGGGKTIEIEKSDLTSVTWMKVPRAYQLGVRTKDGLFYKFIGFREQDVSSLTNFMQKNMGLSPDEKQLSVSGQNWGGIDINGNMLTFMVGSKQAFEVSLADVSQTQMQGKTDVLLEFHVDDTTGGNEKDSLMDLSFHVPTSNTQFLGDENRTAAQVLWETIMGVADVDSSEEAVVTFEGIAILTPRGRYSVELHLSFLRLQGQANDFKIQYSSIVRLFLLPKSNNPHTFVVVTLDPPIRKGQTLYPHIVIQFETEAVVERNLALTKEVLAEKYKDRLEESYKGLIHEVFTKVLRGLSGAKVTRPGSFRSCQDGYAVKSSLKAEDGLLYPLEKGFFFLPKPPTLILHEEIEFVEFERHGAGGASISSHYFDLLVKLKNDQEHLFRNIQRSEYHNLFNFINGKHLKIMNLGDGQGATGGVTAVLRDTDDDAVDPHLERIKNQAGDEESDEEDEDFVADKDDSGSPTDDSGGEDSDASESGGEKEKLSKKEASSSKPPVKRKPKGRDEEGSEKRKPKKKKDPNAPKRAMTPFMYFSMAERGNMKNNNPDLPTTEIAKKLGEMWQKMTGEEKQPYIQQSQVDKKRYEKESAVYRGAAAMDVDSGSGGNESD

SEQ ID NO: 24402 - protein, 112 aa, Oryza sativa
  unsure (1)..(112): unsure at all Xaa locations
  Clone ID: TF_8955997.pep
MKGAKSKGAAKPDAKLAVKXXGAXKPAAKGRKGKAGKDPNXPKXAPSAFFVFMXEFRKEFKEKNPXNKSVAAXGKAXGDRWKSLTEXDXAPYVPSXQAQXRXQQAIAAYNKG

SEQ ID NO: 24403 - protein, 146 aa, Oryza sativa; identical to SEQ ID NO: 16974
  Clone ID: TF_OsC1457_5.pep

SEQ ID NO: 24404 - protein, 242 aa, Oryza sativa
  unsure (1)..(242): unsure at all Xaa locations
  Clone ID: TF_OsC1301_1.pep
IVSKKKKKKKKKKKQKKKKKVTIHHTTTTLKADAAXSKDEIQARVAQLKKELSETDSIYDTEKLAERIAKLSGGVAVIKVGAATETELEDRQLRIEDAKNATFAAIEEGIVPGGGTAYVHLSTTVPAIKETIEDHDERLGADIIQKALVAPASLIAHNAGVEGEVVVEKIKDGEWEVGYNAMNDKYENLIEAGVIDPAKVTRCALQNAASVAGMVLTTQAIVVEKPKPKAPVAEPAEGTLTV

SEQ ID NO: 24405 - protein, 83 aa, Oryza sativa
  unsure (1)..(83): unsure at all Xaa locations
  Clone ID: TF_3763394.pep
KGGATADPNRPKKPASSFLLFSKEARRXLAEERPGXASSXLTALXSVKWKELGEAEKQAXNXNAAEAXAAYKRDXEEYTKAAA

SEQ ID NO: 24406 - protein, 132 aa, Oryza sativa
  Clone ID: TF_OsC90143_1.pep
MGKADADAEFKAAGKRKKAGGAGKPKRGLTPFFAFLAEFRPQYMEKHPNTKGVAAVTKAAGEKWRAMSDEEKAQYGGKKPDGESKPAAASKKKESTSSKKAKTDGAEQEGEGSDKSKSDVEDDENDGSGEDE

SEQ ID NO: 24407 - protein, 116 aa, Oryza sativa
  unsure (1)..(116): unsure at all Xaa locations
  Clone ID: TF_LIB4506-025-R1-K1-B4.pep
MKGAKSKGAAKPDAKLAVKSKGAEKPAAKGRKGKAGKDPNKPKRAPSAFFVFMEEFRKEFKEKNPKNKSVAAXGKAAGDRWKSLAEAXKAPYXAXALLLKAEFLLALAASXXGGST

SEQ ID NO: 24408 - protein, 129 aa, Oryza sativa
  unsure (1)..(129): unsure at all Xaa locations
  Clone ID: TF_uC-osrocyp031b01b1.pep
YKGAAKANTKLAEKSKGAEKPGGKGRKGKAGKDPNKPKRAASAFFAVMEEFRKEFKEKNPKNKSVAAVGKAAGDRRKSLTEADKAXPNXAQGHKLKAEYNKAIAAYNKGESTAKKAPAXEEEEDDQEES

SEQ ID NO: 24409 - protein, 448 aa, Oryza sativa
  Clone ID: TF_OsC85710_1.pep
MSAAAEEAAAAAAAEEVEGVEAGKKGVADAKGKGKEKVVVAEEDSAVAAGSGGSGGGRRTLVAYPARVAGYKDVVADAAVFRRALEGLHAQMGTKLKVPIIGGKDLDLHQLFKEVTSRGGIDKKYYMSLLYHFERLYLFEAQGWYQETADSRSISCIEMKAEGQASRKRKRGSNSCSSDPPINLEWTLSASLDNDVQVIIDGKFEHGYIVTVIMGSKSTKAVLYNCTEEPAVPTAVPHVAIDSAEGIRPRRRRRRKKLSTTDPNHPKPNRSGYNFFFQDQHRKLKPEYPGQDRLISKMIGERWNNLGPEDKAVYQEKGVEDKARYQRQLALYREQRTGQPISNAVPIQQRLPQKEVTIDEVDSKVSEGDILLSNQGYSSSTSSSDETADSGEKNVEDDEEFNTETSPEPSMETTDSHGQPDPSADGERFELRRRENPKIDEKRDMPPN

SEQ ID NO: 24410 - protein, 158 aa, Oryza sativa
  unsure (1)..(158): unsure at all Xaa locations
  Clone ID: TF_LIB4832-017-R1-N1-H2.pep
MKGGKSTGAAKPXSKVVCEYNRXEKPAEKGKNIKAAKDPNKPKRAPXGFFHFMQEFRKELKENNPKNTTVAAAGKEAXDRSKSLTEADNAPYVAKANKLKAEYNKDIAAYNKVYSTAKNAPDKEEEEDDEEESDKSKSHVXNDEEDDQGSEEDEDYDY

SEQ ID NO: 24411 - protein, 646 aa, Oryza sativa
  unsure (1)..(646): unsure at all Xaa locations
  Clone ID: TF_OsC206808_1.pep
MTDGHHFNNISLGGRGGNNPGQFKLYSGGLAWKRQGGGKTIEVEKSDITSVTWMAIPRSYQLGVSTKEGLFYRFFGFREQDISSLTNFMEKNMRITPEEKQLSVGGHNWGGIEINGNMLSFNVGSKEAFEVSLADVAQTQMQGKTDVVLEFHVDDTTGGNEKDSLMDLSFHVPTSNTQFPGDENRPSAQVLWQAILNKADVGSSEEAVVTFDGIAILTPRGRYSVELHLSFLRLQGQANDFKIQYSSILRLFVLPKSNNPHTFVVITLDPPIRKGQTLYPHIVIQFETEAVVQRDLTLSDEVLAEKYKDRLENSYQGLIHEVFSKVLRGLSGAKVTRPSTFRSCQDGYAVKSSLKAEDGXLYPLEKGFFFLPKPPTLILHEELXSLWQIEYVEFERHGAGGASISSHYFDLLVKLKNDQEHLFRNIQRNEYHNLFNFISGKHLKILNLGEAQGRAGGVTAVLQSTDDDAVDPHLERIRNQTGDDESDEEDEDFVADKDDSGSPTDDSGEEGSDASLSGGEKEKSSKKEASSSKAPLKKRKPKGGDAAEGSEKRKPKKKKDPNAPKRAIAPFMYFSKAERANLKNSNPELATTEIAKKLGERWQKMTAEEKQPYVEQSQVDKKRYAEESAAYRGAAAMDVDSGPASD

SEQ ID NO: 24412 - protein, 117 aa, Oryza sativa
  unsure (1)..(117): unsure at all Xaa locations
  Clone ID: TF_uC-osflcyp054d10b1.pep
MKGAKSKGAAKPDAKMAVKSKGAEKPAAKGRKGKAGKDPNKPKRAPSALFGFMEELRXEFKEKNPKNKSVAACGKAPGDRWKSLTEADKAASVAQANTLKAVYNMAIAAXYNQGEST

SEQ ID NO: 24413 - protein, 504 aa, Oryza sativa; identical to SEQ ID NO: 16977
  Clone ID: TF_OsC5000_2.pep

SEQ ID NO: 24414 - protein, 108 aa, Oryza sativa
  unsure (1)..(108): unsure at all Xaa locations
  Clone ID: TF_2311851.pep
MKGAKSKGAAKPDAKLAXKSKGAEKPXAKGRKGKAGKDPNKPKRAPSAFFVFMEEFRKEFKEKNPKNKSVAAVGKAXGDRWKSLDRXRTRXPMXQRXTSFKXVYNKGI

SEQ ID NO: 24415 - protein, 114 aa, Oryza sativa
  Clone ID: TF_LIB4833-008-R1-N1-G8.pep
MKGAKSKGAAKPDAKLAVKSKGAEKPAAKGRKGKAGKDPNKPKRAPSAFFVFMEELRKEFREKNPNNKSAAAVGKAPADSRKSLTEAHKAPYVAKANTLRAEHTRAIAAYNKGQ

SEQ ID NO: 24416 - protein, 264 aa, Oryza sativa
  Clone ID: TF_OsC1457_1.pep
RSGTIPCSLSSDSSISSKYSSDSPSLSPSTSSPTSLGLSPASSNFSHTLVPSSRSPLHQSSNEEPSKSGLGSIRSPSKTSSIAERRGGFSSLKLPSFQKDLVLPPRVPTSLRREEEVTDKSNNNSVKQLTGVCCPEKCTGNTSTVHTKTGITERTDSISEACGNLQLLVYRWPSKEKLTTFTRKDLDPKSVLIFVTPEDSRSEAVKTVHIWVGGEYESSKCVDTVDWQQVVGDFFHLKELGNTLPVKVFKEHETENLLEVLNAR

SEQ ID NO: 24417 - protein, 101 aa, Oryza sativa; identical to SEQ ID NO: 7649
  Clone ID: TF_LIB4833-024-R1-N1-F8.pep

SEQ ID NO: 24418 - protein, 158 aa, Oryza sativa
  unsure (1)..(158): unsure at all Xaa locations
  Clone ID: TF_3548937.pep
MKGAKSKGAAKPDAKLAVKSKGAXXPAAKGRKGKAGKDPNKPKXAPSAFFVFMEXFRKEFKXXNPKXNKSVAAVGKAAGDRWKSLTEADKAPYXXKANKLKAXXNKAIAAYNKGXSTAKXAPAXEEEEDDXXESDKSXSEVHDEDDDXGXEXDEXXDX

SEQ ID NO: 24419 - protein, 203 aa, Oryza sativa; identical to SEQ ID NO: 16970
  Clone ID: TF_OsC4387_1.pep

SEQ ID NO: 24420 - protein, 145 aa, Oryza sativa; identical to SEQ ID NO: 16971
  Clone ID: TF_OsC742_1.pep

SEQ ID NO: 24421 - protein, 361 aa, Oryza sativa
  Clone ID: TF_OsC1450_1.pep
MEEISHHFGVVGASGVHGGHQHQHHHHPWGSSLSAIVAPPPPPQLQQQQTQAGGMAHTPLTLNTAAAAVGNPVLQLANGSLLDACGKAKEASASASYAADVEAIKAKIISHPHYSSLLAAYLDCQKVGAPPEVAARLTAVAQDLELRQRTALGVLGAATEPELDQFMEAYHEMLVKYREELTRPLQEAMEFLRRVETQLNTLSISGRSLRNILSSGSSEEDQEGSGGETELPEIDAHGVDQELKHHLLKKYSGYLSSLKQELSKKKKKGKLPKDARQQLLNWWELHYKWPYPSESQKVALAESTGLDLKQINNWFINQRKRHWKPSDEMQFVMMDGYHPTNAAAFYMDGHFINDGGLYRLG

SEQ ID NO: 24422 - protein, 90 aa, Oryza sativa
  Clone ID: TF_uC-osflM202042d03b1.pep
RAFHHMGIMGQEAWRPQRVLPERSVNILRSWLLEHLLHPYPSDADKHLLARQTGLSRNQVSNWFINARVRLWKPMIEEMYQQECKELEGS

SEQ ID NO: 24423 - protein, 603 aa, Oryza sativa; identical to SEQ ID NO: 16979
  Clone ID: TF_OsC147537_1.pep

SEQ ID NO: 24424 - protein, 150 aa, Oryza sativa
  unsure (1)..(150): unsure at all Xaa locations
  Clone ID: TF_OsC1713_5465.pep
DGGGEPCPGVGSGFCSLSHSRRRCWWCSASGSSGKVKRIMKTPYQLEVLKRTYXLGLTDKQLQMWFCHRRLKDRKPPPKRQQLEEEVHVPVMAPPPVLSPPLPHRELTMAPGGMYGEQLLPSSSRRGTGRASAILDMSDLQCLPLLTSHG

SEQ ID NO: 24425 - protein, 612 aa, Oryza sativa
  Clone ID: TF_OsC796_1.pep
MSSAAGGGGYGGGQGGGAEHHHHHHGHAGHLLLHHHPQHVAGAAVAAAAAAAGGQMYHVPQHSRREKLRFPPDAGDSPPPHGHGHGHAPQQQQQHGSWPPPPAFYSYASSSSSYSPHSPTLAQAQLVAHGLAPPLPQIPTQNFSLSLSSASSNPPPPQAQPRRQLGGLAQATGPFGPFTGYAAVLGRSRFLGPAEKLFEEICDVGGAASHVDRTISDEGLLDADPMDGVDHDVVDHDLGGADRAAADAGPISGAEQQWKKTKLISMMEEVCKRYRQYYQQVQAVMASFETVAGFSNAAPFAALALRAMAKHFKCLKSMILNQLRNTSNKVAVKDGLNKEIAVFGLAGGSSGGAGLQRANSASAFGQPHNIWRPQRGLPERAVSVLRAWLFEHFLHPYPTDGDKQMLAKQTGLTRNQVSNWFINARVRLWKPMVEEIHNLEMRQMHKHSVVDKGQHSVHHQAQHSSQCSGNPSVPSDSHPGQSSSITRNHNTAASQGFPDELSQMSQSIQGQVSFAYNGLTSQHNIASPHHQHQQVGGVGIGGGNGGVSLTLGLHQNNRVCIAEPLPAALPANLAHRFGLEEVSDAYVMSSFGGQDRHFGKEIGGHLLHDFVG

SEQ ID NO: 24426 - protein, 109 aa, Oryza sativa
  unsure (1)..(109): unsure at all Xaa locations
  Clone ID: TF_OsC244_6.pep
RRRASRRSTLSSLSGKRGAPSAPAAVAXEDSGGGSRKKLRLSKDQAAVLEDTFKEHNTVNPISKQTNNXKQKAALARQLNLKPXQVEVWFQNRRARTKLRQTEVDSELL

SEQ ID NO: 24427 - protein, 341 aa, Oryza sativa
  Clone ID: TF_OsC1648_1.pep
MESFASLAGGGSSSTTARLPELISPENPDHISPPPLLYQLLAGPASSARQHGHDGHHHGGGGGEAAAAAVQGQVSPAGAEAAVKAEIMSHPQYSALLAAYLGCKKVGAPPDVLTKLTAVPAAQQLDEADGHPRRRHEPRRDDDPDQLDQFMVSTCSMLTRYREELERPILEAAEFFSRVETQLDSLAESNCEGTGSSEEEQDPSDKQLKHQLLRKYGGSLGDLRQVFSKRTKKGKLPKEARQKLLHWWELHYKWPYPSEMEKMTLAQTTGLDQKQINNWFINQRKRHWKPTPVAGTAFPTMEAAGGGFRHSGHGGGLAAAAALPLYMGRPFVVDGMYRLGS

SEQ ID NO: 24428 - protein, 678 aa, Oryza sativa; identical to SEQ ID NO: 16982
  Clone ID: TF_OsC49147_1.pep

SEQ ID NO: 24429 - protein, 238 aa, Oryza sativa
  Clone ID: TF_10504981.pep
KRERFFLTRELNARRRARARNLVPHPPAADLLARPPRRRPRVGGGGGGRGPRKRRRRLRRIICSPRRCRRRRPPPTGCPPRRGPWGPSRSRGTRPRPGSTTPRCCPRRRDAAGRTRPPVARPCPPPRSRRCPVLSLSSAFTCCSCCSSKAAAASSNARCPPAFRDGELQFGARRAARGRLRPAPGVPSVVVSFSGSFSFKEHDLTAQDHHEFSQNQGARPNRIEDNARLGGGAGGGRS

SEQ ID NO: 24430 - protein, 647 aa, Oryza sativa; identical to SEQ ID NO: 16983
  Clone ID: TF_OsC48414_1.pep

SEQ ID NO: 24431 - protein, 642 aa, Oryza sativa; identical to SEQ ID NO: 16984
  Clone ID: TF_OsC17293_1.pep

SEQ ID NO: 24432 - protein, 884 aa, Oryza sativa; identical to SEQ ID NO: 16985
  Clone ID: TF_OsC61454_1.pep

SEQ ID NO: 24433 - protein, 1123 aa, Oryza sativa; identical to SEQ ID NO: 16987
  Clone ID: TF_OsC47330_1.pep

SEQ ID NO: 24434 - protein, 330 aa, Oryza sativa
  unsure (1)..(330): unsure at all Xaa locations
  Clone ID: TF_OsC85922_1.pep
MAFHGHLPHEMTMQALGADDAAVAAAAAAXTTSDSSASPSGAAAAAARVRXGGDAVAAAMGGGGEADAARCKAEILAHPLYEQLLSAHVACLRIATPVDQLPRIDAQLAQSQGVVAKYSALAAAAAGDDGRELDQFMTHYVLLLCSFKEQLQQHVRVHAMEAVMACWELEQNLQSLTGASPGEGTGATMSDGEDDQADSEANMYDPSLDGADNMGFGLPTESERSLMERVRQELKHELKQGYKEKLIDIREEILRKRRAGKLPGDTTSTLKAWWQSHAKWPYPTEEDKARLVQETGLQLKQINNWFINQRKRNWHSNPSSSTSVKTKRKR

SEQ ID NO: 24435 - protein, 318 aa, Oryza sativa
  unsure (1)..(318): unsure at all Xaa locations
  Clone ID: TF_OsC1970_2.pep
MAFHYQDHALAMDAAAAAAXTGGHHHPGFVGAGGVVGGGGGGGWEREKAAIAAHPLYERLLEAHVACLRVATPVDQLPRIDAQIAARPPPLAAASAAAAPPGPSAREELDLFMTHYVLLLCSFKEQLQQHVRVHAMEAVMGCWELEQSLQSLTGASPGEGTGATMSDDEDNQVDSEANMFDGNDGSDGMGFGPLMLTEGERSLVERVRHELKNELKQGYKEKLVDIREEILRKRRAGKLPGDTASILKAWWQAHSKWPYPTEDDKARLVQETGLQLKQINNWFINQRKRNWHSNPASSGEKTKKKRNVTGDGGAEQSW

SEQ ID NO: 24436 - protein, 357 aa, Oryza sativa; identical to SEQ ID NO: 16989
  Clone ID: TF_OsC175523_1.pep

SEQ ID NO: 24437 - protein, 1227 aa, Oryza sativa; identical to SEQ ID NO: 16988
  Clone ID: TF_OsC2791_1.pep

SEQ ID NO: 24438 - protein, 218 aa, Oryza sativa
  unsure (1)..(218): unsure at all Xaa locations
  Clone ID: TF_OsC1970_1.pep
MTIFLRQFFLLNKKMFFFSRTTQQLLRTHYVLLLCSFKELLQQYERVHAMEAVMAXSPREGSGATMSDDEDNQVDSESNMFDGNDGSDGMGFGPLMLTEGERSLVERVRQELKHELKQGYREKLVDIREEILRKRRAGKLPGDTASTLKAWWQAHSKWPYPTEEDKARLVQETGLQLKQINNWFINQRKRNWHSNPASSSSDKSKRKSAGDGKAEQSW

SEQ ID NO: 24439 - protein, 262 aa, Oryza sativa
  unsure (1)..(262): unsure at all Xaa locations
  Clone ID: TF_OsC1621_1.pep
MQGGDHGGMEMGVGSFTGGGGGGECSSSSATAAAAAAAAAAAAAAEAEERQLLKGEIAVHPLCEQLVAAHVGCLRVATPIDHLPLIDAQLAQSSGLLHSYAAHHRPFLSPHDKQELDSFLAQYMMLLCSFREQLQQHVRVHAVEAVMANWHNNSQTSTLKSKRKRXRAEKNVYLTYSLIKSKEDMFLRKRRAGKLPGDTTTILKQWWQQHSKWPYPTEDDKAKLVEETGLQLKQINNWFINQRKRNWHNNSQTSTLKSKRKR

SEQ ID NO: 24440 - protein, 196 aa, Oryza sativa
  Clone ID: TF_OsC1621_2.pep
MQAQYMMLLCSFREQLQQHVRVHAVEAVMACREIEQSLQDLTGATLEEGTGATMSEDEDETAPMLEGPMDMGSDGHDLMGFGPLMPTDSERSLMERVRQELKIELKQGFKSRIEDVREEILRKRRAGKLPGDTTTILKQWWQQHSKWPYPTEDDKAKLVEETGLQLKQINNWFINQRKRNWHNNSQTSTLKSKRKR

SEQ ID NO: 24441 - protein, 594 aa, Oryza sativa; identical to SEQ ID NO: 16994
  Clone ID: TF_OsC72309_2.pep

SEQ ID NO: 24442 - protein, 618 aa, Oryza sativa; identical to SEQ ID NO: 16997
  Clone ID: TF_OsC72309_1.pep

SEQ ID NO: 24443 - protein, 289 aa, Oryza sativa; identical to SEQ ID NO: 17000
  Clone ID: TF_OsC354772_1.pep

SEQ ID NO: 24444 - protein, 200 aa, Oryza sativa; identical to SEQ ID NO: 17001
  Clone ID: TF_OsC91731_1.pep

SEQ ID NO: 24445 - protein, 140 aa, Oryza sativa
  Clone ID: TF_LIB3475-008-P1-K1-B6.pep
PRVRQTEVLCSNSNGSTAKNRHFGPAINQKLKAHFKEDPYPSRATKENLAQELGLTFNQVTKWFSSTRHYARVAATKKENNIENHTAENNNNTNTVDSIQLRGSNDIVSVDRNDMVSEERTGQSNLNEGTPLRSDTSCGQ

SEQ ID NO: 24446 - protein, 365 aa, Oryza sativa
  Clone ID: TF_OsC520_1.pep
MEELEGHRGEGRLPPPPPLLPFPKVSVQVYTVPSSSTAASAAAAGGARQAVAPATRDGGDGGGRAAGVLDDPVKARIVSHPRYHRLLAAFLDCHKVGCPAEAAEEIAAAARVREARQRAAAAASRMPPAPEDPELDQFMEDYCKLLVECKEELSRPLQEAEEFLRTVESELNSINSGPPLTALISESKAGLDSSDDDEHEDGSGMEMMEAAEDEDLGIIDPRSDDKALKRHLLRKYSGYLGGLRKELSKKRKKGKLPKEARQKLLTWWELHYRWPNPSEMEKIALAESTGLEQKQINNCFINQRKRHWKPTEEMEFAVMEAYHHQSTDAAAAFYVDVDARLVGATAAAPASAVYTARPDHGVWRA

SEQ ID NO: 24447 - protein, 601 aa, Oryza sativa
  Clone ID: TF_OsC95162_1.pep
MAHDPSLGYADYFAAEVDGTGSSELYGLQQHQQVVGVAEMFGVRGLMPAAHAHEQSKGVGALVVGGGGVDDGGATTLPTVHFGGLGELHQHQHRQSQAPLSLSLHRPEAAATSLLMQQQQQHLHHQPSPPAGAASTWQLQQGAWHLRGSRFLLPTQQLLQEFCSLPVKSTTSPSSASKATKPPQEEAASGGGSSSWTAPTQIQSMDAAELQRLKGKLYTMLEEVDRRYRRYCEQMRALAASFEAVAGERAAASYTRLASRTISRHFRSLRDGVVAQLQAVRKQLGEKDTAVPGMTKGETPRLRVLDQCLRQHKAYQAGMLESHPWRPQRGLPERAVSILRAWLFEHFLHPRMFAGFVTMLKLSPRYPSDVDKHILARQTGLSRSQVANWFINARVRLWKPMVEEMYAEEMKDEEGSGQSTQASNPQNPNPSSYTSEVRGGGGGGEDRGEQKPSRAQLLHDAGSLASVVSIGHGGAGRTMVDHHHHQSLNFGTMDQLDFDAYEAAGGGQGFGAGGGVSLTLGLQQQHADPHDGVNVAFAAAAAPPNSSGVAAEYLFMGGGEHQQQLPQTAQFGAVMEGDAASHYRGLSATAAGFHLLHDLAG

SEQ ID NO: 24448 - protein, 77 aa, Oryza sativa
  Clone ID: TF_5103730.pep
ELKSHLLNKYSGYLSSLWRELSKKKKKGKLPRDARQKLLHWWQLHYRWPYPSELEKAALAESTGLDAKQINNWFINQ

SEQ ID NO: 24449 - protein, 311 aa, Oryza sativa; identical to SEQ ID NO: 17032
  Clone ID: TF_OsC244_4.pep

SEQ ID NO: 24450 - protein, 311 aa, Oryza sativa
  Clone ID: TF_OsC1190_1.pep
MEDLYSIHPGISRGGGGGGGGAASEASGVAGGGSSPPHPPPPATTAAAADLTELMKAQIAGHPSYPSLLSAYIECRKVGAPPEVTTLLEEIGREGRGGGGGATAGGEIGLDPELDEFMETYCRVLERYKEELTRPFDEAASFLTGIHTQLASLCGGAPPPTDNSDEMVGSSEDEPCSGDADAADFGQEHSSRLADHELKEMLLKKYSGCLSRLRSEFLKKRKKGKLPKDARSALMDWWNTHYRWPYPTEEDKVRLAAMTGLDPKQINNWFINQRKRHWKPSEDMRFALMEGVTGGSSSGTTLYFDTGTIGP

SEQ ID NO: 24451 - protein, 268 aa, Oryza sativa; identical to SEQ ID NO: 17040
  Clone ID: TF_OsC244_2.pep

SEQ ID NO: 24452 - protein, 321 aa, Oryza sativa; identical to SEQ ID NO: 17041
  Clone ID: TF_OsC2119_1.pep

SEQ ID NO: 24453 - protein, 973 aa, Oryza sativa
  Clone ID: TF_OsC23897_1.pep
MGMVRKIGRAGREADASSSPELLPGPAQPASLTSEDAFVARTGTALKHLNIGVEDAVDAAPAVGSADGSDIRRAVNRRTLRPRRGLWVRSGVAAGSISSPDLSPDVRVPGEIDNDREAFAHHGAHRPGLPRVVGSESGCEACGRGGVDPRKRTFSSLRRGVLLRRGGGGMSFGGLFDGGGGGGMQFPFASGFASSPALSLALDNAGGGIGGRMLGGGAGAGSSAGGAMTRDTEAENDSRSGSDHLDAISAAGEDDVEDAEPSNSRKRKKRYHRHTPQQIQELEALFKECPHPDEKQRAELSRRLSLDARQVKFWFQNRRTQMKTQLERHENALLKQENDKLRAENMTIREAMRSPMCGSCGSPAMLGEVSLEEQHLRIENARLKDELNRVCALATKFLGKPISLLSPPPLLQPHLSLPMPNSSLELAIGGIGGLGSLGTLPGCMNEFAGGVSSPMGTVITPARATGAAIPSLVGNIDRSVFLELAISAMDELVKMAQMDDPLWVPALPGSPSKEVLNFDPCVRSFLPCIGMKPAGYVSEASRESGLVIIDNSLALVETLMDERRWSDMFSCMIAKATVLEEVSTGIAGSRNGALLLMKAELQVLSPLVPIREVTFLRFCKQLAEGAWAVVDVSIDGLVRDHNSGTAPTGGNVKCRRVPSGCVMQDTPNGYCKVTWVEHTEYDEASVHQLYRPLLRSGLAFGARRWLATLQRQCECLAILMSSATVTANDSTAISQEGKRSMLKLARRMTENFCAGVSASSAREWSKLDGATGSIGEDVRVMARKSVSEPGEPPGVVLSAATSVWVPVAPEKLFNFLRDEQLRAEWDILSNGGPMQEMTQIAKGQRDGNSVSLLRASAVSANQSSMLILQETCTDASGSIVVYAPVDIPAMQLVMNGGDSTYVALLPSGFAILPDGPRIGATGYETGGSLLTVAFQILVNNQPTAKLTVESVETVNNLISCTIKKIKTALQCDA

SEQ ID NO: 24454 - protein, 855 aa, Oryza sativa; identical to SEQ ID NO: 17034
  Clone ID: TF_OsC434_1.pep

SEQ ID NO: 24455 - protein, 785 aa, Oryza sativa
  Clone ID: TF_OsC775_3.pep
MMIPGRNMSPAMIGRPNGGGGGGGVAYASSSSALSLMQSLLDGHHHQLPSLLQQHHNGHHLLDQHQQHQHQLPPQATTTSESDGRAPRDELEMSKSGGSDNLESGGGGGGGGSGGDQDPNQRPRKKRYHRHTQHQIQELEAFFKECPHPDDKQRKELSRELGLEPLQVKFWFQNKRTQMKTQHERHENNALRAENEKLRAENMRYKEALANASCPNCGGPAAIGEMSFDEHHLRLENARLRDEIDRISAIAAKYVGKPAAAVSAAYPPLPPSNRSPLDHMGIPGAGADVFGADFDKPLVIELAVAAMEELVRMAQLGEPLWAPALGGEALGEEEYARTFPRGLGPKSPELRSEASRETAVVIMNHVSLVEMLMDVGQWTALFSSIVSRAATLEVLSTGVAGNHNGALQLMSAEFQMPSPLVPTRETQFLRYCKQHPDGTWAVVDVSLDGLRAGAGGGCQPAAARGHRRRPSGCLIQEMPNGYSKVTWVEHVEADDQMVHNLYKPVVNSGMAFGARRWVATLERQCERLASAMASNVASSGDAGVITTSEGRRSMLKLAERMVASFCGGVTASTTHQWTTLSGSGAEDVRVMTRKSVDDPGRPPGIILNAATSFWLPVPPSRVFDFLRDDSTRSEWDILSNGGVVQEMAHIANGRDHGNAVSLLRVNNANSNQSNMLILQECCTDATGSYVIYAPVDVVAMNVVLNGGDPDYVALLPSGFAILPDGPDGGGGSLLTVAFQILVDSVPTAKLSLGSVATVNSLIACTVERIKAAITGDNGVAPPCPR

SEQ ID NO: 24456 - protein, 239 aa, Oryza sativa; identical to SEQ ID NO: 17037
  Clone ID: TF_OsC155919_1.pep

SEQ ID NO: 24457 - protein, 872 aa, Oryza sativa
  Clone ID: TF_OsC8602_1.pep
MAMAHMLGWAGPSLHASDHHCLRPRRRTPPPEPLPPLGRRGGDRGSPRPCAVLAIPLVSLCPHPDDFRFTSLALLVFFHSTEVMNGELKLMASYVSKLKFILQKDQQQEPHTANLLVLLGSSNQDKRNGLSQGENRMDTCTRKKPRRYQLLTMQQKETLNRAFQSCPNPDRNDLKKLAKELNMTETQIKYWFQNCRTKMKKFKNNEERKLLQKENEELKKENAELRNRMKNSTCRACDLPLFHIDCRHWENPMLNKGNHGVTSNLIPQAVSSLLPSSSGFVASGSNLSSNAVLMPVSAMPSSVLQPAPAVSGANFPILHNLSANANDGYTEKNVLDLANRAMEEFFSLMKENESLLVKKKENGPLWLPHMDILGVESLNYQEYLAKSRTIGQKPVDFKVVVTRDTAIVNGSCVDLVKSLLDANRWRELFPGIVASANTTKIISTGPSNLHDGLLQLKNLQMRAELQVMSPEVPVCDVTFLRQSVQFGSGLWCVVDVSIDTILPGESKTAQSSVQTSSTAARRMEVRLLPSGCVIEEMENGYSKVTWMVHAAYDERAVPVLYHSLLRSAKALGACRWVASLQRHSQFLSGLHKYIFCPDSTMTEVVMRRKVLYLVKQMTSSFTGLFASMSKATLQDGDDTHFAHQIVGGATGEPAGLLLSATTTIWLPGVNPRHVYDHLRDEQCHGEWRCLLGEQLHQGNALPYGAPLNGETVPEFYRMVNGLHEGHAISLISPREMGGNISNTLLLQEARTDLSGSLIVYARTDVNTVHSIMNSGLNPATVFLVSSGCAILPDCLESFPLHPAATADQAGTSSAAIASRSETGGSFVTVTYQMFFSSQGGAAPASSSIHQGRDALKKATDIFKVVLDTLTVA

SEQ ID NO: 24458 - protein, 305 aa, Oryza sativa
  Clone ID: TF_OsC230307_1.pep
MKRPSCRGSSMAIIHDTSDQQEDNMRSYMDGGGAAAYEEEEEEVEDDDGGGGGGGGGGGGGLGEKKRRLAAEQVRALERSFEADNKLDPERKARIARDLRLHPRQVAVWFQNRRARWKTKQIERDFAALRSRHDALRLECDALRRDKDALAAEIADLRDRVDGQMSVKLEAVAADEHQPPPPPPPPPLAYNSKVVDGSTDSDSSAVFNEEASPYSGAAIDHHHHQTPASYDTAGFTSFFAPSTTLTSSLSFPSMFHASSHFDGHQELLVGGGGAGAVADADLGGAGFFAGDEHAGGLSWYGAEGW

SEQ ID NO: 24459 - protein, 889 aa, Oryza sativa
  Clone ID: TF_OsC25864_1.pep
MISPAGHMRRMLGDCQVLSSMAAMAGAASSADALFASPLIPNPALAGFMSSSAAMPFHHFSNAAATLIPKEEGLMGGLHVAKDEGMDLEMDMELSGGSGSAHLDGLLSFADVDDDHKPQHSGHDQPPDAAQPSGAAGGNAKKKRYHRHTAHQIQQMEALFKECPHPDDKQRLKLSQELGLKPRQVKFWFQNRRTQMKAQQDRADNVILRAENENLKSDNFRLQAAIRNVVCPNCGHAAVLADMSYEEQQLRIENARLKDELDRLACIATRYGGGGGRQPVLSTSALSCISAPPPVLMPPLDLDMNVYSRHFAEQAPVMGCGDLIPPPVVPQHDGAAAYMGAMMAPVQEQDKQLVVDLAATAADQLARMCRAGEPLWVRQRGAEVMAVEEHARMFSWPVDGAKQGDGGAVARAEGTRDNAVVIMNSINLVDAFLDANKWMELFPSIVCKARTIQIINHGAASGHLGSGTLLLMQAEVQFLSPLVAAREVVFFRYCVHNADEGSWAIVDFPAEGFEEGLLQASVVRCRRRPSGCIIQDMPNGYSRVVWVEHMEMVGEEKPLQPVFRDYVASGAAFGATRWLSILQRQCERLASELARNIADLGVIRTPEARTNMMKLSQRMITTFCANISASGTQSWTALSDSTQDTIRVTTRKNTEPGQPSGVILTAVSTSWLPFTHQQVFELLADEQQRCQLEILSNGGSLHEVAHIANGSHPRNCISLLRINAASNSSQNVELLLQESSTHPDGGSLVVFATVDVDAIQVTMSGEDPSYIPLLPLGFAIFPATSPSPAAAPTISSSTTTTTGNGNGETSSTPPRNSSSNNNNADELLPPNGCLLTVGMQVLASAVPSAKLNLSSVTAINSHVCNAIHQITAALKSSAGGAGGEPASDQ

SEQ ID NO: 24460 - protein, 129 aa, Oryza sativa
  Clone ID: TF_LIB3432-004-P1-K1-G7.pep
VHLLERSFEEENKLEPERKTELARKLGLQPRQVAVWFQNRRARWKTKQLERDFDRLKASFDALRADHDALLQDNHRLHSQVMSLTEKLQEKETTTEGSAGAAVDVPGLPAAADVKVAVPDAEEPALEEA

SEQ ID NO: 24461 - protein, 125 aa, Oryza sativa; identical to SEQ ID NO: 17043
  Clone ID: TF_OsC330010_1.pep

SEQ ID NO: 24462 - protein, 851 aa, Oryza sativa; identical to SEQ ID NO: 17044
  Clone ID: TF_OsC23897_2.pep

SEQ ID NO: 24463 - protein, 277 aa, Oryza sativa
  Clone ID: TF_OsC2116_1.pep
MKRPGGAGGGGGSPSLVTMANSSDDGYGGVGMEAEGDVEEEMMACGGGGEKKRRLSVEQVRALERSFEVENKLEPERKARLARDLGLQPRQVAVWFQNRRARWKTKQLERDYAALRHSYDSLRLDHDALRRDKDALLAEIKELKAKLGDEEAAASFTSVKEEPAASDGPPAAGFGSSDSDSSAVLNDVDAAGAAPAATDALAPEACTFLGAPPAAGAGAGAAAAASHEEVFFHGNFLKVEEDETGFLDDDEPCGGFFADDQPPPLSSWWAEPTEHWN

SEQ ID NO: 24464 - protein, 196 aa, Oryza sativa; identical to SEQ ID NO: 17054
  Clone ID: TF_OsC2116_6.pep

SEQ ID NO: 24465 - protein, 292 aa, Oryza sativa; identical to SEQ ID NO: 17055
  Clone ID: TF_OsC224908_1.pep

SEQ ID NO: 24466 - protein, 713 aa, Oryza sativa; identical to SEQ ID NO: 17056
  Clone ID: TF_OsC64951_1.pep

SEQ ID NO: 24467 - protein, 857 aa, Oryza sativa; identical to SEQ ID NO: 16460
  Clone ID: TF_OsC42451_2.pep

SEQ ID NO: 24468 - protein, 886 aa, Oryza sativa; identical to SEQ ID NO: 17051
  Clone ID: TF_OsC1713_3804.pep

SEQ ID NO: 24469 - protein, 1108 aa, Oryza sativa; identical to SEQ ID NO: 17062
  Clone ID: TF_OsC81847_1.pep

SEQ ID NO: 24470 - protein, 199 aa, Oryza sativa
  unsure (1)..(199): unsure at all Xaa locations
  Clone ID: TF_LIB3598-004-P1-K1-B9.pep
RSQLASWARMGVGRGDHHHLQQQHQFLMPPPAPVVPPQLCMPAMMADEQYMDLGGGGAXAARGGGGAGERKRRFTEEQIRSLESMFHAHHAKLEPREKAELARELGLQPRQVAIWFQNKRARWRSKHFEHDYAALRSKYDALHSRVESLKQEKLALTVQLHELRXRLREREERSGNGGAATTAASSSSCNGSGSEEVDD

SEQ ID NO: 24471 - protein, 235 aa, Oryza sativa
  Clone ID: TF_OsC52478_2.pep
WYGRAQLASWARIAMDRGDHHHLQQQHQFLMPPPAPVVPPQLCMPAMMADEQYMDLGGGGAAAAPGRGGAGERKRRFTEEQIRSLESMFHAHHAKLEPREKAELARELGLQPRQVAIWFQNKRARWRSKQLEHDYAALRSKYDALHSRVESLKQEKLALTQRRELIMLPGGEDGGKHRGATADEEAAATAASLNDLCATAGDAGGLPALAPFPRAAARPRRRAQRRTARGGRAPL

SEQ ID NO: 24472 - protein, 1156 aa, Oryza sativa
  unsure (1)..(1156): unsure at all Xaa locations
  Clone ID: TF_OsC42451_1.pep
MAAAVAMRSGSGSDGGGGGYDKAGMDSGKYVRYTPEQVEALERVYAECPKPSSSRRQQLLRDCPILANIEPKQIKVWFQNRRCRDKQRKEASRLQAVNRKLTAMNKLLMEENERLQKQVSQLVHENAYMKQQLQNPSLGNDTSCESNVTTPQNPLRDASNPSGLLTIAEETLTEFLSKATGTAVDWVPMPGMKVDCQLLRFTLPASNDPGPDSFGIVAVSHGCRGVAARACGLVNLEPTKIVEILKDRPSWFRDCRSLEVFTMFPAGNGGTIELVYMQMYAPTTLVPARDFWTLRYTTTMEDGRLVVPVLADDDAAVARHAPLVMRSNRKAGIDFVDPRATFCPEAAMLVLSVPTPAGVRVLREHGSEWADYKTDADLASALKTSACSPPGLRPRRFSGSRSLSGSGGGLSTASVQEVVRVEMLPSLYMVRPCDRGGSIVHIVDQQQPGRWWDPPFRLALHRLMISQMKLHXISSGFRVIPLDMKTDGASSGRTLDLASSLEVGSATAQASGDASADDCNLRSVLTIAFQFPYELHLQDSVAAMARQYVRSIVSAVQRVSMAISPSQTGLNAGQRIISGFPEAATLARWVCQSYHYHLGVELLSQSDGDAEQLLKMLWHYQDAILCCSFKEKPVFTFANKAGLDMLETSLVALQDLDLEALFVPDVLRPLFESFRVVAQKMTTAALRHIRQIAQETSGEVVYALGRQPAVLRTFSQRLSRGFNDAISGFNDDGWSVMGMDGIEVVIIACNAKKVRNTSTSANAFVTPGGVICAKASMLLQSVPPAVLVRFLREHRSEWADYNFDAYSASSLKTSSCSLPGLRPMRFSGSQIIMPLAHTVENEEILEVVRLEGQALTHDDGLMSRDIHLLQLCTGIDEKSMGSCFQLVSAPIDELFPDDAPLISSGFRVIPLDMKTDGTPAGRTLDLASSLEVGSTAQPTGDASMDDCNLRSVLTIAFQFPYEMHLQDSVATMARQYVRSIVSSVQRVSMAISPSRSGLNAGQKIISGFPEAPTLARWICQSYQFHLGVELLRQADDAGEALLKMLWDYEDAILCCSFKEKPVFTFANEMGLNMLETSLVALQDLSLDKIFDEAGRKALYNEIPKLMEQGYVYLPGGVCLSGMGRHVSFEQAVAWKVLGEDNNVHCLAFCFVNWSFV

SEQ ID NO: 24473 - protein, 228 aa, Oryza sativa
  unsure (1)..(228): unsure at all Xaa locations
  Clone ID: TF_OsC2118_1.pep
TTLLLLPLHPSTHSTISSSSSSISHGFRPSIIRARSGAMDGEEDSEWMMMDVGGKGGKGGGGGGAADRKKRFSEEQIKSLESMFATQTKLEPRQKLQLARELGLRPRQVAICFRSKRARWKSRELERAYFPLRDAYDALLWTYESLNKEKLALIKQVGKLVEKLEEARGKHGDRAGDDARSGGLAGIQKQELVPPDGAASLHXSAEGGGTSSTEQTCSSTPWWEFESE

SEQ ID NO: 24474 - protein, 301 aa, Oryza sativa; identical to SEQ ID NO: 17067
  Clone ID: TF_OsC1620_1.pep

SEQ ID NO: 24475 - protein, 709 aa, Oryza sativa
  Clone ID: TF_OsC1034_1.pep
MEMNQQHNEGNESFVALMNGFAGDGTATLPNDGEQRMSIPARELFAAIEADSGLLPVNSSNTNEKRKRRLQRLTGKQSEVLEGFFSICGHPDDGQKRHLSETTGLGLDQVKFWFQNKRTQVKTMCWKEENYKLSVENEILRDENRRVKIAHCTAVCLTCCNSSVQNQLAVEMERLMGQSEWLQQEIARSNGTPPAANLAFQLNSSADYVFSGQHDQQMIAELAKNAMHALIILAESHVALWFPVPGCSYEVLNKMAYDQAYPGDNSANAIGFKTEATRAVSMVMMDYKSVVDFLMDPYNYRTFFPEVISGAVTNRIYTWPTSDGYNGVIQLMTVEMMFPSPLVPARKCTFLRYCNVLNEGLVVVIDVSLDDGSIFSKCRKMPSGFLIQSIRPNSCKVTAIEHVLADDTGVHELYQPRVNGLVFGARRWVATMARQSARMRDVHHNKTAPQVSTKGRKNLMKLADDLLASFAGGIAATGGGTWTVVIGAGTEKDIRVAYRRTTEGSSSYNAILSVTASLRLPLPMRKTFDLLRNLTHRCKWDVLVHGSVVKEEVTIARGVGNDDTVTVLHCKRAGREDRGRTMILQNNGYDASGSFMVYSQIDSELMNTMVLSPSDLPPGRGGPSLYPTGFSLLPDVEAAQDSSGIALGEVGGTLMTMGFQIPVKLASGDRMYSRSAASAIRLMTDTIALVKKTLMNEHSGIYGVSPFHP

SEQ ID NO: 24476 - protein, 726 aa, Oryza sativa; identical to SEQ ID NO: 17059
  Clone ID: TF_OsC1034_2.pep

SEQ ID NO: 24477 - protein, 307 aa, Oryza sativa; identical to SEQ ID NO: 17060
  Clone ID: TF_OsC244_3.pep

SEQ ID NO: 24478 - protein, 342 aa, Oryza sativa; identical to SEQ ID NO: 17058
  Clone ID: TF_OsC157633_1.pep

SEQ ID NO: 24479 - protein, 781 aa, Oryza sativa; identical to SEQ ID NO: 17068
  Clone ID: TF_OsC775_2.pep

SEQ ID NO: 24480 - protein, 350 aa, Oryza sativa
  Clone ID: TF_OsC1920_2.pep
MDPGRVVFDSGVARRACPGGAQMLLFGGGGSANSGGFFRGVPAAVLGMDESRSSSSAAGAGAKRPFFTTHEELLEEEYYDEQAPEKKRRLTAEQVQMLERSFEEENKLEPERKTELARRLGMAPRQVAVWFQNRRARWKTKQLEHDFDRLKAAYDALAADHHALLSDNDRLRAQVISLTEKLQDKETSPSSATITTAAQEVDQPDEHTEAASTTGFATVDGALAAPPPGHQQPPHKDDLVSSGGTNDDGDGGGAAVVVFDVTEGANDRLSCESAYFADAAEAYERDCAGHYALSSEEEDGGAVSDEGCSFDLPDAAAAAAAMFGAAGVVHHDAADDEEAQLGSWTAWFWS

SEQ ID NO: 24481 - protein, 108 aa, Oryza sativa
  Clone ID: TF_OsC434_3.pep
MAAAMVAAVHGVGRQDRSSPGGGGAPQVDTGKYVRYTPEQVEALERVYGECPKPSSLRRQQLIRECPILSNIEPKQIKVWFQNRRCREKQRKEASRLQTVNRKLTAMN

SEQ ID NO: 24482 - protein, 275 aa, Oryza sativa
  unsure (1)..(275): unsure at all Xaa locations
  Clone ID: TF_OsC52478_1.pep
MEMSDRHRRRQPHKFXTTRPAPVEQPQFCMRPMMAAEQHAALGGGGATAAPAXGGGGERKRRFTEEQVRSLETTFHARRAKLEPREKAELARELGLQPRQVAIWFQNKRARWRSKQIEHDYAALRSKYDALHARVESLRQEKLALADQVRAPLPTNHQLRERLREREERSGNGGAATTAASSSSCNGSGSEEVDDDKRNSVMNASSSGLVEEDYVSCLAVPVVDVSEDGSAACGGSSYEYDHHLDYLGGGQLPDPFCGMPDLWEIWPMVEWNAVA

SEQ ID NO: 24483 - protein, 351 aa, Oryza sativa; identical to SEQ ID NO: 17022
  Clone ID: TF_OsC1920_3.pep

SEQ ID NO: 24484 - protein, 373 aa, Oryza sativa
  unsure (1)..(373): unsure at all Xaa locations
  Clone ID: TF_OsC1920_1.pep
MASNGMASSPSSFFPPNFLLHMAQQQAAPPHDPQEHHHHHHHGHHGHHHEQQQQQQHHHHLGPPPPPPPHPHNPFLPSSAQCPSLQEFRGMAPMLGKRPMSYGDGGGGGDEVNGGGEDELSDDGSQAGEKKRRLNVEQLCLFKLYVLEMTFEHGNKLEQERKMKLARKLGLQPRQVAVWFQNRRARWKTKQLERDFDRLKRPLDAVRADNDALLEDNENLHAEVMSXALKGREAASELINLNKETEASCSNRSENSSEINLDISRTPPPDAAALDTAPTAHHHHHGGGGGGGGGGGMIPFYTSIARPASGGGVDIDQLLHSSSGGAGGPKMEHHGGGGNVQAASVDTASFGNLLCGVDEPPPFWPWPDHQHFH

SEQ ID NO: 24485 - protein, 767 aa, Oryza sativa
  unsure (1)..(767): unsure at all Xaa locations
  Clone ID: TF_OsC2076_2.pep
ALSTNVKSSAVRNSYKQIVKRGRKGSEISPSKTYPLRSTHSNVMMLRGASKRNXSXPNVPTNENTGIQRVAXKGVQANXLTPSPCRALRXTWKSKNXTHNKLRNDGAGVQPAEKKRKVGRPPKGGTPKDDYLMIRKRVRYVLNRMNYEQSLIQAYASEGWKGQSLEKIRPEKELERAKVEILRCKSRIREAFRNLDSLLSEGKLDESMFDSAGEISSEDIFCAACGSKDVTLKNDIILCDGICDRGFHQYCLNPPLLAEDIPQGDEGWLCPACDCKIDCIDVLNELQGVKLSIHDSWEKVFPEAASFLNGSKQIDASDLPSDDSADNDYDPTLAQGHKVDEEKSSGEDGGEGLDSDDSSSEDSESSEKEKSKTSQNGRTVDDLGLPSEDSEDGDFDPAGPDSDKEQNDESNSDQSDESDFTSDSDDFCAEIAKSCGQDEISGPSSSQIRTVDRTDGSGFDGEPNAENSNLAFMETELEQDMVLPISSKRQVERLDYKKLYNEAYGKASSDSSDDEEWYGNSTPEKGNLEDSETDSLAESPQGGKGFSRRAPVRYHNNEHTPQNVRPGGSVSDQQTEVLCSNSNGSTAKNRHFGPAINQKLKAHFKEDPYPSRATKENLAQELGLTFNQVTKWFSSTRHYARVAATKKENNIENHTAENNNNTNTVDSIQLRGSNDIVSVDRNDMVSEERTGQSNLNEGTPLRSDTSCGQSVAVTPMVHPENQGNDSSSNVRTPNAKSAEKLIPGLENSDEARRKAVQRELRKMKTGR

SEQ ID NO: 24486 - protein, 355 aa, Oryza sativa
  Clone ID: TF_OsC1191_1.pep
MDQSFGNLGGGGGAGGSGKAAASSFLQLPLSTAAAATAYYGTPLALHQAAAAAGPSQYHGHGHPHHGGGHHHSKHGGAGGGEISAAEAESIKAKIMAHPQYSALLAAYLDCQKVGAPPEVLERLTATAAKLDARPPGRHDARDPELDQFMEAYCNMLAKYREELTRPIDEAMEFLKRVESQLDTIAGGAHGGGAGSARLLLADGKSECVGSSEDDMDPSGRENEPPEIDPRAEDKELKFQLLKKYSGYLSSLRQEFSKKKKKGKLPKEARQKLLHWWELHYKWPYPSETEKIALAESTGLDQKQINNWFINQRKRHWKPSEDMPFVMMEGFHPQNAAALYMDGPFMADGMYRLGS

SEQ ID NO: 24487 - protein, 344 aa, Oryza sativa
  Clone ID: TF_OsC1920_5.pep
MESGRLIFSTAGSGAGQMLFLDCGAGGGGVGGGAMFHRGARPVLGMEEGGRGVKRPFFTTPDELLEEEYYDEQLPEKKRRLTPEQVHLLERSFEEENKLEPERKTELARKLGLQPRQVAVWFQNRRARWKTKQLERDFDRLKASFDALRADHDALLQDNHRLHSQVMSLTEKLQEKETTTEGSAGAAVDVPGLPAAADVKVAVPDAEEPALEEAAAAFEEQQEQQVKAEDRLSTGSGGSAVCGHGRANWVVGCGRQHLAAVDSSVESYFPGGDEYHDCVMGPMDHAAGGIQSEEDDGAGSDEGCSYYADDAGVLFADHGHHHHHQHADDDEEDGQQISCWWMWN

SEQ ID NO: 24488 - protein, 229 aa, Oryza sativa
  Clone ID: TF_OsC2115_1.pep
MMGATSPSGLELTMAVPGLSSSGSEGAGCNNNNAGGGCNMRDLDINQPASGGEEEEFPMGSVEEDEEERGVGGPHRPKKLRLSKEQSRLLEESFRLNHTLTPKQKEALAIKLKLRPRQVEVWFQNRRARTKLKQTEMECEYLKRCFGSLTEENRRLQREVEELRAMRVAPPTVLSPHTRQPLPASALTMCPRCERITAATGPPAVRPPPSSAAAAAPSPFHPRRPSAAF

SEQ ID NO: 24489 - protein, 871 aa, Oryza sativa; identical to SEQ ID NO: 17021
  Clone ID: TF_OsC310466_1.pep

SEQ ID NO: 24490 - protein, 278 aa, Oryza sativa
  Clone ID: TF_OsC244_8.pep
MRAEHALCNHAVHPQVRQQPCLAPALVFEGAMMERAEDLRLSLSLSSPLIAPRTHHVAMLFHAPPEKRFLEMPLLPAAKRSEVVAAEEERAGLRGGGGSDEEDGGCGIDGSRKKLRLSKDQSAVLEDSFREHPTLNPRQKATLAQQLGLRPRQVEVWFQNRRARTKLKQTEVDCEFLKRCCETLTEENRRLQKEVQELRALKLVSPHLYMNMSPPTTLTMCPSCERVSNTNNNSSAAAAADRRGIRTTTAAGGGSVVDTAADGGILCHRPIAVRPQQS

SEQ ID NO: 24491 - protein, 1226 aa, Oryza sativa
  Clone ID: TF_OsC36_9.pep
MAGNEWINGYLEAILDSGGAAGGGGGGGGGGGGGGGGGGGGGGGGVDPRSPAAGAASPRGPHMNFNPTHYFVEEVVKGVDESDLHRTWIKLELEGILRISARRKEQEQVRRETSEDLAEDLFEGEKADTVGELAQQDTPMKKKFQRNFSELTVSWSDENKEKKLYIVLIRSYTAYFTHWCHSVYATKLQNFTEFLYSLFYFSLHGLVRGDNMELGRDSDTGGQVKYVVELARALAMMPGVYRVDLFTRQVSSPEVDWSYGEPTEMLTSGSTDGEGSGESAGAYIVRIPCGPRDKYLRKEALWPYLQEFVDGALAHILNMSKALGEQVSNGKLVLPYVIHGHYADAGDVAALLSGALNVPMVLTGHSLGRNKLEQIMKQGRMSKEEIDSTYKIMRRIEGEELALDAAELVITSTRQEIDEQWGLYDGFDVKLEKVLRARARRGVSCHGRFMPRMVVIPPGMDFSSVVVPEDTSDGDDGKDFEIASPRSLPPIWAEVMRFLTNPHKPMILALSRPDPKKNITTLVKAFGECRPLRELANLILIMGNRDDIDEMSAGNASVLTTVLKLIDKYDLYGSVAFPKHHKQSDVPEIYRLTGKMKGVFINPALVEPFGLTLIEAAAHGLPIVATKNGGPVDIKNALNNGLLVDPHDQHAIADALLKLVADKNLWQECRKNGLRNIQLYSWPEHCRTYLTRIAGCRIRNPRWLMDTPADAAAEEEEALEDSLMDVQDLSLRLSIDGERGSSMNDAPSSDPQDSVQRIMNKIKRSSPADTDGAKIPAEAAATATSGAMNKYPLLRRRRRLFVIAVDCYGDDGSASKRMLQVIQEVFRAVRSDSQMSRISGFALSTAMPLPETLKLLQLGKIPPTDFDALICGSGSEVYYPSTAQCVDAGGRLRPDQDYLLHINHRWSHDGAKQTIAKLAHDGSGTNVEPDVESCNPHCVSFFIKDPNKVRTIDEMRERVRMRGLRCHLMYCRNATRLQVVPLLASRSQALRYLFVRWGLSVGNMYLIVGEHGDTDHEEMLSGLHKTVIIRGVTEKGSEQLVRSSGSYQREDVVPSESPLIAFTKGDLKADEIMRALKEVTKAASGMDWQRPLCKTAYWFQSRVYTNMEEKEEMTMLSLGVGAASKHSISNRKFRLKEVTDHKFNLGDQDHNSGHVRKKLRLSEEQLTVLENMYEAGSNLDQALKQGLAEKLNIKPLQVEVWFQNRRARTKHKQIEEECKNRGGWRA

SEQ ID NO: 24492 - protein, 250 aa, Oryza sativa; identical to SEQ ID NO: 17029
  Clone ID: TF_OsC139567_1.pep

SEQ ID NO: 24493 - protein, 320 aa, Oryza sativa; identical to SEQ ID NO: 17030
  Clone ID: TF_OsC267403_1.pep

SEQ ID NO: 24494 - protein, 302 aa, Oryza sativa
  Clone ID: TF_OsC10707_1.pep
MAAAEAAAAVGKQQQKGGGGRGGGGGGPAPFLTKTNQMMEESAHVLGVFWGKTCPYCLVLIRTETCYDCPSIRSHDLTGANERWRLFMQGFRKVVPDRWEFANGNFRRGEQGLLSGIRRRKATTPQSSKSCGSGVNVAFPPPLPPLPPEPSATTSSGNDRSSSSASSPPRADITSENEQLRKDNQTLTMELARARRHCEELLGFLSRFLDVRQLDLRLLMQEDMRAAAGGVGGEQRVQEHAREEKCVKLFGVLLDDTHGAATRKRARCEEAAASERPIKMIRIGEPWVSVPSSGPARCGGDN

SEQ ID NO: 24495 - protein, 527 aa, Oryza sativa
  unsure (1)..(527): unsure at all Xaa locations
  Clone ID: TF_OsC165344_1.pep
MDHNTDPPPTTMVDAAAALLLEPKLEGYDDDGGGEPLQPAPFVSPLDQLMQPPRPLEALLQGPHLPPFLSKTYDLVCEPELDXVISWGPRRLQRRRPGHLRLRAEPHVSPDLVLQRLHQRNNVYRLVCPLSTYXKKKIGHDEIPGHSKHWLMKIVRRRYSPTQQSGLQHGSSVESGLDPELNTLRREKSALLQEVTRLKQEHLQTIEQMSTLNQRLESAEDRQKQMVSFLAKLLQNPTFLRQLKMHRQQKEIDSTRVKRKFLKHVPHGNIDSGESSSQHTGESNLDFSPTSLDLPATHSDILDLQNFLLEDGDLNLAMLPENIGLDGIEAPDDIGALVQGFDTQEELELGSGVELLEIPPASGPRGQDPTIGRSKGKNVLSPGLDATSSEADCLGSFSDNMGMLSDSMLQTAGKLMDADDDERIWGVDASSALQSSCSGTSQQAYGSLVSDPYLMEMANKPEKFWELDFQALDDGDLQLDNPEKVLDTGVVAQAQALELGGLTQATELKKACFFLRLITQGTNQTGP

SEQ ID NO: 24496 - protein, 95 aa, Oryza sativa
  unsure (1)..(95): unsure at all Xaa locations
  Clone ID: TF_LIB3433-009-Q6-K1-C9.pep
NLQGFRKVDPDRWEFAXNEGFLRGQRHLLKTIKRRKPPSNAPPSQQQSLTSCLEVGEFGFEEEIDRLKRDKNILITEVVKLRQEQQATKDHVKAM

SEQ ID NO: 24497 - protein, 156 aa, Oryza sativa
  Clone ID: TF_LIB3599-044-Q1-K1-G1.pep
PRVRWGKGNNSFVVADPFVFSQTLLPAHFKHNNFSSFVRQLNTYVSLVTPSSISSSHHTPPLSALHIMLPWILSGTQLKVSSEGLRPWPMDLSYMVLEFVCACVLGDSLEDEIKNCCGGWHVDFVDLERQEVRGEDNRVWDPSFIGVALNCTYALL

SEQ ID NO: 24498 - protein, 497 aa, Oryza sativa; identical to SEQ ID NO: 17085
  Clone ID: TF_OsC98500_1.pep

SEQ ID NO: 24499 - protein, 206 aa, Oryza sativa
  Clone ID: TF_OsC255623_1.pep
MPTTTTARGGGGVAPFVAKTYRMVDDPATDGVIAWGRDSNSFVVADPFAFSQTLLPAHFKHSNFSSFVRQLNTYGFRKVDPDRWEFAHVSFLRGQTHLLRRIVRRSSGGGGAKRKEEAGGCGGGGEAAAGDVDEESAVVAMEVARLRREQREIEGRVAAMWRRVQETERRPKQMLAFLVKVVGDPQLVTIFRVLAYISPSSGFLSI

SEQ ID NO: 24500 - protein, 249 aa, Oryza sativa; identical to SEQ ID NO: 17086
  Clone ID: TF_OsC278100_1.pep

SEQ ID NO: 24501 - protein, 406 aa, Oryza sativa; identical to SEQ ID NO: 17088
  Clone ID: TF_OsC108229_1.pep

SEQ ID NO: 24502 - protein, 469 aa, Oryza sativa
  unsure (1)..(469): unsure at all Xaa locations
  Clone ID: TF_OsC8038_3.pep
MAEQGAGEADAGGGEPPPAAVMTAAAEALAGQRSLPTPFLTKTYQLVEDPAVDDVISWNEDGSTFVVWRPAEFARDLLPKYFKHNNFSSFVRQLNTYGFRKIVPDRWEFANDCFRRGEKRLLCDIHRRKHRQASGSGSAPGGGGGGSASGGDMGEENERLRRENARLTRELGHMKKLCNNILLLMSKYAATQHVEGSAGISSIANCSGESSEAVPPPPPLPPAILDLMPSCPALATAAAAAGLAIDGEPDPSARLFGVSIGLKRTRDDAAAAADEDGGGEDQAEHGGADVKPEAADPHPAGGGGGSSTEASPESHPWPIYRPTPMYHAVRPTCNGPDRAGSDQDGTSTSCAESPPIPQMHSRVDTRAKVSEIDVNSEPAVTETGPSRDQXPAEEPPAVTPGANDGFWQQFLTEQPGSSDAHQEAQSERRDGGNKVDEMKSGDRQHLWWGKRNVEQITEKLGLLTSTEKT

SEQ ID NO: 24503 - protein, 357 aa, Oryza sativa; identical to SEQ ID NO: 17083
  Clone ID: TF_OsC68408_1.pep

SEQ ID NO: 24504 - protein, 459 aa, Oryza sativa; identical to SEQ ID NO: 17092
  Clone ID: TF_OsC561_1.pep

SEQ ID NO: 24505 - protein, 379 aa, Oryza sativa; identical to SEQ ID NO: 17093
  Clone ID: TF_OsC84754_1.pep

SEQ ID NO: 24506 - protein, 380 aa, Oryza sativa; identical to SEQ ID NO: 17098
  Clone ID: TF_OsC8038_8.pep

SEQ ID NO: 24507 - protein, 539 aa, Oryza sativa; identical to SEQ ID NO: 17076
  Clone ID: TF_OsC8038_2.pep

SEQ ID NO: 24508 - protein, 384 aa, Oryza sativa; identical to SEQ ID NO: 17078
  Clone ID: TF_OsC106512_1.pep

SEQ ID NO: 24509 - protein, 247 aa, Oryza sativa
  unsure (1)..(247): unsure at all Xaa locations
  Clone ID: TF_LIB4506-021-R1-K1-D9.pep
TRPGGGSLPPFLSKTYEMVDDPSTDAVVGWTPAGTSFVVANQPEFCRDLLPKYFKHNNFSSFVRQLNTYGFRKVDPEQWEFANEDFIKGQRHRLKNIHRRKPIFSHSSHSQGAGPLTDNERKDYEEEIERLKSDNAALSSELQNNTLKKLNMEKRMQALEEKLFVVEDQQRSLISYVREIVKAPGFLSSFVQQQDHHXKKRRLPIPISFHEDANTQENQIMPCDLTNSPAQTFYRESFDKMESSFEL

SEQ ID NO: 24510 - protein, 221 aa, Oryza sativa
  Clone ID: TF_OsC211574_1.pep
MLYAGIRLPPADRAAPAPRPPRIIISTDLTIGSPGKPDDAACSPSSGGEKIDDTKPRGFLLFGQAILTEEQIKNGNSDGRPASPNWDAEKAPNTSEGSDSGVTQGSPTKNTTPSWSLPYFGGNNISRASEYELNPGQCKVFVESETVGRSLDLSALSSFEELYACLSDMFSIGSDELRSHLVYRSPAGEVKHAGDEPFCAFVKSARKLRILTDAGSDNLGD

SEQ ID NO: 24511 - protein, 183 aa, Oryza sativa; identical to SEQ ID NO: 17103
  Clone ID: TF_OsC109_3.pep

SEQ ID NO: 24512 - protein, 69 aa, Oryza sativa
  Clone ID: TF_uC-osflcyp128d03a1.pep
MLHIRAQAVGWPPVRSFRRNIMTVQSVKSKKEEEADKQQQQPAANASGSNSSAFVKVSMDGAPYLRRGT

SEQ ID NO: 24513 - protein, 225 aa, Oryza sativa
  unsure (1)..(225): unsure at all Xaa locations
  Clone ID: TF_OsC6551_1.pep
MKSSSVAPRLKQERQDDCKFQEGDVNSLELRLGISSDNDQISGGGAASPWLGVLVHPWSLAARQGKAALEQAHQRPNECAVQRENRAASSAQLVGWPPVRAFRKNLSTPKPADADDLMNKVKLCSDEGHGSRCAAQERRSSSTMFVKVNLEGYAVGRKIDLKAHRSYDSLSQALQSMFHGFLXQMALQLRDNELQQMEEGSKKRYVLVYEDNEGDRMLVGDVPWE

SEQ ID NO: 24514 - protein, 89 aa, Oryza sativa
  Clone ID: TF_LIB4370-026-R1-N1-D11.pep
SPGHVHRCFIESDTVGRNLDLSSLASFEQLYGRLSEMFCIDSAELRSRVLYRGATGEVRHAGDEPFSEFIKLARRLTILTDAGSDNLGS

SEQ ID NO: 24515 - protein, 32 aa, Oryza sativa
  Clone ID: TF_jC-osroLIB3475019d07a1.pep
VTYEDGEGDWMQVGDVPWEAFAKSVKRLKILV

SEQ ID NO: 24516 - protein, 95 aa, Oryza sativa
  unsure (1)..(95): unsure at all Xaa locations
  Clone ID: TF_LIB3479-005-Q6-K1-H6.pep
MNTDGYALHLKAITEAYLRPQQDQGLLYLKVSMDGXAPYLRNIDLKTYTNYKDLSTGLDKMFRGLSTGTDGLSDYRKDGEYVXLTYDDIDADCML

SEQ ID NO: 24517 - protein, 196 aa, Oryza sativa; identical to SEQ ID NO: 17120
  Clone ID: TF_OsC185566_1.pep

SEQ ID NO: 24518 - protein, 280 aa, Oryza sativa
  Clone ID: TF_OsC20595_1.pep
MRGGVAGPTAGEPPGTEAEAEEVEESSAGDDEELELGLSLGSKKQQQQQHAPCRILTARDLQPAAALSPDSSVSSSSPAAAAAAGGKRAEGPTATTSPGTVASGHPHSFGVVGWPPIRQFRMNSLFNQAKENTSETDTKKTATNESDVQKDKEEGEKKGRVAGWVKVNMDGEVIGRKVDLNAHRSYKTLALALELMFTKPSIGLCASHNTNSLKLLDNSAEYQLTYEDRDGDWMLVGDVPWEMFVSSVKRLRIMRTSDANGLGQRYQGIHRTIASTRGRS

SEQ ID NO: 24519 - protein, 194 aa, Oryza sativa
  Clone ID: TF_OsC16890_1.pep
SRPLAGELERRMELELGLRLALPSPSPSPATATAAGSELDLLNSAPGSCRKRGFEEALGGFKTDDDNDDGNGRGGDGDSDGEMGNKRRKLVGWPPVKCLHRRRDGGCGGGYVKVKMEGLAIGRKLDLSILGSYAELLDTLHLMFPSTNQEDGHDRRRRHPYAVTYEDGEGDWMQVGDVPWEAFAKSVKRLKILV

SEQ ID NO: 24520 - protein, 238 aa, Oryza sativa; identical to SEQ ID NO: 17113
  Clone ID: TF_OsC165755_1.pep

SEQ ID NO: 24521 - protein, 197 aa, Oryza sativa
  Clone ID: TF_OsC72583_1.pep
MENLKATELRLGLPGTEEEAAPPPSTPRAGSKRALAGEPDQAKIKPAAAAKAQVVGWPPVRSYRKSCLQPTTTTTKSKPPPAAAAAETQQKEDVAGAGGLFVKVSMDGAPYLRKIDLKVYKGYRELREALEAMFLCFSGGAAADAAVNPSDFAVTYEDKDGDLMLVGDVPFEMFISTCKRLRIMKGSEARGLGATRG

SEQ ID NO: 24522 - protein, 569 aa, Oryza sativa
  Clone ID: TF_OsC109_1.pep
MGAASSRLEKALGEQFPEGERYFGLENFGNTCYCNSVLQALYFCVPFREQLLEYYANYKSTGDSEDNLLTCLADLFSQITLAKKKTGVLAPKRFVQRVRKQNELFRSYMHQDAHEFWNFLVNDIIDILEEDCRTANSSPETTPEEVSNGAANALANGARERPLVTLVHRTFQGILTNETKCLMCDTITAKDETFFDLSIDVEQNSSLTSCLKSFFSTEILNGEDKFFCDKCSSLQEAHKRMKIKKAPHVLVIHLKRFKYVEQLSRHKPLPPPPPPPPLHTLLISSPSFPPIGIQTRRIPVHVLPLPMSPPLELDYIGLSPPPPPPSSSSAAAARADDVDLKGTELRLGLPGSESPDRRPAAIAAAAATATTLELLPAKGAKRVFPDEAALTPPTAAAGKGKAAREGEEVGAEEEDKKVAAPPQPAAKAQVVGWPPIRSYRKNTMATNQIKSNKEDVDAKQGQGFLYVKVSMDGAPYLRKVDLKTYKNYKDMSLGLEKMFIGFSTGKEGAENQKDGEYVLTYEDKDGDWMLVGDVPWEMFTDSCRRLRIMKGSDAIGLAPRAGEKSKNRN

SEQ ID NO: 24523 - protein, 105 aa, Oryza sativa
  unsure (1)..(105): unsure at all Xaa locations
  Clone ID: TF_OsC28546_1.pep
KVDLSKYTTAXQKLSSAVEELFRGFLEAQKDLFFAESGEQGAEDKIFSGLLDGTGVYTLVYEDNDGDRMLAGDIPWKVFVSTVKRLRVMRRSELPHDMIGADPVK

SEQ ID NO: 24524 - protein, 266 aa, Oryza sativa; identical to SEQ ID NO: 17116
  Clone ID: TF_OsC109_10.pep

SEQ ID NO: 24525 - protein, 226 aa, Oryza sativa; identical to SEQ ID NO: 17118
  Clone ID: TF_OsC157662_1.pep

SEQ ID NO: 24526 - protein, 271 aa, Oryza sativa; identical to SEQ ID NO: 17122
  Clone ID: TF_OsC125_1.pep

SEQ ID NO: 24527 - protein, 355 aa, Oryza sativa
  unsure (1)..(355): unsure at all Xaa locations
  Clone ID: TF_OsC20552_1.pep
MMNLISFETPPLGRRSQDGGSSSSSITAATTTINKAKEAASHLDLSLGISLSPGGGGGDAGTKASSCCYGGGGDGGGCMGSGMLTAGVLGVGHGGSSHDNTTTSSGGVAAGVLGVGHGGSSHDNTTASSGGGGSWTAAFMPSPTGFMHPWSLAARQQKAAAEQERSGVARLPPATTTYMPRAAATVISLPAAVGWPPVHTSRRNLTDTSNGDVRRRRNHGAPAKERGGGDRGQQDIEXMFAKVHMDGYKVGRKINLRAHRNYDSLRRVLTKMTHNFFCPADYSSTNKGEEDCAKSDEFIFLYEDFEGDRMLVGDVPWELFLASAKRLYIAKNPAPRNKEHAEIAKRKETEDAIDN

SEQ ID NO: 24528 - protein, 197 aa, Oryza sativa
  Clone ID: TF_OsC17802_1.pep
MAMAAESIDAELRLGLPGSGGGDGVAAKKRRSASSTVKSEASGTACCGGAGARDVEDGASPASKVQVVGWPPVGSYRRSTFQSSSSSTAAAAKGKGGGETDQGRKNKGGGLYVKVSMDGAPYLRKVDLRMYGGYRELRDALDALFGCFSADASASAAHFAVAYEDKDGDLMLAGDVPWDMFISSCKKLRIMRGSEAR

SEQ ID NO: 24529 - protein, 219 aa, Oryza sativa
  Clone ID: TF_OsC13832_1.pep
MASSSSLRSTSCLASAAETDADNLCLRLGPPGSSITTTTTTGGADPAAKRSLGAKRSLESTDSMASGTGTSAAGDEHDDDTAAPAKAQVVGWPPVRAYRRNTFHQAAAAAAATKKGGDEKQKQQQQGGGLYVKVSMDGAPYLRKVDLKMCKGYRELREALDLLFTKCFSATASDGCSDGQFAIAYEDKDGDLMLVGDVPWEMFISSCKKLRIMKGSEAR

SEQ ID NO: 24530 - protein, 203 aa, Oryza sativa; identical to SEQ ID NO: 17133
  Clone ID: TF_OsC34707_2.pep

SEQ ID NO: 24531 - protein, 297 aa, Oryza sativa
  Clone ID: TF_OsC123_1.pep
PPGAHTHTHSLLLSRCGSLDTTHTHTHSPTLSPVHVLLLPMSPPLELDYIGLSPPVPAAADAAADNDLKGTELRLGLPGSHSPDRSPPAATLDLLPAAKGAKRGFSDEARPLPASAAAAAAAGKGKKAAAGEEDEDAEEEDKKVAAAPQAPAAKAQVVGWPPIRSYRKNTMATNQLKSSKEDAEAKQGQGFLYVKVSMDGAPYLRKVDLKTYKNYKDLSTALEKMFIGFTTGKDGLSESRKDGEYVLTYEDKDGDWMLVGDVPWEMFANSCRRLRIMKGSDAIGLAPRAVDKSKNRN

SEQ ID NO: 24532 - protein, 321 aa, Oryza sativa
  Clone ID: TF_OsC436_2.pep
LNTINVHYPDQNANHNMYPGTWSLMPPNTGFGVNQQNYLMTPDITLPQRSLNAKFGGNGAFTSLRAHGIDQRSSGWLGHIEPSSHIDDASSSLIKPQPLVIDHNVQNAKGGSCMLFGISLDSPAKPELLISPPSVAFDGKLQQDALEEDECSDPSKTVKPLDGAQHDSAREKHQSCPDGTKNIQSKQQNGSSRSCKKVHKQGIALGRSIDLTKFTCYDELIAELDQMFDFNGELNSSSKNWMVVYTDNEGDMMLVGDDPWNEFCNMVHKIFIYTREEVQKMNPGALNSRSEDSRSTSVERGLVGEGLQGGLSTPSLNSENC

SEQ ID NO: 24533 - protein, 236 aa, Oryza sativa
  Clone ID: TF_17154532.pep
MAGADVDVGTELRLGLPGGGGGAAEAAAKAAKRGFEETIDLKLKLPTAGMEEAAAGKAEAPAAEKAKRPAEAAAADAEKPPAPKAQAVGWPPVRSFRRNIMTVQSVKSKKEEEADKQQQQPAANASGSNSSAFVKVSMDGAPYLRKVDLKMYNSYKDLSLALQKMFGTFTATGNNMNEVNGSDAGTTYEDKDGDWMLVGDVPWQMFVESCKRLRIMKGSEAIGLAPRAKDKYKNKS

SEQ ID NO: 24534 - protein, 128 aa, Oryza sativa
  Clone ID: TF_uC-osflcyp010g02b1.pep
SFAPQAPAAKAQVVGWPPIRSYRKNTMATNQLKSSKEDAEAKQGQGFLYVKVSMDGAPYLRKVDLKTYKNYKDLSTALEKMFIGFTTGEMSRVTLLAFLFVIAFPFDVDALTITSSRMPVTRNQYMLD

SEQ ID NO: 24535 - protein, 65 aa, Oryza sativa
  Clone ID: TF_uC-osflcyp159g02b1.pep
EQARIFAIEILVQGEILFCLFYLALQVSVDVLAYQARMAYLRAARMGEFVLTYEDKGGDWMLVGD

SEQ ID NO: 24536 - protein, 243 aa, Oryza sativa; identical to SEQ ID NO: 17129
  Clone ID: TF_OsC217831_1.pep

SEQ ID NO: 24537 - protein, 249 aa, Oryza sativa
  Clone ID: TF_OsC45780_1.pep
MAADLAFEATELRLGLPGGGGDGDAAAAAARSSSGKRGFAETIDLKLKLEPAAAAVDDDDDKEEAAADDREKKSSVVTAAADPEKPRAPKAQVVGWPPVRSYRKNILAVQADKGKDAADGGGDKSGAGAAAAAFVKVSMDGAPYLRKVDLKMYKSYLELSKALEKMFSSFTIGNCGSHGVNGMNESKIADLLNGSEYVPTYEDKDGDWMLVGDVPWEMFVESCKRLRIMKGSEAIGLAPRAMEKCKNRS

SEQ ID NO: 24538 - protein, 335 aa, Oryza sativa
  Clone ID: TF_OsC81650_1.pep
MEEGSNKREGLPPQLLDLIPDEKEWKLREALGLGRSRNAGFDGEEDKKLDLKLGLPGFIEDDEAETLRDYRLQQESPSLSLSFFPKHSKTTSSTTTTTGAKRGFIDTVEDKTEGYNDQKQQARAGCGKELAVEEMIAAVSERKKGCCPPPPPPHGAPATPARNRPQTQGRGAAAPVVGWPPIRSFRRNLASSSSSKHSPEPQNDNANAKVTLTCKKNPLVKINMDGIPIGRKIDLAAYNSYDGLSSAVKQLFHGFLQAQKDQTNAQIAQQGADDKIFYQLLDGSGEYTLVYEDSEGDRMLVGDVPWKVFVSTAKRLRVLRSSELSHTLIGATARV

SEQ ID NO: 24539 - protein, 281 aa, Oryza sativa
  Clone ID: TF_OsC86592_1.pep
MPPPLEARDYIGLAASPASSSSSCCASTPVAEVVGAHLALRLGLPGSESPARAEAEAVVVDAALTLGPAPPPRGGAKRGFVDSLDRSEGRRAAATAGDDERGVREEEEEEKGLGEAAAGAPRAAKAQVVGWPPVRSYRKNTLAASATKTKGEDQGKSEVGCCYVKVSMDGAPYLRKVDLKTYSSYEDLSLALEKMFSCFITGRSSSHKTSKRDRLTDGSRADALKDQEYVLTYEDKDADWMLVGDLPWDLFTTSCRKLRIMRGSDAAGMAPRSLEQTGQNK

SEQ ID NO: 24540 - protein, 100 aa, Oryza sativa
  unsure (1)..(100): unsure at all Xaa locations
  Clone ID: TF_LIB3431-001-P1-K1-G12.pep
VAVDRAPYXLRKVDLEAYPGYYQMLASLQDKILCHFTIPKLGNEETKLLXTASGDEYMPTYEDNDSNLMLPGDVPWKMKGETRPRLRLKKSSEADNLAPR

SEQ ID NO: 24541 - protein, 64 aa, Oryza sativa
  Clone ID: TF_LIB4370-006-R1-N1-H5.pep
GVIMHLCRATYSKFSSMLPDKKAWTHAILQYCTTWDLYLPRPTASDPFIILSLLQLSVNILQYN

SEQ ID NO: 24542 - protein, 210 aa, Oryza sativa
  unsure (1)..(210): unsure at all Xaa locations
  Clone ID: TF_OsC4615_1.pep
MSVETERSSTESSAASGLDFEDTALTLRLPGSLAAAAAPDPDRKRSSPSSSDAADAADNSSPLAAAADAPPAPKARVVVGWPPVRSFREDPAGGQVSGWFPWDGVPXLRKVDLDGXTSGYDQLLRALQDKFFSHFTILLXSSPYAGSSPDDERKLVDAVNGTEYVPTYEDKDGDWMLVGDVPWKMFVETCQRLRLMKSSEAVNLAPRAAQ

SEQ ID NO: 24543 - protein, 173 aa, Oryza sativa
  Clone ID: TF_OsC2423_2.pep
MSCTSPDPPDYCSAASPELKLYQAFIFSVPVFFTFVLLLFFYLFYLRRRRANWQSLRMRTNNLIRGDNPRLECGIKKEMREMLPVVVFKESFLIRETQCSVCLADYQPDERLQRIPPCGHTFHIDCIDHWLSTNTTCPLCRVSLLPSPKTASIDPVDLEAQTVEENSSLDEKR

SEQ ID NO: 24544 - protein, 300 aa, Oryza sativa
  Clone ID: TF_OsC2849_2.pep
MGEASESMKKISRGRLGGSWMGEPSDHHRHGDEQEEEEKTLELSLGLPGGGWRAACRDKGTTTKHSIAAAAAADDDDGDKSSMLSLGYSTLVSHSQGKANKNKGSPEEEEAHPPPATGNNALASNNNGCFQTRSPSTPVVGWPPVRTFRRNLATSSKASLELQNGKKAAKAEEIKRAPFIKINMDGVPIGRKIDLNAFDSYEKLSLAVDKLFRGLLAAQRDPLTAGAKDCQQEDVAISGLLDGTGEYTLVYEDYEGDKVLVGDVPWGMFVSSVKRLRVLKTSDLSSSLITSGRKRTAAEC

SEQ ID NO: 24545 - protein, 205 aa, Oryza sativa; identical to SEQ ID NO: 17134
  Clone ID: TF_OsC334733_1.pep

SEQ ID NO: 24546 - protein, 266 aa, Oryza sativa; identical to SEQ ID NO: 17135
  Clone ID: TF_OsC59803_1.pep

SEQ ID NO: 24547 - protein, 234 aa, Oryza sativa
  unsure (1)..(234): unsure at all Xaa locations
  Clone ID: TF_LIB3431-025-P1-K1-F7.pep
DAWADAWADAWADAWADAWAQFGISLSDLHLNKLQSSLSPHGLHQLDHGMQPRIAAGLIIGHPAARDDISCLLTIGSPQNNKKSDGKKAPAQLMLFGKPILTEQQISLGDAASVDVKKSSSDGNAENTVNKSNSDVSSPRSNQNGTTDNLSCGGVPLCQDNKVLDVGLETGHCKVFMQSEDVGRTLDLSVVGSYEELYRRLADMFGIEKAELMSHVFYRDAAGALKXTGDEPSA

SEQ ID NO: 24548 - protein, 133 aa, Oryza sativa
  Clone ID: TF_OsC28546_2.pep
DLQKYDSYQKLSSAVEELFRGFLEAQKDLSCAESGEQGAEDKIFSGLLDGTGVYTLVYEDNDGDRMLAGDIPWKVFVSTVKRLRVMRRSELPHDYGKHRATSTGAIFLINSSAVSLVKLGSNGCTFVLYNTML

SEQ ID NO: 24549 - protein, 1736 aa, Oryza sativa
  Clone ID: TF_OsC608_1.pep
MGRLFVSGGLGAPDFYPQTLSCAEETLTKEYVQSGYKDTVEGIEEAREIVLSQIPYLSKPDIATKCKEALKKRFRAINESRAQKRKAGQVYGVPLSGSLLTKPGMYPEQMHSNEDTRRKWIEALVQPNRRLWSLAEQVPRGFRRKLLFNYLIRYNVPLLRASWLVKVTYLNQVQTSSNNVSSAAPDSLRSQHWTKDVIEYLQLLLDELCSKNGFFGLPSSQEQSLPCLVAGDSPIKLKTGASPASADVEEPSLHFKWSYMIRIVQCHLMEQLLVPSLLIEWVFNQLQERDSTEVLELLLPIVLSLVDTITLSQTYIHMLVEILIQRLSDASPGSLSVKNNPKRSSITSALVELLQYLILAVPDTFVSLDCFPLPSVVAPDVYGKGALLKIAGGGKIASSRRQNASRHLSCGYAICSVQRRASDLSLVANPNLQVRGAANVVQALDKALVTGNLTAAYTSVFNYLSDTLMEETWIKEVSPCLRSSLMWMGAVELSLVCSVFFICEWATCTFRDCRTSQCQNVKFSGSKDFSQVYMAVSLLKDKMNEINNLSSSKSSSQLAMKDHLKSATLNHSSIKVTAMETASGFRDSTGSIDENNKKDIFSSPGPLHDIIVCWLDQHEISDASGFKSVDVFMTELIRSGIFYPQTYVRQLIVSGITIWNDSLFDLEKKTRHYKILKHLPGFCLFNILEEAKIAEDQVLYEIVSTYSSERRLVLSELSSGLATDANVEGRVPLSSCLQKQPDLLMDSTDDNHGRVAVQVEEVKLMISGREETKKTKKGQTDLVDSEEDVGHAKTGCKDSSRTKRQKLDKNVFPFQGSPLVQSDEEDFWWVRKEQKQELFTVETIHQSIEQTSGGKATVVQKTQNIAQLAAARIDGSQGASTSHVCDNNLSCPHHKPGTNSDILKDADHMSMLTLAEVGKSLKRLRLLERRSISIWLLKSIKQLIEGDEVKHSKANNSISASTVQHSGKIASGWRFGEDELLSVLYIMDTCCDLLSSVRLLIWLLSKIYIGRTTSGQVGRGVMHPKHKENQVFQVAEAFLFSSLLRYENILIAMDLLPEVLSVSMNRTVHKSGERQSTSVAFAYARYFLRKYRDVTSVARWERNFRSTSDKRLLAELDSGKSITGDSIISGISSDCIRQNGGANPDGDHSLVASAVSAIVDNAGHAIAKHLDISGGNNPGVTSINSLNLIQHILDIHINSLALLRETLGDRFSRIFEISLAVEASSAVAASFAPPKAHRSQQSSETHDESGNHANEVPSNPSKCFNVKAVKVSAAVSALVVGAIIYGVVSLERMMVVLRLKEGLDILQFLRISKASTNGVTHSIGNFKIDSSTEVLVHWFKILIGNCKTVYNGVIAEILGDSYVLAFSRLQRTLPLGIVLPPAYSIFAMVLWRPYLYDTSTSNHEDIQLYQSLLGAISDITRHQPFRDVCFRNMHLFYDLLAADVGDSEFAAIVELRSPDECLKALSPLRARVFLNALLDCEIPVTMRDDGTYALEPGCAEASTKNDVKFPERLIEILNVLQPAKFHWQWVELRLLLDEQSLIEKPKNVPYVKALRSLSPNAENFTLSEREKGLTEVILSRLLVRPDAAPLYSELIHLLGKLQESFVMGIKWFLQGQDVLLGNNSVRQQLVNLTQRKGFPMKTQFWKPWGWSKLVGYANANKSSKRKLEVTSIEEREVDGLIDSRKSSNRKSLNVGTSPEGHGSTQKYFTQEALAEFFLLCIYFCFCLFNFLFFFLP

SEQ ID NO: 24550 - protein, 157 aa, Oryza sativa
  Clone ID: TF_LIB3599-052-Q6-K1-E12.pep
MRWPPIRSYRKNTMAMSQPALKGKDDGEAKQAPASGCLYVKVSMDGAPYLRKVDLKMYKNYKELSLALEKMFSCFTVGHGESNGKSGRDGLSDCRLMDLKNGTELVLTYEDKDEDWMLVGDVPWRMFTDSCRRLRIMKGSDAVGLAPRATDKSKNRN

SEQ ID NO: 24551 - protein, 129 aa, Oryza sativa
  Clone ID: TF_OsC6383_1.pep
ECYNLFTISPSVKVSMDGAPYLRKVDLKMYKNYKELSLALEKMFSCFTVGHGESNGKSGRDGLSDCRLMDLKNGTELVLTYEDKDEDWMLVGDVPWRMFTDSCRRLRIMKGSDAVGLAPRATDKSKNRN

SEQ ID NO: 24552 - protein, 266 aa, Oryza sativa
  Clone ID: TF_OsC6383_2.pep
MAPPQERDYIGLSPAAAAALATELRLGLPGTAEEAESEGGGGGGTDAAPLTLELLPKGGAKRGFADAIVGGPAGQRREAAGGKAAAAAAEAEEEEEKKKAQAPAAKAQVVGWPPIRSYRKNTMAMSQPALKGKDDGEAKQAPASGCLYVKVSMDGAPYLRKVDLKMYKNYKELSLALEKMFSCFTVGHGESNGKSGRDGLSDCRLMDLKNGTELVLTYEDKDEDWMLVGDVPWRMFTDSCRRLRIMKGSDAVGLAPRATDKSKNRN

SEQ ID NO: 24553 - protein, 141 aa, Oryza sativa
  Clone ID: TF_OsC4615_2.pep
MARRGGRRARVVGWPPVRAFRKNALAALAAASSSKAKFVKVAVDGAPYLRKVDLEAYRGYDQLLAALQDKFFSHFTIRKLGNEEMKLVDAVSGNEYVPTYEDKDGDWMLVGDVPWKMFVETCQRLRLMKSSEAVNLAPRSA

SEQ ID NO: 24554 - protein, 535 aa, Oryza sativa
  Clone ID: TF_OsC141148_1.pep
MAAGGSSSNPMSREASSSAAAAAAGVAVRDVGDDKPLPSAEVDITYWAAQEEAAALLESMAARARGEDDLPEEQLQANNQLQEDEVIALQAIFGDDMVILENKDNLRFIQIFVHYTLPDSIRVFLNLRRSGAMVGTDDSENHNGGELYHLAAKWLDEPKVSYLCAALDEVWTELPGQEVIYRWVDWLNSSSWSSIALNDEIVLDPDKTLKIGDERAIARRILVESTIPLMQSYSEKRSHKIFLESLLCMESHCKIHVKEGNLMQLACPDTNCRNPLPPSVLKSLLRDDGYAQWESFALQKLLDAMPDLVYCPRCSAACLEVDNDAQCPGCFFTFCTLCKRRRHVGDTCITPEEKIRILKGLTRMSSMRKLYSIPEEQLLKEKREIDELINIQEALRDSKQCPRCKMAISKIEGCNKMTCGNCGRFFCYRCNKAIGGYDHFWNGNCDMFEREQDENPQQQDDENFGGDPDEDAELLEPEWVLLTYPCPNCGQLGTNNHISCPGCRGHYCALCRKRVLKCSQHFGPRGCQQHTEDAR

SEQ ID NO: 24555 - protein, 511 aa, Oryza sativa
  Clone ID: TF_OsC53097_1.pep
MEERLADVEGSFACNSRGEDDFRSCCGDEDEWEDTEESFTAGVAKGELDESSVRLFFKGVSSPEAEGKKLSGIGVVMERSPGVPMLQVQKKLDFYVDELVADHLALMDGLLVALQNGIRKIFAFTNSEKLYFQRIAEAEILEDQLLVALGHRILELVEKLEDFDIILLPSFELERPLQLAKEAIGIMYLSPYEVGTCSICCEEKRGAQMIKVGCAHTFCYSCLTSYTQEKLQTNKVPIRCPQLRCKYHISASECKSFLPVSCYDSLERAFAEAGTSDMERFYCPFPNCSVLLDLSQHFSRASTSSQSDLNCVECPECHRDICINCGVPWHVMMGCDEYQSLPVDERDAGDLSLHRLAQNNRWRRCQRCRRMIELTQGCFHMNCWCGHEFCYSCGAEYTNGIQTCQCVFWDEESIEAASAAHSTQASEIWAWDTFDCMPTAIEGYSEQERAQLALIQRFLSGGFNLGEPPSQSPPRCADSYIIDTMKDLHQLPWLERFVSVISDSYNEDYIQ

SEQ ID NO: 24556 - protein, 302 aa, Oryza sativa; identical to SEQ ID NO: 17140
  Clone ID: TF_OsC58839_1.pep

SEQ ID NO: 24557 - protein, 887 aa, Oryza sativa; identical to SEQ ID NO: 17144
  Clone ID: TF_OsC1517_1480.pep

SEQ ID NO: 24558 - protein, 322 aa, Oryza sativa
  Clone ID: TF_OsC42004_2.pep
MASGSSSSNDAAADLTVLVDDFYFSVLSHGRNDDDDSADGDDGELFPISDEKYASELQLQEVIMSSSVAATTARSSSAPVIFIGECSSSHAASSSSRLTSIPAAAATTLVFCKICMDAVPPSAAHRASRGCDHAFCAACLAGYVGAKIQERIADVRCPEERCRGALDPELCQGILPREVFDRWGAALCEAMVLAAPRAYCPFKDCSAMMLDDAGEAVTESECPSCRRLFCAQCAVPWHAGVDCAAYKKLGKGDRGKEDLLVVEMAKGKKWKRCPKCKYFVEKSQGCLHITCRCGFEFCYGCGRQWQLIHDGCCSLMTQQAGE

SEQ ID NO: 24559 - protein, 289 aa, Oryza sativa
  unsure (1)..(289): unsure at all Xaa locations
  Clone ID: TF_OsC1713_3842.pep
MSCAGCSHFYCHECWEGYISAAVNDGPXCLVLQCPEPSCDAIVLEDMINSLTKDEDKVKYARFVLWSYIGVNNKIKWCPAPDCTCAVEFLGDGNYDVSCKCKFSFCWNCAEEAHRPVSCDTVSKWILKNSAESENMNWILAYSKPCPKCKRPIEKNQGCMHMTCTPPCKFEFCWLCLGAWSDHGDGTGGFYACNRYQSAKMGGMYDEAEARRERAKNSLERYMHYYERWASNQTSRQKAQADLQKVENEDLTKLSDVVGIPETQLKFIPEAWHRRVLXWTYAMVLSTHK

SEQ ID NO: 24560 - protein, 174 aa, Oryza sativa
  unsure (1)..(174): unsure at all Xaa locations
  Clone ID: TF_uC-osflm202106d08b1.pep
ANDDDKVRYARFILRAYVEDSKKTKWCPAPDCTCAVEFVSDGNYDVSCNCKFSFCWNCTEEAHRPVNCETVSRWILKNSAESENMNWILANSKPCPKCKRPIEKNQGCMHMTCTPPCKFEFCWLCLGSWAEHGERTGGFYACNRYEXSKEEGVYDETEXRRERAKNSLERYMHY

SEQ ID NO: 24561 - protein, 606 aa, Oryza sativa; identical to SEQ ID NO: 17148
  Clone ID: TF_OsC2708_1.pep

SEQ ID NO: 24562 - protein, 1732 aa, Oryza sativa
  Clone ID: TF_OsC54778_1.pep
MRRSNDGRPFRPPDWGPPPHRYHHHHQNQYQYQQRYRPAQPGPRQFAVILLRGGSNLSAPPATEVEALVAGLPSPPPDSLSVSSSGRQAARLAFRSPQAAAAAARELWSLRLEGLHLLTPDVSDPALAAHAAPLIASLFAAHAARLVDSDLVSLTAARSSELAASIQAVKRRLAGHNRIRDFEQLQAQKRTLKAEKELVDAKIDEYKAAMRSIRRALLRGTEDDEEAEEEGLEVFGIGGGGEMNFARLHMIMLRECRRLKEGLPIYAYRRNILDHIFANQVMILIGETGSGKSTQLVQYLADSGLAANGSIVCTQPRKIAAISLAHRVVEESNGCYGDNFVLNSTFLDHQDFSSKIIYTTDNCLLHHCMNDMGLDGISYIIVDEAHERSLNTDLLLALIKKKLLDRLDLRLIIMSATADANRLAEYFYGCQTFYVKGRSFPVEIKYVPDISEEASFNTVPNHLRGSCATASYVYDVVKMVSIIHKNEEEGAILAFLTSQLEVEWACENFSDADAVVLPMHGKLSHVEQSLVFKSYPGKRKIIFCTNIAETSLTIKEVKYVVDSGLAKESRFVPSSGLNVLKVNWISQSSANQRAGRAGRTGAGRCYRLYSESDFSMMEVHQEPEIRKVHLGTAVLRILALGIRDAQNFEFVDAPNPEAINMAVKNLEQLGAVKYKCDGFELTDTGRYLVKLGIEPRLGKIMLDCFGFGLRKEGVVLAAVMANSSSIFCRVGTDEEKYKADRLKVPFCHQDGDLFTLLAVYKEWEDEHENRNTWCWQNSINAKTMRRCQETISDLENCLRHELNIIVPSYWCWNPEESTVHDKLLKRIILTSLSGNIAMFSGHERFGYQVISTDQAVKLHPSCSLLIYDSKPEWVVFTEILSVPNQYLVCVTAIDPDALCSIHPMPLIQQLEKLKLQVKVISGLGYNLLRKFCGKSGQNQQKIISLLQEEFRDDRVTVEVDFRNKEVVLFAKEQDIEKVFGIVNDALECEARMLRNECLEKSLFSGKPGDCSLALFGSGAEIKHLELEKRYLTVEVLHQNAHELNDKELICLVDTLISGVANFYKLYGNLQVASDETKWGKFTFLNPEYAEDAVSKLNGMEFHGSPLKVVPVCSSSNRGLPFPAVRAKVSWPLKQSRGLALVTCASGEAEFVVKDCFALGVGGRYINCEVSTRHENCIFVRGIPMHVTEPELYDAFRSTTTRKIVDVHLLRGTPIAAPSASLCAEALNREISSFMPKKIFPAQNFRVEVLTPEENDSVMRATITFDGSLHREAARALEHLQGSVLPCCLPWQTIQCQHVFHSTVSCQVRVYNVISQAVASLLESFRSQKGVSYNLEKNEYGIFRVKLTANATKTIADLRRPLEILMKGKTINHPDLTLSTVQLLMSRDGVADLKSVEQETGTYILYDRQSLNIKVFGLQDQVAAAEEKLIHALLQLRDKKPLDIRLRGRNLPPNLMKEMLKKFGADLEGLKREVPAVELRLNLRQHTLYVRGSKEDKQRVEEMISELVNSTKYNGLLQLPLENACPICLCEVEDPFKLESCGHVFCLTCLVDQCESALKSHDGFPLCCLKNGCKKQLLVVDLRSLLSSEKLEELFRASLRAFVASNAGKYRFCPTPDCPSIYQVAAADAESKPFVCGACFVEICNKCHLEYHPFISCEAYKEYKEDPDATLLEWRKGKENVKVCPSFHFTIEKADGCNHVECKCGSHICWACLENFRSSDDCYSHLRSVHLSY

SEQ ID NO: 24563 - protein, 624 aa, Oryza sativa; identical to SEQ ID NO: 17150
  Clone ID: TF_OsC59837_1.pep

SEQ ID NO: 24564 - protein, 208 aa, Oryza sativa; identical to SEQ ID NO: 17157
  Clone ID: TF_OsC930_2.pep

SEQ ID NO: 24565 - protein, 160 aa, Oryza sativa
  unsure (1)..(160): unsure at all Xaa locations
  Clone ID: TF_OsC142633_1.pep
AQIANRKGRVNTKFFSIELSSWHLKGQDLSEIGIQETQTLQNQLELRIRCIRSEKYHLMIEDSNVLNRXEILIQQEIMDLYRKMTNCIGYTLNYLMTAYLSPQLYETGAENEANRDSTTPYNFAVIEEANTPARLELNPPSQQNDAEQTTPPKLGLQLHP

SEQ ID NO: 24566 - protein, 162 aa, Oryza sativa
  unsure (1)..(162): unsure at all Xaa locations
  Clone ID: TF_jC-osflLIB3477P008a12b1.pep
MARGKVQLKRIENKINRQVTFSKRRNGLLKKAHEISVLCDAEDAAIGFSPKGKLYEYASDSXMDKILERYERYSYAEKALISSESESEITLPQVTTCTASRSTHGIXCQYCLMSKTLGNWCHEYRKLKAEIETIQICHKHLMGEDLESLNLTRLQQLEQQLE

SEQ ID NO: 24567 - protein, 160 aa, Oryza sativa; identical to SEQ ID NO: 17159
  Clone ID: TF_OsC15113_3.pep

SEQ ID NO: 24568 - protein, 219 aa, Oryza sativa
  Clone ID: TF_OsC15113_1.pep
PQPPRHRFCRRCPLPEEIRPTSLSLSISFDFSTSLSLPFSLCAAAAWQGQRGACGGPAAAAPSPPPDLTGAGGEARSWRTVWRCNAGDHKPARAPSLDNPSSGGCGSSCPEFGYSRSSGLRRQQRQIQAHGEWMASPLSSNRLCALPSAVKAYRLYGEHVLLLILCSHHLPATLARHLWSCFSSCCSSLRFRDSRSSPMRWLQELQKINFAARSSSPIR

SEQ ID NO: 24569 - protein, 247 aa, Oryza sativa
  Clone ID: TF_OsC482_1.pep
MWRRRWRGRGEGEGRAATGKRERIAIRRIDNLAARQVTFSKRRRGLFKKAEELSILCDAEVGLVVFSATGKLFQFASTSMEQIIDRYNSHSKTLQRAEPSQLDLQGEDTSTCARLKEELAETSLRLRQMRGEELHRLNVEQLQELEKSLESGLGSVLKTKSKKILDEIDGLERKRMQLIEENLRLKEQVSRMSRMEEMQPGPDSEIVYEEGQSSESVTNASYPRPPPDNDYSSDTSLRLGLSLFSSK

SEQ ID NO: 24570 - protein, 260 aa, Oryza sativa; identical to SEQ ID NO: 17174
  Clone ID: TF_OsC386220_1.pep

SEQ ID NO: 24571 - protein, 186 aa, Oryza sativa; identical to SEQ ID NO: 17170
  Clone ID: TF_OsC1443_2.pep

SEQ ID NO: 24572 - protein, 248 aa, Oryza sativa
  Clone ID: TF_OsC892_1.pep
MGRGRVHPRRIENKINRQVTFAKRRNGLLKKAYELSVLCDAEVALIIFSNRGKLYEFCSGQSMTRTLERYQKFSYGGPDTAIQNKENELVQSSRNEYLKLKARVENLQRTQRNLLGEDLGTLGIKELEQLEKQLDSSLRHIRSTRTQHMLDQLTDLQRREQMLCEANKCLRRKLEESNQLHGQVWEHGATLLGYERQSPHAVQQVPPHGGNGFFHSLEAAAEPTLQIGFTPEQMNNSCVTAFMPTWLP

SEQ ID NO: 24573 - protein, 250 aa, Oryza sativa
  Clone ID: TF_OsC1057_1.pep
MGRGRVELKRIENKINRQVTFSKRRNGLLKKAYELSVLCDAEVALIIFSSRGKLYEFGSAGITKTLERYQHCCYNAQDSNNALSETQSWYHEMSKLKAKFEALQRTQRHLLGEDLGPLSVKELQQLEKQLECALSQARQRKTQLMMEQVEELRRKERQLGEINRQLKHKLEVEGSTSNYRAMQQASWAQGAVVENGAAYVQPPPHSAAMDSEPTLQIGYPHQFVPAEANTIQRSTAPAGAENNFMLGWVL

SEQ ID NO: 24574 - protein, 117 aa, Oryza sativa
  Clone ID: TF_OsC44879_2.pep
QSLENQLEISLRSVRTKKDHVLIDEIHELNRKGSLVHQENMELYKKISLIRQENAELYKKIYETEGPSEVNRDSPTPYNFAVIEKTNVPVQLGLSTLPQHSDAEQSTAPKLGLQLNP

SEQ ID NO: 24575 - protein, 249 aa, Oryza sativa; identical to SEQ ID NO: 17172
  Clone ID: TF_OsC494_1.pep

SEQ ID NO: 24576 - protein, 220 aa, Oryza sativa
  Clone ID: TF_LIB4371-038-R1-K1-B8.pep
MDRSEMGRGRVELKRIENKINRQVTFSKRRNGLLKKAYELSVLCDAEVALIIFFLRGKLYEFGSAGINKTLEKYNSCCYNAQGSNSALAGGEHQSWYQEMSRLKTKLECLQRSQRHMLGEDLGPLSIKELQQLEKQLEYSLSQARQRKTQIMMEQVDDLRRKERQLGELNKQLKNKLEAEADSSNCRSAIQDSWVHGTVVSGGRVLNAQPPPDIDCEPTL

SEQ ID NO: 24577 - protein, 235 aa, Oryza sativa
  Clone ID: TF_OsC44879_1.pep
MGRGKIVIRRIDNSTSRQVTFSKRRNGIFKKAKELAILCDAEVGLMIFSSTGRLYEYSSTSMKSVIDRYGKSKDEQQAVANPNSELKFWQREAASLRQQLHNLQENHRQLMGEDLSGLNVKELQSLENQLEISLRSVRTKKDHVLIDEIHELNRKGSLVHQENMELYKKISLIRQENAELYKKIYETEGPSEVNRDSPTPYNFAVIEKTNVPVQLGLSTLPQHSDAEQSTAPKLG

SEQ ID NO: 24578 - protein, 268 aa, Oryza sativa; identical to SEQ ID NO: 17175
  Clone ID: TF_OsC1730_2.pep

SEQ ID NO: 24579 - protein, 644 aa, Oryza sativa
  Clone ID: TF_OsC1204_1.pep
MPSLALLRAVAMALLLLLARSMEGVDGAGGGGNATCPLDLSYVTTFPWDADLCAGGAGNMTRCCNTLLSVLAIGLAEQVRATGHFRIPSVGESAACLKDYGAKLSAAPLSLPGASLVQTCFPSPEQFVSSPSFCAGVTTAAEYRAVVGNDSVAALDSACGDLSSTPHCLRCLDAGIAATSRLKAAANISANATTDGAATTRNCFYLTVTYAAGISNVAGPTNPPTAACTLGLALSNPPAAPPKSHDTVIYATAIPVAFLLLASLLAFLVWRRHDKKKKKKKIHEISKEGSAKRRSHPRPNTGSILYDIAELSKATDAFADRNLVGRGGFGAVYCGVLADGSVVAVKKMLDPDVEGGDEEFTNEVEIISHLRHRNLVPLRGCCIVDDDAEEGKQKFLVYDFMPNGALEDFIFRDGKRPALTWAQRRSIIMDVAKGLEYLHYGVKPAIYHRDIKATNILLDGDMRARVADFGLARRSREGQSHLTTRVAGTHGYLAPEYALYGQLTEKSDVYSFGVLVLEVLSARRVLDMSAPSGPVLITDWAWAHVKAGQAREVLDGALSTADSPRGGAMERFVLVGILCAHVMVALRPTITEAVKMLEGDMDIPELPDRPLPYGHSAMFSEAGSNFSASPAFSGPFIDNGDMLR

SEQ ID NO: 24580 - protein, 267 aa, Oryza sativa
  Clone ID: TF_OsC99_1.pep
MGRGKVQLKRIENKINRQVTFSKRRNGLLKKAHEISVLCDAEVAAIVFSPKGKLYEYATDSRMDKILERYERYSYAEKALISAESESEGNWCHEYRKLKAKIETIQKCHKHLMGEDLESLNLKELQQLEQQLESSLKHIISRKSHLMLESISELQKKERSLQEENKALQKELVERQKNVRGQQQVGQWDQTQVQAQAQAQPQAQTSSSSSSMLRDQQALLPPQNICYPPVMMGERNDAAAAAAVAAQGQVQLRIGGLPPWMLSHLNA

SEQ ID NO: 24581 - protein, 343 aa, Oryza sativa
  Clone ID: TF_OsC1755_2.pep
MVQCHEVGQPRGERRKVQEEEKHQGQYIDGLSPHRPGLHLISSFPNHSLLLEHTPLFLIIISSLIREELANMHIYKEQEAEPSTGLMMPEPAPVASPGSGGSGGSGSVGAEKIGSRGKIEIKRIENTTNRQVTFCKRRSGLLKKAYELSVLCDAEVALVVFSSRGRLYEYSNNSVKETIERYKKANSDTSNASTVAEINAQHYQQEAAKLKQQITNLQNSNRTLVGDNITTMNHRELKQLEGRLDKGLGKIRARKNELLCAEIEYMQRRETELQNDNMYLKSKVAESERGLQTVNMMGSASTSEYVQNMIHYDPRNFLQFNIMHQPQYYPEQEDRKAFMSDER

SEQ ID NO: 24582 - protein, 263 aa, Oryza sativa
  Clone ID: TF_OsC753_1.pep
DLAWLVGCSWRSIGMGRGRVELKRIENKINRQVTFAKRRNGLLKKAYELSVLCDAEVALIIFSNRGKLYEFCSTQSMTKTLEKYQKCSYAGPETAVQNRESEQLKASRNEYLKLKARVENLQRTQRNLLGEDLDSLGIKELESLEKQLDSSLKHVRTTRTKHLVDQLTELQRKEQMVSEANRCLRRKLEESNHVRGQQVWEQGCNLIGYERQPEVQQPLHGGNGFFHPLDAAGEPTLQIGYPAEHHEAMNSACMNTYMPPWLP

SEQ ID NO: 24583 - protein, 224 aa, Oryza sativa
  Clone ID: TF_OsC930_1.pep
MARGKVQLRRIENPVHRQVTFCKRRAGLLKKARELSILCEADIGIIIFSAHGKLYDLATTGTMEELIERYKSASGEQANACGDQRMDPKQEAMVLKQEINLLQKGLRYIYGNRANEHMTVEELNALERYLEIWMYNIRSAKMQIMIQEIQALKSKEGMLKAANEILQEKIVEQNGLIDVGMMVADQQNGHFSTVPLLEEITNPLTILSGYSTCRGSENGLFLLT

SEQ ID NO: 24584 - protein, 257 aa, Oryza sativa; identical to SEQ ID NO: 17183
  Clone ID: TF_OsC1644_1.pep

SEQ ID NO: 24585 - protein, 244 aa, Oryza sativa; identical to SEQ ID NO: 17184
  Clone ID: TF_OsC207784_1.pep

SEQ ID NO: 24586 - protein, 105 aa, Oryza sativa; identical to SEQ ID NO: 17188
  Clone ID: TF_OsC1644_2.pep

SEQ ID NO: 24587 - protein, 230 aa, Oryza sativa
  Clone ID: TF_OsC1664_2.pep
MVRGKTQMKRIENPTSRQVTFSKRRNGLLKKAFELSVLCDAEVALIVFSPRGKLYEFASASTQKTIERYRTYTKENIGNKTVQQDIEQVKADADGLAKKLEALETYKRKLLGEKLDECSIEELHSLEVKLERSLISIRGRKTKLLEEQVAKLREKEMKLRKDNEELREKCKNQPPLSAPLTVRAEDENPDRNINTTNDNMDVETELFIGLPGRSRSSGGAAEDSQAMPHS

SEQ ID NO: 24588 - protein, 249 aa, Oryza sativa
  Clone ID: TF_OsC1730_1.pep
MGRGPVQLRRIENKINRQVTFSKRRNGLLKKAHEISVLCDADVALIVFSTKGKLYEFSSHSSMEGILERYQRYSFDERAVLEPNTEDQENWGDEYGILKSKLDALQKSQRQLLGEQLDTLTTKELQQLEHQLEYSLKHIRSKKNQLLFESISELQKKEKSLKNQNNVLQKLMETEKEKNNAIINTNREEQNGATPSTSSPTPVTAPDPIPTTNNSQSQPRGSGESEAQPSPAQAGNSKLPPWMLRTSHT

SEQ ID NO: 24589 - protein, 278 aa, Oryza sativa
  Clone ID: TF_OsC336457_1.pep
MGQGKIEMKRIEDATRRQVTFSKRRAGFLKKANELAVLCDAQVGVVVFSDKGKLFDFCSPPVILMELFHRYEITTRNTRLQETNRDDEQMVMEITRLRNEIDQLEASLRRQTGEDLSSVSTVDELSQLQLQLESSLSKVHARKDELMSQQLEDMRRMVHYSLIVVAVVVFADECCRPCMSRTISCAAWGELQLWSSLPVGEQQMSENWHSENWQSPGSGEASAMEALTMLPPAAAATTAAEAFNCFFPEEEKGVAASSTLLQLWPQPHDGDQPDLRLW

SEQ ID NO: 24590 - protein, 153 aa, Oryza sativa
  Clone ID: TF_OsC15113_4.pep
MANGVEVQRRGLRRQQRQIQAHGEWMASPLSSNRLCALPSAVKAYRLYGEHLLLQLLQLFEIQRFKILSHEMAAGITENQFCCKILFSHKEHAVAAAVARIRSIEARITAHRDTITVKGHRLRAVRANMVPPVRARLAVPMGATGGGGCYSSG

SEQ ID NO: 24591 - protein, 166 aa, Oryza sativa
  Clone ID: TF_OsC1755_6.pep
MSSVKRIHCCSVKETIERYKKANSDTSNASTVAEINAQHYQQEAAKLKQQITNLQNSNRTLVGDNITTMNHRELKQLEGRLDKGLGKIRARKETELQNDNMYLKSKVAESERGLQTVNMMGSASTSEYVQNMIHYDPRNFLQFNIMHQPQYYPEQEDRKAFMSDER

SEQ ID NO: 24592 - protein, 270 aa, Oryza sativa
  Clone ID: TF_OsC1755_1.pep
MGRGRIEIKRIENTTSRQVTFCKRRNGLLKKAYELSVLCDAEVALIVFSSRGRLYEYSNNNNVKATIDRYKKAHACGSTSGAPLIEVNAQQYYQQESAKLRHQIQMLQNTNKHLVGDNVSNLSLKELKQLESRLEKGISKIRARKNELLASEINYMAKREIELQNDNMDLRTKIAEEEQQLQQVTVARSAAMELQAAAAAQQQQQNPFAVAAAQLDMKCFFPLNLFEAAAQVQAVAAQRQQIIPTELNLGYHHHLAIPGATAADAPPPHF

SEQ ID NO: 24593 - protein, 211 aa, Oryza sativa; identical to SEQ ID NO: 17164
  Clone ID: TF_OsC392059_1.pep

SEQ ID NO: 24594 - protein, 233 aa, Oryza sativa
  Clone ID: TF_OsC1639_2.pep
MVRGRTELKRIENPTSRQVTFSKRRNGLLKKAFELSVLCDAEVALIVFSPRGRLYEFASAPSLQKTIDRYKAYTKDHVNNKTIQQDIQQVKDDTLGLAKKLEALDESRRKILGENLEGCSIEELRGLEMKLEKSLHNIRLKKTELLERQIAKLKEKERTLLKDNENLRGKHRNLEAAALVANHMTTTTAPAAWPRDVPMTSSTAGAADAMDVETDLYIGLPGTERSSNRSETG

SEQ ID NO: 24595 - protein, 225 aa, Oryza sativa; identical to SEQ ID NO: 17168
  Clone ID: TF_OsC1641_1.pep

SEQ ID NO: 24596 - protein, 102 aa, Oryza sativa
  unsure (1)..(102): unsure at all Xaa locations
  Clone ID: TF_LIB4371-039-R1-N1-B3.pep
SKTARMFSGAQEKCAPCSKTGYPLKKVTVXGQAFPKSCFKCFPGGWALLPSNYAALEGILYCKPPFFPLFKEKGSFHPLVKWASVKGAEGQPAPPPGGADSS

SEQ ID NO: 24597 - protein, 624 aa, Oryza sativa; identical to SEQ ID NO: 17196
  Clone ID: TF_OsC12552_1.pep

SEQ ID NO: 24598 - protein, 215 aa, Oryza sativa
  Clone ID: TF_OsC54167_3.pep
MGWLSKIFKGSVNRVSRGHYNGNTHEGHSAWHTKAYEHDSDHEDIDRAIALSLSEEDQRKGKAVDEVDIDHRLHEDEQLARALQESLNDEPPRQNVPVKDVHSESTPATFMPPYIFPSTGLRVCAGCKTPIGQGRFLSCMDSVWHPQCFRCFACDRPISEYEFAVHEGNPYHRSCYKELFHPKCDVCKNFIPTNKDGHIEYRAHPFWMQKYCPAP

SEQ ID NO: 24599 - protein, 524 aa, Oryza sativa
  unsure (1)..(524): unsure at all Xaa locations
  Clone ID: TF_OsC54167_1.pep
MTFVSVKKYRSSGLKVVARSFPLQTYSVRIQKGTSGSRLGKCRYKDFRLPILENMGWLSKIFKGSVNRVSRGHYNGNTHEGHSAWHTKAYEHDSDHEDIDRAIALSLSEEDQRKGKAVDEVDIDHRLHEDEQLARALQESLNDEPPRQNVPVKDVHSESTPATFMPPYIFPSTGLRVCAGCKTPIGQGRFLSCMDSVWHPQCFRCFACDRPISEYEIPTNKDGHIEYRVHPFWMQKYCPAHETDRTPRCCSCERMEPKDSKYITLDDGRKLCLECLNTSIMDTDECQPLYIDIQEFYEGLNMKVEQQIPLLLVERQALNEAMEAEKTGHHLAETRGLCLSEEQIVRTILRRPVIGPGNKIVDMITGPYKLVRRCEVTAILILYGLPRLLTGSILAHEMMHAYLRLKGYQTLDPKVEEGICQVLAHICSAYVAPSQKCHLGSSSIIASIAASSSSSSSSSAPSSKKGYTKHGTFEKKLGEFFKHQIDXDPSDVYGDGFRDGIKAVERYGLRKTLDHMKLTGVFPC

SEQ ID NO: 24600 - protein, 224 aa, Oryza sativa; identical to SEQ ID NO: 17199
  Clone ID: TF_OsC1528_2384.pep

SEQ ID NO: 24601 - protein, 188 aa, Oryza sativa
  unsure (1)..(188): unsure at all Xaa locations
  Clone ID: TF_OsC44261_1.pep
MATSFQGTTTKCMACDKTVYLVDKLTADNRVYHKACFRCHHCKGTLKLANYNSFEGVLYCRPHFDQLFKRTGSLDKSFEGTPKVVKPEKTVENENAIKVSSAFAGTREKCVGCNKTVYPIERVTVNNTMYHKSCFKCCHGGCTISPSNYIAHEGKLYCKHHHIQLIKEXRGTSANLRMTMRRHHNLDL

SEQ ID NO: 24602 - protein, 196 aa, Oryza sativa; identical to SEQ ID NO: 17200
  Clone ID: TF_OsC11613_1.pep

SEQ ID NO: 24603 - protein, 1844 aa, Oryza sativa
  Clone ID: TF_OsC2152_1.pep
MAAAAWGGTTQKCDSCGRTVYPVEELAADGRVYHRPCFRCTHCKATLQFSNYSSVEGVLYCKPHYDQILKSTGSLEKSFEGTSKSAKAEKSNGNKGQPNRFSSMFVGTQDKCVVCNKTVYPLEKVNLNGSSYHKSCFRCTHGGCTLSPSNNVTHEGKLYCKTHHSQLFMVKGNFSNFEDSTPNAKVDIEKQPEHEDATKNPGGPGQGDGLTEKPLESELTPEKPSQDDIVAEKQSQSSVDVPKQSESSTTVQRSEEGERVTKGESNSHVVSKKPLESSVEKPFQSSAVNLQPSGSSAAVRKPWQRNLPTDKPLLSNTTTEKSTPSSAAIEESLPSNGVDAKQPESSTASTVVKRPWQRRVATENLPQSISPSDKPSSTSADDVKPSENSKLIRKPWQRAVAAEAQIQNSGPTEKSSLTNDTKPSESTTSIKRPWEHKVVNEKPLQNNIDTEKPLQNNTDTEKSSSSAIDVKLAETSTTPTVPQEHSGITEKPSQTSADDVKPSESTAAVVKKQWQRNIGFQKQPQSSVTDAKTPESRGMGKRLWQRNVPTEKQSQSGASVVTPSQVSVASTNPLQSSVVVKKPWQRSVSREKEPEKDISSNKPLQNRVLAEEAEKTNVTADNKSQIIQDKKNNGATTENSSQISESAKKLPLTANKSQADTSTEKLSESDILAVASSQITEPSKKPSENTAENEKPSQTDIATDELPLTQSVEAMSEPSPSDAAHQEISEREILTDKLPESTMAVEKLSQTATLTEKPSKEDAAEKLPQTNEPSEQPHESEETAEKPLQNEANAESTTKQSDLSLEKPPQVDANVGNPTEPESDATSGVNSSDAQIRPTAEQLVGPQGIVSAEKTSDQILEANTDPAADQSSESQDVAPAKVATEQPLENQKAAASEQPLEPQHEAYEENPQEHNSDATAKESSEPERDTASDQLAEQPSESRTAGEKATLRESDVVTEDPAEPQIDAAAERSAEVLSESQTGVETPVLHQSDRTNEVPSEPQTDEASDKSTEQPLEPENDASVEDEKPPEIESDDVHDKPSESTPDTETLPHNTPKSSISISEAADGNVSEEAPPQSSASIETPSESAIAVEEPKHDDEASIKPSEDSSALEEPPQDDSASVEPSENTITLEKASEEDEGSVKPSEGNDALEKTLEEDEASAKLPEDSTTFEKPSEKDDAGTKQTEDPVTLEKEPEEDKGSVEPTQDNAGLEKPLEEDEASAKPSEDSVVLDKPSVEDDDSAKPSEDSMDLEKPEAHKPSEEEDGATKSSPEDAAVEEAPLQVSEEGRRREFSMAPKRKPPARAAAAKLDPDGMFRGVSAFVVPHAVQSRRLEVWKQRLAQMGGRVQEKLAAKGGGGAVTHVLAADAKALLRELDAAWLHRFRGSVVSFEWLEECLKSGERLPEHKFAINYEEEFKPKKEGGAAGSGVLQSAKRSKISSDGPENRKETAGGNRESRDAIAHPNEDSDVVKGPSTCTSSQSASGDSKETIASQNAFKAEEASSGESSTYAPPDLNRNITEIFGKLINIYRALGDDRRSFSYYKAIPVIEKLPFKIESADQVKDLPAIGKSLKDHINEIVNTGKLSKLEHFENDEKVRTVSLFGEVWGVGPATALKLYDKGHRTLDDLQKDDSLTSAQRIGLKFFDDIKQRIPRHEVSEMEKLLQEVGTDILPGVIIVCGGSYRRGKSSCGDMDIIITHPDGESHVGFLPKFVQRLKGINFLREDLIFSIHSIEGTDCGVDTYFGLCTYPGRELRHRIDLKKVYPRNRHAFGLLAWTGNDVLNRRLRILADSKGYILDDTGLYLATPGSGGKRGGRSDAIINCDTEKDVFDTLGFPWLEPHERNL

SEQ ID NO: 24604 - protein, 206 aa, Oryza sativa; identical to SEQ ID NO: 17205
  Clone ID: TF_OsC28685_1.pep

SEQ ID NO: 24605 - protein, 496 aa, Oryza sativa; identical to SEQ ID NO: 17194
  Clone ID: TF_OsC91189_1.pep

SEQ ID NO: 24606 - protein, 201 aa, Oryza sativa; identical to SEQ ID NO: 17193
  Clone ID: TF_OsC12484_1.pep

SEQ ID NO: 24607 - protein, 882 aa, Oryza sativa
  Clone ID: TF_OsC13226_1.pep
MGDRPDMGAGVALRFSHNDWTLEEDSKALHFLQPDLVLFTGDYGNENVQLVKSISDLQLPKAAILGNHDCWHTYQFSEKKVDRVQLQLESLGEQHVGYKCLDFPTIKLSVVGGRPFSCGGNRIFRPKLLSKWLLSFLVASPGWFLIAYYFCCVVTCSEIELQWYGVNDMAESAKRIYDAATNAPKEHAVILLAHNGPTGLGSRMEDICGRDWVAGGGDHGDPDLEQAISDLQRETGVSIPLVVFGHMHKSLAYGRGLRKMIAFGANRTIYLNGAVVPRVNHAQSSRQPAISTSEKTGLEGLTGLMVPTSRAFTIVDLFEGAVEKISEVWVTVGDARTELEQELVLYKQPHKSVPSNIAIWSSMGWLTKFFRGSTHKISEGQYHSKPAEETIWNGPSNSAVVTMVYPLESTFGQLDLLLLATDLRQLVIDDVDCCDLDVPSEFDNEETARAISLSLLEEEQRKAKAIEKDMHLEEDEQLARAIQESLNVESPPRARENGNANGGNMYQPLPFMFSSGFRTCAGCHSEIGHGRFLSCMGAVWHPECFRCHACNQPIYDYEFSMSGNHPYHKTCYKERFHPKCDVCKQFIPTNMNGLIEYRAHPFWLQKYCPSHEVDGTPRCCSCERMEPRESRYVLLDDGRKLCLECLDSAVMDTSECQPLYLEIQEFYEGLNMKVEQQVPLLLVERQALNEAMEGEKTGHHHLPETRGLCLSEEQTVSTILRRPRMAGNKVMEMITEPYRLTRRCEVTAILILYGLPRLLTGSILAHEMMHAWLRLKGYRTLSPDVEEGICQVLAHMWIESEIIAGSGSNGASTSSSSSASTSSKKGGRSQFERKLGDFFKHQIESDTSMAYGDGFRAGNRAVLQYGLKRTLEHIRLTGTFPF

SEQ ID NO: 24608 - protein, 138 aa, Oryza sativa
  unsure (1)..(138): unsure at all Xaa locations
  Clone ID: TF_LIB3431-002-P1-K1-C5.pep
SRARTHVRTKHVSLFSTYATSEQQLWYSPIATATKEVAAAAAAADKAPTTPSTPLIQEANEALKAPKPKEAPKAKEGEEKKAKGDKEKENANKERHPRATXPRSARPHHPPYSETIKEDIMALQGNSTGGSSTYAISK

SEQ ID NO: 24609 - protein, 304 aa, Oryza sativa
  Clone ID: TF_OsC135984_1.pep
MGAPKQKWTSEEEEALRRGVLKHGPGKWRTIQKDPEFSPVLSSRSNIDLKDKWRNLSFSASGLGSRDKLKVPRIKGPSSSTSPSSQTPLLVLPPNKVAEASPSADPEKSSQDVKIPNSMVIEALCEIGDPNGSDVDAICHYIEQRHEVQANFRRLLTAKLRRLIAAKKIEKIDRSYRITESYAAKVSQANKSPSPKKDPAKPLKASQNLGSFAGTSPALEAAAAAAMKVADAEAKSHLANEHMTEAERIFKLAEETESLVTLATEIYERCSRGEILTIMQVAQSNFEFQSVSGNGSGTGSTVLA

SEQ ID NO: 24610 - protein, 293 aa, Oryza sativa
  Clone ID: TF_OsC20360_1.pep
MATDVAATEPEVAAEEAAAAAPETTATAGDSKPAKEAKAKKAAAPRKARSTATHPPYAEMISEAIATLKERTGSSQYAIGKFLEDKHKDHLPSNFRKQLLVQIKKLVAAGKLTKVKNSYKLPPTRAPAAAKPKAKPAAAAKPKPKPKAAAKPKAAAKPKAKAPAKSKAAAKPKAAAKPAAKPKAAAKPKSPAKPAAKPKAAPKAKAKPAAKPKAKAAPKPKAAVVTKTKATSAPARRPAKAAKTSAKDTPSKKAAPAAKKPAAAAKKAPAKKAAPAKKAAAPARKVPARKAKK

SEQ ID NO: 24611 - protein, 538 aa, Oryza sativa
  Clone ID: TF_OsC1869_1.pep
MVVAVASPSSAPGPGAAGRPHPTYKEMILRALKELPDPIISSRRAIAKYISDNFSGLPSHHDALLTVHLRRLRSQGLLLMSGHSYLLSTSATAARGRGRGRPPKKASSSAPPQKRGPGRPRKNTALFPVPVLEAKPGRGRPRKNPLPVASSTSSAAAAATALSLRVKRGPGRPRKNAAATPLRLGVKRGPGRPRKNAAATPLRLGAKRGPGRPRKNATATPLSLGVKRGPGRPRKNAAAAASPVAPPPASPLKRGVGRPRKNATPLVKPGPGRPSGFKRGPGRPRKNATPPVLSVPPTAAAVLGVKRGRGRPRKDKPLQSWSVLSGGAAMTKRGPGRPRKKRPLEAGGVVAAQVDTADGGEAGAVQNGGEVRCLLSDGASSMGNRGPGSPRKEVLLENEPTVSTLVGKRGRGRPKKEKPSAARPAETGDAKSMGIKRGRGRPRKDSSFQAVFAEAAGQVSRDVTAAQPEGDADLLARKEPETAAVVSVENKETRPADAGGVVVSEEKTSIDPVEAGSVMPCVNAEVDRMNSDLRTANP

SEQ ID NO: 24612 - protein, 123 aa, Oryza sativa
  Clone ID: TF_uC-osflcyp033a05b1.pep
KLVPLQDSRAGSILPATTRVLSDPYIPPIREGRYVQTGLFAKEPHLAWTSPAPRWQAPRQPPRSTRQTPSDDAGGSSHPPYFQMIKDAITVLNERTGIQRSLHHQVHGRTSTAPALAANYKKM

SEQ ID NO: 24613 - protein, 297 aa, Oryza sativa; identical to SEQ ID NO: 17210
  Clone ID: TF_OsC62134_1.pep

SEQ ID NO: 24614 - protein, 355 aa, Oryza sativa
  Clone ID: TF_OsC4154_1.pep
MIMEAIVALKERTGSSSQAIGKHIHANHGANLPPNFRKHGRGTGRPPPPQNRKQSAASRDHFLRVVVEGRVSEGRAAMATEEVVPEVPVTEVEAAAAEEAVEETTAAEEKAAKPAKEKKKAGRPPKEKKEAKPAKEKKVKEAKAKKPRVAAAHPPYAEMIMEAIVALKERTGSSSQAIGKHIHANHGANLPPNFRKLLSGNLKKLTAAGKLAKVKNSFKLSSTRPAAPAAADAKPKAAPATKPKVKTTKAAKPAAKAKAPATTKAAKPATKTKIKVAAAPAAKPKASPKAKAKTATSPVKPRGRPAKSAKTSAKDSPAKKAAPVAAKKKAAATKKKASVAAAPAARKGAARKSMK

SEQ ID NO: 24615 - protein, 184 aa, Oryza sativa
  Clone ID: TF_OsC566_21.pep
MVEFAASSLGTRDVHAVFTEVDRAAPIMYWVDSSLCQCCVPVRRMIKEAIMALDGNGKAGSSPYAIAKYMGEQHMGVLPANYRKVLAVQLRNFAAKGRLVKVKASFKLSAAEEKKATAAKAARSKAAKGVVGGAKRKRTPRPSGAAAKKPASSAEAKKRVPPARPARAKRARKAALAKPMQPPK

SEQ ID NO: 24616 - protein, 133 aa, Oryza sativa
  Clone ID: TF_uC-osflcyp061f05b1.pep
MATATEEVAAAAAAAGEAPPPPPPAVVEEVKEAVEAPNPEEAPNADEGEEKKAEGEKEKEKAKKERKPRARKPRSAGPHHPPYFEMIKEAIMALDGNGKAGSSPYAIAKYMGEQHMVVFPANYRKVLAVQLRN

SEQ ID NO: 24617 - protein, 191 aa, Oryza sativa
  Clone ID: TF_OsC5305_1.pep
MPAMAKPASRAAKPASAPKKQKAKPSAAAGGSSHPPYFEMIKEAITVLKERTGSSAHAIAKYMEEKHGASLPANYKKMLSIQLRGFASKGKLVKVKASYKLSDAAKDSPKAKPAAPAPKAAAPKPAKDAAKPKKDAAAAKPKKAPAAGTKRKAPEKKVVAKPKKSPAAKAKAKPKTVRSPAAKKTRKAPAA

SEQ ID NO: 24618 - protein, 608 aa, Oryza sativa
  Clone ID: TF_OsC11113_1.pep
MQHGRRGGWRKGEAAAAGERGGGLVLPDHTLRHGERMAQAADRAGDQRQAVVDAALTKPSRGRGIVNGGGETEARATTRWLRQGSAGGGVTAPSGVAFNITAGPMTEIVDDIDVAMVEEVVAAPAEKDEHVQAILLAIVASTREDRHGVERLERSEVEARDPRVRDVANVQALSLRRHRSRLPTSHRSSPPMPHRSRPPTPPLRNRARPPPSPLRLLWPPFWCGDGARLKRCPLGRPAPSPPAGLPSRQKIREEPQPQPPFSSQIRVAAAPNPTRAQRSTNAGRRQRPSPPPPQPYEREGASQPASQAWPPPLPLATAPPTSSSPPTPRHALFLNPSCSWPDAQICGGIDRVSWVVFSFSLLQMIVEAIASLAEENGSSQAAIARRIEAARGGGGLLPPSHPALVAAHLSRMSAAGELVAVAGGKYALRPTPPPPPPADPAAAAAVAEEEEEEEEFLADDDSADDLPPPPPPKRGRGRPPKVRPPGYPAVPAAAAPVPVPVGAPVDGSVAAAAPAVPRRRGRPPKPRDPHAPPKIPRPRGRPRKNPLPEGMVPPPPTRPGATAKPRPQFAEWLISSKNCKGLTASLLFAVVPAAKLMMVNAHCLQLDP

SEQ ID NO: 24619 - protein, 471 aa, Oryza sativa
  Clone ID: TF_OsC166550_1.pep
MAAADEASKPPPLPPYPEMILAAIEGLNEKSGSNKSAISKFIEGKYGDLPPAHASLLTAHLARMKESGELIFLKNNYFRADAPDAPPKRGRGRPPKPRDPNAPPPPPKPSSPRPRGRPPKSKDPISDAIPKSRGRPPKKAKTAPAPPPAAGDGSAPVKRGRGRPPKLVWPLMVATGVLVSGGGGSWYLCASWTANRRHGGQIIPEQEPQSKIEFPDLDGLGGGGGGASGSGCRHPARVRVCVGGGDGVCVAPGTSVVVVEVATVSALSSALRRLSSPFAVPELAVALFPSVAPMLAVAPAGVGMCAMIGASSSVGGSGWLVVIYILLQADAFRILVIGCLFCPKSCGSMLQVALSLAIPALKARQKSIGSLSKASLLMVGWSTFWPSLLFPRSRSRAWFVIRVELGPPAQFRLSGLLEFLRFNDESRGDVSLSAVMLTPKIYGSATNLDLVPFPWRQPKGINGLSSGVHFN

SEQ ID NO: 24620 - protein, 102 aa, Oryza sativa
  Clone ID: TF_LIB4371-022-R1-K1-F8.pep
MATSTSTGHRAADLVLPSYPEMIVEAIASLAEENGSSQAAIARRIEAARGGGGLLPPSHPALVAAHLSRMSAAGELVAVAGGKYALRPTPPPPPPADPAVAA

SEQ ID NO: 24621 - protein, 242 aa, Oryza sativa
  unsure (1)..(242): unsure at all Xaa locations
  Clone ID: TF_OsC566_18.pep
LVPNSARARKPRSAGPHHPPYFEMIKEAIMALDGNGKAGSSPYAIAKYMGEQHMGVLPANYRKVLAVQLRNFAAKGRLVKVKASFKLSAAYDKKATAAKAARSKAAKGVFGGAKRKKTPRPSAAAAKKPASSAEAKKAVPPARPARAKRARKPPPXEAMQAPKSIRSAISKKANKAAPDHLRRLAARPRRALYPLYNLSVVANLVVVRHRRFVCFDRSSALCPVCVLRCRGLGFFLQGEKLL

SEQ ID NO: 24622 - protein, 78 aa, Oryza sativa; identical to SEQ ID NO: 17324
  Clone ID: TF_OsC31153_3.pep

SEQ ID NO: 24623 - protein, 227 aa, Oryza sativa
  Clone ID: TF_OsC393664_1.pep
MGQDFLVNGPKLNWAFGDRLGAGAAPAAAEPAPAAAACRWTRQKDKLLETLVARCAMNRQCVGGWDAIAAAFGDDRTAAQVEQRYGEIAAEVRRVMEEPWDAEDPAIAAAAAAVPAAPVKHAAAGPGSDGGGEEGKVVVEKKSGIWSEEEHRQCLRGIEEIGHGRWTQISIEYVPSRTPIQIASHTQKYFLRMAKPKEDRKRKSIHDTPYHLHLPNAADAHAHQQQQ

SEQ ID NO: 24624 - protein, 78 aa, Oryza sativa
  Clone ID: TF_1044913.pep
MGRAPCCDKKGLKKGAWTPEEDKLLVDYIQVNGHGSWRLLPKLAGTGWLLCSCEAMLCFCHVFVFACRTSAELLISTF

SEQ ID NO: 24625 - protein, 219 aa, Oryza sativa; identical to SEQ ID NO: 17407
  Clone ID: TF_OsC100249_4.pep

SEQ ID NO: 24626 - protein, 201 aa, Oryza sativa
  Clone ID: TF_OsC263120_1.pep
MSLVRSAPARPRAAGTRQEEQNFFNALRQVGKNFEKITLRVQSKSKDQVRHYYYRLVRRMKKLLGPEFSLDAKNSKDTIAAMLCWWSLLEKFSCSASKLHLKPRRFKTFVEALGNQLLKDRNKTRKKCPRGDVCLSSSSSAVNRTPGNESFSVKLLPVDVSNGSKVASSKGAVFKRGAEPNSSNKSGATKGDLSATSTVKQ

SEQ ID NO: 24627 - protein, 128 aa, Oryza sativa; identical to SEQ ID NO: 17222
  Clone ID: TF_OsC134_46.pep

SEQ ID NO: 24628 - protein, 109 aa, Oryza sativa; identical to SEQ ID NO: 17224
  Clone ID: TF_OsC341175_1.pep

SEQ ID NO: 24629 - protein, 87 aa, Oryza sativa; identical to SEQ ID NO: 17226
  Clone ID: TF_OsC96526_1.pep

SEQ ID NO: 24630 - protein, 1272 aa, Oryza sativa; identical to SEQ ID NO: 17229
  Clone ID: TF_OsC4193_1.pep

SEQ ID NO: 24631 - protein, 427 aa, Oryza sativa; identical to SEQ ID NO: 17228
  Clone ID: TF_OsC51198_1.pep

SEQ ID NO: 24632 - protein, 148 aa, Oryza sativa
  Clone ID: TF_LIB4506-009-R1-N1-D10.pep
KDVQGLQDKDFCDSDDNPKTKRGGKRKHHRAWTLCEVVKLVDGVARYGAGKWSEIRRLAFSSYSYRTSVDLKDKWRNLIRASQTQLSTENDGVCPRKSNPSAIPIPVSILLRVKKLAEMQSQAGDVRVPIKFSGQSTTVVQGKVSGFL

SEQ ID NO: 24633 - protein, 478 aa, Oryza sativa
  Clone ID: TF_OsC25904_1.pep
MASRAVEGEGEGEEEGEGKGNLEDESLIQMINIYGHNNWETVARAIPGRNAQQCRVREHASNHFKRLSELKLLEHFTGRTSAAIKEHWRGPMKRKLNSYLASGLLKKSPGLPENLSVSQSSDSNILQQCDVSSDENKLLSDLRPSLKSKEGVSSKCDGSSSDNQLLSDLRASLKSKGASSKCDGSSGDNQLLSDLRASLKSKGASSKCDGSSGDNQLLSDLRASLKSKGASSKCDGSSDENKLLSDLRACLKSKQGASSKCDGSSGENQLLSDLQASLMSKQRTSSKYKQGASSKYKQGASSKSKQGTSSKSKQGFIDLCENTDTSEGESSELICTERPDPDSGEASQRIRDRLNWRKRARKKLVFLSSPVELKVSAVAESERHLQESKEMSPEVNIVSPPAVLQGFSPEVPSVCEKIVEPPLADFNQAKNVCSLETSSDPCTLEQHLANVSDLLDMSYIDGLMIIPPSGCPYDGDFI

SEQ ID NO: 24634 - protein, 87 aa, Oryza sativa; identical to SEQ ID NO: 17232
  Clone ID: TF_OsC389431_1.pep

SEQ ID NO: 24635 - protein, 203 aa, Oryza sativa
  Clone ID: TF_OsC28425_1.pep
GEDKFRELGLCDMGEDIAQRWTDEEESLFYRVVYSNPPSLGKNFWHFLPRALPGKTSMELVSYYFNVFMLRKRAQQNRSEPLHVDSDDDEVPDEPSVTEDEDSAVESPAHDYYVNNPMSPESEDSFHEKVADSLSGLRDGPSQKPLGSNTDNPGGDADVQDESCTSFEDHNGAHGSNGVQCAEFHMMLPNAALDHYSDRGACM

SEQ ID NO: 24636 - protein, 467 aa, Oryza sativa
  Clone ID: TF_OsC31153_2.pep
MDHADMDGLATAMLPLSLWSREIAGLLFMMDRLTGTTVTSLRNQGPKFSYATHGARCLMLLPTLTASASFPLDIAINGEMANRMMHQVPKKRAPQTHNAFYLDALMLLPHAALCHRNHRSMEHATVSENRSRRHFRNPVLAYVTPWNSKGYDMAKLYSTKFTHISPVWYDLKSDGNKLVLEGQHNFDAKWVSELQSNGSLVLPRVVLEAFPGVVLMKKKLRDKAIDLIFVIWLSVNRDKGYDGVVLESWSRWAVYGVLDDSELRNRALQFVKHLGKTLPLTSSNLSTHHHLKLIYVVPAPRMKELNNQEFRPEDLLQLADSVDGFSLMTYDFSGPQNPGPSAPLSWIQYSLKTLLAAKGSASHGHSHMIFLGINFYGNDFLLSKGDGGNAITGRDFIYLLDKYKPSLQWDEKSSEHFFVYSDKGLRHAVFYPTLMSLSLRLDEAQDWGTGLSIWEIGQGLDYFFDVL

SEQ ID NO: 24637 - protein, 719 aa, Oryza sativa
  Clone ID: TF_OsC52736_1.pep
MKKEFPGQAPTSRLHSEMDAAAAGGGGAAKRKRSFSEDDAYLILHRYQPATILTMLQEMGKQVGAGKGIDWRALVRRTSTGITSAREYQMLWRHLAYGHEFVESVEPASLPLDDGSDLECEIEIVPAPGNEALAEATSFAKTIITGSSREQTSGQRVNSEAAALNTPNEKIVRVPSDKQLVPGHRLTNGTGPVSSSKQPSHTGSSPDPLDPNGHPKKKKKPKPWSREEDMELGAGVQKHGEGNWMEILHKYKFDSSRTHLQLQQRWALICKRQGSTKPATPKIPNVMSEELKAAQKAFSLAIGTTRSSTLRPGGVPHHNPMVTTTNPEVKSVTAPSPLPVPVHVVPVPVPVQPVQVQLPPPQLHQAPAQSAPPPPKVSNASNKSRNNSKKQVAQSIPVNGPLSIQEAALAAGGRIAEPSVATNFLKAAQSTKAVHIRSRGTGSSKSSTGSKTPTVAGEPGTQLGSDQHLELQSTGGPSQVLTAHATEQVHNVSEVAGVNPLGQSAGVHLSETKKALNTTPVSGSSDKMEIDDNSNYFAVTMEDLFPEDVKQEDVQDPKIEEAIDPKDADMLEFDRFVAQGCLNKDNVDKSKAAKIAPEAQSVIGSQKKQLKTLPTVGKSNPVFAGPPATAKKTKAPVPQGGMSSGIVGVLNRSLGGKAPAPATTGTQSTVQKQQSMSSKGNLLVPKNVAPGTVTPANNRANTAVNGASKVNPPASQKPA

SEQ ID NO: 24638 - protein, 83 aa, Oryza sativa
  Clone ID: TF_OsC31153_4.pep
MDSSSGSQGKNSKTSDGCETKEVNNTAQNFVHFTEEEEDLVFRMHRLVGNRWELIAGRIPGRTAKEQYTEGEIWCLETFPRRM

SEQ ID NO: 24639 - protein, 50 aa, Oryza sativa
  Clone ID: TF_rsicee_6205.y1.abd.pep
MGRLSSCGGVQAKLRKGLWSPEEDDKLYNHIIRHGVGCWSSVPKLAGLQR

SEQ ID NO: 24640 - protein, 215 aa, Oryza sativa
  unsure (1)..(215): unsure at all Xaa locations
  Clone ID: TF_LIB4309-043-R1-K1-B2.pep
MYSSLLGIVMQAQKVLGNKWTEIAKVVSGRTDNAVKNRFSTLCKRRAKDDELFKENGSLCSSTSSKRALVQTGCLTSGASGSAPPIKQMRPCNSDFKENMTPNMRLVGQDKSTQDSRQPLAIVYQNNQDNMNTMDTQNLVAKTAAKQLFAXEQNCVKHEGNFLNKDDPKIATLLQRADLLCSLATXINTENTSQSMDEAXQQLQHHLDXKDDNDM

SEQ ID NO: 24641 - protein, 93 aa, Oryza sativa
  Clone ID: TF_OsC44378_4.pep
MVVKKAATMAEAEAEEEMMMRMMCGSGGNEMMKTKMKKKNREGEEEEEVSGGGRMRKGPWTEQEDVQLVWFVRLFGERHWDFLAKVSSLRGGG

SEQ ID NO: 24642 - protein, 345 aa, Oryza sativa
  Clone ID: TF_OsC205949_1.pep
MVSANQPPPDAAAAAAGSAGEDASKKVRKPYTITKSPESRQEEKPAEPETLSRRADADAYAEPPARSAPMVSANQPPPDAAAAAAGSAGEDASKKVRKPYTITKSRESWTEQEHDKFLEALQLFDRDWKKIEAFVGSKTVIQIRSHAQKYFLKVQKNGTSEHVPADSSSMLRELRHECHCFVMDTQFYPTNCSLIHGERFVVRVMPDFAQVYSFLGSVFDPSTSGHLQKLKEMNPIDVETALLLMRNLSINLTSPDFEDQKKLLSSYSTPSDGLELGSTRSSVLADRPLSAPFIMCKGATVYSRLAQLVMAFSFLSSGREGTTAPSDPWHSQKQNAPSVHLMRYV

SEQ ID NO: 24643 - protein, 318 aa, Oryza sativa; identical to SEQ ID NO: 17275
  Clone ID: TF_OsC84775_1.pep

SEQ ID NO: 24644 - protein, 267 aa, Oryza sativa; identical to SEQ ID NO: 17281
  Clone ID: TF_OsC215503_1.pep

SEQ ID NO: 24645 - protein, 273 aa, Oryza sativa; identical to SEQ ID NO: 17278
  Clone ID: TF_OsC92629_1.pep

SEQ ID NO: 24646 - protein, 383 aa, Oryza sativa; identical to SEQ ID NO: 17319
  Clone ID: TF_OsC37603_1.pep

SEQ ID NO: 24647 - protein, 342 aa, Oryza sativa; identical to SEQ ID NO: 17290
  Clone ID: TF_14588603.pep

SEQ ID NO: 24648 - protein, 342 aa, Oryza sativa; identical to SEQ ID NO: 17290
  Clone ID: TF_OsC150_1.pep

SEQ ID NO: 24649 - protein, 428 aa, Oryza sativa
  unsure (1)..(428): unsure at all Xaa locations
  Clone ID: TF_OsC155790_1.pep
MGRNSYCYNQRLTXGLWSPEEDEDLMNDITQHDHCFWCTVPELARLERCCKSCRLRWINYLRPDLKRGAFSQEEEDLIVELHAVLGNRWSQIATRLPGRTDNEIKNLWNSCIKKKLRQKGIDPNTHKPLAEVDRSKATPTISNDRTSESSDVDPSSGVALHNLSHLLSETAQSSELLPVKVTKPRTQAPGLARLKVPPKELFLDQLTSGHENLPSCRSSGPIPNFPFQQLLCYNNDFNSMDVGNRNSLWYNQNESSSSTISTVMPPVSPSTLSTSTGLNPSPDNANSRGTGIHNSQFYWDTNNPSSSSSTGSSGNNGLGFELQSTSSLLETNIFPWSDLAPEKDSQAQLEEELKWPDLLHGTFSEMPAPMQNLSQSLYEDVVKAESQFNMEGLCAAWSQNLLPQQHLPVVSDMYDKDLQRMSLSFENI

SEQ ID NO: 24650 - protein, 378 aa, Oryza sativa
  unsure (1)..(378): unsure at all Xaa locations
  Clone ID: TF_OsC52992_1.pep
RCHATKAHHHKWTKSPHKLISVMCMMATAAQCPHLHAHRNEFHVSSFSACPKGRIHDNSVNKKAYFNRQQNGHQELHLVDXHSTMSLTAMNTILHLLVDLFFPLQPTMILAMSTTLKEEKRMLSSSIGLRRLFXKASPHLPLFTPKSEVSASGKSLKKANVVKGQWTLEEDRKLVKLVEQFGLRKWSHIAQILPGRVGKQCRERWHNHLRPNIKKDTWSEEEDIVLIQTHKEVGNKWAEIAKHLPGRTENSIKNHWNATKRRQFARRRSRASSKNPKSGTLLQNYIKSLGIGPIKSSVRQAPPESTAVSSSSPASTQKLAEVNGKIRPDSNPSNQMVTQGILTMDENSYIQTNSCEELLVSTYDDLCLDMCDHLFETK

SEQ ID NO: 24651 - protein, 321 aa, Oryza sativa; identical to SEQ ID NO: 17322
  Clone ID: TF_OsC134_57.pep

SEQ ID NO: 24652 - protein, 260 aa, Oryza sativa
  Clone ID: TF_OsC351_4.pep
MGRSPCCEKAHTNKGAWTKEEDQRLIAYIRAHGEGCWRSLPKAAGLLRCGKSCRLRWMNYLRPDLKRGNFTDDEDELIIRLHSLLGNKWSLIAGQLPGRTDNEIKNYWNTHIKRKLLARGIDPQTHRPLLSGGDGIAASNKAAPPPPHPISVPAKAAAAAIFAVAKPPPPPRPVDSSDDGCRSSSGTTSTGEPRVRDLNLELSVGPTPSSPPAETPTSARPVCLCYHLGFRGGEACSCQADSKGPHEFRYFRPLEQGQYI

SEQ ID NO: 24653 - protein, 463 aa, Oryza sativa; identical to SEQ ID NO: 17293
  Clone ID: TF_OsC159752_1.pep

SEQ ID NO: 24654 - protein, 641 aa, Oryza sativa; identical to SEQ ID NO: 17300
  Clone ID: TF_OsC150867_1.pep

SEQ ID NO: 24655 - protein, 310 aa, Oryza sativa
  Clone ID: TF_OsC833_1.pep
MVRPPCCDKDGVKKGPWTPEEDLVLVSYVQEHGPGNWRAVPTRTGLMRCSKSCRLRWTNYLRPGIKRGNFTDQEEKLIVHLQALLGNRWAAIASYLPERTDNDIKNYWNTHLKRKLKKMSATGGGGDDGEGGGAGEVKTRAAAPKGQWERRLQTDIHTARQALRDALSLDPSPPAKPLDSSSGATAPPSSQAATSYASSAENIARLLEGWMRPGGGGGKTTTTPSSGSRSSAASVLSGEASHSGGATAPTPDGSTVTSKTKDEETAGAPPPPPPPAFSMLESWLLDDGMGHGEVGLMDVVVPLGDPSEFF

SEQ ID NO: 24656 - protein, 163 aa, Oryza sativa
  unsure (1)..(163): unsure at all Xaa locations
  Clone ID: TF_jC-osflLIB3479001e05b1.pep
PTRPEDVWTEEXDRMLIEAHRTYGNRWSVIARCLPGRSENAVKNHWNATKRSLKSKRRMKKKSVQVVNSPPGQLSPLEEYIRSQYPSAVETTPPPPAVPAPPSDVIVHGAGSVSAGPTVATQEPTGTNPSEMGIYLGLGNPAGPTTQQLAAMNLNMSLAPDLN

SEQ ID NO: 24657 - protein, 358 aa, Oryza sativa
  Clone ID: TF_OsC1123_3.pep
MQRECIVSGPIDGSISATGDGARRGVGGMRGHRSRVRGDRGLRMHRSGSDPDSDKAHWYMSNSDDESFVDKDKDCRRGTVAPLLKKGPWTSWENSILEKYIKKHGERNWKLVQKNTGLLSFCITRRTDNEIKNYWNTRIKKCKNNRWLLYPANVCNDALNEDQYGSVDPSVREKLTNNQLEDTTSMYSAPQFSYASISNILDRRLASKDYDSIEDQRNRIEVAAEYEISLPVLKTTNNDIFPSASIFANHGISNGNLSALSTTDALQMELPLIQFDPNNQFIYSRDYATHLTNLALLNDQAEELLNHIDVLNYVVMKKELSGGSLSPTINMPCKATAYSSELPLCKGYREQDLDFYTQ

SEQ ID NO: 24658 - protein, 200 aa, Oryza sativa; identical to SEQ ID NO: 17303
  Clone ID: TF_OsC352864_1.pep

SEQ ID NO: 24659 - protein, 395 aa, Oryza sativa
  Clone ID: TF_OsC1123_1.pep
MHESDSGPDSDRTHWYMSNSDDESFVDKDKDCRRSTVALLLKKGPWTSWEDSILEKYIKKHGERNWKLVQKNTGLLRCGKSCRLRWMNHLRPNLKKGAFSKEEENKIINLHRKMGNKWSRMAADLPGRTDNEIKNYWNTRIKKCKNNRSPLYPANVCNDALNEDQHESADPNVREKLTNNHLEDTTSMYSAPPGFQDASISNILDRRLASKDYDSIEDQRNQIEVVAKYEIPLPVLKTTNNDIFPSASIFANHGISNGNLSALSTTDALQMELPLIQFDPNNQFVYSRAYAMHLTNFALLNDQSEELLNDTDVLNYVVMKEELSGGSLSPTINMPCEAHNSMAASNELVVPQYEGDAPPLQDDFTSYFYLNDTNLSIFEDTNELFLENKLDTKGN

SEQ ID NO: 24660 - protein, 329 aa, Oryza sativa; identical to SEQ ID NO: 17307
  Clone ID: TF_OsC26573_1.pep

SEQ ID NO: 24661 - protein, 59 aa, Oryza sativa
  Clone ID: TF_2943794.pep
GKSCRLRWLNYLRPNIRRGNISYDEEDLIIRLHRLLGNRWSLIAGRLPGRTDNSIKNYW

SEQ ID NO: 24662 - protein, 358 aa, Oryza sativa; identical to SEQ ID NO: 17313
  Clone ID: TF_OsC344488_1.pep

SEQ ID NO: 24663 - protein, 285 aa, Oryza sativa
  Clone ID: TF_OsC351_3.pep
MGRQPCSDKLGVKRGPWTAEEDKKLMSFILTNGHCCWRAVPKLAGLLRCGKSCRLRWTNYLRPDLKRGLLTDAEEQLVIDLHAKLGNRWSKIAAKLPGRTDNEIKNHWNTHIKKKLIKMGIDPVTHEPLDRKQESPATTSQSTVTAESSKSGEATRQQSRQLDDAVVRDMSVSAGGDSPPESSTNTASTAGGSSSSSSSHHQDPLVKWLLEEDLLPTGDEPWLNFTASNDVDEFSSIAATGATPALPWDVGMTTDWLLDYQDFGMGDSSLVVDASMVNSSNGSNF

SEQ ID NO: 24664 - protein, 300 aa, Oryza sativa; identical to SEQ ID NO: 17314
  Clone ID: TF_OsC490_2.pep

SEQ ID NO: 24665 - protein, 256 aa, Oryza sativa; identical to SEQ ID NO: 17317
  Clone ID: TF_OsC42685_1.pep

SEQ ID NO: 24666 - protein, 447 aa, Oryza sativa
  Clone ID: TF_OsC57946_1.pep
MSASASAACLLPPRGGSLARPDTALPPASQPATVAVNQNIPRLASPRLAVTSITLLPRRGRRCAVDLLLLHLHRLLLFLSLFSEETPNLFLPRKPAAFLKRIKSPSLIRRCNPSPQNLAAPRAVLGFELMAVEEASSSSGGGRGGGGGGGGEEGLSGCGGGWTREQEKAFENALATVGDDEEEGDGLWEKLAEAVEGKTADEVRRHYELLVEDVDGIEAGRVPLLVYAGDGGVEEGSAGGGKKGGGGGGGGGGGGHGEKGSAKSAEQERRKGIAWTEDEHRLFLLGLEKYGKGDWRSISRNFVISRTPTQVASHAQKYFIRLNSMNRERRRSSIHDITSVNNGDTSAAQGPITGQPNGPSANPGKSSKQSLQPANAPPGVDAYGTTIGQPVGGPLVSAVGTPVTLPVPAAPHIAYGMHAPVPGAVVPGAPVNMPPMPYPMPPPTSHG

SEQ ID NO: 24667 - protein, 97 aa, Oryza sativa
  unsure (1)..(97): unsure at all Xaa locations
  Clone ID: TF_LIB4506-019-R1-K1-H12.pep
CGRAAAGLQDEAAAEEEAYAAVADLQLELRRGPGTVDEDLTLVNYIXDHGEGRWNSLARAAGNIIKSSVKRTGKSCRLRWLNYLRSDVKRGNFTADE

SEQ ID NO: 24668 - protein, 264 aa, Oryza sativa; identical to SEQ ID NO: 17351
  Clone ID: TF_OsC199642_1.pep

SEQ ID NO: 24669 - protein, 241 aa, Oryza sativa
  Clone ID: TF_OsC134_84.pep
MPDQRRGTTALLPTARHGPAASDRHHSASAARRDAAATRPATSVAAANTLVSSSLIEIESTHTPPTTGRPPRTGEQDGEAAVLRQGWVKKGPWTPEEDLMLASYIQEHGSGNWRAVPTNTGVMRCSKSCRLRWTNYLRPGIKRGNFTEQEEKLIVHLQALLGNRRDHMEVISPMKDGTFIDWDIVDNIWNHAFSFYPEEHPMLIVEPSTNTGQQREKYLLTLKIMKALCIYQGFDMVFVQE

SEQ ID NO: 24670 - protein, 377 aa, Oryza sativa; identical to SEQ ID NO: 17327
  Clone ID: TF_OsC419061_1.pep

SEQ ID NO: 24671 - protein, 228 aa, Oryza sativa; identical to SEQ ID NO: 17331
  Clone ID: TF_OsC149302_1.pep

SEQ ID NO: 24672 - protein, 1498 aa, Oryza sativa
  Clone ID: TF_OsC351_1.pep
TQCGRSMVFVTPCQEQKKKQSSTPGAVFSPDMIGEAVADRTIELLRLTNSETQCWQDWLLFADIFFFLMKSGCIDFLDFVDKLASRVTNSDQQILRSNHVTWLLAQIIRIEIVMNTLSSDPRREHLNSDQLQKGKQIDEWWRQMTKASGERMIDFTSLDERAMGMFWVLSFTMAQPACEAVMNWFTSVGVADLIQGPNLQPNERMTMMRETYPLSMSLLSGLSINLCLKLAFQLEETIFLGQNVPSIAIVETYVRLLLITPHSLFRPHFTTLTQRSPSILSKSGVSLLLLEILNYRLLPLYRYHGKSKALMYDVTKIISMIKVKRGEHRLFRLAENLCMNLILSLRDFFLVKKELKGPTEFTETLNRITIISLAITMKTRGIAEVEHIIHLQPLLEQIMATSQHTWSEKTLRYFPPLIRDFLMGRMDKRGQAIQAWQQAETTVINQCNQLLSPSAEPTYVMTYLSHSFPQHRQYLCAGAWMLMNGHLEINSANLARVLRELSPEEVTANIYTMVDVLLHHIQLELQRGHQIQDLLSKAITNLAFFIWTHELLPLDILLLALIDRDDDPYALRLVINLLERPELQQRIKAFCTSRSPEHWLKNQPPKRIELQKALGNHLSGKERYPPFFDDIAARLLLVIPLIIYRLIENDATDIADRVLAVYSTFLAFHPLRFTFVRDILAYFYGHLPSKLIVRILNVLGVSTKTPFSESFAQYLASSNSSICPPPEYFANLLFGLVNNVIPPLSCKSKSNPSDAAGSTARTTYNKPYTSSAGGISNSDGQRAFYQNQDPGSYTQLVLETAAIEILSLCVPASQIVSSLVQIIAHVQAMLIQSNSGHGMSGGLGQNSGVPTSSGGGVEPVGANRPNTTASGINASNFVSRSGYSCQQLSVLMIQACGLLLAQLPPEFHTLLYAEAARIIKDCWWLADSSRPVKELDSAVGYALLDPTWASQDNTSTAIGNIVALLHSFFSNLPHEWLESTHTVIKHLRPVNSVAMLRIAFRILGPLLPRLAFARPLFMKTLALLFNVLGDVFGKNSQASPPVEASEIADIIDFLHHAVMYEGQGGPVQSTSKPKLEILTLCGKECAAISGVMLLDKQLVDGQSQASPSMLLPPHSCTADYCRQYYIEGERAVTQLLKDVDPLQTAVVLTLRRQRPRRELSPDYTCTRNSILEAWRARRLAADVSDGLTPSRLRLASAFPLLAASINPRAAPEPLQIKTRVSSSGSVHPSREIQIASQIRDQRVMGRQPCCEKVGLKKGPWTADEDQKLVTFLLSNGHCCWRLVPKLAGLLRCGKSCRLRWTNYLRPDLKRGLLSEEEEKLVIDLHEQLGNRWSKIAARLPGRTDNEIKNHWNTHIKKKLKKMGLDPVTHRPVMSLAQPDPLKQQQQQHEPSVSGGTGADDKEEEEEETPTSAQPQGVACAASSASAVSSSCSSSASASAATPGADVDWPGLFEVDAILDIDWAGLLSACGDDGGCSAIGVDMLFDQCSDVGFDQDVWM

SEQ ID NO: 24673 - protein, 261 aa, Oryza sativa; identical to SEQ ID NO: 17329
  Clone ID: TF_OsC351_12.pep

SEQ ID NO: 24674 - protein, 176 aa, Oryza sativa
  Clone ID: TF_18698673.pep
MGRSPCCEKAHTNKGAWTKEEDQRLIAYIKAHGEGCWRSLPKAAGLLRCGKSCRLRWMNYLRPDLKRGNFTDDDDELIIKLHALLGNKWSLIAGQLPGGRTRDQELLEHAHQAQALSRGIDPQTHRPVTPEHAPPGKRAYTTATPRFSSLARGRRRRRQAKTRARPGANIAAFQVR

SEQ ID NO: 24675 - protein, 340 aa, Oryza sativa
  Clone ID: TF_OsC76_1.pep
MGRAPCCDKNNVKKGPWSPEEDAKLKEFIEKHGTGGNWIALPQKAGLRRCGKSCRLRWLNYLRPNIKHGEFTEHEDRIICNMFASIGSRWSIIASQLPGRTDNDIKNYWNTKLKKKLLGSSAVAAAAPPRIQRHQQSHHRSSLLLPNSPSLNPGGGYPGFFSGAGGFHPQEPAMPLTLPTTTQEFMLGTHSGLPMVSASALLNHLHGASHHHQLLVKEEISSNMIVFGSDQQSCSSSDGLAAPHSHNHHGNREFILDGYSYGVGYGSSCIDQVDNDKLFQHHHQQDQAQEQQQQLVYNYDEIKQLLMNTSTTSNSINAGQDHGGSMEAGLIGSQGKVTMM

SEQ ID NO: 24676 - protein, 317 aa, Oryza sativa; identical to SEQ ID NO: 17274
  Clone ID: TF_OsC16767_1.pep

SEQ ID NO: 24677 - protein, 242 aa, Oryza sativa
  Clone ID: TF_OsC1737_4.pep
MARKCSSCGNNGHNSRTCTGQRSLQESGGGYGGGGAGGVRLFGVQLHVGGAPLKKCFSMECLSSPSPSPSPAYYAAVAAAASNSSPTVSSSSSLVSVEEAGEKMANGYLSDGLMARAQERKKGVPWTEEEHRKFLVGLEKLGKGDWRGISRHFVTTRTPTQVASHAQKYFLRQSSLTQKKRRSSLFDQHGTARSHAAASSILNPDAKLFITSSEQQQQRTTKNNPSFSDGGKASGATATPAT

SEQ ID NO: 24678 - protein, 1666 aa, Oryza sativa; identical to SEQ ID NO: 17333
  Clone ID: TF_OsC6483_1.pep

SEQ ID NO: 24679 - protein, 350 aa, Oryza sativa; identical to SEQ ID NO: 17336
  Clone ID: TF_OsC26138_1.pep

SEQ ID NO: 24680 - protein, 152 aa, Oryza sativa
  Clone ID: TF_OsC174168_1.pep
SQERQLLPAGGGAHASASIKSLATRGPCGRRCCPAGLTSLSPAPGRGAFSQEEEDLIIHLHSMLGNKWSQIAAQLPGRTDNEVKNFWNSYIKKKLRQRGIDPATHKPLKWSDYVFDGYNHQLPPYNHGGIYGGGDSKDTAVHFDAHALGNWC

SEQ ID NO: 24681 - protein, 379 aa, Oryza sativa
  Clone ID: TF_OsC3325_1.pep
DAWADAWARAHRTCVCAVVLGTLPHIYPLDRAPSRPPRSTERSIDRYTPARATNPAAGSCSRVGREWDGTRALPPVSSRSCARGSGLPRKTRSSTITSTATASVAGAPFPSSHRLQRCGKSCRLRWINYLRPDLKRGSFSQQEEDLIVALHEILGNRWSQIASHLPGRTDNEIKNFWNSCLKKKLRQRGLDPATHKPIAAAAAAATSSESAVTQVDEDHKPHGAAAAAAAADGLAANAKQSVFDPFPVTDFGAGFDLGAANMAAALYGSHPDDGAGFVADYSSVLDVSENLGYGESSSNSSNWTCAEVSNVLDSEVLNWAASAGADAAAKAEPFADMEQQHSGYGGEYQVEDDATLEHKFSLPCHEQSLAQFDFNLEYF

SEQ ID NO: 24682 - protein, 292 aa, Oryza sativa
  Clone ID: TF_OsC46522_1.pep
MRDVCMEVLPPMDHYASRGNWFMARKWSPEENKQFERALAGLDLRCPDWDRVARAIPGRSALEVMNHFRDLELDVQQIENGMVPFPVYGAAAAGGAFTLQWDGAHGVGDFRNAYRFGGGGGGKRHFGRTPEQERKKGVPWTEEEHKLFLLGLKKYGKGDWRNISRNFVQTRTPTQVASHAQKYFIRLNSGGKDKRRSSIHDITTVNLTDDRPPSPSQSSLISNQSNTSTLTAAVAPFSSTADVKPQNAANASFNSPSRTLGMAGYGMGLQDQGLQCGGPLHDQLAASRSILF

SEQ ID NO: 24683 - protein, 321 aa, Oryza sativa; identical to SEQ ID NO: 17339
  Clone ID: TF_OsC215051_1.pep

SEQ ID NO: 24684 - protein, 965 aa, Oryza sativa
  Clone ID: TF_OsC139519_1.pep
YSDDSDPDIDEDLQRDLDALRQSCILSGNDPDAAVAQVSACLAAPPAAAAGAEVNGLSDDDDEEEDEDLALVRSIRENLLLNKASPSSPLPRPICAWPPSDSEDDEDDLETLRAIQRRFSHYHSGTSSGSEMNTKTEASKEGSGNIFGNELDEEFDAEKHNKEATTRTGFPKAALLLVDALKKNRACQKFIRRKMITIEAKIEENKDLRDRVKCLLDYQLSCRKAFGKILCQKEDPRVRLISSRKPCAQSTKNKDKKTPALFLGPADNPHVSKYKMVLKQLPMSLQKQPWSDVEKEKLAKGIKQQYQEALILNSINKGSSTGDFSAVDMAYALTNTAGNFEVTPESLRSVLPLINWDKIAAMYLPGRSGAECESRWLNFDDPLISHNAWTAREEKRLILTVQQQGMNNWINIAVTLGTHRTPFQCLVRYQRSLNHCILNKDWAEEEDLQLQAAVNTFGTNWQLVSASMDGRTGNQCSNRWRKTLNPERSRVGRWSLDEDKRLMVAVKLFGSGSWNKIAQFIPGRTQSQCNERWRNVLDPDIDLGEWRPEEDSILLASVDEFGPCWSKIAGAKIPHRTDNMCLRRWRKLCQDKLPSVKAAQQIKKSILQCNFVDRETERPAIGPSDLMPLVRSKVDGSDENTVSAKVRKPRKRSRIPCEDNVLPGDTSNSSPSMNLPLSESIDAEAAVNTTTANSKKKPSRSRSKKQTDENLAVCDVNNSSNCSSGARKRKRSITDKNQVVQKKMKGSISGDNEAVVETVGTISADNEVATKRKTGSTSVGEEGTTKKTTRGSLSGKGEVNKRMRGSISGVQKGATKQRMRGSVSTDNHGAVMKSKRAPSRKSAEENSKADSMANAAFGSDLPTVASEDRDANNGNVKNGRLKSMPRPKQINMTEGSADKFSTSTRLADCMSFGRINGSSRVARHLCVSVKPLSNMIQSNGPSDVSAKDPTSAETDPTSVENSNTA

SEQ ID NO: 24685 - protein, 812 aa, Oryza sativa
  Clone ID: TF_OsC1713_5582.pep
MPRKASSTSDSRLKWRKWKRNPTASPSPSNRSSAAAAAADHSDDSDSAAVNEDDDSAVPEDADDETLAGAEDPVLDLREAEVLPSAEPVSAFPVATRRVVNRPHPSVLAVIAAERSACAGEGSAAVAAAPVLENISYGQQQVLSGVLPDHASLATDTDKPSTYVCTPPNLMEGHGVTKQFQGRLHVVPKHSGPPALCNQKPECLSYNAALTCLRFVDWFSPGIVHRLERQVVPQFFSGKSPGNTPEKYMLLRNKVIAKYLENPSKRLAFAECQGLVANTAELYDLSRIVRFLDTWGIINYLASGSVHRGLRMATSLLREEPTGELQLLTAPLKSIDGLILFDRPKCNLQAEDISSLASNSEVVDFDAGLAELDGKIRERLSESSCSYCLQPLTSLHYQSLKEADIALCSDCFHDARYITGHSSLDFQRIDGDNDRSENDGDSWTDQETLLLLEGIEKYNDNWNNIAEHVGTKSKAQCIYHFIRLPVEDGLLENIEVPDASVPFRAETNGYPHLDCNGSTSGNLPQKIPPDNQLPFINSSNPVMSLVGFLASAMGPRVAASCASAALSVLTVDDDSRVNSEGICSDSRGQGPHPNFRDHNGGVSSSISPEKVKHAAMCGLSAAATKAKLFADQEEREIQRLTATVINHQLKRLELKLKQFAEVETLLLKECEQVERIRQRIASDRVRIVSTRLASPGNSLPGGSTSTMSSNPMSMSPRPMGVPGSMPQSSMPAPFANNMQGHGHPQMAFLQQQQQQQRQQMLSFGPRLPLSAIQTQPSPQTSNIMFNPGMPNSVTPNHHQLLRSSSGNNSSVG

SEQ ID NO: 24686 - protein, 719 aa, Oryza sativa
  Clone ID: TF_OsC158_1.pep
MEINSSGEEAVVKVRKPYTITKQRERWTEAEHNRFLEALKLYGRAWQRIEEHVGTKTAVQIRSHAQKFFTKLEKEAINNGTSPGQAHDIDIPPPRPKRKPNSPYPRKSCLSSETSTREVQNDKATISNMTNNSTAQMAGDAALEKLQRKEISEKGSCSEVLNLFREVPSASFSSVNKSSSNHGASRGLEPTKTEVKDVVILERDSISNGAGKDAKDINDQEMERLNGIHISSKPDHSHENCLDTSSQQFKPKSNSVETTYVDWSAAKASHYQMDRNGVTGFQATGTEGSHPDQTSDQMGGASGTMNQCIHPTLPVDPKFDGNAAAQPFPHNYAAFAPMMQCHCNQDAYRSFANMSSTFSSMLVSTLLSNPAIHAAARLAASYWPTVDGNTPDPNQENLSESAQGSHAGSPPNMASIVAATVAAASAWWATQGLLPLFPPPIAFPFVPAPSAPFSTADVQRAQEKDIDCPMDNAQKELQETRKQDNSEAMKVIVSSETDESGKGEVSLHTELKISPADKADTKPAAGAETSDVFGNKKKQDRSSCGSNTPSSSDIEADNAPENQEKANDKAKQASCSNSSAGDNNHRRFRSSASTSDSWKEVSEEGRLAFDALFSRERLPQSFSPPQVEGSKEISKEEEDEVTTVTVDLNKNAAIIDQELDTADEPRASFPNELSNLKLKSRRTGFKPYKRCSVEAKENRVPASDEVGTKRIRLESEAST

SEQ ID NO: 24687 - protein, 563 aa, Oryza sativa; identical to SEQ ID NO: 17349
  Clone ID: TF_OsC144018_1.pep

SEQ ID NO: 24688 - protein, 175 aa, Oryza sativa
  Clone ID: TF_sicee_6517.z1.abd.pep
MAFYLGSMGGSPSSWGVAEVPVPSSRPWSKAEDKVFESALVAFPEHTHNRWALVASRLPGRSAHEVWEHYQVLVDDVDLIERGMVASPGCWDDDNNSAGHGRGSGGDERRRGVPWTEEEHRLFLEGLEKYGRGDWRNISRWSVKTRTPTQVASHAQKFFIRQANASSRGDSKRKS

SEQ ID NO: 24689 - protein, 275 aa, Oryza sativa; identical to SEQ ID NO: 17364
  Clone ID: TF_OsC1122_1.pep

SEQ ID NO: 24690 - protein, 200 aa, Oryza sativa
  Clone ID: TF_OsC6000_6.pep
MGGGGGVEADCDRIRGPWSPEEDEALRRLVERHGARNWTAIGREIPGRSGKSCRLRWCNQLSPQVERRPFTAEEDATILRAHARLGNRWAAIARLLQGRTDNAVKNHWNLLPQAQARRRHHHHHHHHRRRRRAGSGRRCRRARRAAVQAVHPHAGQPVGVWFRVGPQRPHPRRGVRADFPAGDDRVRARLRAQPAGRRIP

SEQ ID NO: 24691 - protein, 367 aa, Oryza sativa
  Clone ID: TF_OsC342590_1.pep
MGRSPCCEQDADVKKGPWTPEEDKLLVEYIGKNGHGSWRRLPKLAGLNRCGKSCRLRWTNYLRPDIKRGGFSDDEERLIIHLHATLGNKWSSIATKLKGRTDNEIKNYWNTHLRKKLLSQGIDPVTHRPRTDLLAGLPNLLAAANLGGAAHQLPLDLNAIKLQADAAKFQILQGLLRVLASTTAPPPTAAVLPGTDLMTSILGATLAANSAGILGQQQQLAGVDLSRLGQYNGNYDNLPPLTNDSCTQQTQPAMSSMSPDSLLNRISSGISGDMLGSPELCHGGDGLSSPELGQGGPSASNMTTSPMAPPPPMVAADDHQCNTNTPSGGGDGMSCEQTPASSTFDGLNLDDIDMEGCCPMTHILRAD

SEQ ID NO: 24692 - protein, 1125 aa, Oryza sativa
  Clone ID: TF_OsC251248_1.pep
MAIGGKQLAVFGGLCSQLLSFVFHAHTRRDEDEEEEQELGLGGGDLLRPQIGGATSSRPRSRTARRLHLCRAESLSWSRRRRRRGPVVGAPQIAPLPWPSGSHPQIQHPGIVRLGTALRGTRAARVAVARAIVMMTSDNGKAPEKDGEPSGPPSAPQEGEISNEPKRRRPLNGTTGPTRRSTKGNWTPEEDAILSRAVQTYNGKNWKKIAECFPDRTDVQCLHRWQKVLNPELVKGPWSKEEDEIIVQMVNKLGPKKWSTIAQALPGRIGKQCRERWYNHLNPGINKEAWTQEEEITLIHAHRMYGNKWAELTKFLPGRTDNSIKNHWNSSVKKKVNSYMSSGLLTQVSCLPLNEYSANCNSSPAMTQQNSEDSGCFAVREVENSSGCSQSSLAKVSCSQVHDTTVPLGCDLQVNANFDKNEAHDSQSSMGPQACYTSAEAVASALPAVHCHVSSSNLDPDQHLQEDFAQGLNLDMTIDEMPTVPSFADNQTVCSIENHERSLEPYDVAMEVPLSMLSSDSGAEQKLHFMSEADFNSPNCLKSELWQDISLQGLLSGPDAVEADSISRSNHQSDVYSSEADTHFLAPPYMPQTSNSSSVMGLADDQSPQMSVPPSLICSNAMTDDAPFDNRPGRKEMPLSQAEVVTQSSSSSGDAEMFANPGCSNDRHVPSSTMESIPECGDQQVTNAEEPEASLEKEPSLTQSVTAPDEQDKGALFYEPPRFPSLDVPFVSCDLVTSGDLQEFSPLGIRQLMHSTMNVCTPMRLWGSPTHDESTGVLLKSAAKSFICTPSILKKRHRDLLSPIPDKRIEKKYGTEKDRGVSDTSSTGIQTSCINATKDDALITTVLRIERSASSKSLEKKLVFSDENKENLGYTTEQTKDGQSAGNDEHMDEQTTGERSSATNVATNDDLSGNLQPAGILIEHSGDDPISPDYGKNTMNQKLNTNVKSLSVCKEGVCAKSKPTELIVEKSSPCINVDYEYVNILADTPGIKRGLESPSAWKSPWFVDMHFQGSYFTSPADSYDALGLMKQINVQTAAALVEAREVLASGGQCDNISSDKENTGNPDAKKEPGTTKLQTKIMAEGRVLDFECTTPERSSDKNAGSNLGRYLSSPIPSSHLLKSFR

SEQ ID NO: 24693 - protein, 227 aa, Oryza sativa
  unsure (1)..(227): unsure at all Xaa locations
  Clone ID: TF_OsC134_42.pep
MAFAAAYWLDHIWASFSWDVGDVVGAMARPEMVRVDGNDEVGRWRRYGHRERRRAYHQLFDQRRGTTALLPMARHGXPVASDRHHSASAARRDAAATRPATSVATANTRVSSSLIEIEXDTHTPPTTGRPPRTGEQDGEAAVLRQGWVKKGPWTPEEDLMLASYIQEHGAGNWRAVPTNTGVMRCSKSCPLRWTNYLQPGIKRGNFTEQEEKLIVHLQALLGNRSLP

SEQ ID NO: 24694 - protein, 279 aa, Oryza sativa; identical to SEQ ID NO: 17355
  Clone ID: TF_OsC806_1.pep

SEQ ID NO: 24695 - protein, 366 aa, Oryza sativa; identical to SEQ ID NO: 17356
  Clone ID: TF_OsC146515_1.pep

SEQ ID NO: 24696 - protein, 190 aa, Oryza sativa
  Clone ID: TF_OsC43020_3.pep
MVTVREEMRKGPWTEQEDLQLVCTVRLFGDRRWDFVAKVSGLNRTGKSCRLRWVNYLHPGLKHGRMSPHEEHLILELHARRGNRWSRIARRLPGRTDNEIKNYWRTHMRKKAQERKSNMSPSSSSSSLTYQSCHPETPSMIIGIEEQELHGGSGCITSIMKSTPVDMDGYPMDQIWMEIEAPNVLPGPLF

SEQ ID NO: 24697 - protein, 195 aa, Oryza sativa
  unsure (1)..(195): unsure at all Xaa locations
  Clone ID: TF_LIB4309-001-Q1-K1-A10.pep
MGRSRGVPNSGDDETNHRSKRRRVASSGDAPDSLSAACGGAGEGGGKKALYHCNYCNKDISGKIRIKCSKCPDFDLCVECFSVGAEVTPHRSNHPYRVMDNLSFPLICPDWNADEEILLLEGIEMYGLGNWAEVAEHVGTKTKAQCIDHYTTAYMNSPCYXLPDMSHVNGKNRKELLAMAKVQGEKXKGTSVLPG

SEQ ID NO: 24698 - protein, 570 aa, Oryza sativa
  unsure (1)..(570): unsure at all Xaa locations
  Clone ID: TF_OsC2142_1.pep
MGRSRGVPNSGDDDTNHRSKRRRVASSGDAPDSLSAACGGAGEGGGKKALYHCNYCNKDISGKIRIKCSKCPDFDLCVECFSVGAEVTPHRSNHPYRVMDNLSFPLICPDWNADEEILLLEGIEMYGLGNWAEVAEHVGTKTKAQCIDHYTTAYMNSXIGISGELDLPLPVTLARTGEVELPFTLSRAGTSVLPGDLTPKDESPFSPPRVKVEDALGEGLAGRSPSHIAGGANKKASNVGQFKDGANVAKVEDGHVDRSIGVKKPRYSADEGPSLTELSGYNSKRHEFDPEYDNDAEQALAEMEFKETDSETDRELKLRVLRIYLSRLDERKRRKEFILERNLLFPNPLEKDLTNEDKEVYHRYKVFMRFLSKEEHEALVRSVLEERKIRRRIQELQECRSAGCRTLAEAKIHIEQKRKKEHEVNAQKAKESGQLLSNTKVVHKTNRPMKIESDGNLDQKKGGASLDSTGRDSPKTTGHAGTKHWDDWDIVGFPGAELLSTSEKNLCCQNRLLPNHYLKMQEVLMQEIFKGSVAKKEDAHVLFKVDPAKVDNVYDMVTKKLGTNEEAPTV

SEQ ID NO: 24699 - protein, 306 aa, Oryza sativa; identical to SEQ ID NO: 17358
  Clone ID: TF_OsC90588_1.pep

SEQ ID NO: 24700 - protein, 297 aa, Oryza sativa; identical to SEQ ID NO: 17361
  Clone ID: TF_OsC387490_1.pep

SEQ ID NO: 24701 - protein, 276 aa, Oryza sativa; identical to SEQ ID NO: 17362
  Clone ID: TF_OsC804_1.pep

SEQ ID NO: 24702 - protein, 89 aa, Oryza sativa
  Clone ID: TF_LIB3433-019-P1-K1-H3.pep
MNMTGVPWSEEEHRLFLVGLEKLGKGDWRGISRSYVTTRTPTQVASHAQKFFLRQSSIGKKKRRSSLFDMVQSQFLGLLKLIRVLEFFG

SEQ ID NO: 24703 - protein, 301 aa, Oryza sativa; identical to SEQ ID NO: 17332
  Clone ID: TF_OsC96816_1.pep

SEQ ID NO: 24704 - protein, 266 aa, Oryza sativa; identical to SEQ ID NO: 17372
  Clone ID: TF_OsC165761_1.pep

SEQ ID NO: 24705 - protein, 224 aa, Oryza sativa
  Clone ID: TF_OsC44378_1.pep
MVVKKAATMAEAEAEEEMMMRMMCGSGGNEMMKTKMKKKNREGEEEEEVSGGGRMRKGPWTEQEDVQLVWFVRLFGERRWDFLAKVSGLKRTGKSCRLRWVNYLHPGLQRGRITADEERLILHLHSQWGSRWSRIARSLPGRTDNEIKNFWRTHMRKIAHHAKKKTNSPSPAPTTSFGSLSFSLTTATTTMATAAALQEAAAAAATTRPSTSWWGGAPRRRASC

SEQ ID NO: 24706 - protein, 1004 aa, Oryza sativa
  unsure (1)..(1004): unsure at all Xaa locations
  Clone ID: TF_OsC11497_1.pep
MRIMIKGGVWKNTEDEILKAAVMKYGKNQWARISSLLVRKSAKQCKARWYEWLDPSIKKLCSPHAILLQAYTAFEGLMTEWTREEDEKLLHLAKLMPTQWRTIAPGVGRTPSRYLERYEELLHGACEKDGNYEPNHERRKGRPGEIHPKPEPKPEHHDAVDMSNADDDELRRADSPRAKXQGNDQVVMLERNSISQDGDTANCKNGSXLNDGGIDTRKXERHRKGIDYNADVRFDKSPPPGFYYTVGEDSTHEHAQFPTIIEXFKIXRREDIEAQLRKQDFLRSKIIQRQVALAAFAQAIKLKVPXSVTKRSKLKLLPPXNSYHLLVGTANMGNGGDTSLVEELGEGSTATRALLSSYSQTPRLAMTWVRTPQRTPAGKGDAIMMEAENLARLRESQTPLLGGDNPELHPSDFSGVTPRKKEMQTPNPMATPLASPGPGATPRIGMTPSRDGSSFGLTPKSTPFRDELRINEEVDMQDTAKLELRRQAELRKSLRSGFASIPQPKNEYQIVMPPITEEEKEEAEEKIEDMSDRLARERAEEQARQEALLRKRSKVLQRSLPRPPAASIEILRQTLIKGGESRSRSTFVPPTSLEQADELINEELLRLLEHDNAKYPLDEKTQKDKKKGSKRQANGTPSVPEIEDFDEDELKEANSMLEEEVQYLRVAMGHESESLEDFVKAHDACQEDLMFFPNNNSYGLASVAGNSDKIAALQYEFEIVKKRMDDEAKKASRLEQKIKLLTPRIPGRLGMMHHKHCNMYRAGKLWSQVQDTFKQMDTSATELECFQELQKQEQMAASYRIRNLTEEVNKQKALERTLQSRYGDLLTSYKRIQEQLEEHKRQLMIQEEMEAQKRAQEEEEMEAQKRTQAEEEKEAAKAEEEARKMDRAADEEAAGSKQVNEDQMDVDNSNADGDEFVGPIPPGPGTQGDDNVVAVEENSSSQSGDTATTEDGSCGMIDASKSGGQDHIDSKDELPTVGASLDDGSAAASSDQDVSTEVNATVPE

SEQ ID NO: 24707 - protein, 278 aa, Oryza sativa; identical to SEQ ID NO: 17373
  Clone ID: TF_OsC44378_2.pep

SEQ ID NO: 24708 - protein, 309 aa, Oryza sativa; identical to SEQ ID NO: 17374
  Clone ID: TF_OsC2083_1.pep

SEQ ID NO: 24709 - protein, 561 aa, Oryza sativa; identical to SEQ ID NO: 17375
  Clone ID: TF_OsC951_5.pep

SEQ ID NO: 24710 - protein, 287 aa, Oryza sativa; identical to SEQ ID NO: 17376
  Clone ID: TF_OsC351_7.pep

SEQ ID NO: 24711 - protein, 599 aa, Oryza sativa; identical to SEQ ID NO: 17381
  Clone ID: TF_OsC8573_1.pep

SEQ ID NO: 24712 - protein, 307 aa, Oryza sativa; identical to SEQ ID NO: 17383
  Clone ID: TF_OsC207688_1.pep

SEQ ID NO: 24713 - protein, 368 aa, Oryza sativa; identical to SEQ ID NO: 17390
  Clone ID: TF_OsC808_1.pep

SEQ ID NO: 24714 - protein, 857 aa, Oryza sativa
  Clone ID: TF_OsC9889_1.pep
MSPPVAGAASSGDGPPGRPPRELYTIPASSGWFQWDEIHETERRALPEFFGGAGGSGFGTASRNPRIYREYRDYIISRYREDTSRRLTFTEVRKALVGDVTLLRKLFAFLDSSGLINFSASPSRPEAQQQQRQTEAEARREAPGGLQVRPRPLLESSAEEKGGRGKENWFCLPPLTSYSDVFGEWAPGMAPICGLCGMECRDGNAQILKDGFKVCSKCYANNDNKGEANIHPGDKKERIDNHSSSAWTDAETLLLLEGVLKHGDDWDLIAQHVRTKNKSECIARLIQLPFGEHMLGTVNGKLDNRLHKIQTTDGKVNKSTVKESSSQPTETVDDMQIDGNEDGADKSVEEHPTKHRRLFSSIDITVSLMEQLAHLTTSTSPDVVAAAADAAIKALGNENPQARRAFQLSEKEYQTRAFSSNHARQRDYCSDDVGGGDRDVEMHGHPDQEEREMELLMASIIETQLKKIQYKIKHFEELELIMDQEYATLQQMKSSLVDEWQKQSQQFGVWRIGAILNRLGFDRTAGMESHRRAPPFFPNAERRRRQPKTPPSSPPGLSVSPNLARHLSSPRPPPPDAQFTGALMAKKGKAAAAEAAAPDAGVSGPQGGGGEKEGSFLLGSPTWEDAGGGRWRCKETGHELPEREKEAYGRSRACRLALIDQAVARKKPPLNAFKPHPEHKSKLICNITGDIINKSEEHIWKHINGKRFLNKLEKLEEKMASGEMAEGEAEQSNEGENKTKSRKKKDKKKAAVVNPSLPREPKPEIDDSDNSDDPDFWVPPVGSRWDDDDGKDRWTSSPVKDKDDAAEDEDGDDDGDDMADKDDKETREIASRTKRLSVEAVGPSSFASRKKKTKKEQ

SEQ ID NO: 24715 - protein, 272 aa, Oryza sativa
  Clone ID: TF_4138298.pep
MGRRACCAKEGMKRGAWTSKEDDVLASYIKSHGEGKWREVPQRAGLRRCGKSCRLRWLNYLRPNIKRGNIDDDEEELIVRLHTLLGNRWSLIAGRLPGRTDNEIKNYWNSTLSRKIGTAATAAAGSRGGSTPDTARATDAASSSSVVPPGQQQQPASRADTDTATAAAAAAATTTTVWAPKAVRCTRGFFFHDRETAPLAAAAPAPAGELGDGDDVDCDYYCSGSSSAATTTSSSSLPAVVEPCFSAGDDWMDDVRALASFLDTDDAWNLCA

SEQ ID NO: 24716 - protein, 403 aa, Oryza sativa; identical to SEQ ID NO: 17379
  Clone ID: TF_OsC373_1.pep

SEQ ID NO: 24717 - protein, 285 aa, Oryza sativa
  Clone ID: TF_OsC490_1.pep
MEMVLQRTSHHPVPGEQQEAAAELSSAELRRGPWTVDEDLTLINYISDHGEGRWNALARAAGLKRTGKSCRLRWLNYLRPDVKRGNFTAEEQLLILDLHSRWGNRWSKIAQHLPGRTDNEIKNYWRTRVQKHAKQLNCDVNSKRFKDAMKYLWMPRLAERIHARAGAVDDSGDYSNNDLSCVSGVTMATVANCFDGSPSMVTSSSSDSFTSESQDLKKINLHVHGDDEKMNSEDWMQEVDHEFWSTEIQPNNEQFQDQQLNGWVQGFSEGLSETLWSLEDIWKMQ

SEQ ID NO: 24718 - protein, 75 aa, Oryza sativa; identical to SEQ ID NO: 17391
  Clone ID: TF_OsC411024_1.pep

SEQ ID NO: 24719 - protein, 343 aa, Oryza sativa
  Clone ID: TF_OsC6000_3.pep
MGMGRGGAVQCTARAGAATTTTTMGEWIVPGPHVNDEEENDNGPGIRGPWSPEEDEALRRLVERHGARNWTAIGREIPGRSGKSCRLRWCNQLSPQVERRPFTAEEDATILRAHARLGNRWAAIARLLQGRTDNAVKNHWNCSLKRKLAVATTTTTTTTGAAAAPGVVADAAELVERPCKRFSPTPDSPSGSGSGSDRSDLSHGGGFGQIFRPVARTGAFEPVDCAISRRQEEDPFTSLSLSLPGTDQRFNHDSAHSHFQELPSSPSPPPPPPPAAAASTTQYPFTPEFAAAMQEMIRAEVHKYMASVGVRAGCGDAGGADLHMPQLVEGVMRAAAERVGRMH

SEQ ID NO: 24720 - protein, 416 aa, Oryza sativa
  Clone ID: TF_OsC9332_1.pep
MFGRVPRSNNTKYYEVLGVPKTASKDELKKAYRKAAIKNHPDKGGDPEKFKELSQAYEVLTDPEKRDIYDQYGEDALKDGMGGGSDFHNPFDIFEQFFGGGAFGGSSSRVRRQRRGEDVAHTLKVSLEDVYNGSMKKLSLSRNILCPKCKGKGTKSEAPATCYGCHGVGMRNIMRQIGLGMIQHMQTVCPECRGSGEIISDRDKCTNCRASKVIQEKKVLEVHIEKGMQHGQKIVFQGEADEAPDTVTGDIVFILQVKVHPRFKRKYDDLFIERTISLTEALCGFQFILTHLDSRQLLIKANPGEIIKPGQHKAINDEGMPHHGRPFMKGRLFVEFNVEFPESGVLSRDQCRALEMILPPKPGHQLSDMDLDQCEETTMHDVNIEEEMRRKQYQRKQEAYDEDEEEDAPRVQCAQQ

SEQ ID NO: 24721 - protein, 168 aa, Oryza sativa
  unsure (1)..(168): unsure at all Xaa locations
  Clone ID: TF_OsC358016_1.pep
MGRSSACCDKAAVKPKRGAWTAEDDERLRSYIQQHGTGGNWXGLRRCGKSCRLRWLNYLRPGIRHGAFSDHDDRLILALHAAVGTRPVLLLAAHQLHVASTSSGGMHVGVGEEGRGYDDVFAAGPEHGRRADDDDELAQPPKPATIFARQITNWCAAAATCIWHALLV

SEQ ID NO: 24722 - protein, 84 aa, Oryza sativa
  unsure (1)..(84): unsure at all Xaa locations
  Clone ID: TF_OsC351_17.pep
GGRGGVRPRVRDRLIAYIKAHGEXCWVSVPKXAAGVLRCGKSCRLRWINYLRPGLKRGNFTEEEDELIIKLHRLLGNKDVGSSQ

SEQ ID NO: 24723 - protein, 346 aa, Oryza sativa
  Clone ID: TF_OsC2658_1.pep
RASSLPRSPLSRRAPVLVRPWATSPPPPPPPPPQPAAAAPGTPGNARHRASHRRWGCAFFSTPVLPPPCLTPSASPHILPRPHAGSGDGYPSDGGLLLSSGKRRRAQERKKAVPWTEEEHRTFLAGLEKLGKGDWRGISKNSVTHASPTQVASHAQKYFLRQTNPNKKKRRSSLFDMMATDMSPAPNCPVLPPSMGKLHDMVAMTKQLQNSSLEGVSSSSTVNLAPQVARDLPPPIPSFKATNVDSSLSKMNHMDGFLRAPMLFRPIPRIAEGASSSTPATASIADLEFQANLTACSNALFASPRRKPKKADPPAEKDLDLTVAPPSQQTRASISSQNAVGVIQVV

SEQ ID NO: 24724 - protein, 409 aa, Oryza sativa; identical to SEQ ID NO: 17398
  Clone ID: TF_OsC351_5.pep

SEQ ID NO: 24725 - protein, 342 aa, Oryza sativa
  Clone ID: TF_OsC2381_1.pep
MRRWSQIAAQLPGRTDNEIKNRWNSCIKKKLRQKGIDPNTHKPLTEADRRGAAPTVSTERTSGSSDVNPSSAGALGNLSHLLSETAQSSMLLPVYDKNHPETASLPRPKVPPKELFLDQLTAGHESPSSCRSSGPTLYFPFQQPLGYSNECGTGDGASMNSLWFNQNDFNCSTISTVMPPVSPSALSTSMGLNLPPENPRHGGTGIGNTPFYWDGSNPSSSGSTGSSGSNSMGFEPQSTTSILENSVFPWTDIGQEKDTRVHLVEELKWPDLLHGTFAEATTAMQNQSQSLYDDVIKAESQFNMEGICASWFQNQQPQQQLQAASDMYDKDLQRLPLSFEHI

SEQ ID NO: 24726 - protein, 246 aa, Oryza sativa; identical to SEQ ID NO: 17401
  Clone ID: TF_OsC257872_1.pep

SEQ ID NO: 24727 - protein, 261 aa, Oryza sativa
  unsure (1)..(261): unsure at all Xaa locations
  Clone ID: TF_LIB4371-008-R1-K1-H5.pep
YITGHSSLDFQRIDGDNDRSENDGDSWTDQETLLLLEGIEKYNDNWNNIAEHVGTKSKAQCMYHFIRLPVEDGLLENIEVPDASVPFRAETNGYPHLDCNGXLQVGFLASAMGPRVAASCASAALSVLTVDDDSRVNSEGICSDSRGQGPHPNFRDHNGGVSSSISPEKVKHAAMCGLSAAATKAKLFADQEEREIQRLTATVINHQLKRLELKLKQFAEVETLLLKXCEQVERIRQRIASDRVRIVXTRLASPGNSLPGG

SEQ ID NO: 24728 - protein, 491 aa, Oryza sativa
  Clone ID: TF_OsC13695_1.pep
MEMACLPGNAMATDENGADDRAGGESTVDHLRSHMNYGDMDLSGEEHVPKARKPYTITKQREKWTDEEHRLFLEALQLHGRAWRRIQEHIGTKTAVQIRSHAQKFFSKVVRESSGSNTGSGGASAAAAAAAIQIPPPRPKRKPAHPYPRKVDGAAKKHVPALRQLEKPPLWMQSLSEQEEGSPTSVLTAAQIGTEALGGGFSNNSSGSGSLAPSAAGTDEHVDGGGSPASSVDREDGCLSPSIPTAELAMQAPNTKMSIATTDAKEASSEASVFRLFGKSVVVKDSDQLHLLNGSNIATSGSVERATRNILVPSFAAAPEGSSSNPWPSSMQQFLYFLPRSDGFAAQPVMPWLSYNGSLPCALFYPAAAAAANQQCHRDSEGVEFRVSQREGSLTGSNTASSVVLGSSAAVPAAAAAAQNSDVAESRGQGNSREAAASPRLTKCESSASVTLLQRGFMPYKRCAAESELLRSEAAGGEEAVADGELTRLCL

SEQ ID NO: 24729 - protein, 278 aa, Oryza sativa
  unsure (1)..(278): unsure at all Xaa locations
  Clone ID: TF_OsC351_6.pep
MGRSPCCEKAHTNKGAWTKEEDQRLIAHINQHGEGCWRSLPKAAGLLRCGKSCRLRWINYLRPDLKRGNFTDEEDELIIKLHELLGNKWSLIAGRLPGRTDNEIKNYWNTHIKRKLLARGLDPLXRTARSMPPPPSPATTTSXRRRLQLLARRNKRPQQLQRRRRVPRRHRPQPVHKPAVVVVPAVFPAAAAARSRGETRRSDGELHLPPPLLGDEGEDMPVLEPPRAARRRRVQLRRLVGLFLLLAAAGDGELASVHIRQCIVVNSVKHREIQRFSD

SEQ ID NO: 24730 - protein, 265 aa, Oryza sativa; identical to SEQ ID NO: 16705
  Clone ID: TF_OsC2008_2.pep

SEQ ID NO: 24731 - protein, 267 aa, Oryza sativa; identical to SEQ ID NO: 17409
  Clone ID: TF_OsC806_2.pep

SEQ ID NO: 24732 - protein, 451 aa, Oryza sativa
  Clone ID: TF_OsC17430_1.pep
MASMPQLEEKDSSDLAINKGPSLDLVKSPLMMNDASATVTAMQPNEGMEEFPVKVRKPYTITKQREKWTEEEHDKFLEALKLYGRSWRQIQEHIGTKTAVQIRSHAQKFFSKVVREPGSNNAIEIPPPRPKRKPLHPYPRKCANSGSDANPATAQLKLAPGSSSSGSDQENGSPISVLSAMQSDAFGSSVSNPSTRCTSPASSDDGNNIPTFTSGEDNNVPCEPTVIDPSQSHKEIDQDRKDVNNMSEEDSSEEEVQETSLKLFGRTVVIPDPRKRSSSDPKHESEEQISQPSNEEMLQASSSVGEIPAAYCAPNGWFMSYNSFPFQFGESAADARIPPLHVWWPYYGFAPISHPRGLSTVMQQTEGSDESDGVKSHSSESSSDSGENVQMTAPQSSRIVESLGAIYVRDSGSSFELKPSANSAFVRVKPSNSGDEEVIRGFVPYKRCKFQ

SEQ ID NO: 24733 - protein, 289 aa, Oryza sativa; identical to SEQ ID NO: 17416
  Clone ID: TF_OsC161464_2.pep

SEQ ID NO: 24734 - protein, 239 aa, Oryza sativa; identical to SEQ ID NO: 17420
  Clone ID: TF_OsC24389_2.pep

SEQ ID NO: 24735 - protein, 587 aa, Oryza sativa
  Clone ID: TF_OsC50674_1.pep
MGAMAMVEQEGCVENRQPLAAPSRPVSDGSSYGGGGGGLAQMSPPVSSSANSISGLRRTSGPIRRAKGGWTPEEDETLRKAVEAYKGRNWKKIAECFPYRTEVQCLHRWQKVLNPELIKGPWTQEEDDQIIDLVKKYGPTKWSVIAKALPGRIGKQCRERWHNHLNPEIRKDAWTTEEEQALINAHRIYGNKWAEIAKVLPGRTDNSIKNHWNSSLRKKQDMYNTSNNMVVPKLLVHDKFKDKPKLMAMEGHLDLNKAPIINSKDQPGTAHRSNCSGFLSRSSLPTAQPLTSREASVVDGSAVTLVAQALESDSVRGKGLEIDSVHEKGLEVNSAPDHTGNSWTIQLEAAPSKGEAELSLKNEARSLGPLCYQIPNMEDVVPVSSSLFSDHLTGNHTSEHCGDDILSPAGCTTPPPTKGKLTSQLSVDSILKSAANSFPGTPSILKRRKRDKSTPVSASEMKISGSNTDRFYTPMGMEPATATPESFKTTSFLSLGSLDGSVKSFDVSPQYRARSKRMALTKTVEKQLDFSSDGLDTCGSEILNSSCNNSQSTLSITEAPKLKEKEHAVQLENGTKNFAHTTNLDVT

SEQ ID NO: 24736 - protein, 511 aa, Oryza sativa; identical to SEQ ID NO: 17421
  Clone ID: TF_OsC3094_1.pep

SEQ ID NO: 24737 - protein, 219 aa, Oryza sativa
  Clone ID: TF_OsC1713_4582.pep
GSIASVGVDGSLLLLVSSVAVVSSVRHIGEGEVDVDEQQWLFGWLRAIRNQYLSVDTLGARQCQDHWIYFKIRADPITLTPLLLLFPSPSSPRAFRRHGPAVTPPASLASRKESTPMAMSYPCAAVFPVSGSEGVANAGEEEEVAGVGGEGLEHESQSSFSGPKSVRFEDGFSIDRSKSQTIGFHPSNQNFRTLDNSFNKKLITAIARFCPSTYFGIAI

SEQ ID NO: 24738 - protein, 508 aa, Oryza sativa
  unsure (1)..(508): unsure at all Xaa locations
  Clone ID: TF_OsC75714_2.pep
MMAEALREVLPLPYFPGQPCWYLQERRGAEAWSAEENKVFERALAQVDLDSPNRWEMVAAMLPRKTVIDVMNHYRDLENDVGSIEAGLVPFPHYSSSLSPASSGFTLQDWDGSDGGFRRGCYLKRGRAPDQERKKGVPWTEEEHKSFLMGLKKYGRGDWRNISRYFVTSRTPTQVASHAQKYFIRLNSGGKDKRRSSIHDITTVNLPEEDTSNPSPSPPSVLTTASDPLACLVDRRPVAPRRALVGSXMGLKTYGRGDWRNISRYFVTSPDADATVSAGAEAMLTLVTAGGNGGGPSSDDDIATAQLIETATTRPRPSRPPVSASDWHASWLXSCFIRLRIAKYWTEGPLTGYCFDQEHQGIPRDRNPXSVLDTAYCIXSMIYLLTCLWVPKRPHRRATRVYVYMNRARVVEPASEPASGLIXDPKREMNXSGTPGPFIFRSGFLCSDDVERNSCSSSGPVFYSSDPILFNGCERKSAIAAIALLGRHVRPRLRANIQILQMDDIIEE

SEQ ID NO: 24739 - protein, 311 aa, Oryza sativa
  Clone ID: TF_OsC805_1.pep
MGRPPCCDKEGIKKGPWTPEEDIILVSYIQEHGPGNWRSVPINTGLMRCSKSCRLRWTNYLRPGIKRGNFTAHEEGIIVHLQSLLGNRWAAIASYLPQRTDNDIKNYWNTHLKKKLAAAANSTSSSNRHPIFADATFPSAAGGSYTVSSNSDVTQMAAIARRSPFADCPSSSYASSMDNISKLLDGFMKTNSPSPPPPPLQHYDGGYYDDVKPAVDVGGNPLLSSFDCMSGADLDCCFDVHQQHQQQPPASFMEYGGYGGGYGDESKQQLMNQAAPPLSSIEKWLFDEAAAEQVADLMDLSDGCCSVPMMF

SEQ ID NO: 24740 - protein, 348 aa, Oryza sativa
  Clone ID: TF_OsC75714_1.pep
MMKESYMEVLPPAPAHYFVGQAAAAGGWFLPDRRGGGGAWSQEENKVFEQALAALDRNDPERWERVALLLPGKTVADVMTHYDDLENDVCFIEAGLVPFPHYGAAGGGGGSGFTLDWDGGDDPAGLGFKRSCYMVGGKRARGPDQERKKGVPWTEEEHKLFLMGLKKYGRGDWRNISRNFVTSRTPTQVASHAQKYFIRLNSGGKDKRRSSIHDITTVNLPDDDHGNPSPSPPPSVLTASEQFGVLVDGKPPPPPLGRGAGHHHFMPHPYAQVKIEAGNSHVAGGGRLDDSVLVQMQCGQPQSKENRKTVSALSTGAPLVQPANTPLSPAGVIAKRPAPIALPNSCAA

SEQ ID NO: 24741 - protein, 315 aa, Oryza sativa; identical to SEQ ID NO: 17284
  Clone ID: TF_OsC75714_3.pep

SEQ ID NO: 24742 - protein, 312 aa, Oryza sativa
  Clone ID: TF_OsC6000_2.pep
MSSSRKEEEEVDSMGMEAECDRIKGPWSPEEDEALRRLVERHGARNWTAIGRGIPGRSGKSCRLRWCNQLSPQVERRPFTAEEDAAILRAHARLGNRWAAIARLLPGRTDNAVKNHWNSSLKRKLATATDGGEIDRPCKRVSPGPGSPTGSERSELSHGGCGSGSGGGQVFRPVPRPGGFDAISAADVVRPPRRRDDNDDDGDDDPLTSLSLSLSLPGFHHDSARSHFQELPSPSRSPSPPPSAAAASPSAYPFTAEFVSAMQEMIRAEVRKYMASVGVRAGCGHAAGADLHMPQLVEGVMRAAAERVGRMH

SEQ ID NO: 24743 - protein, 280 aa, Oryza sativa
  Clone ID: TF_OsC43020_1.pep
MLKRRRAKLDTSGRRARRPAPSRSKVGASSVGATLSSYTRVTNMVTVREEMRKGPWTEQEDLQLVCTVRLFGDRRWDFVAKVSGLNRTGKSCRLRWVNYLHPGLKHGRMSPKEEHLIIELHARWGNRWSRIARRLPGRTDNEIKNYWRTHMRKKAQERRGDMSPSSSSSSLVYQSCLLDTVPIISMDGGDIHDDRSCMARVLKSTQSVMDGYTMDQIWKEIEAPGAPSLLGIDEGKDKACSNLPCPLLTSTMSDYSCPEVFWKIDNEETRMLATQSGYGK

SEQ ID NO: 24744 - protein, 288 aa, Oryza sativa
  Clone ID: TF_OsC52907_1.pep
MAVPAPAAAVGEEARKVRKPYTITKSRESWTEPEHDKFLEALQLFDRDWKKIEAYVGSKTVIQIRSHAQKYFLKVQKNGTGEHLPPPRPKRKAAHPYPQKASKNVSPAAISQPPPLGEQGCVMSMDTSPVIRNTNASAVVPSWDNSIAQPLSASRTQGTGAVATNNCSSSIESPSTTWPTSEAVEQENMLRPLRAMPDFAQVYSFLGSIFDPDTSGHLQTLKAMDPIDVETVLLLMRNLSMNLTSPNFAAHLSLLSSCNSGGDPIKSEGMENLGSPQSCHLPFMETSE

SEQ ID NO: 24745 - protein, 175 aa, Oryza sativa
  unsure (1)..(175): unsure at all Xaa locations
  Clone ID: TF_LIB4830-029-R1-N1-B12.pep
MMASCRRGGGGDVDRIKGPWSPEEDEALQRLVGRHGARNWSLISKSIPGRSGKSCRLRWCNQLSPQVEHRPFTPEEDDTILRAHARFGNKWATIARLLAGRTDNAIKNHWNSTLKRKHHSSLLADDLRPLKRTTSDXHPTLSSAAAPGSPSGSDLSDSXHHSLPLPDGPLTPTPP

SEQ ID NO: 24746 - protein, 522 aa, Oryza sativa; identical to SEQ ID NO: 17286
  Clone ID: TF_OsC351_2.pep

SEQ ID NO: 24747 - protein, 269 aa, Oryza sativa
  unsure (1)..(269): unsure at all Xaa locations
  Clone ID: TF_OsC344203_2.pep
MPCTSAAWMLHVGGAAAEQASSSSSSKGGGRVVTAGTTTMDTGGYNNGGGGGGGGGNGGGGGDHQESSSSGGGGGQSSRLAARGHWRPAEDAKLRELVALYGPQNWNLIADKLDGRSGKSCRLRWFNQLDPRISKRPFSDEEEERLMAAHRFYGNKWAMIARLFPGRTDNAVKNHWHVIMARKYREQSTAYRRRKLNXPSSASSTPPPPPTSSSPTTTPTPPPTTPTPSPSATTASLFRPPPPPPPTSRPSPACSPGRRRRPGAAAAVA

SEQ ID NO: 24748 - protein, 908 aa, Oryza sativa; identical to SEQ ID NO: 17256
  Clone ID: TF_OsC359_7176.pep

SEQ ID NO: 24749 - protein, 326 aa, Oryza sativa; identical to SEQ ID NO: 17259
  Clone ID: TF_OsC351_8.pep

SEQ ID NO: 24750 - protein, 338 aa, Oryza sativa; identical to SEQ ID NO: 17261
  Clone ID: TF_OsC344203_1.pep

SEQ ID NO: 24751 - protein, 153 aa, Oryza sativa
  Clone ID: TF_rsicek_6331.y1.abd.pep
MDSSEVSGASGTSWTDEETLLLLEALEIFGGKWTEIAEHVATKTKAQCMLHFLQMQIEDRFHGDEDINQNIQENTEQASAEKGAAEIPDKMEVEEKAEGKDTAGEKTPEKAEGNSVEAQTEDGNAIENKDANNSGGTDSVKSLNTDEPKKSSD

SEQ ID NO: 24752 - protein, 552 aa, Oryza sativa; identical to SEQ ID NO: 17266
  Clone ID: TF_OsC331108_1.pep

SEQ ID NO: 24753 - protein, 346 aa, Oryza sativa
  Clone ID: TF_OsC351_9.pep
MMGRSPCCEKEGLKKGPWTPEEDQKLLAYIEQHGHGCWRSLPSKAGLQRCGKSCRLRWTNYLRPDIKRGKFSLQEEQTIIQLHALLGNRWSAIATHLPKRTDNEIKNYWNTHLKKRLAKMGIDPVTHKPRSDVAGAGGGGGGAAGGAAGAQHAKAAAHLSHTAQWESARLEAEARLAREAKLRALAASATPGAPHLPAPPASAAAAAAAHGLDSPTSTLSFSESAVLATVLEAHGAAAAAAARAAMQPMQAYDEACKDQHWGDVDAADVGFPGAGAGFTGLLLEGSLNQIPRPAGRDAEADGEFQETEEEKNYWNSILNLVNSSSAPMSTAVVVPASHAYSPAPDF

SEQ ID NO: 24754 - protein, 210 aa, Oryza sativa
  Clone ID: TF_OsC424_1.pep
MRAINAGCWIVRRVYGWCVADAGLQRSGKSCRLRWVNYLHPGLKRGRMSPEEERMVVQLHAKLGNRWSRIAKSIPGRTDNEIKNYWRTHLRKLKLKQQKQQQSDDHHNDNDDDDDRNSSSSSSSSNSNSNLQQQPQPEDESSASGSLQAQHHEDQHQLFLHPLWNDDIIVDVDCWSSSTNVVAPPPMPASPLWDIDDAFFCSDYSLPLWG

SEQ ID NO: 24755 - protein, 287 aa, Oryza sativa; identical to SEQ ID NO: 17269
  Clone ID: TF_OsC76813_1.pep

SEQ ID NO: 24756 - protein, 306 aa, Oryza sativa; identical to SEQ ID NO: 17424
  Clone ID: TF_OsC100249_2.pep

SEQ ID NO: 24757 - protein, 257 aa, Oryza sativa
  Clone ID: TF_OsC729_1.pep
MGRAPCCEKMGLKKGPWTPEEDKVLVAHIQRHGHGNWRALPKQAGLLRCGKSCRLRWINYLRPDIKRGNFSKEEEDTIIHLHELLGNRWSAIAARLPGRTDNEIKNVWHTHLKKRLDAPAQGGHVAASGGKKHKKPKSAKKPAAAAAAPPASPERSASSSVTESSMASSVAEEHGNAGISSASASVCAKEESSFTSASEEFQIDDSFWSETLSMPLDGYDVSMEPGDAFVAPPSADDMDYWLGVFMESGEAQDLPQI

SEQ ID NO: 24758 - protein, 321 aa, Oryza sativa
  Clone ID: TF_OsC1121_1.pep
MGRKPCCSKEGLNRGAWTAMEDDILVSYIAKHGEGKWGALPKRAGLKRCGKSCRLRWLNYLRPGIKRGNISGDEEELILRLHTLLGNRWSLIAGRLPGRTDNEIKNYWNSTLSKRVAMQRTAAATSMPAAATTSSNADAAGAAARRRRSPEPRTVVVSPIRTKALRCNNNSSSGIVVVQQAGACSHGGRPPESGAPGDAAADKVATPQAVQQQQQQELAGAEDDDDLPVPAVCIDLDLDDIELGGLDGFLISPWRGGGHDDGNAAAGAVPNLPMPIGYELGGAGGGGEAGAVDLEALLGQLEAEEDDDGDHHHHHHHHHHQ

SEQ ID NO: 24759 - protein, 219 aa, Oryza sativa
  unsure (1)..(219): unsure at all Xaa locations
  Clone ID: TF_OsC43020_2.pep
MAKSRRIAAAHLTCMEIFNRALDWALERELHTSRRGADDDRQILKLVHAATARGRRSRGRGSTSPPRKGGMESSVPMIMADKKASAFHIRRTGKNIWKKPDRDFSKIPFPMAGVHQGSHPEAGANKHTEVEEEQEDRLRADTRVINMVTVREEIRKGPWTEQEDLXTGLNRTGKSCRLRWVNYLHPGLKRGRMSPHEERLILELHARWGNRDPVNDHWN

SEQ ID NO: 24760 - protein, 78 aa, Oryza sativa
  unsure (1)..(78): unsure at all Xaa locations
  Clone ID: TF_LIB3431-001-P1-K1-G9.pep
HAFGKQATGGGGCGRPSRTTERCFWKATGCDRSIRXRGYPNRMIGLNKTLGYYEGRAPTGTKTDWVMNEVCLCECDTI

SEQ ID NO: 24761 - protein, 172 aa, Oryza sativa
  unsure (1)..(172): unsure at all Xaa locations
  Clone ID: TF_jC-osleLIB3474001h09a1.pep
DRKYPNGSRPTRAAGIWYXKAPGTNKPVAPRGRTLGIKKALVLYAGKAPGGVNTEWIMHESRLANDGRASTGAKKGSLRLHDWVXLCRMYINKNEWDKMQQGKEVKEQASDMGTXQCALGTPTRWGETRTLESEIVDSDPFPELHSFPAFQLAPPPAQAMMVPNIRIDGRRH

SEQ ID NO: 24762 - protein, 136 aa, Oryza sativa
  unsure (1)..(136): unsure at all Xaa locations
  Clone ID: TF_OsC1517_1194.pep
MTWCNSFNDVRAVENNLATAAAVAAAKKQQQQQQVSQHVNLIKTCPSCGHRAQYEQAAAAATIQDLPGLPAGVKFDPTDQELLEHLEGKARPDARXXQPLIDEFIPNIXGENGICXNHSESFQEAKTADSEFFNAV

SEQ ID NO: 24763 - protein, 350 aa, Oryza sativa; identical to SEQ ID NO: 17541
  Clone ID: TF_OsC359885_1.pep

SEQ ID NO: 24764 - protein, 558 aa, Oryza sativa
  Clone ID: TF_OsC342748_1.pep
MATAAESQGLSPGFKFNPSVEQLLCFFLLPYLQHRRLLVDGVVFLDDPASAPPWALLHRHGRGGEDEAYFIGPVPAGDGHGGRRQQQVSRTVTGGGGGKWIKQRTERPRGEEEPVVVFGGETFRWEEFSLNFHADERCRSGSTGWVMHEFAVVPPAGSRVAATHTACRIAFTGHGQKRKRVPDGYVFVDVHVQTAAAAAAVAPPLPMLSSYGEPPHEHFSDDHPPPHSYTYYTQGYQQFLPPAEQSDQEQEYCAPDQQNFQDYHLAAAEQTDQDYFYTEMINQEQDYAYQQQQQHLFHGDFLATSQQFLGQDHEVMFTGLGGGLVVSDNGEHASAAAPATEPPVHDVFLETLVPEPPENAYVDGAGESAMASASSAGGAPLLEQPFATPPQQFLDQEPAPAGLNDGGAMIYNNNGDGEHDAAPAAQPPARYYSGPVPAVDSVFLDKMREYLMADAKGLCRIDAPINNGEHAAAPAPAADDPLAAQHGHGDAPPLPVPPDAAELERVVGHLLREVEDIIKVAAAGGYGGSSDKPLSEFDKAQNQILAKLMAVFNQVAES

SEQ ID NO: 24765 - protein, 282 aa, Oryza sativa; identical to SEQ ID NO: 17430
  Clone ID: TF_OsC330475_1.pep

SEQ ID NO: 24766 - protein, 54 aa, Oryza sativa
  Clone ID: TF_uC-osflcyp108a02b1.pep
SSSAQLASCRSSCSSQAAPFSNHGSLARSDSLGSHVPACPFWMTSYLAPSIFSS

SEQ ID NO: 24767 - protein, 507 aa, Oryza sativa
  Clone ID: TF_OsC49175_1.pep
MKKTLVFHSGRAPKGQRTNWVMHEYRLLDADGTQDLHVVCRIFQKNGSGPQNGAQYGAPYLEEDWEEEDDAIENMPASGAFAEMAAVTDTADESTEEDGNFSLKTNDEPLQTQEYQPEITPVKAQGSNEETNGGGYSCDVFSLDEILQEPENVCKNEEQNAIDDKFTIAELSGYPRQDDGYVGENGPVNWIDPSNGDNTNWPLRAYSTQNHVNGTLSADGFFDTVNGTNSYSGPSDNQNLYLQDDGLTSSHQVGDNMPFYDASSNHKWVDGKDDYLNLNDLLYPPAENQPLFDAGDDLMAYFDATEDDFKFDIMGTEDSNSQLPDMSNFVQKDDNNNKFTLDGISNTALYGASSSGSHGNMYPDTAVPDMPMDDTVDKSFGKRLASMLGSIPAPPAMASEFPPSTGKSVVPLSAVNPSSSIRVTAGIIQLGGITFTGSTEHLQKNGDFNLLLSFTVEGDVSTKSIGFEPDTQMSTTPMVLRSGMYLFFVSAMILMLSYKVGLCIYSR

SEQ ID NO: 24768 - protein, 341 aa, Oryza sativa
  unsure (1)..(341): unsure at all Xaa locations
  Clone ID: TF_OsC277393_1.pep
LRPRVVSXGDKPPPSSSSCGFIIHEADVYSADPADLTRGFAPAVARSSGDEAWYFFSAVRGLKGGRKARTVDDGAGCWHSEAGAKPVLAASSGRRLGHRQSFSFITKDDDGQRVRSGWLMVELSLDVDEEEQLVLSKVYFSPRAPGARKPTTAAAMSRHKRKLSTTDIASPPRRQRRHRVVPSSPPEEPNTSPSPAAAPPDQQEGGDDDPDRGSISWWLRRVFGLTATFTEEESIELNPWLKDILRPFPPPLPPTPPPPCPSPRRKLIDMPEIREFIMRGSYLGGGPAPPRYECDHPAMVMTGGDDQQQLDEQRRDDVGDDRAHYDRVDGQLQFERHYLQL

SEQ ID NO: 24769 - protein, 56 aa, Oryza sativa
  unsure (1)..(56): unsure at all Xaa locations
  Clone ID: TF_LIB4370-024-R1-K1-D2.pep
FLADXSYIFIHGDDTAASIFSHASGFRFQPTDEQLVVDYLQRRTACAAMALLPTSP

SEQ ID NO: 24770 - protein, 948 aa, Oryza sativa
  Clone ID: TF_OsC13359_1.pep
MSATLSSFLLLLFSFLSSLPLQSERKAKQVEGSGRAATGKHDSGVEVDVIASTYYMRARERDAGAEADALREELWSVKAELELAKTKAVAAAAAAGALAEKAQEVYKRGREDVRNTIASYRSALLKMELFSRVLPPLGIAMGDSWSDTEIIMFLAERKTWDPLPQNILVGVDLTMIDPRDSPGTLWFLNWPDNQLCYDDENNVFRKAKNGYWKCVDACRIQTGTSILGVKLCLEFHEGQTPCGTRSGLMMYEYLIEQNDELNLPQAYKSLCRMFLQKDRKIVEDEHISLNLGVHHNFLGSYSQYLAEIQRQNMVMNSQAVSSDKKSIFIRELDERKSKKCSTKITRSSTRLYRQKIPHIWCLRHSVSRKWFRESMFRVIDKLAKLLESVLLDLATVRQKINKGKKRIWKMEGKLEKAQIQHLTDFNNKYGPSIRQSVETAEHNNCALRCLNNYLELMIEEPRFSSIAYVRLDSQVKKLDKENTSAMDLSSSLHQMLQKLNLRVQDEEVWVSQLGSNLQASFRKIMDTSSEIGKLEDEVLQLKVDIAEFAPGEVTSCAVYEMIKTLQIVELFMNNSTRHLKLIDGINSEMREFGSIFNGKVRCLVRFARYQQTIMEKSTQINLFQIINFLGDIRAKVDKMTQMYGLSEVVPIVSNQFIEGSFNADAYAFESLKEHSTDLCFSWRTRKFHNRLILPPVRQQTSGTRSYYATLSSVESLYKREYASYPTILKDKIGQPDEFLVNLSRAQLEDIVEDFYTRHKVKGSKRLNVCLDKMKNEGVISEESYMNPQAQSTERYKIKQYEELNLEIAMRERDKEEVSIVDKKCIGKKKKRRFRKKMRMKEHIFLTKIKKVIESHIMDGKVLIASFRVTTGYFRLLPHQIYKIPEEDPQYELNKKGNPCSHCVVVVGFGIRDGECYLIYLNSYGTSWGHDGFGRIYLDSVRKLFLAQV

SEQ ID NO: 24771 - protein, 137 aa, Oryza sativa
  Clone ID: TF_OsC13359_2.pep
MPLRVLPPLGIAMGDSWSDTEIIMFLAERKTWDPLPQNILVGVDLTMIDPRDSPGTLWFLNWPDNQLCYDDENNVFRKAKNGYWKCVDACRIQTGTSILGVKLCLEFHEGQTPCGTRSGLMMYEYLIEPDDELNLPQ

SEQ ID NO: 24772 - protein, 108 aa, Oryza sativa
  Clone ID: TF_uC-osflM202051g08a1.pep
SIIGSWSDLIWCELFVQLDDWVLCRLYNKKNEWEKMQQGKEVKEEASDMVTSQSHSHTHSWGETRTPESEIVDNDPFPELDSFPAFQPAPPPATAMMVPKKESMDDAT

SEQ ID NO: 24773 - protein, 68 aa, Oryza sativa
  Clone ID: TF_uC-osflcyp108a03b1.pep
MATPGQQLPPGFRFHPTDEELVVQYLRRRALCRPLPADVIEDVHYAGVLDPWDLPGARDGEAYLFSFR

SEQ ID NO: 24774 - protein, 286 aa, Oryza sativa
  Clone ID: TF_OsC114295_1.pep
MANPSPMGCAVGVADGGAHHGGLWNIKEPFKLQNGWLLWAGVGLFGAIISIALVGVAMTYLNGEPPERETDSLVLLLPLIGSSSASTAFLVGITGVLAPILEETVFRGFLMVSLTKWFPTPVCILVSAALFAFAHLTPGQFPQLFILGVALGFSYAQTHNLLTPITIHAFWNSGVILLLTFLQRPIYSSEGTKCISLKKSLVFYKGRAAKGFKTDWMMHEFRLPSLTEPSLSKIPIDKKPAKDIWAICKIFKKPNSMAQRALSHPWGPQSTATTSSQFASGSSSCT

SEQ ID NO: 24775 - protein, 109 aa, Oryza sativa
  unsure (1)..(109): unsure at all Xaa locations
  Clone ID: TF_jC-osleLIB3474001h09b1.pep
MGGRVVIFIQRIVLAATRRKHEAMGMVMRRERYLEAELNLPPGFRLHPTDDXLVEHYLCRMAAVHRLPQPIMGXVDLYXFDSWNLTNRSLYGPREWLFFISRDRKYTTG

SEQ ID NO: 24776 - protein, 86 aa, Oryza sativa
  Clone ID: TF_LIB3434-009-P1-K1-B11.pep
MALREIESTLPPGFRFFPSDEELVCHYLHKKVANERIAQGSTLVEVDLHAREPWELPEVAKLTASEWYFFSFRDRKYATGSRTNRA

SEQ ID NO: 24777 - protein, 678 aa, Oryza sativa; identical to SEQ ID NO: 17477
  Clone ID: TF_OsC33185_2.pep

SEQ ID NO: 24778 - protein, 706 aa, Oryza sativa; identical to SEQ ID NO: 17478
  Clone ID: TF_OsC33185_3.pep

SEQ ID NO: 24779 - protein, 228 aa, Oryza sativa; identical to SEQ ID NO: 17472
  Clone ID: TF_OsC2923_1.pep

SEQ ID NO: 24780 - protein, 506 aa, Oryza sativa
  Clone ID: TF_OsC5734_7.pep
MERRCGTSAPAIEDMSPHSRSTAGKYIAGYIVKKKMHPNGAPLAVPPGFRFHPTDEELLYYYLRKKVAYEAIDLDVIREIDLNKLEPWDLKDRCRIGTGAQEEWYFFSHKDKKYPTGTRTNRATVAGFWKATGRDKAIFLGSGGGTRIGLRKTLVFYTGRAPHGKKTDWIMHEYRLDDDNVDVPEEGWVVCRVFKKKSIHQRGFDQPDMAAAADEDELRYQLLHGAGMSSSPVDQKHVLLQEQLVAHGAHGGGFVVPAFEASMHLPQLASADAAPCGGGGGGHVAFASMNPLDAAGCGSQNMMTMKMAATSGGEMLLMSGGGVDGGRFGAAADWSILDKLLASHQNLDQLFHGKVAGAHQQQQQMAMDAASSLQRLPFHHYLGLEAADLLKSSPLPVSHRPVPDRVPQAHDSSPPHRPAPPWGQAVVASSLRGQAAAAAGTNRLLAQSPHRRHRSNPRRLCRAPLPPRAVTRHIAAAGPSQPTPPPRRPIASSPAAPSSPKIWYDL

SEQ ID NO: 24781 - protein, 301 aa, Oryza sativa; identical to SEQ ID NO: 17476
  Clone ID: TF_OsC225972_1.pep

SEQ ID NO: 24782 - protein, 376 aa, Oryza sativa; identical to SEQ ID NO: 17509
  Clone ID: TF_OsC256659_1.pep

SEQ ID NO: 24783 - protein, 78 aa, Oryza sativa
  Clone ID: TF_uC-osroM202005c08b1.pep
MSGGQDLQLPPGFRFHPTDEELVMHYLCRRCAGLPIAVPIIAEIDLYKFDPWQLPRTIILLLHPPNHHHHQRRRELID

SEQ ID NO: 24784 - protein, 318 aa, Oryza sativa
  Clone ID: TF_OsC1780_1.pep
MEMAAAVGGSGRRDAEAELNLPPGFRFHPTDEELVVHYLCRKVARQPLPVPIIAEVDLYKLDPWDLPEKALFGRKEWYFFTPRDRKYPNGSRPNRAAGRGYWKATGADKPVAPKGSARTVGIKKALVFYSGKAPRGVKTDWIMHEYRLADADRAPGGKKGSQKLDEWVLCRLYNKKNNWEKVKLEQQDVASVAAAAPRNHHHQNGEVMDAAAADTMSDSFQTHDSDIDNASAGLRHGGCGGGGFGDVAPPRNGFVTVKEDNDWFTGLNFDELQPPYMMNLQHMQMQMVNPAAPGHDGGYLQSISSPQMKMWQTILPPF

SEQ ID NO: 24785 - protein, 534 aa, Oryza sativa
  unsure (1)..(534): unsure at all Xaa locations
  Clone ID: TF_OsC311999_1.pep
MAPVSLPPGFRFHPTDEELIIYYLKRKINGRQIELEIIPEVDLYKCEPWDLPEKSFLPSKDLEWYFFSPRDRKYPNGSRTNRATKAGYWKATGKDRKVNSQRRAVGMKKTLVYYRGRAPHGSRTDWVMHEYRLDERECETDTGLQDAYALCRVFKKTAPGPKIIEHYGVVHHHVEQPQWMTSSIDRSPTLDVSCDGRGDDFESSSFSFPTETPMDSMHGGFGMQMSAPHEDGKWMQFLSEDAFNATNPFLTNPVSANFSCLPSKVDVALECARLQHRLTLPPLEVEDFPQDVSLDTKIGILRSNPNEVDILQEFLSVATASQELINGSTSSYPEMWLGASTSSASYVNELSSLVEMGGVGTSNHHESARLQVEIADMEVFKDEKKRVENLRGVKLVNTVFHIRYRLYTDTVLACTNSELXAGEAGHRMTDPTDVGGIDTAPIFSQSQPDDFAAGFDDVNPNASFDLYEKVDVNHRLFVSRVAAAKTFFHRIEPSKKVSFHSNPAATAVSKATEKFHFPVTTKVSGRIMGIALSA

SEQ ID NO: 24786 - protein, 252 aa, Oryza sativa; identical to SEQ ID NO: 17493
  Clone ID: TF_OsC652_3.pep

SEQ ID NO: 24787 - protein, 370 aa, Oryza sativa; identical to SEQ ID NO: 17494
  Clone ID: TF_OsC1517_1609.pep

SEQ ID NO: 24788 - protein, 505 aa, Oryza sativa
  Clone ID: TF_OsC1517_1495.pep
MYTSPTLLALSFALLLLILLFYYSSSLLYSQLATRRRLTHACARSLPDAYESGMNRGHISSSELIDAKLEERRISTAKHCPSCGNKLDCKPDWVGLPAGVKFDPTDQELIEHLEAKVREEGSRSHPLIDEFIPTIEGEDGICYTHPEKLPGVTRDGLSKHFFHRPSKAYTTGTRKRRKIQTECDVQKGETRWHKTGKTRPVMVSGRQKGCKKILVLYTNFGKHRKPEKTNWVMHQYHLGDLEEEKEGELVVCKIFYQTQPRQCSWSSDRGGGAAATASAVTTAAVQQDQQRRRDSGSGSCSSTRDHEVSATSYSTAGYAVAAAVEMQHLKHAADHFSFAPFRKSFEEVGISGDQVHSNQLGRSEQQHAGQEQQPHRPLLATTTAVPATAFLISRPTNPVSNIVPPAMQHASVVLDHDQFHVPAILLHHDKFQQQQQQKLDRRSAGLEELIMGCTSSSTKGVVYTCTFRKLQFLTPKRQNGLTSHTGLLTTRIIMDSSNKAAFDMH

SEQ ID NO: 24789 - protein, 333 aa, Oryza sativa; identical to SEQ ID NO: 17489
  Clone ID: TF_OsC267092_1.pep

SEQ ID NO: 24790 - protein, 346 aa, Oryza sativa; identical to SEQ ID NO: 17491
  Clone ID: TF_OsC153799_2.pep

SEQ ID NO: 24791 - protein, 393 aa, Oryza sativa
  Clone ID: TF_OsC148618_1.pep
MVLSNPAMLPPGFRFHPTDEELIVHYLRNRAASSPCPVSIIADVDIYKFDPWDLPAKANYGDREWYFFSPRDRKYPNGIRPNRAAGSGYWKATGTDKPIHSSGGAATNESVGVKKALVFYKGRPPKGTKTNWIMHEYRLAAADAHAANTYRPMKQGTARVRLDDWVLCRIYKKSSHASPLAVPPLSDHEQDEPCALEENAPLYAPSSSSAASMILQGAAAGAFPSLHAAAAAATQRTAMQKIPSISDLLNEYSLSQLFDDGGAAAAAPLQEMARQPDHHHHQQQQHALFGHPVMNHFIANNSMVQLAHLDPSSSAAASTSAGAVVEPPAVTGKRKRSSDGGEPTIQALPPAAAAGKKPNGSCVGATFQIGSALQGSSLGLSHQMLLHSNMGMN

SEQ ID NO: 24792 - protein, 445 aa, Oryza sativa; identical to SEQ ID NO: 17496
  Clone ID: TF_OsC272662_1.pep

SEQ ID NO: 24793 - protein, 290 aa, Oryza sativa; identical to SEQ ID NO: 17501
  Clone ID: TF_OsC272918_1.pep

SEQ ID NO: 24794 - protein, 240 aa, Oryza sativa; identical to SEQ ID NO: 17500
  Clone ID: TF_OsC24651_1.pep

SEQ ID NO: 24795 - protein, 118 aa, Oryza sativa
  Clone ID: TF_LIB4506-013-R1-K1-B12.pep
SLHRNVLDDEHDYNFLVLVFFSGDLGLGKSLDGAWYVFSPRSRYKERGVRPARGIKTTAVGYWKSNSAEADVVDDDGEVIGRVNSLTLALGHQPRGKATHWRMKEYRIPQFQIPPDAW

SEQ ID NO: 24796 - protein, 143 aa, Oryza sativa
  unsure (1)..(143): unsure at all Xaa locations
  Clone ID: TF_OsC58633_1.pep
MGMENPPLRWPPGFRFSPTDEELVLYFLKRRIATGRPTPYIADVDVYKSHPSHLPERSALRTGDKQWFFFSRMDRKYPNGSRASRTTGEGYWKATGKDRSICNGXGGGTASGRAVGSKKTLVYHHGRAPRGERSDCVMHEYTL

SEQ ID NO: 24797 - protein, 432 aa, Oryza sativa
  Clone ID: TF_OsC83405_3.pep
MEEEKRLERIIKEIDSPISPGGGAALLAEDDDLVFPGFRFHPTDQELVGFYLTRKVEKKPFSIDIIKEIDIYKHDPWDLPKVSHGAVALQGSSSSSSLSTAAAAEKECGYFFCLRGRKYRNSIRPNRVTGSGFWKATGIDKPIYSSSLAAAAAAAGAGDCIGLKKSLVYYRGSAGKGTKTDWMMHEFRLPSSISDSDHLQDASETWTICRIFKRSMTYTKGRAAAAAASMNKRISHELQHIHHHQQQQFYYHEVVHDGHGHHHRRHLQHYAGSASMAAAAANIVDVIDHSSDAETTTRSHSHSQSHLVADIRHRQSPFMLDFHAGTASSSSSTAAGWSEVMSFSRDGGSSSGSSWDELGRIMDISTNSANNNYYFAPPPSPAGAARLLLERASPLPPPPAGAARLLLARTRRSRLTLPAAACFPARAAPRRR

SEQ ID NO: 24798 - protein, 860 aa, Oryza sativa
  unsure (1)..(860): unsure at all Xaa locations
  Clone ID: TF_OsC18626_3.pep
MNPRDPVEEFLNQTIADPDEHSSTTSKAQYDSDTGIIPTEFENHGVMQGEFMDDLSGLENLDFWPDDRNPQLSALYEDTPLLPYDSTDQDVLSMDSGAESLQDLFNSMTVMELKKLPLGFRFHPTDEELVRHYLKGKITGQIRSEADVIPEIDVCKCEPWDLPDKSLIRSDDPEWFFFAPKDRKYPNGSRSNRATEAGYWKATGKDRVIRSKGDKKKQQVIGMKKTLVFHRGRAPKGERTGWIMHEYRTTEPEFESGEQGGYVLYRLFRKQEEKIERPSPDEVDRSGYSPTPSRSTPDNMEPIEDGNTPLNRESPESALHESPIDLPALTEAQAAPITRWLADRTDNATTIEVNVSTIQTRGIMCGAKASPSAGAFPQLIGSQQNIHDNNELXTASRRLMLQLSESLSPDFDASMTRDECEDEEPGIVXLRRTIADPDEHSSTTSKAQYDSDTGIIPTEFENHGVMQGEFMDDLSGLENLDFWPDDRNPQLSALYEDTPLLPYDSTDQDVLSMDSGAESLQDLFNSMDDSNARNNVWGNEPFLQGTGFPMSWPLQPNSAFPNQGTANRRLMLQLSESLSPDFDVSMTRDECEDEEPGIVVTSKYVNEAPEESTAEKDMPSDGDDAEPTGITILRRRHAPTASSFSDGDDAESTGITILRQHQAPNASLLSDGDDAESTGITILRRRQAPTASSASSFTQQGAAVQRVRLQSNLDAAPCSSVDGSSSCIINEGESERTMEKPEIEENAGSTLAEGGTCHEDDQKEHDASAANAKSVLRLRKTAEGSDKENKQEEEEGVLASHMLVATYPSCSAVDTLKERVERKLKKASCKREDGHLLPSGLWAKADFDLLENDFKGWFGL

SEQ ID NO: 24799 - protein, 147 aa, Oryza sativa
  Clone ID: TF_15856347.pep
MHAYVSLDPLERRPPKGTKTSWIMHEYRLAADPLAAAANTYKPSSSSRFRNVSMRLDDWVLCRIYKKSGQASPMMPPSPRYDHDEPSGVLETPTVLRAAMIRTSSSPSPQDPLHLRDSSTSTRSPRIFDGPRDPRATTSACPRVQPS

SEQ ID NO: 24800 - protein, 207 aa, Oryza sativa
  Clone ID: TF_OsC53655_2.pep
MRGSDHHQDVVAAPRGGGGGGDDGQAHDMVMPGFRFHPTEEELIEFYLRRKVEGKRFNIELIAFVDLYRYDPWDLPALASIGDKEWFFYVPRDRKYRNGDRPNRVTPSGYWKATGADRMVKVEGDRPIGLKKTLVFYVGKAPKGLRSSWIMNEYRLPHGDADRYQKVEISLCRVYKRPGIEDNCSAIESRSTRHLAICRLITSSALL

SEQ ID NO: 24801 - protein, 494 aa, Oryza sativa; identical to SEQ ID NO: 17469
  Clone ID: TF_OsC422472_1.pep

SEQ ID NO: 24802 - protein, 225 aa, Oryza sativa
  unsure (1)..(225): unsure at all Xaa locations
  Clone ID: TF_jC-osflLIB3477P002f12a1.pep
VFTKKLLDVYRLXXPAEHELVNYYLKHKLLGDDPRVHVIPVIDLCDEEPWNVPVILASSSAIRFGDPDWFFFSPGDFKYLKSKRFNRTTKCGFWKATGKDRDIRTGDTDNTVIGTKKTLVYYQGRVSXGVKSNWVIHEYHAVTFHENQRTFVXCCLMKKPXKTTEGGTDPLICDEGEPSRSMISDYENQPTAEGIASEGTFTGIEAIFQATPWAENCFSPKQQSL

SEQ ID NO: 24803 - protein, 322 aa, Oryza sativa; identical to SEQ ID NO: 17471
  Clone ID: TF_OsC1781_14.pep

SEQ ID NO: 24804 - protein, 372 aa, Oryza sativa
  Clone ID: TF_OsC1783_2.pep
MSISVNMESCVPPGFRFHPTDEELVGYYLRKKVASQKIDLDVIRDIDLYRIEPWDLQEHCGIGYDEQSEWYFFSYKDRKYPTGTRTNRATMAGFWKATGRDKAVHDKSRLIGMRKTLVFYKGRAPNGQKTDWIMHEYRLETDENAPPQEEGWVVCRAFKKRTAYPARSMVETWDYSLHERNIMSAAAAAAFADPSAAYAQMRRQHRSGRFKQEAELDGAATALLHYSSHLAELPQLESPSAAAAPLQPNPSQLATAGEDDDCKGDNGGRRAKKARAAGDKVATTTDWRALDKFVASQLSPGECGSMEATAEAAAAAVAGVSSPLDHGDDDMAALLFLNSDERDEVDRWTGLLGSGAGASGVDGDLGICVFDK

SEQ ID NO: 24805 - protein, 382 aa, Oryza sativa; identical to SEQ ID NO: 17520
  Clone ID: TF_OsC1517_1611.pep

SEQ ID NO: 24806 - protein, 303 aa, Oryza sativa; identical to SEQ ID NO: 17518
  Clone ID: TF_OsC1781_2.pep

SEQ ID NO: 24807 - protein, 94 aa, Oryza sativa
  Clone ID: TF_uC-osrocyp010a11b1.pep
MHFCLLTNKPNPDPRLRPPARSSPAPKLSFMAAEAAYGGGGGYRMLPQAEMPIGFRFRPTDEELLLYYLRHMAMLGALAAVVRLVVQLFHQHSW

SEQ ID NO: 24808 - protein, 485 aa, Oryza sativa
  unsure (1)..(485): unsure at all Xaa locations
  Clone ID: TF_OsC359887_1.pep
MAAPEDGEDKNFGKNKHGLPIGFYFAPTDQELLAILEAKRLGRPLSRAHDAFFHDIRILDFHPAELYEKYAKDEEKGYFYFFSKREFPTSSKKRPLRVAEGGAWNSSGAVYKVVKSSKSGGGYDVGHKKTLVFHQRFPGDKEAVKTNWAIQEFTRIIGPQNEVPDLAVYRLYKMRKEGRETPADLAADEAAAAAAMNNRGQQASAAAMALPPPATGLPGGRMMSMADKANMASTSKAYGPSNVGXAKALPLPAPGLPGVRRMSMADKANMASTSKAYATSQSSSSQLQQGAAAVAAPPNAAGPSNWAPRPCNCRECAPAAGQYGYFASMVPRPSLDRKGKGKAPMDCAEQAGGGGGCHAESTSTPAPPKGAEYYGCSVAVEDDDEELLKFLQAMVRGEEVEGDGDHAMADERGPQQGSSPVAAAAASGSAPAGHDGRRGSLQGGHHGSSSPTSLAAAAATGDDVTSAASAGDDVSGSQQEDHPAR

SEQ ID NO: 24809 - protein, 343 aa, Oryza sativa; identical to SEQ ID NO: 17528
  Clone ID: TF_OsC83405_2.pep

SEQ ID NO: 24810 - protein, 656 aa, Oryza sativa; identical to SEQ ID NO: 17530
  Clone ID: TF_OsC50016_1.pep

SEQ ID NO: 24811 - protein, 886 aa, Oryza sativa; identical to SEQ ID NO: 17532
  Clone ID: TF_OsC359_8224.pep

SEQ ID NO: 24812 - protein, 213 aa, Oryza sativa
  Clone ID: TF_OsC18236_1.pep
MATTRSGVGGAISDPFATPGFRFYPTEEELLGFYLRHRLAGTRPDVERVIPVVDVYGYHPSQLAALAGEASARDTEQWFFFCPRAERELHGGRPARTTPSGYWKATGSPSCVISSATNRVIGVKRTMVFYQGRAPTGTKTRWKMNEYKAVADDADAAAAAMLHQLRNELGVCRVYISTGTLRSFDRRPLDNQRWDTNKAKNQIISSGRLTPAS

SEQ ID NO: 24813 - protein, 488 aa, Oryza sativa
  Clone ID: TF_OsC153799_1.pep
MAVEGFEEAIKCLENLKLESGEASLEQRLPAAACGDHHTAAGAGLPPGFRFHPTDEELLLHYLGSRAAAAPCPAPIIAEVDIYKYNPWELPAMAVFGECEWYFFSPRDRKYPNGVRPNRAAGSGYWKATGTDKPILGNAADETVGVKKALVFYRGRPPKGTKTSWIMHEYRLANAAASSSSSYTSNMKQLASSSSSSSSSASMRLDEWVLCRIYKKKEANQQLQHYIDMMMDDDNDDEHNLQVQQQQQQQAQSHRMPRPPSISDYLLDYSDDLPPSTDQTPSLHLGFTAVNEGNNKRHKTMEEYYSISISTADMLHASSSTSNNKSTQINFSSIFEPQTPAAAGHQLIDEGRWPGGAWRSGPQVQTSDGRKSSGWALSVEAVELWIWGFGAAVVARFGENNGGGHWAPARSEMGSWRDKELGDFVIEMLLSMIKVLVTELLSSWLVTSIVQATWLPYVESTLDVTWQMTAVDVEHGGSDMECARVLAL

SEQ ID NO: 24814 - protein, 451 aa, Oryza sativa
  unsure (1)..(451): unsure at all Xaa locations
  Clone ID: TF_OsC2635_2.pep
MAQTCLPPGFRFHPTDVELVSYYLKRKIMGKKPLIQAISDVELYKFAPWDLPAQSCLQSRDLEWFFFCPRDKKYPNGSRTNRSTPNGYWKTSGKDRTIELNSRIVGSKKTLIFHEGKAPKGNRTDWVMYEYKMEDNQLVSAGFSKDDFVLSQXFSKKSGLGPGIGEQYGAXPFNEEEWEHADAEMFPLLPNVETSVFPLLPSSEVVNSTDDTRVQPSVAARAIEELPVQHLPHVCAGNGSTYQNITVTGESALMELPSQHSVESIGDEVVSVDNCSNVVNNADSPVIEGLVLEELSRFLTDSPHHGNPVGEHSGLPPMSEAEAHAFEVSTNDLYNEIAGLAELGVPNGDGFSPSNAGVTEQQPTYFGVPNSENYVNMDDIFAPDTRLSYAYPLPNNQFWHYPMDQFTYSTTLSAAFPSGDSRPTMRIVDDLPAAANNGGFASKPSMQFPLS

SEQ ID NO: 24815 - protein, 218 aa, Oryza sativa
  Clone ID: TF_OsC168819_1.pep
MAPVGLPPGFRFHPTDEELVNYFPPRKVHGLSIDLDIIPEVDLYKCEPWELEEKSFLPSKDSEWYFFGPRDRKYPNGCRTNRATRAGYWKSTGKDRRINYQNRSIGMKKTLVYYKGRAPQGIRTSWVMHEYRIEESECENAMGIQLQDSYALCRIFKKNVVLGEFDKKGECSSSQAKGNEEVTDFGDAGQSSGANENDKDNSWMQFIAEDLWCTNKLK

SEQ ID NO: 24816 - protein, 571 aa, Oryza sativa; identical to SEQ ID NO: 17512
  Clone ID: TF_OsC371956_1.pep

SEQ ID NO: 24817 - protein, 425 aa, Oryza sativa; identical to SEQ ID NO: 17515
  Clone ID: TF_OsC29141_2.pep

SEQ ID NO: 24818 - protein, 267 aa, Oryza sativa; identical to SEQ ID NO: 17536
  Clone ID: TF_OsC397849_1.pep

SEQ ID NO: 24819 - protein, 316 aa, Oryza sativa; identical to SEQ ID NO: 17537
  Clone ID: TF_OsC43596_1.pep

SEQ ID NO: 24820 - protein, 518 aa, Oryza sativa
  Clone ID: TF_OsC394395_1.pep
MAAAKMAGLTPGFKFEPSDEQLVQFFLLPYLRELPVPLGGLVIRDDPRSVPPWKLFARNGRGDEEDAYFLAPADGEGRQARTCDGGRGRWITQRLERTGNLRLAGGGGSGEAVVFEKHRLNYHAGEGRCGSTGWVMHEYAVVKPAALGARHRACHIAFTGHGQKRKRVPDGYVDVEDDGSKASTNAAAAVPPSSTAAMSACPSNVTYNQGCHISPEQSIEQHFPAEHNNIQIQQQAYYQSQDHEQCQYSDEEKYLLQQIKQEQYYYNQQNCFLPGQGNQELYYNDEQQQIFSLPEHQCSQEQYCHHDDQQDCVLPEQHSQELHGYNNEDQGSLLPPEPIDQEEQALFVGGEPQHEQQPLTSTPRQALLDYDDGKLLPPVGVNGAIAIPPQDAAVASNDDDGGQATEAPAAKMTAEEKKWFMEELLTEGCWSGPLLFDQPYYAAAPTGRYRATLRVALAASATPAPRQAAAARAAAAAPAPLRYCLFATTAVSARKEWIRARKEERIRARREIRRKTLR

SEQ ID NO: 24821 - protein, 145 aa, Oryza sativa
  Clone ID: TF_jC-osleLIB3474012e11b1.pep
MDGLISDDSMMMGGEVRAIESRLPPGFRFHPSDEELVGYYLRNKQQQQQQQTAATSMLVEVDLHACEPWDLPEVAKVGSDEWYFFSWRERKYATGWRMNRASKQGYWKATGKDKPILHPTVAGARKTLVFYSGRAPNGRKTAWVM

SEQ ID NO: 24822 - protein, 249 aa, Oryza sativa; identical to SEQ ID NO: 17543
  Clone ID: TF_OsC393139_1.pep

SEQ ID NO: 24823 - protein, 489 aa, Oryza sativa
  Clone ID: TF_OsC257626_1.pep
MDAVQPSNASINRVHLVYVLVRRLALVGSLVGRGGLRLPAGGAGAAMTGCIVLFMRPGVRTASYIRGTVCSCLRTSWIIDSHRIASKIKNASGSVDASKHKWVSNPTKACPRCNHIIDNSDVVHQWPGLPRGVKFDPTDQELLWHLLAKHGKVGAKAHPFIDEFIPTVEEDDGICYTHPQKLPGVKQDGSVSHFFHRTFKAYNTGIRKRRKINTGDLADVRWHKTGKTRPVVVDGKHLGCKKFMVLYMSTMKGGKPEKTNWVMHQYHLGTGEDEVEGQYVVSKLLFQQQFKPGEKNAQDLTSADALESIVAEDLPNIPPLPLEEHVFTNQELEVLEKSETITDQGKETSEINNEDNAVEDVAHMATEKPEDGDNPSSQDPKWWEGESQFLLDSQQLAENLAICDEFLQSQSQTSCGGGDDETDKIKPRLAVYAQLPVEDLKKDLEECQRLDPSDGTNLELENASEFRLSQIEFSQDSFTTAWAGGKVID

SEQ ID NO: 24824 - protein, 196 aa, Oryza sativa
  Clone ID: TF_OsC18626_1.pep
HAPTASSFSDGDDAESTGITILRQHQAPNASLLSDGDDAESTGITILRRRQAPTASSASSFTQQGAAVQRVRLQSNLDAAPCSSVDGSSSCIINEGESERTMEKPEIEENAGSTLAEGGTCHEDDQKEHDASAANAKSVLRLRKTAEGSDKENKQEEEEGVLASHMLVATYPSCSAVVSQVRDMVTFVYVMFCSII

SEQ ID NO: 24825 - protein, 391 aa, Oryza sativa
  Clone ID: TF_OsC29141_3.pep
MPSSGGAMPALPPGFRFHPTDEELIVHYLMNQAASVKCPVPIIAEVNIYKCNPWDLPGKALFGENEWYFFSPRDRKYPNGARPNRAAGSGYWKATGTDKSILSTPTSDNIGVKKALVFYKGKPPKGVKTDWIMHEYRLTGTSANSTTTTKQRRASSMTMRLDDWVLCRIHKKSNDFNSSDQHDQEPEESTVEQLEDIHDNNSSEQPPAPADMNNQQSDFQPMTAMSMSKSCSLTDLLNTIDCAALSQFLLDGSSDAIAEPPAPPSPLIYTTPHPNYQTLNYNINSNSSMPHAFESRLDHHDGYVNNYNVNGLRRKRMMACSATSFDDGSSSNDFVHAVVKKPQLLPSDSRGSGFGGGYCNQQLSETATGFQFQNGNLLSHPFPLNNHLQMQ

SEQ ID NO: 24826 - protein, 776 aa, Oryza sativa; identical to SEQ ID NO: 17553
  Clone ID: TF_OsC33185_7.pep

SEQ ID NO: 24827 - protein, 1601 aa, Oryza sativa
  Clone ID: TF_OsC12565_1.pep
MRRRRWRRRLAPVFRFYPTEEELICLYLRNKLDGFRDDIERVIPVFDIYSVDPLQLSGTSTRVYLLLPAARRGSGWFYFCPRQEREVRGGRPSQTTPSGYWKAAGTTGVVYSAEPWPRAVGNKDRVEDDEREREGGRWKMRSYRWVFPIAKRQITVLAEKCLPRDTDEDLGGGHVDDMTKLTYLNEPGVLYNLKRRYALNEIYTYTGSILIAVNPFTRLPHLYNEYMMEQYKGVRLGELSPHVFAVADASYRAMVNDSRSQSILVSGESGAGKTETTKFIMQYLTYVGGRAAIDDRTVEQQVLESNPLLEAFGNAKTVRNDNSSRFGKFVEMQFDANGRISGAAIRTYLLERSRVVQINDPERNFHCFYQLCASGKDAELYKLGHPGSFHYLNKSKTYELEGTNNEDEYWKTKRAMDIVGISRNDQDAIFRILAAILHLGNIEFSPGKEIDSSKIKDPTSNFHLQMAAKLFMCDPDLLVSTLCTRAINTLEGAIIKALDCSAAAANRDALAKTVYARLFDWLVENINKSIGQDVDSKVQIGILDIYGFESFKNNSFEQFCINFANEKLQQHFNEKPIGIIALLDEACMFPKSTHETFATKMFRNFSSHHRLEKTKFSETDFTISHYAGKVTYQTESFLEKNRDYIVAEHCNLLSSSRCPLVSGLFGTLPEESLRSSYKFSSVASRFKQQLQALMETLNSTEPHYVRCVKPNSVNQPQIFENQSVLHQLRCGGVLEAVRISLAGYPTRRTYAEFVDRFGVLVPELMLGSYDERALTKGILEKMKLDNFQLGSTKVFLRAGQIAILDMRRAEVLENAARHIQGRFRTFITRKEFVKTREASISIQAYCRGCLARKKYMVKRETAAAIIVQKYVRRWRLHRTYQQAHSAALLIQSCIRGFIARRYFSVIREQKAALVIQSLWRKRKVIILFQQYRQATVKIQCAWRQKLARRELRRLKMAANEAGALREAKNKLEKKLDDLTLRLTLERRLRAAGEEAKSVEILKRDKMIESLSAECAAAKSDAQSEHDKNRLLQRQLDDSLREITMLRGSKIMTAEAEKENSNLKNLVESLSKRNSSLEYELTSARKGSDATMKKLKDVEGKCNHLQQNLDKLQEKLTNMENENHVLRQKALNMSPLNNMPMTTKAFPQKFATPIGLPNGEQKHGYETPPPAKYLASLPQSLTRSRRTRMPVERQEENHEILLRCIKENLGFKDGKPVTACIIYSCLLHWRAFESERTAIFDHVIEAINNVLKGEEADGRLPYWLSNTSSLLCLLQKNLRSNGLFATPSRRSGGPLGIGDKIVQTLRSPSKLMGRSDTLGQVDARYPAILFKQQLTACVEKIFGQLRDNLKKEISPLLSVCIQAPKSSRAQPGKATKSPGIGAQPPSNSHWDNIVKFLDLLMDTLHENYVPSFFIRKLITQLFSFINIQLFNSLLLRRECCTFSNGEYVKAGLSLLEKWITDATDEFAGTSRHELNYIRQAVGFLVIHQKRKKTLEEIRQDLCPNLSVRQIYRICSMYWDDKYNTQGISNEVVSAMREEVNKYTQNLVSNSFLLDDDLSIPFSTEDLSMAIPAIDYADVEFPESLHHYPSVQLLVKHHDPQPV

SEQ ID NO: 24828 - protein, 170 aa, Oryza sativa
  unsure (1)..(170): unsure at all Xaa locations
  Clone ID: TF_OsC135094_1.pep
MSEVSVMAEVEETAAAAPLDLPPGFRFHPTDEEIVSHYLTPKALNHRFSSGVIGDVDLNKCEPWHLPAMAKMGEKEWYFFCHKDRKYPTGTRTNRATESGYWKXATGKDKEIFRGRGILVGMKKTLVFYLGRAPRGEKTGWVMYEFRLEGKLPSQAXRAPAKDQWAVCKV

SEQ ID NO: 24829 - protein, 332 aa, Oryza sativa
  Clone ID: TF_OsC60046_1.pep
MSLISMMEANLPPGFRFHPRDEELVVDYLYHKLSGGGEFYGGVAMVDVDLNKCEPWELPAYFLHNLIIFPARARARAAGRRRREDAARVGATEWYFFSLHDRKYATGQRTNRATRSGYWKATGKDRAIVTRRRAAAGEAVAGGEVVGMRKTLVFYQGRAPRGSKTEWVMHEFRVDGHAVADHPSSSTSSSSSNLLKEDWVLCRVFYKSRTATPRAVVSGEAAVSLSGELSLPPPLPPPVAPAVVDGYTGGGYYEQDSSAGYHHHHHHRPPPSAALPFKDLTDFRDLLSNMAQGGGGGAAAAKTEGFHLGWSEEESSGYVQQSAMASQAWNPF

SEQ ID NO: 24830 - protein, 73 aa, Oryza sativa
  unsure (1)..(73): unsure at all Xaa locations
  Clone ID: TF_2311034.pep
MSGGGEGAAAERQELQLPPGFRFHXTDEELVMHYLSRRCXXLPIXVPIIAEVDLYKFDPWHXPRXAXLYGEKE

SEQ ID NO: 24831 - protein, 366 aa, Oryza sativa
  Clone ID: TF_OsC334673_1.pep
MAEEDDKKQKGPDVTVPSGYFFVPKPEQLIRDYLNHWITGRPIEELRDIVREADVYGSDPATLTEAHRAYGHDGKSWYFLTVAKWKGGRGGAGTAGRLNRGGFEGGGTWHNSQRRRVIEGYGDRQAFEYRAPGNKKTDWLMEEIASNLPAAITDEGIMVICKVYLSPRAKEATADEEERQETNVVPGPKRLREAEATGYDAPAPETPQPDVGCSYSGGGETSQATASMDYCCSTTTHTADDTANAAAYYHGDADAIKPDAYDGGDYGIGFNADGELVLCGNGHGGIGTQGQTPLAMQNTNGEMTLFSPMNGYGVGFNEEVRQEPQVGGEVEMDDFFNDLFVDFDGAGDPNPNPNGGGDSHGHILCE

SEQ ID NO: 24832 - protein, 514 aa, Oryza sativa
  Clone ID: TF_OsC158769_1.pep
PAHGVRDAGGVRDQRVGRLVRPLRRAPRPAGSHRVHGARPPVRGPAGGGDRRRRRQGPWRPRPRVPVDERRRGGVCLSHAAWSLYHRFYARLAVELDVAGIVSVVLPLAPEHRLPAAIDAGHAALLWLRDVACGTSDTIAHHAVERLRDAADFSRVFLIGDSAGGVLVHNVAARAGEAGAEALDPIRLAGGVLLHPGFILPEKSPSELENPPTPFMTQETVDKFVMLALPVGTTSRDHPYTSPAAAVTAAEGAQLPPMLVMVAEEDMLRDAQVEYGEAMARAGKAVETVLNKFPAQCIRVFVSPIRLRNFDLMEKHVEKMLSLGFRFNPSAEDLITFYLPRLIAGKPMKDTEKFICRADVYGSEPSDLAGKFAPVPRCEKGGRFFFTSCKRHKGSSTKKERTAGAGTWVRQNSKEVKNKAGVKVGETQNFRFKKDGSYTDWLMEEHHCCRQQAVAGDEEPVICRMYVSPRAPPDSAARQESAAFVQQQPAPQVSEPPCDKKKRDDVAEEAPAAA

SEQ ID NO: 24833 - protein, 223 aa, Oryza sativa
  Clone ID: TF_OsC16309_1.pep
MANTGLSIPMVNGATIHLLPGFRFRPTDDELVIKYLYPRAFHVPLPCAIITDVDIHHHNPWDIVPVAEREKGKHFFTRKEVKYPGSRRSNRVAGNGFWRAAGSEVPIYYKPEGAANDMLVGMRRTLVFHYGKSRSAERTEWAMHEFQLAGAGLLPHPMMRHATSNGSEPPCGCLEATIAKKSDGLSATLRAKRDSAPLMRIMVEPDSSWVICCIYKKRQRAPP

SEQ ID NO: 24834 - protein, 331 aa, Oryza sativa; identical to SEQ ID NO: 17559
  Clone ID: TF_OsC46776_1.pep

SEQ ID NO: 24835 - protein, 276 aa, Oryza sativa
  Clone ID: TF_OsC1783_3.pep
MHPSGGALSVPPGFRFHPTDEELLYYYLRKKVAYEAIDLDVIREIDLNKLEPWDLKDRCRIGTGPQNEWYFFSHKDKKYPTGTRTNRATTAGFWKATGRDKAIFLANACRIGMRKTLVFYVGRAPHGKKTDWIMHEYRLDQDNVDVQVGGWVVCRVFMKKSYQRGLNPADMAAVDDDDLLHHHHHPFPPAQLHGGAADHKHDGAGGHHHHHLMQPHHHYDDFPSFDPSMQLPQLMSADQPPPPPPSLLPGGTASSLQRLPLQYLGCEAADLLRFSK

SEQ ID NO: 24836 - protein, 375 aa, Oryza sativa
  Clone ID: TF_OsC1783_4.pep
HPSGGALSVPPGFRFHPTDEELLYYYLRKKVAYEAIDLDVIREIDLNKLEPWDLKDRCRIGTGPQNEWYFFSHKDKKYPTGTRTNRATTAGFWKATGRDKAIFLANACRIGMRKTLVFYVGRAPHGKKTDWIMHEYRLDQDNVDVQEDGWVVCRVFMKKSYQRGLNPADMAAVDDDDLLHHHHHPFPPAQLHGGAADHKHDGAGGHHHHHLMQPHHHYDDFPSFDPSMQLPQLMSADQPPPPPPSLLPGVPPSAAAALSSLDVECPQNLMKLTSAAAGGGATGLLHAGGDHRFATAATDWSILDKLLASHQNLDQLFQGRVIAGASSPAAMAAPSHHQHLMDQLAGGGGGTASSLQRLPLQYLGCEAADLLRFSK

SEQ ID NO: 24837 - protein, 66 aa, Oryza sativa
  Clone ID: TF_OsC346533_1.pep
MFRFSQYLTEDRDPSPHHMRTNRATASGYWKATDKDKEIFRSRSVQLLSSGHVLPFSLHPWPRCVI

SEQ ID NO: 24838 - protein, 247 aa, Oryza sativa; identical to SEQ ID NO: 17563
  Clone ID: TF_OsC41958_1.pep

SEQ ID NO: 24839 - protein, 362 aa, Oryza sativa; identical to SEQ ID NO: 17562
  Clone ID: TF_OsC83405_1.pep

SEQ ID NO: 24840 - protein, 160 aa, Oryza sativa
  unsure (1)..(160): unsure at all Xaa locations
  Clone ID: TF_LIB4833-025-R1-N1-F6.pep
MAMTPQLAFSRMPPGFRFQPTDEQLVVDYLQRRTAAQPCVTPDITDIDVYNVDPWQLPAMAMYGSDHDRYFFTMAAREAQARRTTPSGFWKPTGQRKISSXRRGHECPPRQKEFVFYLGHHQPSGSNNNNKTSWIMHEYRLMNSPKSGSAVVFFGESSSH

SEQ ID NO: 24841 - protein, 366 aa, Oryza sativa; identical to SEQ ID NO: 17564
  Clone ID: TF_OsC351524_1.pep

SEQ ID NO: 24842 - protein, 352 aa, Oryza sativa; identical to SEQ ID NO: 17570
  Clone ID: TF_OsC146425_1.pep

SEQ ID NO: 24843 - protein, 421 aa, Oryza sativa; identical to SEQ ID NO: 17556
  Clone ID: TF_OsC359883_1.pep

SEQ ID NO: 24844 - protein, 260 aa, Oryza sativa; identical to SEQ ID NO: 17557
  Clone ID: TF_OsC283445_1.pep

SEQ ID NO: 24845 - protein, 382 aa, Oryza sativa
  unsure (1)..(382): unsure at all Xaa locations
  Clone ID: TF_OsC16321_1.pep
MRLARQQQQVVVAATMEHDVHHHRQMMQQQQQQEMDLPPGFRFHPTDEELITHYLLRKAADPAGFAARAVGEADLNKCEPWDLPSRATMGEKEWYFFCVKDRKYPTGLRTNRATESGYWKATGKDREIFRGKALVGMKKTLVFYTGRAXPRGGKTGWVMHEYRIHGKHAAANSKQDQEWVLCRVFKKSLELAPAAAAAVGRRGAGAGTDVGPSSMPMADDVVGLAPCALPPLMDVSGGGGGAGTTSLSATAGAAAAPPPAHVTCFSNALEGQFLDTPYLLPAADPADHLAMSSASPFLEALQMQYVQDAAAAGGAGMVHELLMGGGWYCNKGERERLSGASQDTGLTSSEVNPGEISSSSRXNAWIITTRPSGPIEIFIHHH

SEQ ID NO: 24846 - protein, 325 aa, Oryza sativa
  unsure (1)..(325): unsure at all Xaa locations
  Clone ID: TF_OsC10665_1.pep
MGEQQQQVERQPDLPPGFRFHPTDEEIITFYLAPKVVDSRGFCVAAIGEVDLNKCEPWDLPGKAKMNGEKEWYFYCQKDRKYPTGMRTNRATEAGYWKATGKDKEIFRNHHMLIGMKKTLVFYKGRAPKGDKTNWVMHEYRLADASPPQPPPPPSSAEPPRQDDWAVCRIFHKSSGIKKPVQVPMQMPMQMQMPVAHQVPAANYQQQMAMASASIIQVPMQMQMPSMSDQLQMLDDFSTGSLMAPPPPPPSYSTLPGFPLQINGGAXQQFVGNPSMYYQQQQQQQQQQMDMAAXGGFVVXEPSSLVVSPHRCCPIHIYIGMRELN

SEQ ID NO: 24847 - protein, 129 aa, Oryza sativa
  unsure (1)..(129): unsure at all Xaa locations
  Clone ID: TF_LIB4833-006-R1-N1-G8.pep
MAMYGSDHDRHFFTMAVREAQATRTRPWVCCEPTSPETTMFLDAAGAMVPVRVHTVLISTQHDETVTNDEIAADLKEHVIKPVIPDKYLDEKTIFHLNPSGRFVIGGPHGDAGLTXRKIIIDTYGGWGA

SEQ ID NO: 24848 - protein, 441 aa, Oryza sativa
  Clone ID: TF_OsC1783_1.pep
MHPSGGALSVPPGFRFHPTDEELLYYYLRKKVAYEAIDLDVIREIDLNKLEPWDLKDRCRIGTGPQNEWYFFSHKDKMDGSSMSSSSTQQQAQVPPGFRFHPTDEELVDYYLRKKVAARRIDLNVIKDVDLYKIEPWDLQERCRINGGSAAEEQNEWYFFSHKDKKYPTGTRTNRATAAGFWKATGRDKPIYATKQHSLLVGMRKTLVYYRGRAPNGHKSDWIMHEYRLETTETAPPQEEGWVVCRVFKKRLPTTRRDSDHDAPCGSWYVDEDAPGAFMSPMMITRSSILRPHQHHAGITLQEQHLHTTYKHRDLTTKIQQLQVPAAGHHLLNTMPHDLESSTSSFHSLLVSPDHHQINMHHAQADPFFDDMHAVDQATTTDWRVLDKFVASQLSNDATNKPADHYTDEGDILQVSDKQQEVAAADYASTSTSSSQIDPWK

SEQ ID NO: 24849 - protein, 288 aa, Oryza sativa; identical to SEQ ID NO: 17580
  Clone ID: TF_OsC408353_1.pep

SEQ ID NO: 24850 - protein, 59 aa, Oryza sativa
  Clone ID: TF_LIB3432-002-P1-K1-B11.pep
MAVEVAVAWPSIEVGQDLPGFRFHPTEEELLDFYLFRGVLGKKVHFYIIGTLNILRHYS

SEQ ID NO: 24851 - protein, 329 aa, Oryza sativa
  Clone ID: TF_OsC315862_1.pep
MGTMTLPPGFRFHPTDDELVGYYLKRKVDSLKIELEVIPVIDLYKFEPWELPEKSFLPKRDLEWFFFCPRDRKYPNGSRTNRATSTGYWKATGKDRKIACAGEVFGLRKTLVFYKGRAPGGERTDWVMHEYRLCQDLAHGVSNFIGAYALCRVIKRHEAGLHGEPPAAKAKGMISKVSSSSSLVTVEHQLSSRGNASPSFTPTNNGSPLVDEMFVGGGGGDPFQLLPSCVPYHGGDACGFDLPPLCMPQTQDPFFSDAGFTQAAPPLYGDVMGSVSEHELKWDTLGGYSGGGGGELWNAAAAPLLCRQASDGDDLTAWFTAADDNMSVF

SEQ ID NO: 24852 - protein, 161 aa, Oryza sativa
  Clone ID: TF_OsC46432_1.pep
MERAAAAAPVVVRHGGVVLPPGFRFHPTDEELVVQYLRRKAFGLPLPAAVIPDLHNLFKLDPWDIPGASSDGDKYFFAVRPPAARGRRQHVTASGGCWKPAGGRDKPVVVARLSGSSLVALANGRDERSKQMHGSCKVKKRRRSSSCSFSSVSIFNCIELA

SEQ ID NO: 24853 - protein, 178 aa, Oryza sativa
  unsure (1)..(178): unsure at all Xaa locations
  Clone ID: TF_LIB4371-016-R1-K1-B5.pep
MTVMELKKLPLGFRFHPTDEELVRHYLKGKITGQIRSEADVIPEIDVCKCEPWDLPDKSLIRSDDPEWFFFAPKDRKYPNGSRSNRATEAGYWKATGKXDRVIRSKGDKKKQQVIGMKKTLVFHRXGRAPKGERTGWIMHEYRXTTEPEFESGDRGGXYVLYPAVPKAEEKNERPSPG

SEQ ID NO: 24854 - protein, 307 aa, Oryza sativa; identical to SEQ ID NO: 17481
  Clone ID: TF_OsC189913_1.pep

SEQ ID NO: 24855 - protein, 276 aa, Oryza sativa; identical to SEQ ID NO: 17445
  Clone ID: TF_OsC1779_1.pep

SEQ ID NO: 24856 - protein, 107 aa, Oryza sativa
  Clone ID: TF_LIB4370-037-R1-K1-E1.pep
FCLSFFSFVRWQRSDDEVAEREKGKHFFTRKEVKYPGSRRSNRVAGNGFWRAAGSEVPIYYKPEGAANDMLVGMRRTLVFHYGKSRSAERTEWAMHEFQLLVPGLSS

SEQ ID NO: 24857 - protein, 489 aa, Oryza sativa
  Clone ID: TF_OsC1784_1.pep
MESLRDMVLPPGFGFHPKDTELISHYLKKKIHGQKIEYEIIPEVDIYKHEPWDLPAKCDVPTQDNKWHFFAARDRKYPNGSRSNRATVAGYWKSTGKDRAIKMGKQTIGTKKTLVFHEGRPPTGRRTEWIMHEYYIDERECQACPDMKDAYVLCRITKRNDWIPGNGNELDNSDPHPEPYDAPPSVISTEQLNPAAEPVVGVEAAPVTVAEPDGVTTSAITANIPSPSDDINLDDWLNELFDPFFDPEQSLASADLSPDEQNVESSNVGALAPKVEQDYSSPNENVVDDTEYLLPEDVYNILHPGTDDFNMLQNPLDQYPIQYATDVWSGIQKEELWSPQANAEPSQSNEAADNGIIRRYRSMKTPETSVPQFKGKTQAKMRVGINKMATSSSESINQTIKFENSGRLVEHQKNQAHDVASTKRSDAGKPSTELSSNRGFLRGIRNAFAGCSDARWNMILVAGFAIGVAVVALHIGQRLGLSQRDQQHT

SEQ ID NO: 24858 - protein, 373 aa, Oryza sativa
  Clone ID: TF_OsC152847_1.pep
MERCSVLGLGGGGGGGGRLDGELPPGFRFHPTDEELITYYLLRKVVDGSFNGRAIAEIDLNKCEPWELPEKAKMGEKEWYFYSLRDRKYPTGLRTNRATGAGYWKATGKDREIRSARTGALVGMKKTLVFYRGRAPKGQKTQWVMHEYRLDGTYAYHFLSSSTRDEWVIARIFTKPGVFPVVRKGRLGISGGGGDTSCFSDSTSASVGGGGGTSASSALRAPLAEASLFAAAAAPAVDGADSSNYGGGGGAGSATATANLVTGLELVPCFSTTAHMDASFGTGQYNPAPLAVEPPPPPPAFFPSLRSLQENLQLPLFLSGGMQAGVSSQPLSGGGAFHWQSGMDVKVEGAVGRAPPQMAVGPGQLDGAFAWGF

SEQ ID NO: 24859 - protein, 176 aa, Oryza sativa
  Clone ID: TF_LIB4833-008-R1-N1-D7.pep
MASPGVCINLVNGTSTRLPTNADLVVHYLHRRAIQEPVPCDFITNVDILQHNPWDIVPAEEKTNGKYFFIHEENERLGNHHSNRAAGDGFWRPVGSEVPIYHKRSGGADEALVGMKRTLVFHYGNSSSAKRTEWVMQEFRLAGATLIPCPVTRPATGDGSMLPCHRTGTTIATENN

SEQ ID NO: 24860 - protein, 588 aa, Oryza sativa
  Clone ID: TF_OsC1252_4.pep
MTPRASNLTGVEIYSPVEMKWKERSGTAKTAKMAKRRGGWENDATRMAAGEQERQASQVLGEGARRHPGLDPDLRLRGSEDVVQEDCRRRRRHRRDARSSGLPRLAATAKPTSSPPPRASAGCACGSSSAAAVARRSSSSASTERRLTPPPCSSLASTERRLTPPPCSPRRPPPPPCSSSSASTKRRLTPPPPSSPPVSRRRRPARCPREKKREREKRKGEKRGKKEEADLDRLTWSIQARMSSDGASGSIGMKHDDGDHRPSTGASSRRCPSCGHDPDCNKPFDMVGMPAGVRFDPTDQELIEHLEAKVKDGGSTSHPLIDEFIHTIQGEDGICYTHPENLPGVTRDGLSKHFFHRSAKAYPTGTRKRRKVLADQQPDDHPQASKGRNVAAAETRWHKTGKTREITVRGQPKGCKKILVLYTSFGKKRKAEKTSWVMHQYHLGELDDEKEGELILSKVFYQTQTRSAAAAEAPVSSGAAMEVQGQQQQVLKLQADDGHFSSAPTKKRLHQDVVAQVKVDRGHHCMPAQRQVNFNLKVTPVPTTSSFPVVVDKQLEELQFISPKKQIGLTSAGLLTTKINMDNFLDSQ

SEQ ID NO: 24861 - protein, 90 aa, Oryza sativa
  Clone ID: TF_LIB3477-009-P1-K1-E12.pep
MVTSKEFARDQAAMDQKIKSDVGEVVLAGDEEEDGDVVLPGFRFHPTDEELVTFYLRRKVARKSLSIEIIKEMDIYKHDPWDLPSKCIPN

SEQ ID NO: 24862 - protein, 331 aa, Oryza sativa; identical to SEQ ID NO: 17455
  Clone ID: TF_OsC136542_1.pep

SEQ ID NO: 24863 - protein, 292 aa, Oryza sativa
  Clone ID: TF_OsC84764_1.pep
MEQPGSRSTAAGGEVEVEQLPGFRFHPTEEELLEFYLKQVVQGKKLKFDIIPTVHLYRHDPRELPGLARIGEREWYFFVPRDRKQATGGGGGGRPSRTTERGFWKATGSDRAIRCAADPKRLIGLKKTLVYYEGRAPRGTKTDWVMNEYRLPDAAAIPDTMQLQMQHDDMVLCKVYRKAVSLKELEQRVAMEELARSTTSSGTHNTGSPLQQDSSSISISSSSDAMKKEVVGVDEASAAAHELVRPATLSLPQLEVARPQSGLEWMQEPFLTQLRSPWMETWSPYYASVLNF

SEQ ID NO: 24864 - protein, 118 aa, Oryza sativa
  unsure (1)..(118): unsure at all Xaa locations
  Clone ID: TF_uC-osrocyp010e10b1.pep
MSLISMMEANLPPGFRFHPRDEELVVDYLYHKLSGGGEFYGGVAMVDVDLNKCEPWELPDAARVGATEWYFFSLHDRKYATGQRTNRXTRSGYWKATGKDRAIVTXLRAVGGEVVGMR

SEQ ID NO: 24865 - protein, 260 aa, Oryza sativa
  unsure (1)..(260): unsure at all Xaa locations
  Clone ID: TF_OsC12565_4.pep
MADGGGRRAPGFRFYPMEAEEELICFYLRNKLDGLRDDIERVIPVFDVYSVDPLQLSEIHHEMLGXGGGEEGEPWFYFCPRQEREARGGXRPSRTTPSGSWKAAGTPGVVYSADRRPIGMKKTMVFYRGRAPSGTKTAWKMNEYRAFHYPDASSASASSAGAAAPPNHLPPQLRSEFSLCRLYTRSGGIRQFDRRPLAGGGDENPGPSMAAAAASPEENDGSGSSMQQLELMDQGGAVDPDWDQWDDLATLTALLYWPRD

SEQ ID NO: 24866 - protein, 316 aa, Oryza sativa
  Clone ID: TF_OsC24159_1.pep
MGMGMRRERDAEAELNLPPGFRFHPTDDELVEHYLCRKAAGQRLPVPIIAEVDLYKFDPWDLPERALFGAREWYFFTPRDRKYPNGSRPNRAAGNGYWKATGADKPVAPRGRTLGIKKALVFYAGKAPRGVKTDWIMHEYRLADAGRAAAGAKKGSLRLDDWVLCRLYNKKNEWEKMQQGKEVKEEASDMVTSQSHSHTHSWGETRTPESEIVDNDPFPELDSFPAFQPAPPPATAMMVPKKESMDDATAAAAAAATIPRNNSSLFVDLSYDDIQGMYSGLDMLPPGDDFYSSLFASPRVKGTTPRAGAGMGMVPF

SEQ ID NO: 24867 - protein, 316 aa, Oryza sativa; identical to SEQ ID NO: 17458
  Clone ID: TF_OsC397708_1.pep

SEQ ID NO: 24868 - protein, 537 aa, Oryza sativa
  unsure (1)..(537): unsure at all Xaa locations
  Clone ID: TF_OsC344389_1.pep
MAELPPEGRGGGGNNNGKWKGKEKVVPEHGKNRHGMPVGCYFVPKDXLELFAILRCKLVRGQLPGALNNVFEHIRILEFHPALLHETYIENEEDGYIYFFSRRQFATKAGNKRRPTRVAKGGTWKASGGSKTVRSKKVGGIDVGQKLTMVFYERRFEGDRNPIKTNWGMHEFTKIIDGSKNQLPGSPXDLAVYRLYKIKRKEDEEPSNTAAAASSTDEPSTSSALPPPTPPRPLPDMAGPSSATPLLPLQLPGLAGSSSAMSLPALQLPGMAGSSSAMPLPPLSLPGLAGGMMSMADQANMASTSQASTPSSELLQDWYDEFEITYGAVAPPSPSTISWVAPQSSPTGWWPSPNGGPVQHDGYLGMAADPTSYMLENLLPTAAIPPEPMMPPTSSPAPPPAVDHHHRLSPPHDAAGSNYNHPELADYNGGVQAQHEHQYHPQEPQASLVDAEDGYSAMAGGDDAQLGGAELDTERIAEMVNHIMDGEFEFKFEDNTVLKYNEVFPDNDEVVAAPMMIDGGRDGDGADGGDGDDPFDN

SEQ ID NO: 24869 - protein, 204 aa, Oryza sativa; identical to SEQ ID NO: 17460
  Clone ID: TF_OsC604_13.pep

SEQ ID NO: 24870 - protein, 568 aa, Oryza sativa
  unsure (1)..(568): unsure at all Xaa locations
  Clone ID: TF_OsC345355_1.pep
MAAADGLLPGLKFDPSDHDLVGRYLLRRLQGQPLPLDGVILEADPLSAPPWKLLADHGRGDEAFFFAEAHAKNGKGKRQKRTVEGGGFWQGQPTCVDGERLCVPDDGVGSGGGGGGLQIAWRKYVLSFFANGERGXSSGWVMHEYPVTAPDGLASSQLRLYRVRFSGYGKKRKREPQCPGAHGDDDGELQCAPPPRPMAETALLEERGPLPHPVLGPASVVDQCTDQGSSGVIDDSSLVFRDLPDLIDLPVAEEADASHGAETALLNEHLPLPPPQLFVPPTAVPLDLADDSNGADQNSYGMMGDDQLLLPDLPGTINDDMPDLFVSQAEEASAVPAISYHSSGFMGNEVAALSDFELPESYSSSDAMDGEALALSNYEFPESFEEDLSCIDFATANASSLGFPMDGYPMDELFDDMPDQGSSGAMDDSSVVFRDLPGLINLPAAEEADAIGDAETALLRDLADDSNGTDRNSYGVMGDDQDRLLLPEIPRRIDMPDLFVSQAEEAGLGGGAALDSSSGAMDGEALALSDFEFPESVEEVLSCMDFSTVDMSFLDVPIDELLDDLPAD

SEQ ID NO: 24871 - protein, 329 aa, Oryza sativa; identical to SEQ ID NO: 17463
  Clone ID: TF_OsC1781_9.pep

SEQ ID NO: 24872 - protein, 155 aa, Oryza sativa
  Clone ID: TF_uC-osflcyp044b03b1.pep
MECGGALQLPPGFRFHPTDDELVMYYLCRKCGGLPLAAPVIAEVDLYKFNPWDLPERAMGGEKEWYFFSPRDRKYPNGQRPNRAAGTGYWKATGADKPVGSPRAVAIKKALVFYAGKPPKGVKTNWIMHEYRLADVDRSVAARKLSKSSHNALRL

SEQ ID NO: 24873 - protein, 308 aa, Oryza sativa
  Clone ID: TF_OsC1783_5.pep
SISVNGQSCVPPGFRFHPTEEELLNYYLRKKVASEQIDLDVIRDVDLNKLEPWDIQERCKIGSGPQNDWYFFSHKDKKYPTGTRTNRATAAGFWKATGRDKAIYNAVHRIGMRKTLVFYKGRAPHGQKSDWIMHEYRLDDPATDTAAATPTVTSAAAAAAAMAAAADGGQEDGWVVCRVFKKKHHHKEAGGGGGKHGGDGSAGAKAAHAYSSSDDALDQILQYMGRSCKQEHELPSPQASGGAGAGAGSRPASRYLPPMYPSLRASGFGNRSLFRRPRGGSAAIGYSSVLPDNNIVYILYVVSGSSAD

SEQ ID NO: 24874 - protein, 334 aa, Oryza sativa; identical to SEQ ID NO: 17466
  Clone ID: TF_OsC228106_1.pep

SEQ ID NO: 24875 - protein, 683 aa, Oryza sativa; identical to SEQ ID NO: 17470
  Clone ID: TF_OsC1713_5122.pep

SEQ ID NO: 24876 - protein, 252 aa, Oryza sativa
  Clone ID: TF_OsC8585_1.pep
MTAPADKGKKAKTDADGGAAEENEQIDGALVLSIEKLQEIQDELEKVNEEASDKVLEVEQKYSEIRRPVYLRRSDVIQTIPDFWLTAFLSHPLLSELLTEEDQKMFKYLESVDVDDSKDVKSGYSITLTFSENPYFEDKELTKTYAFADDGTTTINATSIKWKEGMEIANGNAKKKGSKRPLVEESFFTWFTDTEHKSLADGVQDEVAEIIKEDLWPNPLKYFNNEAEELGEDDDEEGSDADEGEEDEEEEN

SEQ ID NO: 24877 - protein, 351 aa, Oryza sativa
  Clone ID: TF_OsC8302_1.pep
MGGDKENLDLSDLNASLPAAAAALSAEDRAGLVNALKDKLQSLAGQHTDVLEALSPNVRKRVEYLREIQGQHDEIELKFFEERAALEAKYQKLYEPLYTKRYNIVNRKLLRCYGWQCNKSCLLYFVDAVFCVELPRKLLVGCARVSFRCLVYVTRGFIGGSCEACLGTSILEYYYVLVICNRFIKRKQLGLKIEWYPGKNLTQKILKKKPKKGSKNAKPITKTEVCESFFNFFSPPQVPDDDEDIDEDTADELQGQMEHDYDIGTTIRDKIIPHAVSWFTGEAVQAEDFDDMEDDEEDDEDDDEDEEEEEEDEDEDEDDEEEKSKPKKKSAGKPKYFALNCPGNYWLVVHG

SEQ ID NO: 24878 - protein, 259 aa, Oryza sativa
  Clone ID: TF_OsC18074_1.pep
MAAAEQKGKKPRTDGAEAEPVDAALLQSIEKLQEIQDEIERVNEEACDKVLELEQKYNEVRRPVYVRRNKIIKQIPDFWLTAFLSHPMLGELLTEDDQKIFKHLESIDVDDSEDIKSGYSITLTFSPNPYFEDTKLTKTYSFSDDEAVKVKATSIRWKKGMDIANDRAYTKKGDKRILIDESFFTWFNSEKNRSFAHGAMDEVADVIKEDLWPNPLKYFNNEFEEELELLDDDDEVSDDDDEEEDDEDQGEGEEDGEEN

SEQ ID NO: 24879 - protein, 364 aa, Oryza sativa; identical to SEQ ID NO: 17582
  Clone ID: TF_OsC26576_1.pep

SEQ ID NO: 24880 - protein, 1058 aa, Oryza sativa
  unsure (1)..(1058): unsure at all Xaa locations
  Clone ID: TF_OsC1542_1.pep
MDGGTGPGAELLSPGEAEWPPELRLPPPPPPHPPPPPPLEPAPPSTPQLRGEASPPPPPPPPVGPPGAAVVAAAARKEASASAEGFDDSHFLGSIMGAPAHQHQHQHQQPPAVGPPVVVKRKRGRPPKNRDGAAPPPPPKPVKKREDDEDVVCFICFDGGNLVVCDKXGLLEDLIDDNGTFSDKITGAFVRIRTPCVGQKQDIYRLVKVLGTHKVAERYSVGKKTTDHALEILNLDKKEVITMDTISNQDFTEEECKRLRQSMKCGLITRLKVVLLIKIHYTGDIHEKAKIFQLLRVNDXSCNFWALLKKEHASLMKIQKYMLTHNHRQNCSATSHHTTTSPPTEGMTHGQGEEASFASSEIVSGDMEPEKVWHYKDPSGSVQGPFTLLQLSKWAAYFPHQLVLMMSGPLEATLVNGTIVRIVVEGSHWSSTADSITHDGLQLSLASAKPESCSAVNPIRDGDSSSASRVPNQSGAHVYSPPHPATTNLSKSEETMNQCKSCEPEASNKSRKPDASHAPVNQHPKPESDPLLPDTQDFERTHPSPSTEHDTKEPLKDQSRSTSVAPEGSGTMAHGQSSIAFISEASGPLSSKIVGLQPPKDTSFLVEKDIKDGGSITQTEQQKEESTAFKKENVAVDPISDSEAIVSGVLESLTETYNLHEETALENFTPTSAEEEQPQCSTPIALSPWDETSDYQGEAVDSALWGVQDDQNNEMWSLSSPTPTLQPSGIGADTKGASCAIEEVIVAQGNSGVVEPSPALEKKRIEKVPSASIDRGVPEQVKPKSDAALSPEESRKPSGLQLSSTYLQGSTKSSGLPPSGTSLDGGIEPSGLLPSGTSLEWGTKISGVQSSASSLEGSKKAFVRQPSGSSLEGNTKASEKLQHGNHQVLRLLQGAQKHQVGSHHLARARNLSLIPHGVPAKAATRLRTNQQHQQLNTHQKPQGDKETTTQILLAGETLSETRAGIHPQAMRAAEAAILATTMTGTIRAANHGVVAQIIPGDQIIVKNMATVARRDHRRRGGNLKGGSVDTTRMATAGRALPASSSTVENALTFLYSPK

SEQ ID NO: 24881 - protein, 143 aa, Oryza sativa
  Clone ID: TF_OsC10655_1.pep
MADLVSSCKDKLAYFRIKELKDILNQLGLPKQGKKQDLIDRVLALLTDEQGQRHHGWGRKNSLTKEAVAKIVDDTYRKMQIQCAPDLATRSHSGSDFSFRPIEEAYDSFPPEAKVRCICSSTMVNDSMIQCEDQRCQVWQHLK

SEQ ID NO: 24882 - protein, 1774 aa, Oryza sativa; identical to SEQ ID NO: 17666
  Clone ID: TF_OsC31430_1.pep

SEQ ID NO: 24883 - protein, 1777 aa, Oryza sativa; identical to SEQ ID NO: 17590
  Clone ID: TF_OsC13528_1.pep

SEQ ID NO: 24884 - protein, 405 aa, Oryza sativa
  Clone ID: TF_OsC15358_2.pep
MGEPPPAGEGSGMMMPAKRRRERVLPSRFKDSVLVLPTAAAKKGKPAEAAAEGGVVDGELYDVELEEGDPGMLWTGDERPVQTEEELYWACRNIRRSSTSTSGSFSSSIFSGSSAVTSLSNAGGGGGNGRPEGKPTVVVECKPKSDGGERKEDFYWPEEFVLGDVVWARSGKKCPAWPALVIDPLLHAPRVVLNSCIPGALCVMFFGYSNSGLRDYGWVKQGLIFPFVEYLDRFKGQTLYKIKASRFREAIEEAFLAERGLFELETDEGCSLEKSVNDQSIPDGLLEGSGSNNEQECQSEAQVVGKSPGCDICGNRLPCKIASKKKQAGERLLCRHCDKLLQSKQYCGICKKIWHHTDGGNWVCCDECQIWVHVECDQTCIKMEDLENADYFCPDCKSKRKNISS

SEQ ID NO: 24885 - protein, 74 aa, Oryza sativa
  Clone ID: TF_uC-osflM202123g09a1.pep
SACGSTDRGEVMLICGNEDGSTGCGVGMHIDCCDPPLEAVPEHDWLCPQCEMPKATKKSASRVASKSRVSKRKR

SEQ ID NO: 24886 - protein, 478 aa, Oryza sativa
  Clone ID: TF_OsC10999_1.pep
MNTAAPGILPTSRNAPVRKVAECDVLSAKQESVPVAVPAKQEVHSPKQESIPKFNTGSSRVSQLISVQQANDSSPNSKVSADANIGSFDLAKFSKKNALPCDICMRSETVLNRIFVCSSCKAAVHLDCYRSVTNPTGPWKCELCQEMPSDVVAGSQSDCDGSKPCLLQCDLCHGTSGAFRKTIKGRCIHAFCAEWLLESTFTRGQYNAVDGMESLPKDKDTCAICHRNVGSCLKCSTVDCQITFHPTCARDAGFYMDTKTIGSTLEHKAYCGKHGIEQRKADLLQLHGPGEVKNMKQMRVDLEVLRLICERVVKREKLKKDLVVCGHDTLAARRNSIAYSTRTSYCGSGPGASSESATTSVNNSYSGLMQRTDDVAVDSIISRKPTVRFSLNNSDADRNTADSSTSSISYKQKLDDRESLADKNLPKKPATAMQISEEGETKSSDKKNQRPPKSIVYTRRSALSKKRQLSQNVEGPGG

SEQ ID NO: 24887 - protein, 687 aa, Oryza sativa; identical to SEQ ID NO: 17592
  Clone ID: TF_OsC305349_1.pep

SEQ ID NO: 24888 - protein, 256 aa, Oryza sativa; identical to SEQ ID NO: 17595
  Clone ID: TF_OsC349609_1.pep

SEQ ID NO: 24889 - protein, 774 aa, Oryza sativa
  Clone ID: TF_OsC17337_1.pep
MPDLPCDGDGVCMVCRVASPPEVDLLRCSTCATPWHSPCLSKPPALADAAQWSCPDCSGDSTDAPPPAPAPLAPGSAGQLVAAIRAIECDATLSDQEKARRRQELLGGAAPAGADADDDEGDDVLEVIGKNFSCAFCMKLPERPVTVSTLAGPFPHCFQKWIHSGKRTCGKCRAQIPAKMAEQPRINSALVSVIRMAKVSKNANSAVSAAAYHYIRNDDRPDKAFTTERAKRAGKANASSGQIFVTIPPDHFGPILAENDPKRSIGVLVGDTWEDRLECRQWGAHFPHVAGIAGQSTHGAQSVALSGGYVDDEDHGEWFLYTGSGGRDLSGNKRTNKEQSSDQKFEKLNAALRISCLKGYPVRVVRSHKEKRSSYAPEAGVRYDGVYRIEKCWRKISVQGKFKVCSDIYGDRPRPLPKVDELKGATDISERKGTPSWDFDEKEGWKWVKPPPISRKPNLSGDPATDKEIRRVARRAQMSVTERLLKEFGCSICKQVMKEPLTTPCAHNFCKLCLVGTYGSQSSMRERSRGGRTLRAQKIVKKCPSCPTDICDFLENPQINREMMDLIESLQRKAVEEGDTKTSSDVSNGAESSGDDGNNEALEKGEDDSSLKDDGSLKDDGKVVKAVVVIKEEDLQPKKSKGEDEKEQGDKKMDSADVVDIAVEKKQATKRASEKAEKKQARKRKGDAVATNDGKRMKTGGDAMETAAEEDAPLSGGTPVKRNSRKSSEVDAKGGGGSPVVSSPRRVTRSNAKASGEADGSPATRTRRATRAEA

SEQ ID NO: 24890 - protein, 821 aa, Oryza sativa; identical to SEQ ID NO: 17596
  Clone ID: TF_OsC297803_1.pep

SEQ ID NO: 24891 - protein, 1563 aa, Oryza sativa; identical to SEQ ID NO: 17598
  Clone ID: TF_OsC18633_1.pep

SEQ ID NO: 24892 - protein, 230 aa, Oryza sativa
  Clone ID: TF_LIB4371-013-R1-K1-G11.pep
LVLGGDDGKECTYGGGYLKRQAVFSCLTCVPAGVAGVCTACSLACHDGHEVVELWTKRKFRCDCGNSKFGSHVCKLCPEKDPENPVNSYNHNFKGSYCTCGRPYPDPEAEKQVEMIQCCICEDWFHEDHIGLNSIEEIPRDEEGEPLYEDFICPKCSPKCYFLKLYPDTIWASNKQSSAPQAETTNSTVMNGNSSLGDIEKSENGALINHLNCEKTSDNENCPKDSVAPD

SEQ ID NO: 24893 - protein, 477 aa, Oryza sativa
  Clone ID: TF_OsC3201_1.pep
MAGEGSGGEGGAGAFEDEAEPTVTIGEYIEGIEAEELEADLVLGGDDGKECTYGGGYLKRQAVFSCLTCVPAGVAGVCTACSLACHDGHELGLVSMFIWVRRMSATRVILGVALAVAKLSIAIFCIKYLYDWVMRTQLMLGWFFLLKVVELWTKRKFRCDCGNSKFGSHVCKLCPEKDPENPVNSYNHNFKGSYCTCGRPYPDPEAEKQVEMIQCCICEDWFHEDHIGLNSIEEIPRDEEGEPLYEDFICPKCSPKCYFLKLYPDTIWASNKQSSAPQAETTNSTVMNGNSSLGDIEKSENGALINHLNCEKTSDNENCPKDSVAPEKASLDDSSDGKCKLGMNICSNTPSADSEKKMPFFMSKSWREVICRCETCTDFYAQQGVAYLIDKEDSIEEYEKVAKQKREKKLEQQEGVEANFLNSLDHVQKIEILSGINDMKNELQSFLETFDSSKPVTSEDIRAVFENLAKKKKQRLS

SEQ ID NO: 24894 - protein, 751 aa, Oryza sativa
  unsure (1)..(751): unsure at all Xaa locations
  Clone ID: TF_OsC340224_1.pep
MSSSAAPARKENGTVAAPAASSAAASNTFHVLNSGSAAAAVAAGRAYVQSPRATALRSPQVRAITNYGMFPTTGASAARTAMAGRTINGGASMLTTTTTTTTPPHLIQQLMVLAGWTTRSPWLQNHASMSPRGSPSSFSSGRFSDPRGMPSTFAYRTPGASSGRVIDNGAVAGRGKQMAGTSRSLEIIAVDTGAGSSKNASPAGGHANAGVVVKRLAPVLAMPSAGAAGKGKEEAAAAAAAPSPNGRGRKRAPPKVSNVPAAGXSDKKPRKRAKKAAAAGSKVTVPADVIIVDDDVNQPSSNTDAQSNADDDLKKAAVASPAATRSKTRSKCKTSSNSAAASPSARSSAIAARKKNNATATGTTATPPPPEAKKHTVLTWLIDTGFLKDKAKVFYVPGDAGAAEKVISGMVTKTGIRCRCCNTVVPVAVFETHARCERPGQPWEKLLLMSGKPLSKCMQEAWAQERVTAMRAREKAMASLEQEKEKSSQAKRKLAKTKKMQLLDGVVVVSTSSPRHQVKKNGGGKDCSDDACGVCADGGQLLCCDTCPSTFHPDCLAIXTTVAPDGSWSCHFCRSSVLPFHGRKLAEMPFAGTLPAYQKQGMMRRLVKAVEKVLASLQVENLVIPAVADLVETWKRSFSFRPMQAEVRDEAKKLSLVAITGTTLLQKPISAHQQQPVPSRKGSSSSRSKRASAPATVTGSSKEEEEQMTTTAARLTDDELAFLEMAPLCSFTDLLAGGVYPTGLQLLRGMK

SEQ ID NO: 24895 - protein, 64 aa, Oryza sativa
  Clone ID: TF_OsC3802_4.pep
MVQCEGCKDWFHPSCMGMTIEQAKKLDHFLCADCVKENGTKRPSNSYPASSNSDSKVEPKKRKR

SEQ ID NO: 24896 - protein, 1125 aa, Oryza sativa
  Clone ID: TF_OsC359_8462.pep
MEASAGLVAGSHNRNELVVIRRDGDPGPKPLRQQNGQVCQICGDDVGLNPDGEPFVACNECAFPVCRDCYEYERREGTQNCPQCKTRFKRLRGKSHPQCRIGCARVPGDEEEDGVDDLENEFNWRDRNDSQYVAESMLHAHMSYGRGGVDVNGVPQPFQPNPNVPLLTDGQMVDDIPPEQHALVPSFMGGGGKRIHPLPYADPNLPESAKGSCATVQPRSMDPSKDLAAYGYGSVAWKERMESWKQKQERLHQMRNDGGGKDWDGDGDDGDLPLIFSPVELLYHFGWTKMDEARQPLSRKVPIPSSQINPYRMVIIIRLVVLGFFFHYRVMHPVPDAFALWLISVICEIWFAMSWILDQFPKWFPIERETYLDRLTLRFDKEGQTSQLAPIDFFVSTVDPLKEPPLVTANTVLSILAVDYPVDKVSCYVSDDGAAMLTFEALSETSEFAKKWVPFCKKYSIEPRAPEWYFQQKIDYLKDKVAPYFVRERRAMKREYEEFKVRINALVAKAQKVPEEGWTMQDGTPWPGNNVRDHPGMIQVFLGQSGGHDIEGNELPRLVYVSREKRPGYNHHKKAGAMNALVRVSAVLSNAPYLLNLDCDHYINNSKAIREAMCFMMDPLVGKKVCYVQFPQRFDGIDRHDRYANRNVVFFDINMKGLDGIQGPIYVGTGCVFRRQALYGYDAPKTKKPPSRTCNCWPKWCCCCCCGNRHTKKKTTKPKTEKKKRSFFKRAENQSPAYALGEIEEGAPGAENEKAGIVNQQKLEKKFGQSSVFVASTLLENGGTLKSASPASLLKEAIHVISCGYEDKTDWGKEIGWIYGSVTEDILTGFKMHCHGWRSIYCIPKLPAFKGSAPLNLSDRLHQVLRWALGSVEIFFSNHCPLWYGYGGGLKCLERFSYINSIVYPFTSIPLLAYCTLPAICLLTGKFITPELTNVASLWFMSLFICIFATGILEMRWSGVGIDDWWRNEQFWVIGGVSSHLFALFQGLLKVIAGIDTSFTVTSKGGDDEEFSELYTFKWTTLLIPPTTLLLLNFIGVVAGVSNAINNGYESWGPLFGKLFFAFWVIVHLYPFLKGLVGRQNRTPTIVIVWSILLASIFSLLWVRIDPFLAKNDGPLLEECGLDCN

SEQ ID NO: 24897 - protein, 1574 aa, Oryza sativa; identical to SEQ ID NO: 17606
  Clone ID: TF_OsC187381_1.pep

SEQ ID NO: 24898 - protein, 1076 aa, Oryza sativa
  Clone ID: TF_OsC1163_1.pep
MAANAGMVAGSRNRNEFVMIRPDGDAPPPAKPGKSVNGQVCQICGDTVGVSATGDVFVACNECAFPVCRPCYEYERKEGNQCCPQCKTRYKRHKGSPRVQGDEEEEDVDDLDNEFNYKHGNGKGPEWQIQRQGEDVDLSSSSRHEQHRIPRLTSGQQISGEIPDASPDRHSIRSGTSSYVDPSVPVPVRIVDPSKDLNSYGINSVDWQERVASWRNKQDKNMMQVANKYPEARGGDMEGTGSNGEDIQMVDDARLPLSRIVPIPSNQLNLYRIVIILRLIILMFFFQYRVTHPVRDAYGLWLVSVICEIWFALSWLLDQFPKWYPINRETYLDRLALRYDREGEPSQLAPIDVFVSTVDPLKEPPLITANTVLSILAVDYPVDKVSCYVSDDGSAMLTFEALSETAEFARKWVPFCKKHNIEPRAPEFYFAQKIDYLKDKIQPSFVKERRAMKREYEEFKVRINALVAKAQKVPEEGWTMADGTAWPGNNPRDHPGMIQVFLGHSGGLDTDGNELPRLVYVSREKRPGFQHHKKAGAMNALIRVSAVLTNGAYLLNVDCDHYFNSSKALREAMCFMMDPALGRKTCYVQFPQRFDGIDLHDRYANRNIVFFDINMKGLDGIQGPVYVGTGCCFNRQALYGYDPVLTEADLEPNIVVKSCCGGRKKKSKSYMDSKNRMMKRTESSAPIFNMEDIEEGIEGYEDERSVLMSQKRLEKRFGQSPIFIASTFMTQGGIPPSTNPASLLKEAIHVISCGYEDKTEWGKEIGWIYGSVTEDILTGFKMHARGWISIYCMPPRPCFKGSAPINLSDRLNQVLRWALGSVEILLSRHCPIWYGYNGRLKLLERLAYINTIVYPITSIPLIAYCVLPAICLLTNKFIIPEISNYAGMFFILLFASIFATGILELRWSGVGIEDWWRNEQFWVIGGTSAHLFAVFQGLLKVLAGIDTNFTVTSKASDEDGDFAELYVFKWTSLLIPPTTVLVINLVGMVAGISYAINSGYQSWGPLFGKLFFSIWVILHLYPFLKGLMGRQNRTPTIVIVWSILLASIFSLLWVKIDPFISPTQKAVALGQCGVNC

SEQ ID NO: 24899 - protein, 1076 aa, Oryza sativa
  unsure (1)..(1076): unsure at all Xaa locations
  Clone ID: TF_OsC71795_1.pep
MAKTLQGTQQQYAASGFPTQQYPTSGWTQSAAEILQLDNMDQDTSVVRNIIHRKIVEYLNERKEFCNFDLSFLMEIGKCIDRHLFEKADSKIKYMDLETLRTRLNAIVNSASFRGRYNQYENCMGAANFAHSLADKPKQMPERLANTIFTSCASTLPKCSPSIDVLHIGHIKEHFSGDAYQNDSSQPSTSGSSSSLSAVWDQTTCSSAMRTLPMDSFSTVNGQNLSTNNKSLYPTTGQGPLLQQYIECEMKQETWSRSLEQSDQSNITTGNRDLYHAQIHPYINGEHKRDRCIQMKEKLGHTSDHEGFSREKSSNLSNHFMHHQQGFMTNYGACSPVSKTVDRAEQTSNSTVSKPTSPASDGSSGKHYPAKRLKVDVPHLVHVNEMEASKEQQPAANETYASAETVQSEVTNSPTKSPCCTSLGDNIACTDNVHGMDMVRLSGSAVQTEEEFRRENSDIEMKDAKVDLLDQTLSGDSLRARKRRGASVLYALTSEELKDHLCTLNHDTSQSKVPTEELLSVEGLPDQNTCNLCGMERLLFEPPPRFCALCFKIINSTGSYYVEVENGNDKSSICGRCHHLSSAKAKYQKRFSYAETDAEAEWWVQCDKCKAWQHQICALFNPKIVDPEAEYTCAKCFLKEKDNEDVDSLEPSTILGARELPRTRLSDHIEQRLSERLVQERQQRAIASGKSVDEVPGVEGLTVRVVSSADRTLQVQPRFKDFFKKEQYPGEFPYKSKAILLFQKNEGVDVCLFAMYVQEYGSACPSPNQRHVYLAYIDSVKYFRPEIKSASGEALRTFVYHEILIGYLDFCKKRGFVSCSIWTCPSTKRDDYVLYCHPTIQKMPKSDKLRSWYQNLVKKAVKEGVVVERNTLYDFFLQPTNECKTNISAAWLPYCDNDFWPGEAERLLEKKDDDTSQKKETQLGRLLRVAKRDDRKGNLEDILLVHKQFCKHCHHPIVSGSSWVCTSCKNFFLCERCYAEELNTPLKDRHPATTKQKHAFERDYLEGLVHASRCFDRSCTSKLCLTLXNCSSMVYDVIPVPVVEEVAICVYSCGNCCSRTHCFVTMQTVQLPDAGI

SEQ ID NO: 24900 - protein, 1026 aa, Oryza sativa
  unsure (1)..(1026): unsure at all Xaa locations
  Clone ID: TF_OsC48275_1.pep
TSSLKGQRDKQYHAQARWLLFLFHAKSCTSPPGSCKSSYCDRVRELVVHLTDCQIKDCSYRHCRESKMVSDHYKNCINEHCHVCCKAKEMLRRSSELAHKQNPAEPILITQHNMNQRSADRVHGDRMDIDQAVETFDDQPPAAKRPKLQLVSPDASENVPVCQKNPGFMLQEAHPRQLDQNKKMVPDQEVDVGLDIRHPQVTLVSCHGSDEKIGAAQNTVIPGALNKIHCHVQQETVVADKESVTVVDVKKKTGSVDVTISKTGKPKVKGVSLMELFTPEQIHEHINSLRQWIGQSKAKXAEKNQVIGYSESESLCQLCKVENLTFEPRPIYCSPCGARIKQNASYYTGSTAMGRLFFCISCYNASLGNTIEVELIKLSKADLEKKRNSDEPEEGWVQCDKCECWQHQICALFNARRNDVEEAEYTCFKCYIEEFKRGLRMPLPESVVRGAKDLPRTLLSDHIEERLFKRLREERQERANKLKTSLDEVPGADGLVVRVVSSVDKKLEVKPHFFKILQEDNYPAEFPYKSKAILLFQKIEGVEVCLFGMYVQEYGAECKFPNQRRVYLSYLDSVKYFRPDIETVSGQALRTYVYHEILIGYLEYYKQRGFTSCYIWACPPVKGEDYILYCHPEIQKTPKSDKLRQWYLSMLQKAIKENIVVELTNLYDQFFVTAKECKIKVSAARLPYFDGDYWPGAAEDIINQLQLEGDGKLLKKGRVNKIITKRALKAAGHTDLSGNASKEAMLMQKLGEIICPIKDDLIMVHLQYSCSHCCTFMVSGRRWVCNECKSFYICDRCYNAEQRLEEKERHPSNSKCLHILHPVEIVGVSEDTKDRDIILENEIFDTRQAFLSFCQGYHYQYDTLRRAKHSTMMMLYHLHNPTGPAFVATCNVCNCDIENGQGWYCKDCPDFDMCASCYQKHXGANHHHKLTNHPSSAECNVQNKGAWQKHVLQVRVWLELALHASSCHVRNCQYPNCRKLKGLFHHGAQCKIRLTKGCKQCARMWYIIRLHSQSCRQSDCAVPRCR

SEQ ID NO: 24901 - protein, 234 aa, Oryza sativa
  unsure (1)..(234): unsure at all Xaa locations
  Clone ID: TF_LIB4309-026-R1-K1-A8.pep
VYNLFLQCDKCRMMVHARCYGELEPLNGVLWLCNLCRPEAPRVSPRCCLCPVTGGAMKPTTDGRWAHLACAIWIPETCLKDVKRMEPIDGLSRINKDRWKLLCSICGVAYGACIQCSHPTCRVAYHPLCARAADLCVELEDDDKIHLMLLDEDEDPCIRLLSYCKKHRQPSTERPSLESNLAKPAVVVQTDAVPPSGCARTEPXYIHGRRGQKQPQVMATASXKRLYVENMPYI

SEQ ID NO: 24902 - protein, 708 aa, Oryza sativa; identical to SEQ ID NO: 17615
  Clone ID: TF_OsC29983_1.pep

SEQ ID NO: 24903 - protein, 1623 aa, Oryza sativa; identical to SEQ ID NO: 17616
  Clone ID: TF_OsC94386_1.pep

SEQ ID NO: 24904 - protein, 682 aa, Oryza sativa
  unsure (1)..(682): unsure at all Xaa locations
  Clone ID: TF_OsC48959_1.pep
VLPILNTWCRYNYQPPPGKPNHTCGGADRWADVVSTDDTSNSSSSSPSASTSTSKMELKMSKKISFSRIPRNLKDLLATGLLEGHPVKYIMRKGKVVSPYYFEVHAGSTKKHPSDYIFLENGNNLHDILRACSDATLDMLQSAIQNAIGPAPKKRTFRCQTCKSELSSCCTGKFALLCDSCLESKGSQNSXPGKLCHSSTFCQRQKIWRTSKIGRNPTSSARRSKNESPGSKYCNSSARGSKNAFPGVKTTSTGRITRKDKGLHKLAFMSGVLPEGTDVGYYVGGKVSPSQFEAHAGRAARRKPYHNIYMSNGVSLHELSVSLSKGRNMSNRQSDDLCSICSDGECVGFTTIPRGTWCCRYCENRQQRESSLAYNHNAIAAGRIDGIDPMEQIFTRSIRIATTPVTGFGGCALLCRLHDFSKKKFSARTVLLCDQCGREFHIGCLKEHNMADLTALPEGAWYCTADCVRISETLKDLLSRGAEPISSVDVEIIKRKYEQKALNKDGDLDVRWRVLKDKSSADSKLVLSKAVAIFHESFDPIIQIATGRDLIPAMVYGRSVRDQDYTGMHCAVLTVGNTVVSAGLFRVMGSEIAELPLVATSRDSQGLGYFQALFGCIERLLASLKVKHFVLPAADEAESIWTQRFGFVKITQDELREYLKGGRTTVFQGTSTLHKLVPKLDG

SEQ ID NO: 24905 - protein, 42 aa, Oryza sativa
  Clone ID: TF_jC-osflLIB3477P005f01b1.pep
FCICCDICETWFHVKCVRISPARMERIKHFKCPGCSNKSTRE

SEQ ID NO: 24906 - protein, 1350 aa, Oryza sativa; identical to SEQ ID NO: 17620
  Clone ID: TF_OsC4410_1.pep

SEQ ID NO: 24907 - protein, 256 aa, Oryza sativa; identical to SEQ ID NO: 17632
  Clone ID: TF_OsC134975_1.pep

SEQ ID NO: 24908 - protein, 1238 aa, Oryza sativa
  unsure (1)..(1238): unsure at all Xaa locations
  Clone ID: TF_OsC463_6.pep
MAKPLRSTVLVCASAAMAPTSAPRLPTSAPPISPASSRKPKPNRARAGTLCRSSSRAERHRGGRTSTRWAAVAAEGGGEAMRRWVDRRLRDSFPVDTVEEMTTLALQCVAKDAAAQPEMSWPRGSPPRCPSSSCPEPQRQEFGGGNPLRRLPLVSPPPRPADFPPRPGGAVLDSAVRGLPRAQGVDVQPEESHIRRGVEIRVSLYSPPMKGGRLHRLERPPAAHITTAAAATTPAPAPADDWGDGSWTVDCSCGITYDDGEEMVSCDECNVWVHTRXKRAPSSADEAEVAELLAELXPTHRPRPLYRRWAEVPLPSRVHVHGLPGGTDTALFRSAAPSPVFSSALWRCAGYVPKRFGFRYCEFPYWADDKDGANALFALAREKRKEKAETRFPLRLGAIHKDKNYVRTLSICGDKVDGVEHSVDDDAKRTSPPSDAKKRGTSISIVEPDTWDNGCEKKRDFDVPASEDQHAKTNMVNSDLHVLVEAKKKRASSSERSGDKKCSASKEITGMLKKYEPKESKRLVISSGVATTAAVAEQEVHSRFVKLYPPHLSAPGGGEMHGSELHLPMGGGAEWQSHQQTLAWRRCKPGVHQGSVYEGLDGNQNVGLQTGVRSNGVVKRDDAKRSNGDVQSDAAPEKMNEGLDLQKQSNQTSNLLVVGGVPDLQTNQSESLTIKKEASTDDHERTEAIQFVSDEHKSGKQDTAMLSTLQRHSSKLASDLVYQHPKSETQNPMHTIPEHPNSSLGNVKVCTASSGPNSTTFDLSCSLLSTEPSSEETTVRLVKKDQTRLVSSADSENDFAKKSESSQDRTRSSDKVQLKGFVPSAPKSSQGSRTYVSSAKNRFIVPKEQLQKTSTEGNAPPGSLQGEVAPLHSRNKAMPLSFYQRKDKIHHRSIHITQDTSNSSASAELQSTETTASLSDEQLALLLHQQLNSSPRVPRVPRCHQASTMQMLHPTGASVFSKRSSAHGGRDQALVLKKRNKDDAWRDNDETKKTGKVSSVERRHRDSSTERVLAAKDSCKFTENIESEQRNRGICSTGATSGVGNDAPIDRGVSHDLPGLIEEIISKNTNITYGELCNAIRQHWGDLSKPNVENNAYPNYLHAVNDCLRNRNDWAHLVDQAAMMNPNKRRKVEESDSLSADVLATEKTNKEAKRGPEDTNAESHHEILPRGKRKARKCRRLELKGRRVNDTRKRSSFDSASDDDDTTLSDSSSDRNDTPMDKSLEDSFVIAKNADSSS

SEQ ID NO: 24909 - protein, 1990 aa, Oryza sativa; identical to SEQ ID NO: 17623
  Clone ID: TF_OsC158862_1.pep

SEQ ID NO: 24910 - protein, 1478 aa, Oryza sativa; identical to SEQ ID NO: 17636
  Clone ID: TF_OsC11584_1.pep

SEQ ID NO: 24911 - protein, 973 aa, Oryza sativa
  Clone ID: TF_OsC85093_1.pep
MIFKRNQRSEILSLRRCNAGGGAGVGEDDGDGGERRPKRRRGDEFFPVELLGDVPVAGIPYAAFGFRWCEEAEVASPAAASRAAAAAAAASRPPVVRTSRGRAQVLPSRFNDSVLIDPWKKDKPAKPPVPAKAVQLVPKSEVLYRKGAIADRSLTMSELDENGDDDYEEGHNFVASRKYSMSLSTVTSVHGEPYSYYHRKGLMKRQYDDDDDDDDDDDDDDDDEDEEAEEEEEEEEEEEEELSYWRNDFVYGDIVWARLGKRQPVWPGVVVDPAQPAAAQALPPQPRSGAVLCVMLFGWAAEFGDEKKFIWVRQGGIFPFVDYMDRFQGQTELSSCKPGDFQRALEEAFLADQGFFEVPMDGNTTGQPARYKRALQCESCGNCFPNKDPSMMVYVMEQLACRQCAKILRSKEYCGVCLKSWQHKCGGRWKSSKPDKVAVICFGMEGTYLRDLELISCHCGPCKGQKFLFNEWERHAGCRSKNWKSSIKIKDTLMPFGKWIEQHQSSSYSTNPAKRSSQKMKKQKLLDLLSEPYDTVNVKWTTERCAVCRWVEDWDYNKIVICNRCQIAVHQECYGVRGKQDFTSWVCRACETPDQKRECCLCPVKGGALKPTNVDNLWVHVTCAWFQPQVAFASDELMEPAIGILNITPLLFMKMCVICRQIHGSCTQCYRCSTYYHAICASRAGYRMEIRCLEKNGKQTTNKISYCAHHRAPNPDNVLIIQTPAGTISSKKLVQSNGTVAASRLIRKDLPKDSVSEVEISENLSAARCRFYVKKELKRSREGAIAHRVRGSCQHRWDEIDSLNPPREERDPESFSTFKERLHYLQKTEHTRVCFGRSGIHRWGLFARRGIQEGEMVLEYRGEQVRRSVADLREEQYRVQGKDWYLFKISEEVVVDATDKRYLALLIGQSCTPNFHARLMSVGHDLSRIVLITKKNVSAGEELTYDYLFDPDEADDRKVPCLCQTANCRKFMN

SEQ ID NO: 24912 - protein, 1696 aa, Oryza sativa
  Clone ID: TF_OsC12404_1.pep
MEGLVGRAVRKEFPGFGVFDGVVESYDAEAGYFRVMYEDGDSEEVELGEVVGLLVGGSPVGVEMAHPLPLTPGRRPKKRRRGDEEGGVGVGAVVAMEVDSVVLAVPAGGAEPASPVVVVEGSSRDEVDGDVVSEMAEKRRRVVSPGPESSGKPLRRSARQAKAAARVAEMEAAAAVAAAAEAEAAAAAMAEAEAEAAVTPPQSGSKRKRASGAGRYRSVAKDLEKAAVERLPPKPELPPSSQSLDLEGLPALDVFQVYSCLRSFSRQLFLSPFLLETFVAALRCIYVNPLIDWVHFSLLRAMKSHLEDLANEGDPPAMHCIRNLNWELLDLATWPIYLAEYLLTRGSELRYGMKLTDLKLLNTEYYTQPAMVKLELLRALCDDVLEIEAIRSEVVSRMSELDGNDELCKSTRTRRKRRASAVKNLLNSSRAPEDSSDTEDGNSDECYLCGMDGNLLCCDGCPAAFHSKCVGVVEDLLPEGNWFCPECLIQKNDGFKNMVKPGRGAEVLGMDPHDRLYFGTCGYILVVESTAEDSLDSTCHYYGIFDHHSLFNVLRTCHPSYSSITNMISLFWGTAIDSFDSNGRCENNKEFSIFDAKIDCSHLLPSKQHTEHEQLKSDKNGSCEQLACGKAHASDPDRLDHDTSHHKFSLRSAVISENGNATSAKTQQDVCSYANGLPAENKIDQSPHKKISDCYIHSNPAMYVNYYSFGQIAASAAEELKDKLSENKEGKKVGQDAASFQLKTICKKYANIFALTDQKLSVELRKEKCGWCNSCQISGGVDCIFRVTDGKCMEGLQSEKNMNSHIILAIHIILSIEERLNGLLIGPWKNPQFSSYWRKAVLKASDVSSLKQPLLMLECPVRRVAFSVEWQKPADSVEVVGSAAHVLVRTSNKSSRHGSTRKPGRKPFIVELKVDSRDVGVYWRRGGRLSRQVFHWKRLPKSLTYKAVRQAGRIKIPTILYSDGSQFARRSKYIAWQAAVEMAENVAQFILQIKELEFNIRWTEILSTLPASLATKETQKIARLFKKVIVRRKRVDGTNVEYLLDFGKRENIPPVIAKHGKKLDEPSNERNRYWLSEGHLPLSLLKAYEAKALTRLLKKKDIDHLPKKMIDLKPPKPKKSGFDDLLEKAKKQVLGLCGHCDKEVKISDAVNCQYCEALFHKKHFKVPRGATDAYYVCNKCLSEKVLNVKSPQKKVVSKKNSLKKKTKKQSLKIVTRSKQIVAKSKKKMGKNKGKRGRPRKYPLNESKNKLPELRVKEPANVPKNEPAKRISKRLYSKYMKGNSNISERSAKRRRTASHYSYWLDGLRWTQNPNDDRAISFRTERVVFPCEDADLSEVFPVCRLCQKCYSGESIYIACEDCGDWFHGDIYSITLENVNNLIGFKCHRCRLKDVPVCPYVQTDNILMAQSDKDDVTSRSIEDKEDRSPTDLVAHDSLEGSHGHIIEKEVNDHSFEKEVGDHICLQAQEDHNEKELDSHSTEKELGDHNKTEEFDGNMKVLFNLNSTKELDSTSTEKELGDHNKIEEFDVNMEMFFNLNNTKELDSTGESICAGGEAHCLHELNNHEILKECHSLDNNLGELDNQDCQKECHNQNSLKELENHRSSQELDSHKSPEELDNIISPKELDCTENNEHSAAVTQSDGFLDDPFNIRISDKGLIIASENGKIKESIPLQTKNKPEENPVPADHDIDLQVVVTL

SEQ ID NO: 24913 - protein, 716 aa, Oryza sativa
  unsure (1)..(716): unsure at all Xaa locations
  Clone ID: TF_OsC54697_1.pep
MVVNSRPLKRARTRVEARDFAGFPQAVDGGAARTFRXAVRGFLARYARLLPLPSIFSPAAAAAPPHLLTWRVSLRVGEEGDEEGGGGAVELNVVEEDVLRSRSVYCDQCRVVGWSGHPVCGKRYHFIIENDNNQVCGKRHSCCLRCGTPTVAGESRCLLCNFDMDGEELEECGYMHLDDNTHLLHAVVHANGYGHLLRVNGREGGSRCLTGRDIMSFWDRLCKVLHVRKVTVMDISKKHGMEYRLLHAITSGHPWYGEWGYKFGAGSFALTSDTYQEAVDTLSGIQLALYFSHRQPIRTPLQNTIALYWALSDRQLVTVRDLFRFIMHLLHQARKKNETSKPTTDEHKEVASNVLCKWTKEDIDRAETAMLKVLRVVQPGQWVSWRALRGAASKAVDSQELLDYSLRGLGGKLMDDGHFIAVRCNAETSAIEYRLEDNSNQSVDAAAFGPSVDHLLHDLKFLYNALLNPETMLASQPEVIGASSHSAAAKILDCKQFIKHYDQHTPRAPLNPFLLSVRCSIELLDHPKDYTAPPVELVLLPASATLAELKIQATRAFQETYLMFQSYQVEQLPDFPNFSDTTLVKHVLGSSQLVRVRGRCTGDNRRIVQFRMERGLENWTVDCTCGAKDDDGERMLACDVCGVWQHTRCSGISDFDDVPEKFICRKCASPRRGKGRGGGGGNGGSRMDVSAAGRCKDEIGSSVGGAGKFGRMATVG

SEQ ID NO: 24914 - protein, 144 aa, Oryza sativa
  Clone ID: TF_uC-osflM202003g05b1.pep
MHLMFQSFQVEQLPDFPNFSDTTLVKHVLGSSQLVRVRGRCTGDNRRIVQFRMERGLENWTVDCTCGAKDDDGERMLACDVCGVWQHTRCSGISDFDDVPEKFICRKCASPRRGKGRGGGGGNGGSRMDVSAEACVNLHGILSF

SEQ ID NO: 24915 - protein, 1671 aa, Oryza sativa
  Clone ID: TF_OsC15358_1.pep
MLASRIPLKRCTAAAVVPLPGELEMEEGPTPPAGGGEGSGAAVVPAKRRRERVVPSRFRDSVVSLPLPPAKKGRPAKKAAAREGGDGEVYDVEVRAVEQQGATAAAFGAVETAVWPGDERPAQTEEELYRACRNIRRSSSSSGFSGSVVTSLSNAGGSVAPEGKPVVVVECKPKREGGDKKEDFYWPEDFVLGDVVWARSGKKCPAWPAVVIDPLLHAPAVVLNSCIPGALCVMFFGFSSGGHGRDYGWVKQGLIFPFVDYLDRFKGQALYKLKANRFRQAIEEAFLAERGFCELETDEGCSLEKSVNDQSIPDGLLEGSGSNNEQECQSEAQVVGKSTGCCDSCGNRVPPKIAKKKKQAGEQLLCRHCDKLLQSKQYCGICKKIWHHTDGGNWVCCDECQIWVHVECDLTCINMEDLENADYFCPDCKSKRKTVPPVEQMNTPNSSECASTSKEKLPEMIPVFCFGMDGMYLPKKHMILCQCNSCKERLMSLSEWERHTGSRKKNWKMSVKLKSNGDPLVTLLDDIPCANVKSSTPSINKEELLKLLGTLALEFMLVYAVANSFRPVNARWTTERCAVCRWVEDWDYNKIIICNRCQIAVHQECYGARDVQDFTNWVCRACELPKQKRECCLCPVKGGALKPTDIDQLWVHVTCAWFQPKVSFPVDETMEPAMGILSIPSEYFKKACVICKQMHGACTQCYKCSTYYHAMCASRAGYRMELQYSEKNGRNITRMVSYCAFHSTPDPDNVLIVKTPEGVFSTKFLPQNNEKQSGTRLVRKENLQEKVLPAKISDCPAARCLPYEMLKNKKEPGEAIAHRIMGPRHHSQESIEGLNACMKIENKRVSCGRSGIHGWGLFAAKKIQEGQMVIEYRGDQVRRSVADLREARYHREKKDCYLFKISEDVVVDATEKGNIARLINHSCMPNCYARIMSVGDEKSQIILIAKRDVSAGEELTYDYLFDPDESEDCRFFSAVQFQFQIGREWRCCSHPRVETDLKTLARRFWKVAAPYWWSEDKVQARLRLAAVFALTLATTGISVGFNFLGRDFYNALADKDQEQFTKQLLYYLGGFAVGIPIVYTRIISHITRFSFFVLRDYARETLSLRWRSWMTSYYMKRYFKNRTFYKIQSQSLIDNPDQRINDDLSAFTGTALAFSLTFLNAAVDLISFSNILYGIYPPLFIVLIVYSLGGTGISIFLGKNLVNLNFMQEKKEADFRYGLVRVRENAESIAFYGGEENELQLLLDRFRRAFENLSELLIASRNLEFFTNGYRYLIQILPAAVVAPMYFSGKIEFGVINQSVSAFNHILSDFSLIVFQFQSISAFSAVIDRLGEFDDLLDGNGSSLSKPDNIDGINIIFKSTGPTVLSSNGSPTQSNPSMVLEICNLTLLTPRSGNILITDLTMELKEKDHLLVMGPSGSGKTSLLRALAGLWTSGTGDIIYHVRGSMELQTSNSGPDEPSNIQSNGEELLQSSKQRRDNGIFFVPQRPYMVLGTLRQQLLYPTWTEDVCHSSNNDPQSTDPLTFEVSTSDGVGSKSEMPTTDELIRVLEAVKLGYILPRFNGLDSMHDWASVLSLGEQQRLAFARLLLAKPTLVLLDESTSALDDMNERHLYSQIEAAGITYISIGHRKTLHKFHNKVLYISNSDSTDSNPRNWYLKPTEQMSIEESSSFAS

SEQ ID NO: 24916 - protein, 1027 aa, Oryza sativa
  Clone ID: TF_OsC247488_1.pep
MRKGICTGHITYTGRTRGPITEGKEASSAICRGSAKRENGTTWTMEMDGGDEATSSGTRENLGIPERAARYGASFPCVEEHGETKVGQAGVQAPSREECSPGFKWQWITHYRHSWGSRRVCDCELGFGAAGRGRGGGLAEAAAALEGFLADPWLLRPAAAGEGVGVEEEGGVATVQVEVPPVEAAEEGEEEAGRAAVLRQAAAAEDYARRLEGAAAAGTGLRFMPNGFSVLLTLCFFIWGVDTHDYDVVKLEEGDEEDWGQEDVGNAAVKVMCRICFSGENEGSTKAAKMLPCKLCNKKYHRSCLKNWGEHRDLFHWSSWVCPSCRSCEVCRRPGDPNKLMFCKRCDGAYHCYCQQPSHKNVTHGPYLCPKHTRCHSCGSGVPGSGHSTRWFLGYTCCDACGRLFVKGNYCPVCLKVYRDSEVIPMVCCDVCEKWVHIECDGISEEKYQQFQSDQNLQYTCGACRGECSQIRDTEDAVRELWKRRDVVDHDLMASLRAAAALPSLEDVSPSHPNSDDEKLGAYVMKNDGRNTLKFSFKSNSTKPALDSSEQEKNAIKSSGSNKKHSKKKGNQNNKTVSEQDEIFLEKRNETKSLGSLGDQIADVTRDKSSFKNDADAFVLSSAQSAEKALKLQSAKAAAHNADMIPKVKIKGTKVPSLHFKDVGEENAAKSDTGKGTKLVIHIGSRHKSRSGSPKSEMSNSQKEQELVSMHGGKVDVTSQFKSSRSEIKEKSVMKLVRETGVQQNSLLGDLGASKKHATGKRSNAIVSAMENASESGTRSRSFGQKQSVNHLTENQGNASFSVNNSPDSLKPSLLKLKFKRPIFEQPSTQSSQPEEPGTWASPQEELNVAKGQRSKRKRPSLDKMDGSESKAPAAKRHEQSTGEEAMDANWILRKLGKDAIGKRIEVQLASDGKWHQGVVSNVINGTLCLQLDNGRSENIELGKRAIRLIAQRSHTGKRLTHFAPQAPAFGSSQSLIHGRLGGLKRIGFILTSGSVGTNNWEGFLGATLDVEEMPDDGHVHVAVAAE

SEQ ID NO: 24917 - protein, 197 aa, Oryza sativa
  Clone ID: TF_rsicef_7783.y1.abd.pep
ARGTYVDSSSEESEDQQVKICDICGDVGEEKKLAICSRCNDGAEHIYCMRVMMPEVPEGDWFCEECRTEMQIEKEKSILEKSQVKVSTISVGSKVKAANVSSKDLNVSNTSSKSTKEDAEEGIVPSGCTSTGKEEDGRSCIGGSEAANKNEEQTSSGRNDDFNLKILHGERHMQSHNNDVPFTSVAHDISNMAVKNK

SEQ ID NO: 24918 - protein, 334 aa, Oryza sativa
  unsure (1)..(334): unsure at all Xaa locations
  Clone ID: TF_OsC348_1.pep
MLEEVELPHPPEDVPGEQAVGGGLVAPPRRALHLQRRRHALQPAVQLAAAVPHHVLHVVHLVAEEDAHQVQELGHGPRQLPPHEELDQVGEVVGGVEGDPLDGAVGADEARRHEQRRQRARPDAVXLRCAARSTPCSASSWTDSAAWRWTRWSKSERLISKASAGAAVGDAARVMPTWMRWSASTLRRRRSYRSPAVSRAGCLVGRWITPGNXRVHGHVREVIDRVADDPEFLLHVVRPHPAYLHRRRRLPLPANAGGXRTPTARTPCQAAAAAASSDRRRTTTPAAASSWRRQTLTACLNSKIGWISATNSKRDEQLEFGKIRTELEMRVRPV

SEQ ID NO: 24919 - protein, 267 aa, Oryza sativa
  Clone ID: TF_OsC348_2.pep
MDEGGGAGAAAAAAGNAAGAAVHHNARSAEDVFRDFRARRAGIVKALTTDVEKFYRQCDPEKENLCLYGLPNETWDVTLPAEEVPPELPEPALGINFARDGMIEKDWLSLVAVHSDAWLLSVAFYFGARFGFDKEARRRLFTMINGLPTVYEVVTGIAKKQTKVSNGSSKSNKSNPKPSKQSNSNSKPAKPPQPKDEEDSGPEGAEDEDQAYMCGACGETYANGEFWICCDVCEKWFHGKCVRITPAKAEHIKQYKCPGCSSKRSRE

SEQ ID NO: 24920 - protein, 1442 aa, Oryza sativa; identical to SEQ ID NO: 17642
  Clone ID: TF_OsC11017_1.pep

SEQ ID NO: 24921 - protein, 1146 aa, Oryza sativa; identical to SEQ ID NO: 17647
  Clone ID: TF_OsC86365_1.pep

SEQ ID NO: 24922 - protein, 1988 aa, Oryza sativa; identical to SEQ ID NO: 17644
  Clone ID: TF_OsC296057_1.pep

SEQ ID NO: 24923 - protein, 167 aa, Oryza sativa
  Clone ID: TF_jC-osleLIB3474049f11b1.pep
TKSSEPRAKQPKPQPQPPVKNEGREEEGGPDDEEGGVGGGGGGREEEHGETLCGACGESYGADEFWICCDICEKWFHGKCVKITPAKAEHIKQYKCPSCSAAAGPALGLTKPNAVEPPQVSFAAKDVEFSEWKGDILAIAVTENDLVKGSDSKFENAVLKKLDGQLG

SEQ ID NO: 24924 - protein, 79 aa, Oryza sativa
  unsure (1)..(79): unsure at all Xaa locations
  Clone ID: TF_jC-osroLIB3475012g10b1.pep
APKDQEGXSGDDQGQEKEDVHGNTLCGTCGTNDGKNEFWICCDNCEKWYHGKCVKITPARAEHIKQYKCPDCTNKRARA

SEQ ID NO: 24925 - protein, 367 aa, Oryza sativa
  Clone ID: TF_OsC5969_2.pep
MDAQYNPRTVEEVFRDFKGRRAGLVRALTADVEDFFRQCDPEKENLCLYGFPNEHWEVNLPAEEVPPELPEPALGINFARDGMQEKDWLSMVAVHSDAWLLSVAFYFGARFGFDKNDRKRLFGMINDLPTIFEVVSGKSKAKPPSANNHSNSKSKSSNKTKSSEPRAKQPKPQPQPPVKNEGREEEGGPDDEEGGGGGGGGGREEEHGETLCGACGESYGADEFWICCDICEKWFHGKCVKITPAKAEHIKQYKCPSCSGGNGGGGGVSGNGKRARPTKREAIISQYLVRDERSKNTSTHARSPLISDNPYEVISDIRIMLAEQYTTNAREDDFDAKPNDKDNQGEGNVAWGGINKELYSLQVTIQN

SEQ ID NO: 24926 - protein, 296 aa, Oryza sativa; identical to SEQ ID NO: 17649
  Clone ID: TF_OsC170376_1.pep

SEQ ID NO: 24927 - protein, 596 aa, Oryza sativa
  Clone ID: TF_OsC1283_1.pep
MILRFCLTCPATLLLLLTLSNLTTSVRILVRQAQKAVAAKRKPQAWEKYAKKRPRVLRINDDDLLITAMVKNRDLGYAKKFTKFKSSKKCGRLLARMSGKGGSNLLGGKRVSLARKTVLCWLIATGFLTVKDVIQYQNLKSNEVVKDGQVTWEGILCNCCTKTFSISDFKVHGGCSLPKSSLGLFLQSGKSYTLCQVEAWSAEFLSRKCDASGRKVEAMDENDDTCGFCGDGGELLCCDNCPSTYHQTCLSDQELPEGSWYCHNCTCRSCGNPLSEKEVSTFSAILKCLQCGDSYHDTCIDQEMLPCGDKQSNIWFCGRYCKEIFIGLHNHVGIENFLDNELSWSILKCNTDGQKLHSSKKIAHMTECNTKLAVALTILEECFVRMVDPRTGVDMIPHVLYNTRSNFARLDYQGFYTVILEKGDEILCVASIRVHGTKAAELPFIATSVDYRRQGMCRRLMDTIEMMLRSFHVETLVLSAIPELVNTWVSGFGFKPIEDNEKKQLRNVNLMLFPGTSLLTKRLDGITAANAGEVRNPEQIKINGRREELGLAAGVARGEGDGEEVLGLGDGAGAAELDDVCHNHLVSCTRHCTRLA

SEQ ID NO: 24928 - protein, 1096 aa, Oryza sativa
  Clone ID: TF_OsC45337_1.pep
MGSKQIVAVLQVGGEFKTDDDGQMSYSGGEAHAMHVKSDWTFKTFKHEISSTLNNLKLDSYVFKYFLPRNNKTLISISNDKDLKRMVEFHAESETTYIYVMKKADNRVKTSAVVPAASADHAVAATTPDGSKRQKICASWENAITGAGQVFEGPKEFRDALHKYAIAHRFHYRFVKNDSSRVTVECTAEGCPWRIHASKSPAKKDFMIKKVFGSHTCESESVKSHRLASQKWVASVIKEKLRDSPNYRPRDIANDLQREYGLSLNYSQAWRGKSIAQKELYSSHEEACNQLPWFCQRIVETNPGSAATVEALEDSKFRFFVAFHASIQGFVHGCRPLLFLDVISVKPNKHWKLLAATSVDGEGDMFPVALSVVDDESQENWHWFLEQLKASLPVSGELTFISNGKCGLLDEVSLIFPDSYHGYHVNYFIEEFKAQLDDSWSEELKDTMVEHVKKAMYSCKVDEFNQCIELIKVESDKLAEWLLETKPEKWSDAFFKGSRLGQYTCNVPETILQWVPSRYELSVVQLVDTIRCNLMEMMYTRREYSNSWTEPLTPSTNQKIQEEMGKALTHSVVCSTGNDGNNNVFEVCDGAVNVVNIDTWDCTCRKWHVSGIPCSHAIAVFERTDHNPLDFCAKYFTTECYRLTYAMSINPIPDIVVAAPSTDPSQGEALHQSPILTRRQVGRPKEKPADPRIAIKRAVRCSRCKGYGHNKATCKVPILIDRYTSTRFTYHENTYTPSRGANGFSRRVHQPKHTSASPPETAARTDTATTTGARATRASTLPHPTPRAVIDSETSDFFAAPIRLPDTWVPHLPQPTRQRHNRKGGRPHQRETSDLLRPASESPTSGSHSTTASSSAPHLAPRLDSPRIPLSSLNPLLALLVLCFACCSPRPTAPAAVGGAVVSQVGMLPYEAREVAMGIHRDAVAQAQALRVAAASAIESVTARAPPFGPPAARHPGEAGRGNPPPPCAACGLPENPGGTIVCDSCERGFHLACVRVWPPLMPPPPPPPAPPGARRPRATANEDWICPECEMRGARTNRWKLGPVPLDINVPPPSTPDAEDPVAVATRDVTRQLSQLSFPQLLLLTADLIRWSKKC

SEQ ID NO: 24929 - protein, 93 aa, Oryza sativa
  unsure (1)..(93): unsure at all Xaa locations
  Clone ID: TF_OsC5969_3.pep
GGPDDKEAAGAAEGAGREEEHGETLCGACGESYGADEFWICCDIXCEKWFHGKCVKITPAKAEHIKQYKCPSCSGGNGGGGGVSGNGKRARPS

SEQ ID NO: 24930 - protein, 1345 aa, Oryza sativa
  unsure (1)..(1345): unsure at all Xaa locations
  Clone ID: TF_OsC13101_1.pep
MKDYDKSTSFEVDDSTIDGDVELGGGLTVVGNERNDGRGFVGENGASNKRSLRYNSMLMQVCAETAACVSLDFCNDETFEKXRCDKLAEGDRAGLRTSLAYNAELGAAENCALECDAGFDATXNSANHVXGLDLAEVGSVPLNGMDAYIKESEGXIGKLDDXLVTLSEEPNESGGGTSVGGINDSQENKAVNGLCQGLVIAPFDTANGNAWTIRKKISDSGRESIEQEDTVMCSNEEQKVENHCQFDDKHKEAEISQIELAVDNHIMLTDCTNQKKGIDSPVNETKGDSTPDIVFIRRKSITRKTCEAKQVKSEDEVRFEKRVTRSATVRQREVSASMCVGATNDANLESKERKEDVHHYTRKVGSTVRSKVHHTGVAECDTDTKKKLKGTVTTRRNSDAIANDDPPSITQNKESKTQMKIDIKSQPLTRRGSIVNKTEDAVSGLDQNICSSAITDKNDIELTDSEGVKSENKAAVRKSILSVGAKIVASKKRILESGLDKASGESPVAIPSLKKARDTSSDTELEQPKMSSGKKLTRNNCGSSKKGMSTRRQHQSQTAKLSTSVNCSNKNESKLSQNESDDDGTGSDTSLKNTCVRRTRSGGVVPKKQEDSSESEEPIILRKNHQRGKYSGKRAGSTPRKVKAPKGNRKEVKASSLKSSGPSEQINTGSLREEKQKISDHIKGMLLDAGWTIDLRPRNGRNYLDSVYIPPSGKGSYWSVTKAYAVFLEGMESEKKGRAKDQRPSKKSVGSPGKSHVSEEILSKLKRIVVNKRRTKVELQKLKKRKHGLLKKQKTSKRNSRGSKNKISNSRKLHLGSERKKRGGCALLARGSNKDGGSSTNGFVPYEWKRTVLSWLIDLDIIDINAKLKCVDETHSKVLLEGVTTRDGINCRCCSKVFTVLEFVAHAGGPVSKPYRNVLVDGLDTDLLHCLINAWDKQSDSERQAFFPISTETDDPNDDTCGICGDGGNLICCDGCPSTFHMSCLELEEHSRQDAQDIAEVDSSLCTCSQCEEKYHPGCSPETTNTSNVSSQACDLFCQQSCRLFSIRFLGGNDIYGTVNSALMQSLRYIYSLFSCDIHYRGKLFEGLRNLLAVKKDLEPEFSCRIIQRIHENVPETVVALDERVECNSKIAVALSLMDECFLPIVDQRTGINLIRNVVYNCGSNFVRMDFHGFYIFVLERGDEIIAAASVRIHGTKLAEMPFIGTRNMYRRQGMCRRLLDGIEMILSSLNVEKLIIPAIAELVDTWTSKFGFSSLDVSEKQEVKSTSMLVFPGTGLLQKPLLKKTSPGENSSSQEVDGVFSELESGKTSNVANEDSLCSANAETQGSAAPCYGDNSKDASACND

SEQ ID NO: 24931 - protein, 799 aa, Oryza sativa; identical to SEQ ID NO: 17661
  Clone ID: TF_OsC97719_1.pep

SEQ ID NO: 24932 - protein, 253 aa, Oryza sativa
  Clone ID: TF_OsC9817_2.pep
MAIARTGVYVDDYLEYSSTLAGDLQRILSTMRELDERAHGIMGQTKEQIKYLLGVPSHGFDRSNMDDDESASERMKKDIEASQDNALSLCTEKVLLARQAYDLIESHIKRLDEDLGQFAEDLKQEGKIPPDEPSILPAISAFSRDDKRRPGFSTPQATKKFREREWDRERGMDFDLMPPPGSNKKTTAPMDVDQTIDPNEPTYCICHQISYGDMIACDNDNCEGGEWFHYTCVGLTPETRFKGKWFCPTCRNL

SEQ ID NO: 24933 - protein, 1103 aa, Oryza sativa
  unsure (1)..(1103): unsure at all Xaa locations
  Clone ID: TF_OsC60785_2.pep
MAGGSSPSPAAAPIQVRCAGCRGVLAVGPGMTEFICPKCGMAQRLPPQLMPKPPPSSSSSAAATPAPPAPAAPPPPTSRRGGGGGAALPPPQAQGVDPTKIQLPCANCQAVLNVPHGLARFRCPQCGVELAVDLAKLHNFLASSNNNAAAAPPDNVPPASGPASRAPLVPAPPPAPFPPVPTPGMTQAPQMVPGALIPMVLPITDPPEEINEVAIDVEREEDEGGTVGETFTDYRPPKLSLGLPHPDPIVETSSLSAVQPPEPTYSLNIMDELDETKALSCLQIETLVYACQRHLYHLPTGDRAGFFIGDGAGVGKGRTIAGLIWENWQQGKHKAVWVSIGSDLKYDARRDLDDVGAKCVQVHPLNKLPYSKLDSKAIGIKNGCHKAKNLIPDAGSQPTRTGSLEKGGVGALELVAMDMKARGMYVCRTLSYKGVDFDIVEAPLEERMMNMYRKAAEFWAEFRLELLSAGESFTEGISNQIWRLYWASHQRFFRHMCMSAKVPAVVKLAKEALAENKCVVVGLQSTGEARTEEAITKYGVEMEDFVSGPRELLLKLVEENYPLPPKPDSFQQGEEKVTEIHRKRHSAPDVSFKGRVRKVAKLVEVSDDDSDDYSPSESDHGSTESDEEFHMCQICNTEEEKTLLLHCSGCSRHVHPGCLTPPWTGVLTDDWSCYTCKKLEGEENEQDAHVADFSQRYDAAVEKKKKILDMIRSLDLPNNPLDDIIDQLGGPDNVAEITGRRGMLIRASDGKGVVYQARNAKEVSMEMINMHEKQQFMDGKKLISIISEAGSAGVSLHADRRAKNQRRRVHITLELPWSADRAIQQFGRTHRSNQTSAPQYRLLFTNLGGEKRFASIVAKRLESLGALTQGDRRAGPSLSAFNYDSNYGKKALTIMYRGIMEQSYFQDDQDSFPVVPPGCSDNQSSIQEFIAEAKAALVSVGIIRDAVVCNGKVAGKLSGRIVDSDMHDVARFLNRLLGLAPKIQNRXVHIDSLSGASTVLFTFTIDRGVTWEXKDGAGSSNDGFYESKREWMGGRHFILAFEGSIEGMYKIIRPAIGEALREMPLTELKSKYRKVSSIEKVNKGWQDEYDASSKQILKRIRIS

SEQ ID NO: 24934 - protein, 1640 aa, Oryza sativa
  Clone ID: TF_OsC77457_1.pep
MASFYCVRVQIDSASLRHILRPFAAQGAAPPEQLAASHPSSQYGQPARAAPSTSLLAQVAGNHPHATHVSDRKALFGMLNAGNAANVIDLTRASPLGGAEPLPKHPRHGLEASSSVEQPSCLGPLFQNTSANVQGSFPGECSVNNGISQGAIQFQDSSTCAVQKLPSQSTPRHHPALLGDQICVSCLNVGGEFFVGEAGIFGVRCFCHRLRMSVAKFCEHSGGPAEKAGEIVIMDNGMTIVQWLKYCMGVGASISDTKWDWPEWAYMRYSSEEYWTKSLLTTNNNMEKTGLFSGHGKSTGHINNPVYSSDIHNEVGRFTSVEKLVNKPDETFYRKSVGLHEAFSKNPAIQQSSKINLANHMIHDMNMNSISRPSERTYSTANMGITYSRNHLAHDYANFLEKNLNNLSRSPGPSSTRVLSNDSRACMPDVPHKIIQDGSESLGADAYPKQTTKANKTIENIEPSFGTGNRKRSLDVSNGTSHSELNEITDDAAKNSFISLFLSHLERNSTSESIDDVLNSNEHYLLKAPDVAYSSDRLKTASTQVETRANDNQLKLAPAIIHTKRISDSRSLPVPVASKGYVHQDVLHANSQEPLINGDCLPHLLPSQPNAGISKICAEVSSPVNCRCCNHVADKSHLAHSETGAPCFYDRTENQCIDAVAKLKKILPNLVLELAISADLISVMMALQFQPIGLDEVRTRSTFIPRSSLCSRELMLQSCCHACPIDGYYRSSMGHTANSLTKNTLLDAPNNTECSPYRDGKCCCSLAPKCLAGYGFTKHCVARIDQTDHTVQKSKDDGMQAAARCCTLGESEKLICQCSSEIIARKSDSKASFQNEVSTEVLNRPCVPTLQQLKNVTEASAVGGHWPYETVKEKASACRDSGIFKELKSGFSSGFSSDVVTKFSASPELNKYGLEHKNLVFDEGSRIEKCSSSSYLPISTGCEEAQNSFSRFHLEPSLVKHKNNQISEGSTRKEHENEGQCSEMSKKTRTLRCCANKSESDDCTRKIDLSSREGDSQPQHKAGPFSRRVSKTKRKHPPTHLNKHVKRLHSNCKVLNVDNERSDDEGIYVGESNSSDRKKQEDNMTTLDRTKCQQQGSRLLVRKLPKYVSLNCIVNETNSEDACSGSASIDSSLIATGITNDNRKSPKIVPLNLILKKAKRCHAIKPLSKTENIHFSEEKSSDGSADKSSSGDRSFSPQDELWSPKKNRYSSNVSRPHVKTDCQSPCCVLEEDEPLSLADMGTSQLSASRSRGSKNQRACISLNRMERYIQRPSLDASCCVCGISNLEPSNQLIECSKCFIKVHQACYGVLKVPRGQWFCKPCKINTQDTVCVLCGYGGGAMTRALKAQNILKSLLRGIATAKRSDKYVYSSGNVNSECTSKLHGEYVRHDSFNGHRSRSFNAISSFGIKEASIGSARGDIISKSWTSNRNSSLLGPRTRQWVHVVCGLWTPGTKCPNTITMSAFDISGASPAKRNTECSMCNRTGGSFMGCRDVNCSVLFHPWCAHQRGLLQSEPEGEHNENEYVGEIVGQCVADKREIEYQSGKRQQYKSACYFFKIGKEHIIDATRKGGIARFINHSCQPNCVAKIISVRNEKKVVFFAERHINPGEEITYDYHFNREDEGQRIPCFCRSRGCRRYLN

SEQ ID NO: 24935 - protein, 875 aa, Oryza sativa
  Clone ID: TF_OsC4368_1.pep
MVIAVEGGFVHEEEEVDHPIRYLPLGRVYSSSAPCPLPKKPRSAEDGKPPVIVYYRRRRKKPRVEGPPPSPATAPPMLHPREDDEDEEVTRRKGSLKYELLSLGQAPPALGGDGEEPARRRCLRRSGGAERRGYFSEPKRRQRQGVHKEAASSAGRRWLELEIEAADPLAFVGLGCKAKVKYDDGESEDLNLADERIKFSISSEEMKCRNLKFGISNLNKRGYDELLALAVSLHDYQGLDPGDLVWAKLTGHAMWPAVVVDESNVPANRALKPGRLDQSILVQFFGTHDFARFLCTQLLPENMLQLQKSMEKGSSDANSNKDVHSCDNLSEDKTAESGGDYDEMTPIELGNLRVSKLGRIVTDSDYFHNKKHIWPEGYTAFRKFRSVKDPHVVILYKMEVLRNSDIKARPLFRVTSEDGTQIDGSTPNTCWKEIYCRLKEKQRNVASGLDRDVCQGSGSYMFGFSNPQIRQLIQELPNARSCLKYFENAGDTFRGYRAVHVNWKDLDYCSVCDMDEEYEDNLFLQCDKCRMMVHARCYGELEPLNGVLWLCNLCRPEAPRVSPRCCLCPVTGHAFNYINPNFGTETCLKDVKRMEPIDGLSRINKDRWKLLCSICGVAYGACIQCSHPTCRVAYHPLCARAADLCVELEDDDKIHLMLLDEDEDPCIRLLSYCKKHRQPSTERPSLESNLAKPAVVVQTDAVPPSGCARTEPYNIHGRRGQKQPQVMATASVKRLYVENMPYIVSGFCQNRVGHDAISEPIQSVGFLDVAHQEAVGNVSSMIEKYKSMKATFRRRLAFGKSRIHGFGVFAKVSHKAGDMMIEYIGELVRPPISDIRERRIYNSLVPEGDMWKTLVKLIGLFMEFNPITQIRGIFT

SEQ ID NO: 24936 - protein, 167 aa, Oryza sativa
  unsure (1)..(167): unsure at all Xaa locations
  Clone ID: TF_OsC88193_1.pep
MTGFTSARDLCIAILREDGLITESRTKIKAEELTGYDADLLFQCKTCGKSDHPLKMLICDSCEAAFHLSCCIPRVHEVPTDEWYCLPCFRKKPKSQEYQPKASWHESYRVHVTRYVXYVTGVRXGIDXQAEVPEWSCPTSSMLLFLFLEGCLIARSPLNLILLTSLN

SEQ ID NO: 24937 - protein, 1229 aa, Oryza sativa; identical to SEQ ID NO: 17668
  Clone ID: TF_OsC11114_1.pep

SEQ ID NO: 24938 - protein, 272 aa, Oryza sativa; identical to SEQ ID NO: 17625
  Clone ID: TF_OsC1327_1.pep

SEQ ID NO: 24939 - protein, 117 aa, Oryza sativa
  unsure (1)..(117): unsure at all Xaa locations
  Clone ID: TF_LIB3434-034-P1-N1-C10.pep
VHIKGRCIGXXTRFAIDRMEMGVDKWTVKCSCGATDDDGERMLSCDTCHMWMHTRCAGISDFDRVPKRYVCKSCKLTHKPKSSGPRLMYSSAPNKRCKTGTGSFSNAAEGLLWPQIS

SEQ ID NO: 24940 - protein, 895 aa, Oryza sativa; identical to SEQ ID NO: 17627
  Clone ID: TF_OsC133489_1.pep

SEQ ID NO: 24941 - protein, 697 aa, Oryza sativa; identical to SEQ ID NO: 17626
  Clone ID: TF_OsC294928_1.pep

SEQ ID NO: 24942 - protein, 244 aa, Oryza sativa; identical to SEQ ID NO: 17628
  Clone ID: TF_OsC78000_1.pep

SEQ ID NO: 24943 - protein, 751 aa, Oryza sativa
  unsure (1)..(751): unsure at all Xaa locations
  Clone ID: TF_OsC53130_1.pep
MGTARGRVALEGGGRRRRKLDEEDDEEYVADDDEEKDEDEDEEEYQQAAAPSDDGEEGGDDEGEQEDESGADFVGDEEEEEEDLEDAYDLEEVKAPRPKRPPKGKPPPRSRRRRQKDDDDDYEEEEEEDADFDPDVDEDDEEEKDSTKNHVAKRQRPPARKKNKRNPARVFKTKHKKHSSGRRRRERWDTDDDEEQEEDADHILKDDQEVEPDARHPKKKAXAARKTRDVTPEPDVEASAWPAVESDTSEFEFVTSDEEAADKEAPAAEPAKTKGKKGRKRWGSGSESSSDSDYVISEQELKDLEVSMPPDAALQSPATLPRRTFLSRRVGEKGKEPEEAWKQTCGICLSEEQRATIQGVLNCCAHYFCFACIMEWSKVESRCPLCKRRFTTITKSSMADLGLGSRKAVIRVEKRDQVYQPTEEEMRRWLDPYENVVCIECNRGGDDNLMLLCDICDSSAHTYCVGLGRQVPEGNWYCGGCRSGGEGPSAQDTVVHCRESNTNPANSSSGSFGSATPSGVFQRPPPINTQPSLQGFDLNLSPRETPDEDKREESHVSADAVSTPTGRHATLDRRRAFNRRIRILLFRPRVTPNGWQNPIQSDRTIPENEQNPQSTSTPTEVNPSCSRDSSMQNQQSSSSFVQPARGLIERTYGGGSNFQQTEGAKEQLIPIVKRNLKLMCAQSPLGQSDFKNVARRATHTILALSGIAHNEDFVVTILDEREMEMNIVQSNVMLRNGCSTEYRPCLSCLRS

SEQ ID NO: 24944 - protein, 298 aa, Oryza sativa
  Clone ID: TF_OsC4349_1.pep
AFFFCASLCALSISLSSKTLTLAAGGSGGGGGRGGGGVVVVVGGMDGGGAHRTPEDVFRDFRARRAGMIKALTTDVEKFYQQCDPEKENLCLYGLPNETWEVNLPAEEVPPELPEPALGINFARDGMDEKDWLSLVAVHSDTWLLAVAFYFGARFGFDKESRKRLFSMINNLPTIYEVVTGTAKKQSKEKTPKTSGKSNKSGTKPSRQPEPNSRGPKMPPPKDEDDSGGEEEEEEEDHENTLCGACGDNYGQDEFWICCDACETWFHGKCVKITPAKAEHIKHYKCPNCSSSSKRARA

SEQ ID NO: 24945 - protein, 167 aa, Oryza sativa
  Clone ID: TF_OsC31997_4.pep
VALASQTYDLVDAHIQQLDQFMRKLEELRQEKEAATTAAAAAAAAAASVATGTPVAATVTASAGTSTADNTPKGGRSSERGRGGRKKTAKVPTEQPAPAIDLELPVDPNEPTYCLCNQVSYGEMVACDNNDCKIEWYHFGCVGVKEHPKGKWYCPSCIGFQKKRKGK

SEQ ID NO: 24946 - protein, 679 aa, Oryza sativa; identical to SEQ ID NO: 17631
  Clone ID: TF_OsC152828_1.pep

SEQ ID NO: 24947 - protein, 258 aa, Oryza sativa; identical to SEQ ID NO: 17630
  Clone ID: TF_OsC32575_1.pep

SEQ ID NO: 24948 - protein, 168 aa, Oryza sativa
  unsure (1)..(168): unsure at all Xaa locations
  Clone ID: TF_OsC308411_1.pep
MSSIGAGAGGAVVGAAVAAVAVGGGAPPHVLAVDDSSVDRAVIAGILRSSRFRVTAVDSGKRALELLGSEPNVSMIITDYWMPEMTGYELLKKVKESSKLKKIPVVIMSSENVPTRISRLPSTXTIVLPSLLCSIGLLTRCLEEGAEDFLVKPVRPSDVSRLFSRVLP

SEQ ID NO: 24949 - protein, 236 aa, Oryza sativa
  Clone ID: TF_OsC359_8248.pep
LVLTEVELPLMSGFLLLSTIMEHDACKNIPVIMMSSNDSVSMVFKCMLKGAADFLVKPIRKNELRNLWQHVWRKQLSSGVLDVQHTQQEDNLTERHEQKTGVTKAEHVTENVVHKNMECSEQESDAQSSCTRSELEADSRQTNNLLEYKQPMGRHFSKPDHKNTEKNGGTKIHASNDGNLIPRREEDASLRRMTCSNDINCEKASRDMELVHIIDNQQKNNTHMEMDVARANSRGK

SEQ ID NO: 24950 - protein, 136 aa, Oryza sativa
  Clone ID: TF_LIB4370-019-R1-K1-H1.pep
MSPDADAAAAAAAGGEGAAAAGVGTAGEGRGVIRWDQILPRRSLRVLLVEHDDSTRQVVTALLRKCGYRAVAAVADGMKAWGVMRERAYAFDLVLTEVTMPTLSRIELLSRIVASDQCKNIPVIMMSSQDSIGTVL

SEQ ID NO: 24951 - protein, 134 aa, Oryza sativa
  unsure (1)..(134): unsure at all Xaa locations
  Clone ID: TF_LIB4370-026-R1-K1-B1.pep
MGSQDDQGAPRRGRGDNRVVARAALKAAGGGDVVDEAENGEVAVQRVRDAAAPYDLVLMDKQMPVMDGHERVLLXVQATRRIRGMGVTTPIVAVSSDGLPADVDAFITAGADDFTSKPLSKEKLGVILAKFRLA

SEQ ID NO: 24952 - protein, 566 aa, Oryza sativa
  Clone ID: TF_OsC359_8450.pep
MGGGVEERKVVDLEDGDGEEGEDAAAVAAGSSRETRMLPRMPVRVLLAEGDDSTRHIICALLRKCGYRVAAASDGVKAWDILKEKSFNIDLVLTEVELPLMSGFLLLSTIMEHDACKNIPVIMMSSNDSVSMVFKCMLKGAADFLVKPIRKNELRNLWQHVWRKQLSSGADSRQTNNLLEYKQPMGRHFSKPDHKNTEKNGGTKIHASNDGNLIPRREEDASLRRMTCSNDINCEKASRDMELVHIIDNQQKNNTHMEMDVARANSRGNDDKCFSIPAHQLELSLRRSDYSRLESQEKNERRTLNHSTSSPFSLYNCRTASSTINAGDAQACSTSATHIDLENKNGDSKTPSQDKRETNQPPIRVVPFPVPVGGLTFDGQPFWNGAPVASLFYPQSAPPIWNSKTSTWQDATTQAISLQQNGPKDTDTKQVENVEEQTARSHLSANRKHLRIEIPTDEPRHVSPTTGESGSSTVLDSARKTLSGSVCDSSSNHMIAPTESSNVVPENPDGLRHLSQREAALNKFRLKRKDRCFEKKVRYQSRKLLAEQRPRVKGQFVRQDHGVQGS

SEQ ID NO: 24953 - protein, 152 aa, Oryza sativa
  Clone ID: TF_OsC261347_1.pep
TLLYQVMRHHRAAVDGRDGGGGTNVGRRRRRRRGWGEVVPVPPPPAEQLHRLLAAVHGGDVERSRLAGGGAAAATAVRPEQQLHDPPVHRRVVHHQHPHRLRPHPLRSHPHTRSSRRSSSNGPRALAAVLAVGVFERGGIATALASPPRAQT

SEQ ID NO: 24954 - protein, 851 aa, Oryza sativa
  Clone ID: TF_OsC1281_24.pep
MGSACEAGTDEPSRDDVKGTGNGILENGHSHKPEEEEWRNGMGEDLPNGHSTPPEPQQTDEQKEHQVQIVRWERFLPVKTLRVLLVENDDSTRQVVSALLRKCCYEDSRGFCASRFPSAVIPAENGLHAWQCLEDLQNHIDLVLTEVVMPRLSGIGLLSKITSHKICKDIPVIMMSSNDSMGTVFKCLSKGAVDFLVKPIRKNELKNLWQHVWRRCHSSSGSGSESGIRTQKCTKPKVDDEYENNSGSNNDNEDDDDNDEDDDDLSVGHNARDGSDNGSGTQFSLNVGQLCQCILMPSACFKTQSSWTKRAVEIDSPQQMSPDQPSDLPDSTCAQVIHPTSEICSNRWLPTANKRSGKKHKENNDDSMGKYLEIGAPRNSSMEYQSSPREMSVNPTEKQHETLMPQSKTTRETDSRNTQNEPTTQTVDLISSIARSTDDKQVVRINNAPDCSSKVPDGNDKNRDSLIDMTSEELGLKRLKTTGSATEIHDERNILKRSDLSAFTRYHTTVASNQGGAGFGGSCSPQDNSSEALKTDSNCKVKSNSDAAEIKQGSNGSSNNNDMGSSTKNAITKPSSNRGKVISPSAVKATQHTSAFHPVQRQTSPANVVGKDKVDEGIANGVNVGHPVDVQNSFMQHHHHVHYYVHVMTQQQQQPSIERGSSDAQCGSSNVFDPPIEGHAANYSVNGSFSGGHNGNNGQRGPSTAPNVGRPNMETVNGIVAPFLGLKSTAGLPVSRRSTNSGFGNVSNGGRIKCMQVWPIEGIKKFETLSYLPPLTVEDLLKQIEYLLRSKWVPCLEFSKVGFVYRENHRSPGYYDGRYWTMWKLPMFGCTDATQVLKELEEAKKAYPDAF

SEQ ID NO: 24955 - protein, 1024 aa, Oryza sativa; identical to SEQ ID NO: 17680
  Clone ID: TF_OsC53858_1.pep

SEQ ID NO: 24956 - protein, 660 aa, Oryza sativa
  Clone ID: TF_OsC1281_22.pep
IPAENGLHAWQCLEDLQNHIDLVLTEVVMPRLSGIGLLSKITSHKICKDIPVIMMSSNDSMGTVFKCLSKGAVDFLVKPIRKNELKNLWQHVWRRCHSSSGSGSESGIRTQKCTKPKVDDEYENNSGSNNDNEDDDDNDEDDDDLSVGHNARDGSDNGSGTQSSWTKRAVEIDSPQQMSPDQPSDLPDSTCAQVIHPTSEICSNRWLPTANKRSGKKHKENNDDSMGKYLEIGAPRNSSMEYQSSPREMSVNPTEKQHETLMPQSKTTRETDSRNTQNEPTTQTVDLISSIARSTDDKQVVRINNAPDCSSKVPDGNDKNRDSLIDMTSEELGLKRLKTTGSATEIHDERNILKRSDLSAFTRYHTTVASNQGGAGFGGSCSPQDNSSEALKTDSNCKVKSNSDAAEIKQGSNGSSNNNDMGSSTKNAITKPSSNRGKVISPSAVKATQHTSAFHPVQRQTSPANVVGKDKVDEGIANGVNVGHPVDVQNSFMQHHHHVHYYVHVMTQQQQQPSIERGSSDAQCGSSNVFDPPIEGHAANYSVNGSFSGGHNGNNGQRGPSTAPNVGRPNMETVNGIVDENGAGGGNGSGSGSGNDLYQNGVCYREAALNKFRQKRKVRNFGKKVRYQSRKRLAEQRPRIRGQFVRQSGQEDQAGQDEDR

SEQ ID NO: 24957 - protein, 539 aa, Oryza sativa
  Clone ID: TF_OsC15088_1.pep
MSPDADAAAAAAAGGEGAAAAGVGTAGEGRGVIRWDQILPRRSLRVLLVEHDDSTRQVVTALLRKCGYRVAAVADGMKAWGVMRERAYAFDLVLTEVTMPTLSGIELLSRIVASDECKNIPVIMMSSQDSIGTVLRCMQKGAVDFLVKPVRKNELRNLWQHVWRRHAMNSQTNASENNAASNHLSANGGNGSKTGEHSDEESDAQSSGSKREVEIQSAENSLRSSDPGKDLLVVAQTTADRKCKSSALENNAVMENNLSENSKGTATGHAESCPSHFVEINLEKQHHLNGYTNHKLNEKDIFNHSNSSAFSRYGNKRIESSAQRPFPPSFRVVHQQPVYDKNPQSSRVLLSCEHNTRESTVQAQVPLDRSTEDAGTSSSSPRKDSLTHPSYGFIPVPIPVENHQLHHSRQILRESGEPVDLAKAHMERINQSASCSQDIRKGSGCTGSGETDANTNTVIALESGNESGVQNCSNNVLDGDRSRREAALLKFRMKRKDRCFEKKVRYHSRKKLAEQRPRVKGQFVSQKLKSAITTEAETD

SEQ ID NO: 24958 - protein, 518 aa, Oryza sativa
  Clone ID: TF_OsC53137_1.pep
MVGAGEGDRVGGGAAVGGGQQFVDRSKVRILLCDSDPSSSREVLRLLCNCSYQVTCAKSPRQVINVLNCEAGEIDIILAEVDLPVSKCFKMLKYIARNKELRHIPIIMMSNRDEVSVVVKCLRLGAAEYLVKPLRMNELLNLWTHVWRRRRMLGLSEKNFFNDNFELALSEPSDANTNSTTLLSDDTDDKPKENINQETSTSNQHEYESNPSDAEPKQKGTPEGLLVSTEGGDQASSPGVMFSRPIKTNLRVAESSAFLAYVKSSTPTTSSFDSELQKGGNRLDSSDHRGNFSSTTDRSDTGTDVNIRDKEAFEMPVQYPVVCFSSSNLHLERSNEGQNDASGTPPVYHFPFYYPGMMDHGMTHPPVQNFQGNINNAQVHTPQTLLPQYNVYPQCHGVSMMPPFQYNPAGMSIQSNQLPTQNMWPQASSTPMPEETCSRSERRAAALAKFRLKRKERCFDKKVRYVNRKKLAETRPRVRGQFVRQANYTDITSTGDDISEDEDDDPSSREVEMVSSPE

SEQ ID NO: 24959 - protein, 644 aa, Oryza sativa
  Clone ID: TF_OsC50511_1.pep
EFLHTHTTRSLSSSSSSAVIPAENGQQAWTYLEDMQNSIDLVLTEVVMPGVSGISLLSRIMNHNICKNIPVIMMSSNDAMGTVFKCLSKGAVDFLVKPIRKNELKNLWQHVWRRCHSSSGSGSESGIQTQKCAKSKSGDESNNNNGSNDDDDDDGVIMGLNARDGSDNGSGTQAQSSWTKRAVEIDSPQAMSPDQLADPPDSTCAQVIHLKSDICSNRWLPCTSNKNSKKQKETNDDFKGKDLEIGSPRNLNTAYQSSPNERSIKPTDRRNEYPLQNNSKEAAMENLEESSVRAADLIGSMAKNMDAQQAARAANAPNCSSKVPEGKDKNRDNIMPSLELSLKRYHTPVASNQGGTGFMGSCSLHDNSSEAMKTDSAYNMKSNSDAAPIKQGSNGSSNNNDMGSTTKNVVTKPSTNKERVMSPSAVKANGHTSAFHPAQHWTSPANTTGKEKTDEVANNAAKRAQPGEVQSNLVQHPRPILHYVHFDVSRENGGSGAPQCGSSNVFDPPVEGHAANYGVNGSNSGSNNGSNGQNGSTTAVNAERPNMEIANGTINKSGPGGGNGSGSGSGNDMYLKRFTQREHRVAAVIKFRQKRKERNFGKKVRYQSRKRLAEQRPRVRGQFVRQAVQDQQQQGGGREAAADR

SEQ ID NO: 24960 - protein, 232 aa, Oryza sativa; identical to SEQ ID NO: 17689
  Clone ID: TF_OsC22028_1.pep

SEQ ID NO: 24961 - protein, 836 aa, Oryza sativa
  Clone ID: TF_21735411.pep
MLLSTWTPGCFQGNKILLRSLITWYYLEFMPKLRPFYFLFYLTLPSCATDSPPISDKSSSIFLPLAQQQQLVHWMMPPRFRCQDYLLPLLLALSPAAAPARQVEYHHCHCDGGGGGGGGGLWSMDSIFRWQKVSDLLIAAAYFSIPLEILYFVAGLRHLLPFRWVLVQFGAFIVLCGLTHLLTAFTYEPHPFMVVLLLTTAKFLTALVSFLTAITLLTLIPQLLRVKVRESLLWLKARELDREVVLMKRQEEASWHVRMLTHEIRKSLDRHTVLYTTLIELSRVLGLTNCAVWMPAAGEMCLTHELRRDGGGEDGVVGVDDADVVEVRGSDGVKLLGPDSVLAAASGGKEEGTGAVAAIRMPMLKVSDFKGGTPEVIQTSYAVLVLVPPAGKSWGRHEMEIVEVVAGQVAVALSHATLLEESRAMRDRLAEQNRELLQARRDALMANEARQAFQGVMSQGMRRPIHSILGLVSMVQEEALAPEQRLVVDTMARTATVVSTLVNDVMEMSADSRERFPLETRPFHLHAMIRDAACVARCLCDFRGFGFAVHVENALPDLVVGDERRIFHVLLHMVGNLIGRTEPGHVTLRVRAADDDVLDDRLGQRWDPWWPSYSTGYSSVKFVIGVKRQQNGDAGSPLSRRPSGKGIDLRLSFSMCRKLVQMMQGNIWAILDPQGLPESMTLVLRFQLQSPLTSSSLGGSFEQKHSSPSCQIAGLKVLLIDDDDDINLVVARKLLEKLGCVVSSPPSGSGFLSSVGSSAAAFQLVMVNLEMKRVKALDVATRISQYRSGRWPIVMAMASDQKAWEKCAQSGINGILKKPVILQELKDELARILQST

SEQ ID NO: 24962 - protein, 799 aa, Oryza sativa; identical to SEQ ID NO: 17688
  Clone ID: TF_OsC945_1.pep

SEQ ID NO: 24963 - protein, 170 aa, Oryza sativa; identical to SEQ ID NO: 17684
  Clone ID: TF_OsC50061_1.pep

SEQ ID NO: 24964 - protein, 201 aa, Oryza sativa
  Clone ID: TF_OsC51348_1.pep
MAVAIEAPFHVLAVDDSLPDRKLIERLLKTSSFQVTTVDSGSKALEFLGLHDHEDSPISTQSDQQEVGVNLIITDYCMPGMTGYDLLKKIKESSYLRDIPVVIMSSDNIPSRINRCLEEGADEFFLKPVRLSDMSKLKPHILKSRCKEHYQQEQNLQSNSESNNSSNPTSENSSSSTSTNSHKRKAVDEEILPHTIRPRHS

SEQ ID NO: 24965 - protein, 763 aa, Oryza sativa; identical to SEQ ID NO: 17690
  Clone ID: TF_OsC569_1.pep

SEQ ID NO: 24966 - protein, 156 aa, Oryza sativa
  unsure (1)..(156): unsure at all Xaa locations
  Clone ID: TF_OsC115733_1.pep
ARGDLLKAIXALGSPNPIPVVVMSSENEPQRISRCLTAGAEDFILKPLKMNDVQRLRKCSGATRPKSAVAGDDDRCCNTAKKAAAAAAATPEQQQQQQRSPHVFWFLQVMNASSFEVSHYFQLIFKLILLAYAVLCLSQLLHRWSNGSSLLSLWCA

SEQ ID NO: 24967 - protein, 132 aa, Oryza sativa
  Clone ID: TF_OsC36724_1.pep
MVFQTQGSNLRALLVEDIKVNRMILSQMLRKFQVETTVVQNGKEAVELFLGGETFDIVLTDNLMPIMTGPEAISKIRAMGATDVMDCGVSVDANSMEEFKDAGADLCVPKLKLEILEHILQETRSKKNKSSA

SEQ ID NO: 24968 - protein, 104 aa, Oryza sativa
  Clone ID: TF_LIB3433-027-P1-K1-D5.pep
MPSTHTICIFSSTILAFSLEPLSFGLSEKRNIFVQALAFFMGGAIEAPVHVLAVDDNPPDRELIERVLKTSSFQVTTVDSGSKALEFLGLHDHEDSPISTQSDQ

SEQ ID NO: 24969 - protein, 445 aa, Oryza sativa
  unsure (1)..(445): unsure at all Xaa locations
  Clone ID: TF_OsC6964_1.pep
FVRKMEALDDTSPENIEVTANSKNTMPYNTLSGLEVANNRKTLESFRMFKDSSDAIDSVNLLVTVEDTGIGITKDAQTRIFTPFMQADGSTSRTYGGTGIGLSITKRLVELMGGEIGFXVSKPGVSSTFSFTAIFKENRKDPGDIKRYCPEPTPPDFQGMRALVVDGRCARAEVTMYHLRRLGIQCDLAATSESALSALLESCNSSVKSSLNMVLVDKEAWGEDSGLAFFRCLIDLRLKGTLKSWQTMPKFFLLAGSITPADSDCLRLAGYSNSIRKPLRLSTVAACLSKALGVGLTGRRSRDNSLVLRSVLTGKNILVVDDNAVNRIVAAGALKKYGAIVTCVDSGKEAISRLQPPHKFDACFMDVQMPEMDGFEATRLVRSVESKINDTIQAASAKNPFGDNNIAKQKSYAVNREQKFDWTAIYVSFDNWMKSISTSRLQPCA

SEQ ID NO: 24970 - protein, 852 aa, Oryza sativa
  Clone ID: TF_OsC18122_1.pep
CRRISAVLLQKKKKKKKEQFERQQGWAIKKMYSSSNKKQSSPGPGPGDAAVAEIREPAEEYAPVIFAQDAYKHVISFDMLSGNEDRDNILRARKSGKGVLTAPFKLLNNRLGVILTYTVYKYELPAYARPHERIQAAIGYLGGIFDIQALVEKLLKQLASQESIMVNVYDTTNESPISMYGDDTGSGMCHVSVLNFGDPSRKHEMHCRFEKKPPWPWLAITSSFGTLVIALLTGHIFQATVHRIAKVEDDFHKMSELKKRAEDADVAKSQFLATVSHEIRTPMNGVLGMLQMLMDTDLDTTQQDYVRTAQASGKALVSLINEVLDQAKIESGKLELETVPFDLRTVCDDILSLFCGKAQEKGLELAVYVSDQVPQILIGDPGRIRQIITNLVGNSIKFTERGHIYLTVHVVEEVMSCLEVETGIQNTNTLSGYPVANRRCSWESIRLFNRELHSSEKSFAPIASDSISLVISVEDTGVGIPFEAQSRVFTPFMQVGPSIARIHGGTGIGLSISKCLVGLMKGEIGFASKPHVGSTFTFTAVLMRAHCKGNDIKSSEFKGINALVVDHRPVRAKVTKYHLQRLGVKTELTAELNQFISKLNSGSLTAKLVLIDKETWLKESHCTPLLVNKLRNNDKPDSPKLFLLGSSASSPKGGSDTSREHNLNVIMKPLRASMLQVSLRRALGGVDKVHCRNGVVGNSTLGSLLHKKQIIVVDDNIVNLKVAAGALKKYGAEVTCADSGKKAITLLKPPHNFDACFMDIQMPEMDGFEATRRIRVMERDLNERIERGEAPPECASIQRWRTPILAMTADVIQATHEECLKSEMDGYVSKPFEGEQLYSEVARFFQNHDQVE

SEQ ID NO: 24971 - protein, 176 aa, Oryza sativa
  unsure (1)..(176): unsure at all Xaa locations
  Clone ID: TF_LIB4309-004-Q1-K1-F10.pep
MTVEERQGRVGGHGVSGGGGGRDQFPVGMRVLAVDDDPTCLKILENLLLRCQYHVTTTGQAATALKLLRENKDQFDLVISDVHMPDMDGFKLLELVGLEMDLPVIMLSANXETQTVMKGITHGACDYLLKPVRLEQLRTIWQHVIRRKNCDAKNRGNDDDAGQKAQGMNNEVRVLV

SEQ ID NO: 24972 - protein, 247 aa, Oryza sativa; identical to SEQ ID NO: 17698
  Clone ID: TF_OsC51348_4.pep

SEQ ID NO: 24973 - protein, 252 aa, Oryza sativa; identical to SEQ ID NO: 17672
  Clone ID: TF_OsC41886_1.pep

SEQ ID NO: 24974 - protein, 291 aa, Oryza sativa
  unsure (1)..(291): unsure at all Xaa locations
  Clone ID: TF_OsC41886_2.pep
TPKNRTIASRIHSFEKLMAQRVGHSADGVFVMIVDEDKSHANFARGMLSSLNFHVIVYSSPVNALVFLENNAQDVAVVLAAVDMKQLSGFQFLEAARVKRQDLQVIMMSAETTMSTMMRCVKLGARFLVKKPLNEETVGNLWQHVDLKVLKMEKIRELLQDPGQETVITISYEEQFSGETEADENNEEEEVNSFEAKKADSVKVQSDEKGHDNAKISNTAAAEGSDEKVSSGDGHVVPKAYNNVNVEESIGSNNTSGEQVSDKIKSDARVXVILVDYPDFEDDETKKPTST

SEQ ID NO: 24975 - protein, 152 aa, Oryza sativa
  Clone ID: TF_LIB4371-041-R1-K1-A4.pep
ARAWTPPPSPTGCASSSWTTTPPGSRSSRRCSGSVPTKKYRLYLSRLQKQNEERILGAARQDFSHKGTSENLNLRSSFQEQPSNIANGYPHASQNIQTQANMLDSQLEDTKSTVPLPVPDKKRTLASDAADSQNVTSASSLGGGSVFQKHGR

SEQ ID NO: 24976 - protein, 95 aa, Oryza sativa
  unsure (1)..(95): unsure at all Xaa locations
  Clone ID: TF_OsC1528_1640.pep
LVTWPSLVSCGLGAGEVTARVEGVGGAGQQCPSCAVDKCKEELSRCHDXHRWHKVCEALSKLPVVVADCEMLFCQQCISLGSIWDMAGNLHKHEP

SEQ ID NO: 24977 - protein, 237 aa, Oryza sativa
  Clone ID: TF_OsC99563_1.pep
MADWGPVFIGLVLFILLSPGLLFQIPGKGRIVEFGNFQTSGLSILVHSIIYFALIAIFLLAVNVHMRFYNTMSGRSTIINLSLTNRTAKSQPLLYTCQENGIAWEGSSYVTAGTKTWSPATDPPSDANAVVTACDEAAILLKEEGANCGGAVALEMPAAGEGCSDDDRRERAHSGSSPWGTPLHALRVVVMLAPSSGEEKGRRRSWRAAPRPLPPSCIKGNCFGSRKVPENEMEKGG

SEQ ID NO: 24978 - protein, 1117 aa, Oryza sativa; identical to SEQ ID NO: 17704
  Clone ID: TF_OsC1735_1.pep

SEQ ID NO: 24979 - protein, 157 aa, Oryza sativa
  Clone ID: TF_OsC53012_1.pep
MGRGGGSSSSAAVAAGASSSSSSSSVAAAARRGAGRAGGGAPSGGGGGPRCQVERCGVDLSEAGRYNRRHKVCQTHSKEPVVLVAGLRQRFCQQCSRFHELTEFDDAKRSCRRRLAGHNERRRKSAADTAHGENCRHADQDAGRSHQGTGNPPFQIR

SEQ ID NO: 24980 - protein, 458 aa, Oryza sativa; identical to SEQ ID NO: 17705
  Clone ID: TF_OsC324749_1.pep

SEQ ID NO: 24981 - protein, 469 aa, Oryza sativa; identical to SEQ ID NO: 17710
  Clone ID: TF_OsC11432_3.pep

SEQ ID NO: 24982 - protein, 214 aa, Oryza sativa
  Clone ID: TF_OsC148343_1.pep
MDAPGGGGPRVRGRVGGEPVWDWGNLLDFAVHDDDSLVLPWGDDSIGIEADPAEAALLPPAPSPQPAEAEAEAAGPASLPSSMQAEGSKRRVRKRDPRLVCPNYLAGRVPCACPEIDEMAAALEVEDVATELLAGARKKPKGAGRGSGAAVGGSGGGASRGTPAEMKCQVPGCEADIRELKGYHRRHRVCLRCAHAAAVMLDGVQKRYCQQCGK

SEQ ID NO: 24983 - protein, 513 aa, Oryza sativa; identical to SEQ ID NO: 17711
  Clone ID: TF_OsC8701_1.pep

SEQ ID NO: 24984 - protein, 343 aa, Oryza sativa; identical to SEQ ID NO: 17712
  Clone ID: TF_OsC152916_1.pep

SEQ ID NO: 24985 - protein, 272 aa, Oryza sativa
  Clone ID: TF_OsC1737_1.pep
MSTAAAAAAAQSWCFATVTPRSRATVVASLASPSPSSSSSSSNSSNLPAPFRPRLIRNTPVFAAPVAPAAMDAAVDRLKDGFAKFKTEFYDKKPELFEPLKAGQAPKYMVFSCADSRVCPSVTMGLEPGEAFTVRNIANMVPAYCKIKHAGVGSAIEYAVCALKVELIVVIGHSRCGGIKALLSLKDGAPDSFHFVEDWVRTGFPAKKKVQTEHASLPFDDQCAILEKEAVNQSLENLKTYPFVKEGIANGTLKLVGGHYDFVSGNLDLWEP

SEQ ID NO: 24986 - protein, 753 aa, Oryza sativa
  unsure (1)..(753): unsure at all Xaa locations
  Clone ID: TF_OsC113993_1.pep
MSSGLKKKGLEWDLNDWRWDSNLFLATPSNASPSKCSRRELGRAEGEIDFGVVDKRRRVSPEDDDGEECINAATTNGDDGQISGQRGRSSEDEMPRQGTCSSSGPCCQVDGCTVNLSSARDYNKRHKFYGNYLTCLVRFHFLQEFDEGKKSCRSRLAQHNRRRRKVQVQAGVDVNSLHENHSLSNTLLLLLKQLSGLDSSGPSEQINGPNYLTNLVKNLAALAGTQRNQDMLKNANSAAIASHTGNYVAKGNSLHDSRPHIPVGTESTAEEPTVERRVQNFDLNDAYVEGDENRTDKIVFKLFGKEPNDFPSDLRAQILSWLSNCPSDIESYIRPGCIILTIYMRLPNWMWDKLAADPAHWIQKLISLSTDTLWRTGWMYARVQDYLTLSCNGNLMLASPWQPAIGNKHQILFITPIAVACSSTANFSVKGLNIAQPTTKXEDLDQSSLSFPFVVAEEDXHIRATSETPKDCTEGFPAARFRWLLSFAVDREFCAVIKKLLDTLFQGGVDLDVQSTVEFVLKQDLVFVAVNKRSKPLIDFLLTYTTSSAPMDGTESAAPAQFLFTPDIAGPSDITPLHIAATYSDTAGVLDALTDDPQQLGIKAWKNARDATGLTPEDYARKRGHESYIEMVQNKIDSRLPKAHVSVTISSTTSTTDFTEKHASQSKTTDQTAFDVEKGQQISTKPPLSCRQCLPELAYRHHLNRFLSTRPAVLSLVAIAAVCVCVGLIMQGPPHIGGMRGPFRWNSLRSGPK

SEQ ID NO: 24987 - protein, 138 aa, Oryza sativa
  Clone ID: TF_rsiceg_12459.y1.abd.pep
MEMASGGGAAAAAGGGVGGSGGGGGGGDEHRQLHGLKFGKKIYFEDAAAAAGGGGTGSGSGSASAAPPSSSSKAAGGGRGGGGKNKGKGVAAAAPPPPPPPPRCQVEGCGADLSGIKNYYWRHKVCFMHSKAPRVVVA

SEQ ID NO: 24988 - protein, 400 aa, Oryza sativa; identical to SEQ ID NO: 17701
  Clone ID: TF_OsC300385_1.pep

SEQ ID NO: 24989 - protein, 997 aa, Oryza sativa; identical to SEQ ID NO: 15827
  Clone ID: TF_OsC51748_1.pep

SEQ ID NO: 24990 - protein, 377 aa, Oryza sativa
  Clone ID: TF_OsC952_1.pep
MDWDLKMPVSWDLAELEHNAVPNMAAAASAAEPGIAAVAASRGAPGRPECSVDLKLGGLGEFGAADALKEPAAAAKAPVSSAAAAASVAKVPPSTSTLKRPRGGGGGGGGQCPSCAVDGCKADLSKHRDYHRRHKVCEPHSKTPVVVVSGREMRFCQQCSRFHLLGEFDEAKRSCRKRLDGHNRRRRKPQADSMSSGSFMTSQQGTRFASFTPPRPEPSWPGIIKSEETPYYSHHHHPHPVMTSRQPHFVGSPSSATTAAFSPKEGRRFPFLHEGDQISFGGGGGAAAAATLEISVCQTTVVAPPPPESSSSNKMFSSDGLTTATTTTTTAHHHHHHHQVLDSDCALSLLSSPANSSSVDVSRMVQPSPAAAAGAAP

SEQ ID NO: 24991 - protein, 108 aa, Oryza sativa
  Clone ID: TF_OsC1528_2153.pep
IPVTPLLLILELMQSCRRNPAFYGSCLCKLPAISQMLPKLPKSCPSDLGHLCSSSSPSYLAIGDNDGQLGERLTHLVPPVLVVAPAQLLLALVHRAGHFTGTEATADK

SEQ ID NO: 24992 - protein, 806 aa, Oryza sativa; identical to SEQ ID NO: 17717
  Clone ID: TF_OsC98_3.pep

SEQ ID NO: 24993 - protein, 127 aa, Oryza sativa
  unsure (1)..(127): unsure at all Xaa locations
  Clone ID: TF_8955113.pep
IRYEXXGAXWISLLQALXXXPXGPPTVXITGIDXXVXAXXPSSRLXLVXKXLSXXPCLXKVXXKFXPLXISXXKVXXXHXXIIPGESLAXNXTLXLHHXPDDXVSXANXXDXXLMIXXXLSPKVPTL

SEQ ID NO: 24994 - protein, 216 aa, Oryza sativa; identical to SEQ ID NO: 17719
  Clone ID: TF_OsC1713_4566.pep

SEQ ID NO: 24995 - protein, 163 aa, Oryza sativa
  unsure (1)..(163): unsure at all Xaa locations
  Clone ID: TF_OsC97073_1.pep
VAESPRNXMPLKPIRKMNPHVFIHGVVNGSYNAPFFVTRFREALFHYSAIFDMLETNIPKDNEQRLLIESALFSREAINVISCEGLERMERPETYKQWQVRNQRVGFKQLPLNQDMMKRAREKVRCYHKDFIIDEDNRWLLQGWKGRILFALSTWKPDNRSSS

SEQ ID NO: 24996 - protein, 478 aa, Oryza sativa
  Clone ID: TF_OsC348872_1.pep
METMSYPCSLLIPFSTQFEEISSSSLLLWSPQAEENPHENANMYEFDADHSHDQIHQDHQFLDMMVIQESANEFDGDHSHDQIHQDHEFLETMVIQESANEFDGDHSHDQIHQDHEFLEMMAIQESANDLLQLQDDFSVPNADPLAASFEFDERLAVAGHENGNVVATQEESAGDLLLAGAMAVDAGDAVHASAIMSRLDDLLADIAGRRSCEATSPGDHLAYYFARGLKLRISGAATPASSPPPPAANWSSPAYRMLQELTPFVKFAHFTANQAILEATADDLDVHVVDFNVGEGVQWSSLMSDLAAAGRHRCSTSRTLKLLLLGTITILQPKLVILIEDELSRISKNPPSPSLAAPPPFPEFFSDAVAHFTAVMESTASCLVSYDDEAWLSLRRVGEEVVGPRVEDAVGRYGSLAGGAQMMEGLRAREVSGFSVAQGKMLAGLFGGGFGVVHQEKGRLALCWKSRPLISVSLWCPK

SEQ ID NO: 24997 - protein, 810 aa, Oryza sativa; identical to SEQ ID NO: 17749
  Clone ID: TF_OsC334805_1.pep

SEQ ID NO: 24998 - protein, 477 aa, Oryza sativa
  Clone ID: TF_OsC39025_1.pep
MRMCDDVRFHQTKPSKPHTLARVVFLLAAAALGNVSGAVYHADPAAAVYASLVPGMAVVPGRAPPSAVQIEAARRWKELEKMALRSVNLMVTCAGAIQAGDYAAAAGSLSDAREIFAKMPTTRTGIGRVLTHFADALAERLFPAFPQSAPPPPPPRGEQRELFRGFYEAGPYLKFAHLAANQAILEAFEGCNSVHVIDFALTDGIQWPSLIQALAVRPGGPPFLRITGIGPHAAGNRDELRDVGLRLAEFARSCSVPFAFRGIAADQLDGLRPWMFQVAPGEAVAINSVLQLHRLLVDQDAAAAASFPAPIDGVLDWVASMNPRVFTAISRHGGGDGAGNPLAEAYLQGEIADIVSREGSSRVERHEQMPRWVERLRRGGMTQLPLGATGLWQAAMQLREFSGAGFGVQENGGFLTLTWHSQRLYSASAWRATAGKKMTMMASGAADAMEESQNSNTNGGGGGSSGGGHGALNQIMQ

SEQ ID NO: 24999 - protein, 487 aa, Oryza sativa
  Clone ID: TF_OsC545_37.pep
MVRKRPASDMDLPPPRRHVTGDLSDVTAAAAGAPTLSASAQLPALPTQLPAFHHTDMDLAAPAPPAPQQVAAGEGGPPSTAWVDGIIRDIIASSGAAVSVAQLIHNVREIIRPCNPDLASILELRLRSLLNSDPAPPPPPPSHPALLPPDATAPPPPPTSVAALPPPPPAQPDKRRREPQCQEQEPNQPQSPKPPTAEETAAAAAAAAAAAAAAAKERKEEQRRKQRDEEGLHLLTLLLQCAESVNADNLDEAHRALLEIAELATPFGTSTQRVAAYFAEAMSARLVSSCLGLYAPLPSPSPAGARVHGRVAAAFQVFNGISPFVKFSHFTANQAIQEAFEREERVHIIDLDIMQGLQWPGLFHILASRPGGPPRVRLTGLGASMEALEATGKRLSDFADTLGLPFEFCPVADKAGNLDPEKLGVTRREAVAVHWLRHSLYDVTGSDSNTLGPLPSASAVRPPPLVNSGPPGIMATLHPILLIDIVT

SEQ ID NO: 25000 - protein, 590 aa, Oryza sativa
  unsure (1)..(590): unsure at all Xaa locations
  Clone ID: TF_OsC65210_1.pep
PWLFPDLFLLHFRRHQLLRRRRHRHRRCRRRGARAAVREHRARSRRVLRRGQLRPHDSAFLKGMEEANKFLPTENKLIIDLEASSENNXQGSRGGQEVPAQRRQASVDVVVATASGGGGRGRKNPYDDEELELEGGRSSKQTAVQGDDVAARAMFDKVMMPSHENCTEMMEKLRIAMKEEAAKNEASAGGKGGNGKVKGGRRGGRDVVDLRTLLIHCAQAVATDDRRSATELLKQIKQHAKPTGDATQRLAHCFAEGLQARIAGTGSLVHQSLVAKRTSAVDILQAYQLYMAAICFKKVSFIFSNQTIYNASLGKKKIHIVDYGIQYGFQWPCFLRRISQREGGPPEVRMTGIDLPQPGFRPTERIEETGHRLSKYAQEFGVPFKYNAIAAVKMESVRKEDLNIDPDEVLIVNCQYQFKNLMDESVVIDSPRDIVLSNIRKMQPHVFIHAIVNGSFSAPFFVTRFREALFFYSALFDVLDATTPRESEQRLLIEQNIFGRAALNVIACEGIDRVERPETYKQWQVRNQRAGFKQLPLNPEIVQVVRNKVKDCYHKDFVIDIDHQWLLQGWKGRILYAISTWTPNDALSYF

SEQ ID NO: 25001 - protein, 738 aa, Oryza sativa; identical to SEQ ID NO: 17758
  Clone ID: TF_OsC65210_2.pep

SEQ ID NO: 25002 - protein, 711 aa, Oryza sativa; identical to SEQ ID NO: 17760
  Clone ID: TF_OsC2627_1.pep

SEQ ID NO: 25003 - protein, 431 aa, Oryza sativa
  unsure (1)..(431): unsure at all Xaa locations
  Clone ID: TF_OsC364342_1.pep
MGVISGGGGGDDDGYGGGDGMLRSLHSSSSSDTDNNSGGCKNNGGGGGEAAAAVEGGGDQRAVAAAAPSTRDLLLACADLLQRGDLPAARRAAEIVLAAAASPRGDAADRLAYHFARALALPVAPFLRFAHLTANQAILEAVDGARRVHILDLDAVHGVQWPPLLQAIAERADPALGPPEVRVTGAGADRDTLLRTGNRLRAFARSIHLPFHFTPLLLSCATTAPHHVAGTSTGAAAAASTAAAATGLEFHPDETLAVNCVMFLHNLAGHDELAAFLKWVKAMSPAVVTIAEREAGGGGGGGDHIDDLPRRVGVAMDHYSAVFEALEATVPPGSRERLAVEQEVLGREIEAAVGALRRPVVARHRXWGGAARAAGFAARPLSAFAVSQARLLLRLHYPSEGYLVQEARGACFLGWQTRPLLSVSAWQPSSS

SEQ ID NO: 25004 - protein, 572 aa, Oryza sativa
  unsure (1)..(572): unsure at all Xaa locations
  Clone ID: TF_OsC13353_1.pep
MDLHQLLKYRLTGANVVYEIPTENNLQNSPWQANPLKYEFSDSPYTPLSSQFECDNLSALTNTPDNQSSTETISAQPISPLEADSSYRQAGILLQENIQVGADPLYATSRHNMQHALREIETVLMAPDTDDATTSTKHEFEEIKPAQLVRQRSRTWSHESRQPLPGVGRSQFASGGYPTASYEFRPEKRQRELREDPQIIVKQLLTRCAEALSEDRTEEFHKLVQEARGVVSINGEPIQRLGAYLLEGLVARHGNSGTNIYRALKCREPESKELLSYMRILYNICPYFKFGYMAANGAIAEALRTENNIHIIDFQIAQGTQWITLIQALAARPGGPPRVRITGIDDPVSEYARGEGLDIVGKMLKSMSEEFKIPLEFTPLSVYATQVTKEMLEIRPGEALSVNFTLQLHHTPDESVDVNNPRDGLXPDGERAVPEGDYFGRAGVTHQHNAFLDEVWGDHGVLLRHVRVDRXPTCRGTTRRGSAWSSTASPRXIVNIIACEGKDRVERHELLGKWKSRLTMAGFRPYPLSSYVNSVIRKLLACYSDKYTLDEKDGAMLLGWRSRKLISASAWH

SEQ ID NO: 25005 - protein, 619 aa, Oryza sativa; identical to SEQ ID NO: 17744
  Clone ID: TF_OsC134269_1.pep

SEQ ID NO: 25006 - protein, 535 aa, Oryza sativa
  Clone ID: TF_OsC82607_1.pep
MSMQASNRPYRYPDNSQIPYYSRSSMHVGQNGTYHVQQNHEDLYASSDDGSQNGNSKAQGLQAQYCTLDSSSGNFVYPAHSSTSSHISGSPISQQDSHSEHTSGSPASASCVTEVPGLRFTTIEEIENAMFGPEPDTVSSDCSLLTDSAFYQDNWREHLGINTGDLKQVIAACGKAVDENSWYRDLLISELRNMVSISGEPMQRLGAYMLEGLVARLSSTGHALYKSLKCKEPTSFELMSYMHLLYEICPFFKFGYMSANGAIAEAVKGENFVHIIDFQIAQGSQWATMIQALAARPGGPPYLRITGIDDSNSAHARGGGLDIVGRRLFNIAQSCGLPFEFNAVPAASHEVMLEHLDIRSGEVIVVNFAYQLHHTPDESVGIENHRDRILRMVKGLSPRVVTLVEQEANTNTAPFFNRYLETLDYYTAMFEAIDVACPRDDKKRISTEQHCVARDIVNLIACEGAERVERHEPFGKWRARLSMAGFRPYPLSALVNNTIKKLLDSYHSYYKLEERDGALYLGWKNRKLVVSSAWR

SEQ ID NO: 25007 - protein, 197 aa, Oryza sativa
  Clone ID: TF_OsC364882_1.pep
MDHVGNSGLAALEGGGAGNPPEPAPHLGHPANEGSTSTKRGARAARGGDSWRGGVRGGGAGGAARAGAAVGGADESGRHGAGGVVRPCLFLLLAQEAALRHLCVAAGGGAPPPHSVVVCLDWIIGVENCINQLALFTVRLLLLASIIIVIQDAARLNLQPARRCHRSSPRPLAAATAPAPIIPPVTAAAEGDKKRER

SEQ ID NO: 25008 - protein, 599 aa, Oryza sativa
  Clone ID: TF_OsC56535_1.pep
MIISMANPEDFFWEALLKENEAPSPPPVFFDLPATPLANSDGSTDPSSLLDNQLLSYVTRMLMEDEMGSSAAVTNLQCVNRGSTEEANNMLPGSEVVRAFSKGMGEASKLLPRNNSFRTLETVDQVSSDGHCRGGKKKNHDRDEQQLEEELGRSSKLAAMTNAGTEEAGARELLDELMLHAHETCIKDMEKLRIDMDNEAEKTINKKGKKGSSSKVVDLRLLLIQCAQAMATDNQQSAGELLKKIKQHALATGDAMQRVAHYFAKGLEARLAGRGKHLYQNQMRMSLVEYLKVYKLYMAACCFTKVALMFAAMTIMQAVQGKKRLHIVDYGPRCGLHWPDLLRRLGSREDGPPEVRITIVDIPQPAFRPFQRIEEAGHCLSSCANEFRVPFRFQAVVAAKWETVGAEDLHIEPDEVLVVNDLWSFSALMDESIFCDGPNPRDVALRNISKMQPDVFIQGIINGGYGASFLSRFRGALLYYSALFDMLDATTPRDSGLRLALEQNVLGPYALNAIACEGADLVERPEKYKQWQARNHRAGMQQLKLRPDIVDTIRDEVNKYHHKDFLLGEDGQWLLQGWMGRILFAHSAWVRQSQDTSSG

SEQ ID NO: 25009 - protein, 414 aa, Oryza sativa; identical to SEQ ID NO: 17777
  Clone ID: TF_OsC220696_1.pep

SEQ ID NO: 25010 - protein, 524 aa, Oryza sativa; identical to SEQ ID NO: 17770
  Clone ID: TF_OsC98324_1.pep

SEQ ID NO: 25011 - protein, 476 aa, Oryza sativa
  unsure (1)..(476): unsure at all Xaa locations
  Clone ID: TF_OsC1713_5478.pep
MVQDEGSSSSVTSSPLHNFSNMPLHPAAAASPTPPWMVRELRSDERGLCLIHLLLNCAAAAAAGRLDAANAALEHIASLAAPDGDAMQRVAAAFAEALARRALRAWPGLCRALLLPRASPTPAEVAAARRHFLDLCPFLRLAGAAANQSILEAMESEKIVHVIDLGGADATQWLELLHLLAARPEGPPHLRLTSVHEHKELLTQTAMALTKEAERLDVPFQFNPVVSRLDALDVESLRVKTGEALAICSSLQLHCLLASDDDAAAVAGGDKERRSPESGLSPSTSRADAFLGALWGLSPKVMVVAEQEASHNAAGLTERFVEALNYYAALFDCLEVGAARGSVERARVERWLLGEEIKNIVACDGGERRERHERLEXRWARRLEGAGFGRVPLSYYALLQARRVAQGLGCDGFKNSTLGVAISTCRKKRPRSSSPCRKFHGIGSRWRGVSKFHQTSAKVGSSNLKSVPALLSTVTA

SEQ ID NO: 25012 - protein, 490 aa, Oryza sativa
  unsure (1)..(490): unsure at all Xaa locations
  Clone ID: TF_OsC1517_1452.pep
HRGLRPQLRIPVARSVQVSVGEGRRAAGGEDYGHRLPAAGVPASRPDRGDRPAAEQLRAPIRRAIQVPSHCCKVGDGPPRGPPPRPRRRRRRRRRGARGELPPLLERPAGRERGCGQPEPQRHGAQQHPRHEASRVRPVRRQWRVRRALLPDALQGDALLLLVAXSTCWTPPSRATTTSGCSSSENFIFFFATIVXACVLFCLLTIYYSAETLKLIVAGLLLEELLISRIRFIFFSNXRGGDIYIEQGLLTSAEGVHFTHTTLQTRVTQPVGINHVGRPPSFHDKAFRKPTQVYHMPTRGVPDQQQFYPSCFSDFKFEGVRRYSHRVHEYRDATRWLQGDMAELAPTWRLRGCHVGRREVDDDAGRNGRXRTTAASGGANHGDTGESEHTGWLHETRGDEPTARIRLRKLDGGKSRRRQLAGREEGNGDEVTRGRFPAVRASTRLRESDASVGLGGATPSEAGDERVLRSSSGDGGEHTASDGNGRGGAG

SEQ ID NO: 25013 - protein, 709 aa, Oryza sativa
  unsure (1)..(709): unsure at all Xaa locations
  Clone ID: TF_OsC1321_1.pep
MRAALFGAERSGVVDHGGGDKEELFWPAGKGGLVVVEPRSVLDCTRSPSPPYSTSTLSSSLGGGSADSTGVAAVSESSTAAAGATKWGAPGEHGGGGKEEWGGGCELPPIPGALDVGLVGGEGWDATATLGNAAGPDQSFLNWIIGAAGDLEQPGPPLPVLQQPLIDNAGFGIPAVDTMGFSLDHPLSGVASDLSSSGAHTATGGGGKASLGFGLFSPEATSLEQPPPSMLFHEGIDTKPPLLGAQPQFLLNHYQPQPPNPAAALFMPLPPFPEHNHQSPHLQPPLKRHHAIPDDLYLARNQQQSSAVAPGLAYSPPLHGPAPFQLHPSPPPIRGAMKSTAAEAAQQQLLDELAAAAKATEAGNSVGAREILARLNQQLPQLGKPFLRSASYLKEALLLALADSHHGSSGVTSPLDVALKLAAYKSFSDLSPVLQFTNFTATQALLDEIGGMATSCIHVIDFDLGVGGQWASFLQELAHRRGAGGMALPLLKLTAFMSTASHHPLELHLTQDNLSQFAAELRIPFEFNAVSLDAFNPAEXISSSGDEVVAVSLPVGGCGRAPALPAILRFVKQLCPKVVGPIVHGGVRADLPVSQHFQYCFESCGFLADSLDAAGIDADSACKIERFLIQPRVEDAVIGRHKAQKAIAWRSVFAATGFKPVQLSNLAEAQADCLLKRVQVRGFHVEKRGAALTLYWQRGELVSISSWRC

SEQ ID NO: 25014 - protein, 944 aa, Oryza sativa
  unsure (1)..(944): unsure at all Xaa locations
  Clone ID: TF_OsC112554_1.pep
MPFGGSAREGHAGTLLQHHLIHGVGLAAAGKLVSSSSAAAAAAGAGGFWEPRSVLDHRHSPSPSPPTSASTLSSPLADVAALAGANAKNVSVSPPPPGWGTGGGGGGGEEVVAAKEEWVHQLTPLDMGLGAGEGWDAAGNVLSDAAAAATSGMAPDNTFLRWIIGGGEDASAAMAGVMDPPVLELDHGGGGXRRRARRVRAVRAAAGXEDTKPVVPFAAGHPPPNFLLQHHHHHPQPHAAFFGAHHPSFDAAPPPSKRHHPMAAAPAPKLPPFPAGGFVPALKPKAEAANDEAAAAVEQLAEAAKLAEAGDAFGAREILARLNYRLPAAPTAGTPLLRSAFYFKEALRLTLSPTGDAPAPSASTPYDVVVKLGAYKAFSEVSPVLQFAHLTCVQAVLDELGGAGCIHVLDFDIGMGEQWASLMQELAQLRPAAALKVTALVSPASHHPLELQLIHENLSGFAAELGVFFHFTVFNIDTLDPAELLANATAGDAVAVHLPVGPAHAAATPAVLRLVKRLGAKVVVSVDRGCDRSDLPFAAHLFHSFHSAVYLLESIDAVGTDPDTASKIERYLIHPAIEQCVVASHRAASAMDKAPPPPWRAAFAAAGFAPVQATTFAESQAESLLSKLGSASASACADAECHVAMVLYCPLIKERERKRWNVHLVIVLVELNTPQAEKNQREVGGYGGEKNKILSEYNLLPLPVLEMQRKGGNHGVKRPCFTEMAAKHLRVRTGTSRTAAATLDGYTTLTWDSAPEWPWHRMHKPDRLRWAHWRVTGEPQCAAGAVAIGQASGHTGVRDTAGANWQETCIVVTEMDVKLADKFRKKWYHSSKLQKRRCTVGLIKQDLKVQNQGGESEASRHKGLQISFRQVQISLRKPNRKCKHSGQTVKLINENCYYLSTKRNNLKIKEVNYICYIYAEELHPLKVMFRNTQAKICQIDVQKS

SEQ ID NO: 25015 - protein, 447 aa, Oryza sativa
  Clone ID: TF_OsC48106_1.pep
KKKPVPSFDSLCLGAARYGTREQLPATRQTAQAASPSRARQRTGEEEEAAAETRGLRLLSLLLRCAEAVAMDQLPEARDLLPEIAELASPFGSSPERVAAYFGDALCARVLSSYLGAYSPLALRPLAAAQSRRISGAFQAYNALSPLVKFSHFTANQAIFQALDGEDRVHVIDLDIMQGLQWPGLFHILASRPTKPRSLRITGLGASLDVLEATGRRLADFAASLGLPFEFRPIEGKIGHVADAAALLGPRHHGEATVVHWMHHCLYDVTGSDAGTVRLLKSLRPKLITIVEQDLGHSGDFLGRFVEALHYYSALFDALGDGAGAAEEEAAERHAVERQLLGAEIRNIVAVGGPKRTGEVRVERWGDELRRAGFRPVTLAGSPAAQARLLLGMYPWKGYTLVEEDGCLKLGWKDLSLLTASSWEPTDGDADADVAVAGDTPHESHDS

SEQ ID NO: 25016 - protein, 544 aa, Oryza sativa; identical to SEQ ID NO: 17787
  Clone ID: TF_OsC84233_1.pep

SEQ ID NO: 25017 - protein, 986 aa, Oryza sativa; identical to SEQ ID NO: 17791
  Clone ID: TF_OsC54001_3.pep

SEQ ID NO: 25018 - protein, 715 aa, Oryza sativa; identical to SEQ ID NO: 17794
  Clone ID: TF_OsC1321_2.pep

SEQ ID NO: 25019 - protein, 560 aa, Oryza sativa; identical to SEQ ID NO: 17795
  Clone ID: TF_OsC340632_1.pep

SEQ ID NO: 25020 - protein, 617 aa, Oryza sativa; identical to SEQ ID NO: 17796
  Clone ID: TF_OsC4431_1.pep

SEQ ID NO: 25021 - protein, 593 aa, Oryza sativa; identical to SEQ ID NO: 17782
  Clone ID: TF_OsC545_35.pep

SEQ ID NO: 25022 - protein, 493 aa, Oryza sativa; identical to SEQ ID NO: 17789
  Clone ID: TF_OsC33690_2.pep

SEQ ID NO: 25023 - protein, 603 aa, Oryza sativa; identical to SEQ ID NO: 17801
  Clone ID: TF_OsC305550_1.pep

SEQ ID NO: 25024 - protein, 247 aa, Oryza sativa
  Clone ID: TF_OsC138508_1.pep
SKALADRRVPATSLKVTVVADPTSPFTPAMTQSLAATCERLKKLAQQAGIDFRFRAVSCRAPEIEASKLGCEPGEALAVNLAFTLSRVPDESVSPANPRDELLRRVRALGPRVVTLVEQELNTNTAPMAARFSDASAHYGAVLESLDATLGRDSADRTRAEAALASKVANAVGREGPDRVERCEVFGKWRARFGMAGFRAVAIGEDIGGRERARAGPARPGRDGTPDGGRLGVGWMGRVVTVASAWR

SEQ ID NO: 25025 - protein, 584 aa, Oryza sativa
  unsure (1)..(584): unsure at all Xaa locations
  Clone ID: TF_OsC1517_1409.pep
MAAAPKPEELVVAIEQPFSPSLFLDLPPTPHHDDDPNNVNDDLLLPFISRILMEDDIDDKFFYQFPDHPALLQAQQSYAQILHAPATSSSSDDTTINNNTTNSTSVPDTLAMPDHDADTQSAPDDMEMLYMAFLKGREEATKFLPTNNTLFSGFKAEPVLDIQPTFTFGPSGGGRGRKNRHAEEDDLETETSRSSKLMAPEHDDAAAADEIFDEIILNGYQMIIKGIDELRVAMGSQSQADKNGRRASRAKTAVVDLHTLLIHCAQAVATGDWRSATELLKQIKQNSSARGDATQRMACCFAEGLEARLAGTGSQMYQSLVAKRTSTVDFLKAYKLFTAACCIKKVSVIFSNKTIYNAVAGRRKLHIVDYGLSYGFQWPALFFLLGAREGGPPEVRMTGIDVPQPGFRPADQIEETGRRLSICARQFGVPFKFRAIAAKWETVRREDLHLDPEEEEEEVLVVNCLHGLNTLQDESVVVDSPSPRDVVLDNIRDMRPHVFVQCVVNGAYGAPFFVTRFREALFFYSAHFDMXDATIPRDNDDRLLIERDMLGRCALNVIACEGADRVDRPETYKQWQVRNHRAGL

SEQ ID NO: 25026 - protein, 493 aa, Oryza sativa; identical to SEQ ID NO: 17727
  Clone ID: TF_OsC180166_1.pep

SEQ ID NO: 25027 - protein, 983 aa, Oryza sativa
  Clone ID: TF_OsC545_17.pep
MAAHTVTDPLEELWNHTMSMDKTHLMCFYPSKITMGGVWTGDNPLDFSIPLLLFQILLITSTTRAATLLPRLPTYISQILAGFLLGPSVLGHLPHFSNLVFPVRSLFVLESMALLGLVYYTFIVGVEIEVSAITRAGIRSFGFAIGCTLPPFLVGALTGYVALSTDDKHKGDTFLNKLSFPIFLGSTFSSTAFAVLARNIAELKLAGTDVGQLTLSASLINDTFAWTGLTVATVLGHSRCTITQTTWTLTSGVVIFGASYLLLRPMLLRLARRAAEGEAVGEDRECWILIGVMVAALVADAGGTHAIFGAFVFGLAVPNGPVGVALVEKVEDFVRPPHRHKITNMHSAVLLMVAAMVAAVLKVVAAIGVADHQEQHHLAAPMVRKRPASDMDLPPPRRHVTGDLSDVTAAAAGAPTLSASAQLPALPTQLPAFHHTDMDLAAPAPPAPQQVAAGEGGPPSTAWVDGIIRDIIASSGAAVSVAQLIHNVREIIRPCNPDLASILELRLRSLLNSDPAPPPPPPSHPALLPPDATAPPPPPTSVAALPPPPPAQPDKRRREPQCQEQEPNQPQSPKPPTAEETAAAAAAAAAAAAAAAKERKEEQRRKQRDEEGLHLLTLLLQCAESVNADNLDEAHRALLEIAELATPFGTSTQRVAAYFAEAMSARLVSSCLGLYAPLPSPSPAGARVHGRVAAAFQVFNGISPFVKFSHFTANQAIQEAFEREERVHIIDLDIMQGLQWPGLFHILASRPGGPPRVRLTGLGASMEALEATGKRLSDFADTLGLPFEFCPVADKAGNLDPEKLGVTRREAVAVHWLRHSLYDVTGSDSNTLWLIQRLAPKVVTMVEQDLSHSGSFLARFVEAIHYYSALFDSLDASYSEDSPERHVVEQQLLSREIRNVLAVGGPARTGDVKFGSWREKLAQSGFRVSSLAGSAAAQAALLLGMFPSDGYTLIEENGALKLGWKDLCLLTASAWRPIQASGR

SEQ ID NO: 25028 - protein, 553 aa, Oryza sativa
  Clone ID: TF_OsC4418_1.pep
MSFIRRADPSTTYADNLYIHKFGTPNSNFAARRYASDTQLFRYGPEPYNPENSFYNQQASPMPYMVTADGHSPSSADNSCSDVAKDSPLVSNVSQQNSQSISDNQSSELEVEFDEDDIRMKLQELEHALLDDSDDILYEISQAGSINDEWADPMKNVILPNSPKESESSISCAGSNNGEPRTPKQLLFDCAMALSDYNVDEAQAIITDLRQMVSIQGDPSQRIAAYLVEGLAARIVASGKGIYKALSCKEPPTLYQLSAMQILFEICPCFRFGFMAANYAILEACKGEDRVHIIDFDINQGSQYITLIQFLKNNANKPRHLRITGVDDPETVQRTVGGLKVIGQRLEKLAEDCGISFEFRAVGANIGDVTPAMLDCCPGEALVVNFAFQLHHLPDESVSIMNERDQLLRMVKGLQPKLVTLVEQDANTNTAPFQTRFREVYDYYAALFDSLDATLPRESPDRMNVERQCLAREIVNILACEGPDRVERYEVAGKWRARMTMAGFTPCPFSSNVISGIRSLLKSYCDRYKFEEDHGGLHFGWGEKTLIVSSAWQ

SEQ ID NO: 25029 - protein, 313 aa, Oryza sativa
  unsure (1)..(313): unsure at all Xaa locations
  Clone ID: TF_OsC152890_1.pep
TEFYQLQTKPVRENLPSQSSSFASSNGSSVTFSEGFESLLSPAGVLPDVSLNDFVVQNQQALQFRRGFQEASKFLPDESKLVIDVDKLYSGDEGSRFLGEVRQEKKLVKVKTETSDVESAGHRGKKHFYGDDLDAEEGRCSKHSAQGIDTDHLVRDLMDKVLLCNGETCSKGVKELREALQHDVAKHSGGGHGKGSSHGKGRGKKQPKKEVVDLETLLIHCAQSVATDDRRSATELLKQIRQHAHANGDGDQRLAHCFANGLEARLAGTGSQIYXKNYTITRLPCTDVLXAYQLYLAACPFKKISPLLLIKQF

SEQ ID NO: 25030 - protein, 731 aa, Oryza sativa
  Clone ID: TF_OsC6079_1.pep
MGLDNNFGELSGMFCGLSYDGYTDHGSQSDYFRFADPQPAIVPQMDAGPSSAASSTASRAAVSSGTDNPEDWEFISDESLNYISRMLMEEDIDEKVSMYQEESAALRAAAKPFYDILGHKFPPSPDRQLVAWPLDSPSESSTSSYPHSLASSVTSSNISGAVDSSQRRYVGHSEYRSLSGHSSQPPVGPSSDVRNAMETLEDPLISNGRIPEYLFESFPTWDFRRGVDEAQKFLPGSDKVVIDLEAGGVAKRQEAGKAISLNVSKAEVLKVKKNRQSEDLDVMEGRNSKQSAFCSDEPDWIEMFDVLLRQTEKKATDLRKMMRFEASKNSPVAQPKGPSGTRSRGRKPTKKDVVDLRTLLIHCAQAVAADDRRTANELLKQIRQHAKPNGDGSQRLAYCFADGLEARLAGTGSQLYHKLVAKRTTASDMLKAYHLYLAACPFKRLSHFLSNQTILSLTKNASKVHIIDFGIYFGFQWPCLIRRLFKREGGPPKLRITGIDVPQPGFRPTERIEETGQRLAEYAEKIGVPFEYQGIASKWETICVEDLNIKKDEVVIVNCLYRFRNLIDETVAIDSPRNRVLNTIRQVNPAIFIHGIVNGSYSVPFFITRFREALFHFSALFDMLETTVPRDDAQRALIERDLFGREALNVIACEGSDRVERPETYKQWQVRNLRAGFVQSPLNQDIVLKAKDKVKDIYHKDFVIDEDSEWLLQGWKGRIIYAISTWKPNNN

SEQ ID NO: 25031 - protein, 495 aa, Oryza sativa; identical to SEQ ID NO: 17738
  Clone ID: TF_OsC382432_1.pep

SEQ ID NO: 25032 - protein, 473 aa, Oryza sativa
  Clone ID: TF_OsC316237_1.pep
MMQFTHTAPPPPPLHPNGHGLGLGLYLDVGATRGGGGARPWSSSSSTTTLGGSGYFPSSAAASKISLGNLNSTGCMEQLLVHCANAIEANDATLTQQILWVLNNIAPADGDSNQRLTAAFLCALVSRASRTGACKAVTAAVADAVESAALHVHRFTAVELASFIDLTPWHRFGYTAANAAIVEAVEGFPVVHIVDLSTTHCMQIPTLIDMLAGRAEGPPILRLTVADVAPSAPPPALDMPYEELGAKLVNFARSRNMSMDFRVVPTSPADALTSLVDQLRVQQLVSDGGEALVVNCHMLLHTVPDETAGSVSLTTAQPPVSLRTMLLKSLRALDPTLVVVVDEDADFTAGDVVGRLRAAFNFLWIPYDAVDTFLPKGSEQRRWYEAEVGWKVENVLAQEGVERVERQEDRTRWGQRMRAAGFRAAAFGEEAAGEVKAMLNDHAAGWGMKREDDDLVLTWKGHNVVFASAWAPS

SEQ ID NO: 25033 - protein, 602 aa, Oryza sativa; identical to SEQ ID NO: 17739
  Clone ID: TF_OsC165556_1.pep

SEQ ID NO: 25034 - protein, 703 aa, Oryza sativa
  Clone ID: TF_OsC33690_1.pep
MDVRFGPEEQIVWPASVLAGILMCAAVYDITREVSSRCYKGYNGLNELHKLEWNNRGFSTFHALVAAVVSFYLLVISDLFSKDVHGAIIIDRKSWMSDAMFGVSLGYFLTDLLMILWHFPSLGGKEYLLHHGLSMYAISLALLSGKGHVYILMVLITEATTPFVNLRWYLDLAGRKDSKLYLYNGVALFAGWLVARVILFVYFFAHVYLHFDQVRTVFPLGFYSMMAVPPAMSAMNLLWFRKICKGMVKAMSSANRSQCAKTDEGCAGEDDSPEFVEPPAAAAAAGTFEQRPELGACKEVYSEEGGAAEERTGVAMAGADVEQVAVEDEEEAHGVRMIALLMECAAAMSVGNLAGANGALLELSQMASPYAASCGERLVAYFARAMAARLVGSWVGVVAPMAPPPSCGAINAAFRALYNVAPFARLAYLACNQAILEAFHGKRLVHIVDLDVVPGGALQWLSLLPALAARPGGPPVIRVTGFGMSASVLHDTGNQLAGLARKLCMFFEFYAVAKRPGDADAVADMPGRRPGEAVAVHWLRHAMYDAAGDDGASMRLVRWLEPARFVSALHHYSAVFDAMGASRPDGEDASRHLAEHGVLGREIANVLAVGGPARSSGREGPGSWREVLARHGFAHAGGGGGGRAQLVAAACPGGLGYTVAGDHDGTVRLGWKGTPLYAPQEMKNGLSWIVASKTSGNKMSYGS

SEQ ID NO: 25035 - protein, 471 aa, Oryza sativa
  unsure (1)..(471): unsure at all Xaa locations
  Clone ID: TF_OsC68212_1.pep
MGEVKMSLKCSVDPKFRMPSLEAVFKMVEDKYLHSYKILPPEFSIGSLMNEICQCVVQLGSDHIAEHNTESDVAGNGRCSQNEPMTGSIPFVKPIACEDGGNRKCKSAGESFIVEDSENSSVAKQQTHLALANLKPIHDVTDISKGEERVRISVANEFASEKCPPSFYYIRGNLVFQNAYVNISVARIGDEDCCADCFGNCLSAPIPCACTRETGGEYVYTPEGLVRTPFLDECVSMNRFPEKCHKFFCKSSCPLERSRNEASPEPCRGHLARKFIKECWSKCGCNMQCGNRVVQRGITCNLQVFFTGEGKGWGLRTLDELPKGAFVCEYVGEVLTSTELHERTLQNMNNGRHTYPVLLDADWGSEGVLKDEEALXLDSTFYGNLGVFINHRCYDANLVEIPVEVETPDHHYYHLAFFTTKKVEAFEELTWDYGIDFGDGKDPVKAFQCLCGSKYCRGIRHPRKRGKAAAK

SEQ ID NO: 25036 - protein, 198 aa, Oryza sativa
  unsure (1)..(198): unsure at all Xaa locations
  Clone ID: TF_OsC38528_1.pep
MPRPAKIRKKHENVFDQLIKAIKAPVDFDLPPVLKEWKSNYYVPIKRNAYITRKRVEDDGIFCSCTPSGSSATCDKDCQCGMLFSCCSSTCKCENKCANKPFQHRTLRKTKLIKTEKCGNGVVAEEDIKKGEFVIEXXGEVIDDRTCEQRLWKMKRQGDTNFYLCEVSXNMVIDATNKXNMSRFINHSCEPNTEMQKW

SEQ ID NO: 25037 - protein, 682 aa, Oryza sativa
  unsure (1)..(682): unsure at all Xaa locations
  Clone ID: TF_OsC103012_1.pep
MEVSPVPKPPLEAALALRRSVRCLNRTRRPTYVEQEEPKESAGRRRGGKRKREEEKKEPVAQHAMKPVRMGDAASERKPSSEGKPMPAIAAEPVSCAGFARPAAEDDVLGNGKSAKLRVKETLRAFTSHYLHLVQERMLSDNALVEFQEEQKRAQAVLQEGQKRPSKRPDLKAITKMQESNAVLYPEKIIGELPGVDVGDQFYSRAEMVVLGIHSHWLNGIDYMGMKYQGKEEYANLTFPLATCIVMSGIYEDDLDKADEIIYTGQGGNDLLGNHRQIGSQQLQRGNLALKNSKDNGNPIRVIRGHISKNSYTGKVYTYDGLYKVVDDWVQNGVQGHVVFKYKLKRLEGQPSLTTSEIDYYVWSCFVYSVPFLVTLISCCMTCALLLSRLVCDDISGGQENLPIPATNLVDDPPVPPTGFVYSKSLKIPKGIKIPSYCNGCDCEGDCANNKNCSCAQRNGSDLPYVSHKNIGRLVEPKAIVFECGANCSCNNNCVNRTSQKGLQYRLEVFKTASKGWGVRTWDTILPGAPICEYTGVLRRTEEVDGLLQNNYIFDIDCLQTMKGLDGREKRAGSDMHLPSLHAENDSDPPAPEYCIDAGSIGNFARFINHSCEPNLFVQCVLSSHNDVKLAKVTLFAADTILPLQELSYDYGYVLDSVVGPDGNIVXLPCFCGAPYCRKRLY

SEQ ID NO: 25038 - protein, 812 aa, Oryza sativa
  Clone ID: TF_OsC497_1.pep
MAGTRQTTSVPMDNAAVVDAKPLRTLTPMFPAALGLHTFTAKENSSSIVCITPFGPYAGGTEQAMPASIPPMFASPAAPADPNQRQPYAVHLNGAAPANGTANNTGVIPDLQIAVAGTVESAKRKRGRPKRVQDSSVPSAHLVPSAPGGNITAVQTPPSATTDESGKKKRGRPKRVQDVPVLSTPSAPQVDSTVFQTPASAVNESVTRKRGRPRRVQDGADTSAPPIQSKYNEPVLQTPSAVTLPEDGKRKRGRPKRVPDGALIPLSHSGVSIDDDSGEIITGKRGRPRKIDVNLLNLPSLFSDDPRESVDNVLMMFDALRRRLMQLDEVKQGAKQQHNLKAGSIMMSAELRANKNKRIGEVPGVEVGDMFYFRIEMCLVGLNSQSMSGIDYMSAKFGNEEDPVAISIVSAGVYENTEDDPDVLVYTGQGMSGKDDQKLERGNLALERSLHRGNQIRVVRSVRDLTCPTGKIYIYDGLYKIREAWVEKGKTGFNVFKHKLLREPGQPDGIAVWKKTEKWRENPSSRDHVILRDISYGAESKPVCLVNEVDDEKGPSHFNYTTKLNYRNSLSSMRKMQGCNCASVCLPGDNNCSCTHRNAGDLPYSASGILVSRMPMLYECNDSCTCSHNCRNRVVQKGSQIHFEVFKTGDRGWGLRSWDPIRAGTFICEYAGEVIDRNSIIGEDDYIFETPSEQNLRWNYAPELLGEPSLSDSSETPKQLPIIISAKRTGNIARFMNHSCSPNVFWQPVLYDHGDEGYPHIAFFAIKHIPPMTELTYDYGQSQGNVQLGINSGCRKSKNCLCWSRKCRGSFG

SEQ ID NO: 25039 - protein, 123 aa, Oryza sativa
  Clone ID: TF_LIB4309-028-R1-N1-B3.pep
IGNRYDNSLAQGMSELMLGTQAGRSMAEGDESSGFTIDAASKGNVGRFINHSCSPNLYAQNVLYDHEDSRIPHVMFFAQDNIPPLQELCYDYNYALDQVRDSKGNIKQKPCFCGAAVCRRRLY

SEQ ID NO: 25040 - protein, 420 aa, Oryza sativa
  Clone ID: TF_OsC250784_1.pep
PGLQESARGNCLAPRGSYIRVLGGKAIGNKAAGDRRLERGNLALKNSIETKTPVRVIHGFKGHSKGEASHSKSKQISTYIYDGLCMVVDYWKEGPEGSMVYKYKLQRIPGQPELALHIIKATRKSKVREGVCVPDISQGRERIPIPAINTIDDTQPTAFKYTTEVIYPHSYAKEPLKGCDCTNGCSDSNRCACAVKNGGEIPFNSNGAIVEAKPLVYECGPSCRCPPTCHNRVSQHGIKIPLEIFKTGNKGWGVRSLSSISSGSFVCEYAGEVLQENGDEHVETDEYLFDIGHHYHDEVWEDPKFEGILGLESSTSKTTEDTEGSKTTEDTEGSTIDASKCSNVGRFINHSCSPNLYAQNVLWDHDDMKKPHIMFFATENIPPLQELTYDYNYGKVEDKNGKEKVKPCFCGSPDCSRRLY

SEQ ID NO: 25041 - protein, 1015 aa, Oryza sativa; identical to SEQ ID NO: 17834
  Clone ID: TF_OsC137835_1.pep

SEQ ID NO: 25042 - protein, 714 aa, Oryza sativa
  Clone ID: TF_OsC3086_1.pep
PCVRPRVRGRVGEEEVLRKMRVALPDDYSEKLLSQKNGTENLELPEVKDYQPRKVPGDEVLEQEVYGIDPYTHNLLLEMMPTELDWPSSDKHTFVEELLLNTLNKQVRQFTGSGNTPMVYPLKPVIEEIQKSAEESGDRRTSKMCLGMLKAMRNHPEYNYVAYRKGLGVVCNKTGGFGVDDFVIEFFGEVYPSWRWYEKQDGIKHIQNNSDDQAPEFYNIMLERPKGDRDGYDLVFVDAMHKANYASRICHSCNPNCEAKVTAVDGHYQIGIYTVRPIAEGEEITFDYNSVTESKEEHEASVCLCGSQICRGSYLNFSGEGAFEKVLMEFHGVLDRHSLLLQACEANSVSQQDLIDLGRAGLGTCLLAGLPGWLVAYTAHLVRFIFFERQKLPHEIFKHNVDEKRQFFTDINMDSEKNDAEVQAEGVLNSRLQNLTHTLDKVRYVMRCIFGDPKNAPPPLVRLTGRSLVSAIWKGEGSLVDELLESMEPHVEEDVLTDLKAKIRAHDPSGSEDIEGEIRSSLLWLRDELRTLSCTYKCRHDAAADLIHMYAYTKCFFRVRDYKTVKSPPVLISPLDLGPKYADKLGPGFQEYCKTYPENYCLGQLIYWYSQNAEPESRLTRARKGCMSLPDVSSFYVKSVKPTQERVYGSRTVRFMLARMENQAQRPWPKDRIWVFKSDPRFFGTPMMDAVLNNSPLDKEMVHWLKTRSNVFLG

SEQ ID NO: 25043 - protein, 678 aa, Oryza sativa; identical to SEQ ID NO: 17832
  Clone ID: TF_OsC34869_2.pep

SEQ ID NO: 25044 - protein, 768 aa, Oryza sativa
  Clone ID: TF_OsC55389_1.pep
MDYCDAWLKRKNESNLLSTVVPGASDNQKMQDTDEMSPKAICDSDAPESDMDFPPGFGPNQESAEHSHSACVEYVTEKTDGRSGSSITLFSGPLGRVQERIRTPVHAPEPSSPPGISVHETPSPAEMPRDEISDMAEMARDEISDMAVDTIPCPADMAASGTSTVPEVTTDKLIIPYVEHQSPSASHASIFEKLDAHEEAELDDSFDEVPPGTEAGLASLVIMEKNKYQPSKSVDSVLDIYRYTSWAFFRQILHESVMKEWASLFSGALSNCFDSWYARKNIVAKTMDDTLRPKEYTYYRKRKLRKNCEASSSEKPMDEQLSRPLRDLVECKVNMKNIHRSSKAGISQRVSVVEKPSKKRAKPSHNDNINLNIQQDLKLLSDKVPKRNRSSHPTSKPLVSSKVPTEDRTTSAMPAKKRKQKNLATESNLKTKAVILSPESHGCEAPTEKRTTAIMPVNKRKKNLSGESKLKAKPLTSPESYVCEAPIDNRTTSTMPAKKRKQKNLSNESNLKKKPLVLCPESYGCARASVSGWEWRDWARNATPSERAQVRGYRVRSILSAPENNVLKSSQVKGSSARTNRVKLRNLLAAAEGTDLLKIMQSKSRKKRLRFQRSKIHEWGLVALESIDAEDFVIEYVGELIRRQVSDIREDQYEKSGIGSSYLFRLDDDYVVDATKRGGLARFINHSCDVPRINELGSKVYKSGGNCNWVLPQYVCVMRACRLYWAEVHCRNVLGFTDRMVRWTNSGYPEEGQQHYYIDWIEDIEFTR

SEQ ID NO: 25045 - protein, 684 aa, Oryza sativa
  Clone ID: TF_OsC96998_1.pep
MEMDTSPSSSAPSSPAASSDSIDLNFLPFLKREPKSEPASPERGPLPLPAAAPPPPPPPPPPPPPPQVQAATVATPVPATPDLSAAAVMTPLQSLPPNPEEETLLAEYYRLATLYLSSAGAAGVIVPAAAPEASAGAVAQPGSGSGAKKRRPRSSELVRVSSLSVQDQIYFRDLVRRARITFESLRGILLRDDERAEVLGLTGVPGFGAVDRRRVRADLRAAALMGDRDLWLNRDRRIVGPIPGISVGDAFFFRMELCVLGLHGQVQAGIDFVTAGQSSSGEPIATSIIVSGGYEDDDDRGDVLVYTGHGGRDPNLHKHCVDQKLEGGNLALERSMAYGIEIRVIRAVKSKRSPVGKVYFYDGLYKVVDYWLDRGKSGFGVYKYKMLRIEGQESMGSVNFRLAEQLKVNALTFRPTGYLGFDISMGREIMPVALYNDVDDDRDPLLFEYLARPIFPSSAVQGKFAEGGGGCECTENCSIGCYCAQRNGGEFAYDKLGALLRGKPLVYECGPYCRCPPSCPNRVSQKGLRNRLEVFRSRETGWGVRSLDLIKAGTFICEFSGIVLTHQQSEIMAANGDCLVRPSRFPPRWLDWGDVSDVYPEYVAPNNPAVPDLKFSIDVSRARNVACYFSHSCSPNVFVQFVLFDHYNAAYPHLMIFAMENIPPLRELSIDYGMIDEWGAAFPS

SEQ ID NO: 25046 - protein, 150 aa, Oryza sativa
  Clone ID: TF_uC-osflM202124b05b1.pep
EIKGWAVRAAEPIPQGTFVCEYIGEVLKMKDDGAIRHVEREAKSGSSYLFEITSQIDRERVQTTGTTAYVIDATRYGNVSRFINHSCSPNLSTRLVSVESKDCQLAHIGLFANQDILMGEELAYDYGQKLLPGDGCPCHCGAKNCRGRVY

SEQ ID NO: 25047 - protein, 594 aa, Oryza sativa; identical to SEQ ID NO: 17824
  Clone ID: TF_OsC3937_1.pep

SEQ ID NO: 25048 - protein, 88 aa, Oryza sativa
  unsure (1)..(88): unsure at all Xaa locations
  Clone ID: TF_OsC4368_4.pep
LPILXNHSCEPNCYSRVISVLGDEHIIIFXKRDINPWEELTYDYRFVSSDQRLPCYCGFPKCRGVVNDVESEGQSAKIRVNTSELFHQ

SEQ ID NO: 25049 - protein, 1153 aa, Oryza sativa; identical to SEQ ID NO: 17816
  Clone ID: TF_OsC38685_3.pep

SEQ ID NO: 25050 - protein, 2139 aa, Oryza sativa; identical to SEQ ID NO: 17818
  Clone ID: TF_OsC61980_1.pep

SEQ ID NO: 25051 - protein, 174 aa, Oryza sativa
  unsure (1)..(174): unsure at all Xaa locations
  Clone ID: TF_OsC55389_2.pep
VKGSSARTNRVKLRNLLAAAEGTDLLKIMQSKSRKKRLRFQRSKIHEWGLVALESIDAEDFVIEYVGELIRRQVSDIREDQYEKSGIGSSYLFRLDDDYVVDATKRGGLARFINHSCDPNCYTKVITVEGQKKIVIYAKRRIYAGEELTXNYKFPLKEKKIPCHCGSTEVPRDQ

SEQ ID NO: 25052 - protein, 673 aa, Oryza sativa
  Clone ID: TF_OsC1123_2.pep
MDRASNFIPGPYQELVDAKPIRSLAPMFPAPLGINVNQSSTPPLVCVTPVGQFPVGFGSGILPTFGSTTAFTTTANGVSYTSYTNNGAIDATPISAYKTRPGIVSLDGDEPYSGSASGRKSKRSSGSAADGSNGVKFKRPKPVYKNFVAGKELAFLPPSSSDPREVVEAVHMTFEALRRRHLQLDEIQETSKRADLKAGAIMMASNIRANVGKRVGLVPGVEIGDIFYFRMELCIIGLHAPSMGGIDYMSAKFGSDEDSVAICIVAAGGYENVDDDTDTLVYSGSGGNSRNSEERHDQKLERGNLALERSLHRKNEIRVVRGFRDPFCLTGKIYIYDGLYKIQESWKERTKSGINCFKYKLLREPGQPDGAALWKMTQGWIDNPASRGRVILPDLSSAAEALPVCLVNEVDHEKGPGHFTYASQVKYLRPLSSMKPLQGCGCQSSVCLPGDPNCACGQHNGGDLPYSSSGLLACRKPIIYECGDACHCTTNCRNRVTQKGVRFHFEVFRTANRGWGLRCWDPIRAGAFICEYTGEVIDELKVNLDDSEDDYIFQTVCPGEKTLKFNFGPELIGEESTYVSADEFEPLPIKISAKKMGNVSRFMNHSCSPNVFWQPVQHDHGDDSHPHIMFFALKHIPPMTELTFDYGVAGSESSGSRRTKNCFCGSSNCRGVF

SEQ ID NO: 25053 - protein, 895 aa, Oryza sativa
  Clone ID: TF_OsC2056_1.pep
MASSSSKASDSSSQRPKRPDQGPSGKDAAGLVALHGKLAQLKRQVQSTRLAAIKERVEANRKALQVHTCALFDVAAAAEVASRGAEGGNALSRGAAEGHRRFVGWDSASGPGERELVHVQEENLVAGTLVLSSSGGSGASHRTVVQLVKLPVVDKIPPYTTWIFLDKNQRMADDQSVGRRRIYYDPIVNEALICSESDDDVPEPEEEKHVFTEGEDQLIWKATQDHGLSREVLNVLCQFVDATPSEIEERSEVLFEKYEKQSQSSYKTDLQLFLDKTMDVALDSFDNLFCRRCLVFDCRLHGCSQNLVFPSEKQPYGHELDENKRPCGDQCYLRRREVYQDTCNDDRNACTTYNMDSRSSSLKVSATILSESEDSNRDEDNIKSTSIVETSRSKITNSEYADKSVTPPPGDASETENVSPDMPLRTLGRRKISKHASKSNDHSPDKRQKIYSSPFPFAMSVLNKQSVPEIGETCPDSIESAVDQLPSLDDPNKKISTKDMCAGSTTNTTENTLRDNNNNLFISNKEHSISHWSALERDLYLKGIEIFGKNSCLIARNLLSGLKTCMEVASYVYNNGAAMAKRPLSGKSILGDFAEAEQGYMEQDLVARTRICRRKGRARKLKYTWKSAGHPTVRKRIGDGKQWYTQYNPCGCQQMCGKDCACVENGTCCEKYCGCSKSCKNRFRGCHCAKSQCRSRQCPCFAASRECDPDVCRNCWVSCGDGSLGEPLARGDGYQCGNMKLLLKQQQRILLGKSDVAGWGAFIKNPVNRNDYLGEYTGELISHREADKRGKIYDRANSSFLFDLNEQYVLDAYRKGDKLKFANHSSNPNCYAKVMLVAGDHRVGIYAKDRIEASEELFYDYRYGPDQAPAWARRPEGSKKDEASVSHHRAHKVAR

SEQ ID NO: 25054 - protein, 841 aa, Oryza sativa; identical to SEQ ID NO: 17820
  Clone ID: TF_OsC109084_1.pep

SEQ ID NO: 25055 - protein, 183 aa, Oryza sativa
  unsure (1)..(183): unsure at all Xaa locations
  Clone ID: TF_OsC380292_1.pep
DNSYRSLLVSCSRACHCSDECTNKPFRRQKKIEIVKWNTSXTQYCGWGSRALEAIEKDDFVIEFVGEVLEDETCEERLEDMRRRGDKNFYMCKVKKDFVIDATFKGNDCRFFNHSCEPNCQLQKWQVNGKTRLGVFASKAIEVGEPLTYDYRFEQHYGPEIECFCGAQNCQGNMSTPYILNFE

SEQ ID NO: 25056 - protein, 948 aa, Oryza sativa; identical to SEQ ID NO: 17871
  Clone ID: TF_OsC361962_1.pep

SEQ ID NO: 25057 - protein, 40 aa, Oryza sativa
  unsure (1)..(40): unsure at all Xaa locations
  Clone ID: TF_uC-osflM202075a05b1.pep
RAKRTSAVKQLKAQHRLIPSGPSIXNKALELWSLFDLSNA

SEQ ID NO: 25058 - protein, 230 aa, Oryza sativa
  Clone ID: TF_jC-osroLIB3475042f07a1.pep
HASAHASAHASAHASAHASAIISLPPKTVSLKTVDFTSEERAFYNTLEAESREQFKEYAAAGTVKQNYVNILLMLLRLRQACDHPHLVRGHESTSSWMSSLEMAKKLPVERQQSLLVCLQSCSAICALCNDAPEDAVVTICGHVFCNQCILEQLTGDDSVCPVSNCRVRLNSTSLFSRGTLECALSRSTCEFLSDDSCEDMVQGKQPRFDSSYASSKVRAALDILLSLPK

SEQ ID NO: 25059 - protein, 2067 aa, Oryza sativa
  Clone ID: TF_OsC11239_5.pep
MFKRQQSEHLQQAEKQAEQGQPSNSEQRSGDMRPPSMPPQGVPGQQLSSAGMVRPMQPMQGQAGMSNAGANPMAMAQLQAIQAWAKEHNVDLSNPANVTLISQILPMLQSNRMAAMQKQNEVGMASQQQSVPSQMNNDAPGHSNFPSQGAPSKPRQPLPPSTSVSGGAEPKMMNMSNMQMQQQLAAHNRDSSNDRAARPAMSMGNGGQMMHMPQSSGHANKIPEQPNPKNANSEAMQMQYARQLQQANRATAPSANSGETGGSQAPNQAARPPMGFTKHQLHVLKAQILAFRRLKRGDKKLPPEVLDLIMSGPPPDSQAQQVSGPPVTNRERSATSSADEHGRPVESGGIAPERSSLLKAPCLPKVEVSAPEDKTIPASGPMQVMKASPKEPLRIGPVSMPEQTNTTLIKSEQDPERGIQRTPGRSDYNGERGKSLPAESGSADAEQAKRAASSSSVPTPNRDVSRKYHGPLFDFPSFTRKHDSMVSANYNSNLALGYDVKDLLAQEGMIVLGKKREDNLKKISGLLAINLERKRIQPDLVLRLQIEEKKLKLLEFQARMRDEVEQEQQEIMAMPDRVYRKFVRQCERQRVELTRQVQQMQKASREKQLKSIFQWRKKLLEAHWAIRDARITRNRGVAKYHERMLREFSKKKDDDRNKRMEALKNNDVERYRQILLEQQTSVPGDAAQRYNVLSSFLTQTEEYLYKLGGKITAAKNHQQVEEAANAAAAAARAQGLSEEEVKAAAQCAGQEVMIRNTFSEMNAPRENTSVNKYYTLAHAVNERVTRQPSLLRAGTLRDYQLVGLQWMLSLYNNKLNGILADEMGLGKTVQVMSLIAYLMEFKGNYGPHLIIVPNAVLVNWKEVLAVKFNVLVTTYEFVMYDRSKLSRIDWKYIIIDEAQRMKDRESVLARDLDRYRCQRRLLLTGTPLQNDLKELWSLLNLLLPEVFDNRKAFQDWFSKPFQRDVPTHSEEEDDWLETEKKVIIIHRLHQILEPFMLRRRVEDVEGSLPRKVDCSALVTLSDAICHSALFVCYIVNSSCHLQESIVLRCRMSGIQGAIYDWIKSTGTIRVDPEDEKARIQRNAMYQAKTYKNLNNKCMELRKVCNHPLLSYPFMNYYGKDFIIRSCGKLWNLDRILIKLHRSGHRVLLFSTMTKLLDILEEYLQWRQLVYRRIDGTTSLEDRESAIVDFNRPNSDCFIFLLSIRAAGRGLNLQSADTVVIYDPDPNPQNEEQAVARAHRIGQTRDVKVIYMEAVVDNISSYQKEDELRNGGSGDLEDDLAGKDRYMGSIESLIRNNIQQYKIDMADEVINAGRFDQRTTHEERRMTLETLLHDEERYQETVHDVPSLQQVNRMIARTEEEVELFDQMDEEFDWTGDMMKHNQAPKWLRVSSTELDAVVASLSKKPLRNMAAGGISLDTNEKLEKRRGRPKGSGKYSIYREIDDDDFEESDDDSEERNTSSLPEEGEIGEFEDEEDNDDSVPDNKDQSEEEEPINDEGYDFSHGMGRRKAHRSEEAGSTGSSSGGRRLPPPAPSSSSKKLRSLSALDSRPGALSKRTADDLEEGEIALSGDSHLDLQQSGSWNHERDDGEDEQVVQPKIKRKRSIRIRPRPNAEKLDDRSGDGTVPQRGVHLAFQGDGDYDSQFKSEQAFADPASRQQDTVHRTVKQKRNMPSRKAPPATKAGKMTQLSGSGEGSAEHSKENWSNKVIESAGPNSSGTKMSDSMQRKVNLDCYLLALAKEPSMTPLISCGVFTLFYNHNNCKNVINKLWRRIDKEGHQIIPNISSWWRRNENSSFKGLASSTLDLQKIEQRVDGFEYGGVNEFIADMQQMLKSVVQHFSYRHEVRVEAETLHNLFFNIMKIAFPDSDFREAKGAMSFSNPGGGASGSAAQSTKQSASGQKRRSSTSEAEQHGSSTSRHNQHAPVGEVSGRAHTSKSEKDSRHSGPGSREQFTDSAGLFRHPTDMFIVKKKRDRRPSLGSPSSSGRTGPLSPTNAGRMGPAPSPRGARTPFQRDPHPSQQSMHSAGWGAHSVQQSDRGGSSSPGIGDIQWAKPTKRSRTDSGKRRPSHM

SEQ ID NO: 25060 - protein, 811 aa, Oryza sativa; identical to SEQ ID NO: 17851
  Clone ID: TF_OsC4787_1.pep

SEQ ID NO: 25061 - protein, 693 aa, Oryza sativa; identical to SEQ ID NO: 17853
  Clone ID: TF_OsC1528_1974.pep

SEQ ID NO: 25062 - protein, 3975 aa, Oryza sativa
  Clone ID: TF_OsC35792_1.pep
MASSQQVELEAAKLLQKLIQESKDEPAKLATKLYVICQHMKLSGKEQSLPYQVISRAMETVVSQHGIDMDALRSSRIPLAGGPQAGDSSGAMPKDKEIIGSQPPMVGTDASQNMARHSASISGRVPAGPNRSDVAGADIHQGSMSQKSGRSSGMESPASLQIEDTRSMNSHDSLKSDEKTSKKSSSKRKRVDPKAAGDLHSEDNSKSDAMSTGQNIRKGKQPGKAANLLNASFGWNQNAQGPVMKNTQGSVPNLMRPGVNVEGKVNLGSQGTFNSIIPFKEQQLKQLRAQCLVFLAFRNNLQPRKVHLEIALGVGPPASEGGSAGQRGSESRMADGSGKENGNSQENPAIFGRQSDISRLQSTSTGSVADVDSASKDPEIVKKKIKIAEHEKSFEAENIQQTVPIQGTDSEMHSQETISPMPSGQLHYFQGDTRKTTPEIYKADAENLNRNLGWRSADEGDEDLSEQDDLPLSPPKYTMTDKWILDHQKRRYEENKRKALELQKAHRRISASYEKLKENVSSSEDLSAKTKSVIELKKLQLLQLQRRVRSEFLQDFFKPNTTDLDRIKSVKKHRHGRRVKQLEKIEQKMKEERQKRIRERQKEFFADIEAHREKLEDSFKVKRERLKGFNRYVKEFHKRKERIHREKLDRIQREKINLLKNNDVEGYLRMVQDAKSDRVKQLLRETEKYLQKLGAKLQGSKSMDGRVSYASDSTANDIEDESYQPQHYLESNEKYYQLAHRYQMNGLRWLVSLYNNNLNGILADEMGLGKTVQVISLLCYLMETKNDRGPFLVVVPSSVLPGWESELNFWAPSINKIAYAGPPEERRKLFKEMIVHQKFNVLLTTYEYLMNKHDRPKLSKIQWHYIIIDEGHRIKNASCKLNADLKHYRSSHRLLLTGTPLQNNLEELWALLNFLLPNIFNSSEDFSQWFNKPFESNGDSSTEEVENELPEKIERLVRCWPSAYQKLLIKRVEENLGGIGAVKIEGYLPRHYLPSILRLCGKLEMLDRLLPKLKATGHRVLLFSTMTRLLDVMEDYLVWKKYKYLRLDGHTSGQERGALIDKFNNPNSQAFIFLLSIRAGGVGVNLQAADTVIIFDTDWNPQVDLQAQARAHRIGQKKEVLVLRLETVQTVEEQVRASAEHKLGVANQSITAGFFDNNTSAEDRREYLESLLRGGKKEEAAPVLDDDALNDLLARSEDEIDIFESIDKQRREEEMIYESSNIKSVKVVRRKGELGGLDTQHYGRGKRAREVRSYEDQWTEEEFEKLCQVDSPDSPQPGGISRDADVPKVVKLEVPPESSKEPEQAKKEPASSVGDSPPAKRRRGRPRRSDASLSPVTAPPNTGKQEAGTIIDGSSSAPTTTIHSVAPDVTIDSTALSATGNPDVGTEIKGTTPDGTIKPVICTDNKGTASIAVLEGSNAKEVGIPAHSVHEPVSSSAPHPPTPATSRGRKTQAGETPRRRGRKPKSLAASAGDVILSPVVAVGSGEAYASSVVSSYPQGNVSSSHANAMAGLQKDTIIYKPAALLPEGVKGTLTPSGGDKDEMVKTPLAEDIYAGTVTTSGNANSQLPMIAHNENAGLVQGGTDQNLSVATPTIPVVSEGSTKISEVVVADKPAEKQGARRRRKKTSGTGSEDTGVSTRQRAASRRLYGIGTADIAGTDMSTGEKIGIVKEIDGSCQDTSKGLPNIISPSYEKSGYDSQPSTPIAVPINEAALPSGFSEAHATHSELHPARESISSVGHEKLAGAHLEAPPSVSFQAPVQHETRKDYVGVHSEVATTHPETITTHSSVNPVIDHKLANVQFESHASLHTSGKDITTMPSEVDSGAPSKAPGRRRKGSAREPRTRSNSATAASERRARLAGSKQPDDIKMAEMSGNPSTAVCSSTQQQEDNTLKAAHATGSVGEEQNNAENRVREVSMPAGILEAKLELTKQTDQAGHNSEQEQEMVSAAKSASANDEEHKVHEVHQIIADHNALPSSAQYTLQDKIDSSADAGLVPCDKIASVVIAVDDQDPSNASDKDAPASTEDDGNGLQSECVHVDLVLAKQDNTKVEDTQKSNQPAEQGESLEMTGSKFRSETRLEKTEETVDKSGGDNLPTIEKNDDSPIERSSPSADKIAQVAYGGEAGTETTTVEAVSAMNSDGLQDVRNALSTHGLSTNDITVASEEHRDPESHLSGEVSMSGGSSELKLESLNQSESACQSGEVTLEDTHATLDIQIPALIESEEKKSPGGDVHGSEEQHMHEVLHNTVDGSISPSNREQDKLQVHIDTNTDVDIPSSDKDHSTDIVLAGCQAPCDASGKDKLSTCDASGKDMAAPTDDDLNCLQSEDTVIPVADAKDETMLVKAIQNDEMSMGSSHGLPATIQSTDSDRLAEEGESAEITGSKFSCGMEQEKMEEPLDKSVTDNQTSSQINDGSNNMDSQKVDSSLQAADGGDLLVSRGTSVETTTAINTDASDESISVSTQSVKEASTVEIGASTNDIAPACELRKDFESHVSGCVSKPVGLSELRLEELSQTKSVSQSIVANAEETSTRSDIETPAMDASESKSPESDVHELSERVEFMGPTPSANEKSNELHSQELVKMISAAETASTEGHREKDTCEVDHKIDCTIFSPIGDQDTRNRIDGDTDCGVPSCQRNAAFDSENEVSAEINLTGSQAPCDAPNKATPAPTEDDHNGQESEDTVIGAEQGTVEVEAMQIDGISKSYSSDSHATLQSSDSNQLVNSDSKFESSKKHDKTDETSNESRGDNPTHSCTNDDSHDKNLVGCSPSEDLNEDNSAQLADGDDLVGSKDTTAAHASGLKELTSGNYVASSSSHVVQDVTSISKMESVQAGSEEIYHGYSDETIHSARIKPVVGTEITENASVASAPVITIQPDIETEAGVTASLTVLEGSIAEEVDTQVESGHDLVTSTAPLSPAPLPGESHACTDVSCPVAVEVSETKLESANHTASQLGAACTETPNALLNTLIPALPESEETKLSGSDTDGKTIMAELASSSDEHDKVHEVGNETGDDNKLPSSVAEDAVQGEIDGSADMDSQIIAGSSEAEINNSTVATIADSQIPFDPSDKDTLAEDGNGLQREGTTVDVTGSKEDDMEAEEKQMDDSHLPAALQSTESSQPTEHAAPTQDDGNGLQCEGTTVDVSGSKEDIMEVEEKLIDDISGSPSSHLPVALKSTESNQPAEHAVPAEDDGDGLQSEGTAVDVVDSKKDDMEVEEKQIDISRGSSSFLPGALESAELNQPAEHTAPTEDHGNCLQSEGTAVDVPCSKEDNMEVEDQFDGISRGPSSFSPDTLESAELNQAAEHAAPTEDDGNGPQSEGTSVDVAGSKEDNIEVEEKIDDISRGSSSHLPDVLQSTPNQRAEQECLDNSDDVNTSVVSSHAPLSGPKFTCVKELEKADETLETSDAQVADEVCLQTNDGAHNMASGSCSTLEDKNEDSSAQIADCEDLLLRKGTTVDDLDGCVEGHSGLSTHSNDEVRNLVEIVKGMNDTTAGSEVHVDPESHVSDEVSMPVAPSELKVELKNQSEPACQFGAVIVEESNVSLGIQTPALAESEEMTSGGFMHGKEVCASEQTNIGAAAEPASTKDDHDMHEVDKEIVHCTISSPIGDQENLQGNIDGKMDVGLAACQTESDFVSGNDHSRETDLAGSQAPYDASDKEDTAADLIGPKQATLEIEKMQIDGIPEGPSSVPAVLQLTDSNQPAEQERLENSDSKFASTKDQGRVDGTSNLSGGDNAKCSLTNDDSQTVNLVGYSPSEDSNDDDSVQAADSDGVLGNKEGTDDVISAACTDDVSMLKTESIDRHGSDEVDHSTAPSAAIKQESGTEVTCDASVPVSESSISKEIGTSPECDDDQVATAAPHPPTPLSDATDVSADVQIPAGISEAKLEQPNETTSPSGAATEENNTVVSTQIPTLAESEDRTPADTAIQGTEVDSAEPASVSDDENKVTAADDSALPSTGPEDTADDKIDSSADASEK

SEQ ID NO: 25063 - protein, 240 aa, Oryza sativa
  unsure (1)..(240): unsure at all Xaa locations
  Clone ID: TF_LIB4371-027-R1-K1-E7.pep
PVLDARANIGKGARPYYKIFQAFGLVRKVEKGITRWYYPSMLDDLAFDSAALGIALEKPLDLVRLYLSRATLIVVPANLIDHWTTQIQRHVSSDTLNVYVWGDHKKPSAHNLAWDYDIVITTFSRLSAEWGPKKRSVLKQIHWFRVILDEGHTLGSSLALTNKLQMAVSLVASNRWILTGTPTPNTPTSQVAHLHPMLKFLHEEVYGQNYQSWDTGNHXPXEAXMERRRSRLLQLLQRTM

SEQ ID NO: 25064 - protein, 1274 aa, Oryza sativa
  Clone ID: TF_OsC11525_1.pep
MGGDEEEVAGDVRRKLGGYLPAVVSVSSDVGVEALAPLSPCSLFACGGVSLAPNPDGSGATPRSNGRACGGGGVVRQLRALVSSRCVEVEGRVLRAVARRGREGGGGDGEVEARAVVLFDVYLPVSVWSGWQFPRSRAAAAAAVFKHVSCNWDARNALLAFNWTSPDNPHCDDQYIWTCTDCHVLGCEVHQIPSVLNNDKSFDLHEIFKTLPSVMVEKRMQITRITPDEAASGVGIWSVPDDVLYKVLVRLKPRDLIRVAAACHHLRNLSASIMPCMKLKLFPHQEAAVEWMLRREQNLQVLEHPLYKGLCTMDGFPYYINVTSGEISTGSAPTVHDFCGGMFCDEPGLGKTVTALSLILKTHGTLAVPPPGMNVMWCMHKPDKKYGYYELSASNSSNGNIFLSGSKKLRKDVIREDTCSSESLNNGGSVVSTRSSRKRGRLVNPDLNMIAAHPSGKSPMSAPTGAHSTPATHVLKITKNLKHVRKNLMEAYSDGSVGNKRKRDATSELSETWVQCDACRKWRRLLDGTALDSSTAWFCSMNPDSARQKCSIPEESWDLKRKITYLPGFHKKGTPPGNEQNASFFTNILKEHAALIDSETMKALLWLAKLSPKKHIEMEAVGLTRPVLDARANIGKGARPYYKIFQAFGLVRKVEKGITRWYYPSMLDDLAFDSAALGIALEKPLDLIQRHVSSDTLNVYVWGDHKKPSAHNLAWDYDIVITTFSRLSAEWGPKKRSVLKQIHWFRVILDEGHTLGSSLALTNKLQMAVSLVASNRWILTGTPTPNTPTSQVAHLHPMLKFLHEEVYGQNYQSWDTGIHRPFEAQMEDGRSRLLQLLQRTMISARKQDLKNIPPCIKKITFLDFSEGHAKSYNELAVTIRRNILMADWNDPSHVESLLNPKQWKFRTTTIKNVRLSCCVAGHIKVAEAGQDIQETMDALMQLGLDPSSGEYQSIRYALLNGASCFRCRDWCRLPVVTPCRHLLCLDCVALDSEKCTLPGCGNHYEMQTPETRARPENPNPKWPVPKDLIELQPSYKQDDWDPDWQSTTSSKVAYLVNKLRSLKAENIKHGYSRNMANGACLSSQSSCQDHNNVEGRLPHTMPDKVIIFSQFLEHIHVIEQQLTIGGITYAGMYSPMPLGSKRSSLTKFKDDPACMALVMDGTAALGLDLSFVSYVFLMEPIWDRSMEEQVISRAHRMGATRPIFVETLAMRGTIEEQMLKLLQDSNACRQMVNKGTSSTDNEGARPHRSLHDFAESSYLAQLSFVKGSDAAEKL

SEQ ID NO: 25065 - protein, 1087 aa, Oryza sativa
  Clone ID: TF_OsC3788_1.pep
MAASVEAAAAAVVAPPASVGGDEVVVGGGGGGASEQARTLIGALNLLSRNLPLPPAVLHAVSSIYHGGDAWEGEGEEGGEEEVAAAAAAVGDGCGESGEGEEDRADASPGADEGCSFKAPYCHCDDWGVTLIQELEDAVLKNQGPYMSYSELTALKEDRFNTSIQHRLTELEGLPSTRGEDLQMKCLLELYGLKLLDLQKKVRTDISAEYWLHKKCAHPDRQLFDWGMMRIRYPFTMYGIGDSFSMDADDINRKKRFSEDSLFGIWEQQRISRLEEEEKNQAEIRKRKFFSEILNAAREYQLQVPASYKRKKQRNDGVLAWHVRARQRINRMEKSRLQVLKAGDQEAYLRMVEESKNERLKLLLGKTNELLEGIGKAVQRQKDAEHVSRPDGSELPKGSESDDCSQISGLKVESPDEESPSDVDADHHSSADHSKFNAGHRLDSTVHSIEEKVTEQPSALEGGELRPYQLEGLQWMLSLFNNNLNGILADEMGLGKTIQTIALIAYLLEKKEVTGPHLIIAPKAVLPNWSNEFKTWAPSIGTILYDGRPDDRKALREKNFGQRQFNVLLTHYDLILKDLKFLKKNFEEWFNAPFACEVSLNDEEQLLIIHRLHQVLRPFLLRRKKDEVEKYLPVKTQVILKCDMSAWQKAYYEQVTSNGRVSLGSGLKSKALQNLSMQLRKCCNHPYLFVEHYNMYQRQEIVRSSGKFELLDRLLPKLQRAGHRVLLFSQMTKLLDILEVYLQMYQFKYMRLDGSTKTEERGRLLADFNKKDSEYFLFLLSTRAGGLGLNLQTADTVIIFDSDWNPQMDQQAEDRAHRIGQKNEVRVFVLVSVGSIEEEILDRAKQKMGIDAKVIQAGLFNTTSTAQDRRALLQEILRRGTSSLGTDIPSEREINRLAARNDEEFWLVEKMDEERRQRENYKPRLMEGIEVPDWVFANDTLTEKIPADEPQNVLLTTKRRRKEVVYSDSFGDQWMKADDVVEETPRMAPRAKRSAYSSDVQEVDFSERRKRHKSLVNIADDASIPMWTPEKVRAGVSSYSKDENEDDAEDESTTSVLQGGSFTWKTLRRKRSSHFSNSSDSKGRSAF

SEQ ID NO: 25066 - protein, 303 aa, Oryza sativa
  Clone ID: TF_OsC12040_1.pep
MQGRLNLENRIIDSDERAVYQEALQNIIQDKREDDLPEGVLSVPLLRHQKMALAWMVSKENSSHCAGGILADDQGLGKTVSTIALIQKQRIQQSKFMSVDSDRLKAEALNLDDDDEAAPVADNKGEQTKNDEPRKDLGAGSSSTAAGTGDVETCASLMNTAPDKTVERNVERKKKSKASTSSTMQSMTRPAAGTLVVCPASVLKQWANELTDKVGESAKLSVLVYHGGSRTKDPNELAKYDVVITTYTIVANEVPKQNADDDTDQKNGEESSAGNKRKQPPKAQSKSKKKKKKLETSSLPRAD

SEQ ID NO: 25067 - protein, 176 aa, Oryza sativa
  unsure (1)..(176): unsure at all Xaa locations
  Clone ID: TF_uC-osflM202005g10b1.pep
DLVRPYFLRRTKESIESLLPNKADLVIWLKLTPYQIXLYETFMKSNLIDKTVKGSTFVATMLLQKICNHPQNLTAVDSCEEQLALKENRTLQGIVKKLEALIAKNTTKTSNXSSSCKLTFILQLLEKLKEEGHKVLIFSQTRLMLDEIEEALTNKGVHSARMDGTVTASKEKLLLR

SEQ ID NO: 25068 - protein, 1282 aa, Oryza sativa; identical to SEQ ID NO: 17848
  Clone ID: TF_OsC4554_1.pep

SEQ ID NO: 25069 - protein, 174 aa, Oryza sativa
  unsure (1)..(174): unsure at all Xaa locations
  Clone ID: TF_LIB3432-034-P2-K1-D8.pep
DAWADAWADAWAKITSAVKQLKAQHRLILSGTPIQNNVLELWSLFDFLMPGFLGTEKQFQATYGKPLLAAKDPKCSAKDAEAGILAMEALHKQVMPFLLRRTKDEVLSDLPEKIIQDRYCNLSLLQLKLYDKFSNSNAKQEISTIVKENELDQSTSQPKATRHVXXALQYLLKL

SEQ ID NO: 25070 - protein, 1006 aa, Oryza sativa; identical to SEQ ID NO: 17863
  Clone ID: TF_OsC257752_1.pep

SEQ ID NO: 25071 - protein, 900 aa, Oryza sativa
  Clone ID: TF_OsC138576_1.pep
MVPPPRRRGRLETGSAPAATNVASSPVLALPPADRFPPPLPSNAMSLHSLKETLQSSSFSQPQSESQPRSPPPLLARRPPKTSLSQQLLRLDASSSSSSFSVSPPPPPRTSPTSDAAADDAPPLPEEEDEVPCIRPRASLPPAASLDSRGPYEPLALSPPGERPVVQVPSSINCRLLVHQRDGVRFLYNLYRNNHGGVLGDDMGLGKTIQTIAFLSAVIGKDNDHGDQLVEGRKIAPILILCPTSVIRNWENEFAEWARCSVAVYHGPNRDLVLQKVETQRLEIVITSFDTFRIHGKILCGISWDLVVVDEAHRLKNEKSKLYTACLEITTRKRFGLTGTIMQNKIMELFNLFDWIVPGCLGDREHFRVYYDEPLKHGQRFSAPERFVQVADKRKKHLVSVLSKFLLRRTKEETIGHLMLGKEDNIVFCRMSDVQKRVYRRMLQQPDVQILINKDLPCSCGSPLTQVECCKRTEPHGIIWSYLHRDNPEGCSLCPFCLVLPCLGKLQQISNHLELIKPNLKDEIEKQKKDAELAAAVFDTDIELVGGGAKSENFMGLSDAEHCGKMRALERLLSLWTLQGDKILLFSYSVRMLDILEKFLIRKGYCFSRFDGTTPMNARQLLIDEFNRCPSKQVFLISTRAGNLGVNLVSANRVVIFDPSWNPAQDLQAQDRSFRFGQRRHVTVFRLLGAGSLEELIYSRQIYKQQLSNIAVSGKIEKRYFEGVQDDKKFQGELFGICNLFRDLSDKLFTSEIIEMHGEHGKGNTAETIGIREIVDTNIFGTQDQMKSSMTAIHNENKNLYHCGIVYAHRNEDVVNTRTNEASNCAEDKTVPRHLEELQSKKNETMHTIKAKSYSLVQKKKEFSRIASFMGMNDLEFSKWLLSVSPLQRHEVLDRYRNAK

SEQ ID NO: 25072 - protein, 2482 aa, Oryza sativa
  unsure (1)..(2482): unsure at all Xaa locations
  Clone ID: TF_OsC43095_1.pep
MLGPPRRGPAYKTKLCALWQRGNCNRDTCSFAHGHGDIRRPPSSRGAFTHHPDSADMLTQLLPEDSMTFFINSSLGISTICVDDNACAVPEGELGEEIIEPVISEAGLIGGFHLGGGIPLEESPGVIVPFMIEGHLLEKEILAIHDLLAGRECERRHEKKTDDGETNSSRSLSLSDNNDEKKKDKFSSGDEKEDHEKQLKQIRLDMEALRDDKTQMEVILDEKIDEVRKISSKVNDLEVQLRREKDECHRMTSKMKKFIKAHARFLKAQEEVKRSQARFERLGDLLASDILKRGANEEGSSVNEDLNERSPNTAATKKRSIPYSTSEEAKAVKKRRERDSDTMTRSDKYRSDVTDFDKTSKGTEATKSLYLKKKLWEDEKSKYFVNLQVKGSPVRHVLPSTGMAAHAIDDLNEAIELEDRHESIDALLENDADDKTRSPAIPLQPPPVVQNAYEQSGFEHISFDIPFGLSIYCAKFPLTQLAGSTQATRFAAARQIGEIAKSHPQELNVLLKKDICIIIILRRKRVSPYLRSKNWDTRVAAAHAIGAIAENVKHTSVKDLFASAEAEKHASGLSGIGDVGSTLRHADTTATSELAFGSFDINRVLEFGSPLLASGGQEYDIANDNGKNPAERLARQKQNLRRRLGLDVCEQFMDFNDVIKDEDLLAQKNYWGANMQNNGFYSFNTGQNIQHLVASMVPSAIALEHSVGMALSSICDDLITPLTFFQDTVDAITDEDNLEYSENGRWPFQQFVDQLIHDMFDPIWEVRHGTIMALREILTHQGACAGVYFPDLNSPFADLDDKNNLDSLKRAHGIDLNEDIDSGQLEPVLKRQKKEESNPEVMDIQLDKEPSNGDYSKTEASLSTEPTVSSGEPNLAHAKVESPFQVDGSANPSKVDPYCTPPHETLNSMPKLSSTHLPENSKFIKLMKLANYSAVKNWEFLQDCAIRFLCVLSLDRFGDYVSDQVVAPVRETCAQALGAVLKYMHPTLVCHTLNILLQMQRRQEWEVRHGSLLGIKYLVAVRQEMLKDLLNYVLHACKAGLEDPDDDVRAVAAEALIPAAASLVRLNDQMLHSIVMLLWDILLDLDDLSPSTSSVMNLLAEIYSQPEMVPKMLGTTAIGGDNEFDLNSVTLVAGEEKMGSNDNPYVLAALTPRLWPFMRHSITSVRRSAVRTLERLLEVGNTRNSAKLWLASILGDALQVVFQNLLLESNDEIIRSSERAWKLLLQCPTEDLESAASSYFSNWVQLATTPYGTALDSAKMFLPVALPRGSRSRAAAKIKSARLEHENTRMISFGSTGENTSQEKHSEASLSVSKIIVGSDSDKSVTHTRVLTSMALGLFASKLPEGSWQVVLGPLASDLMSLSGVQRQVASMVIVSWFKDLRKSDPAAVGTLLAFLSSLKGWMLDLLACSDPSFPTKDSPLPYAELARTYRKMRNEANNLFQSIESCALLKEYTSNLNFEADMLSVDDAINFTSKLLLPSEPDFSLDSDKIVLNNIESAKQGLLSTSGYLKCVQNNLHVTVSSLVASAVVWMAGLPSKLNPVILPLMAAVKREQEEILQDKAADALAELIFSCVGRKPGPNDKLTKNLCTLTCTDASETPQAAVINSIQVIEDQNLLSIGKRFSNHKSRGQMTSGGESKSEGFISRRGSELAFKHLCEKFGASLFEKLPKLWDCLTEFLKPVKTGDDLMKEDPSIAQLGRSCEDKEPQSLINNIQVVRSVTPHLAEPLRPQLLSLLPCILGCVRHPHVAVRLAAARCITSMAKSLTANVMVIVIENVIPMLSDSSSVCARQGAGMLLSLLVQGLAVELVPYAPFLVVPLLRCMSDPDGSVRQTVTHSFAALVPLLPLAKGSLLPDGLSERLSSSAEDAQFLEQLLDNSQIDDYKLSIDLSVELRRYQQEGINWLAFLRRFKLHGILCDDMGLGKTLQASAIVAADIAESRARNDEQDPKSLIICPSTLVAHWEYEIEKYIDSSIMKPLQYIGSSQDRIILRSQFDKFNVIITSYDIIRKDIDFLENVFWNYCVLDEGHIIKNSRSKITSAVKQLKAQHRLILSGTPIQNNVLELWSLFDFLMPGFLGTEKQFQATYGKPLLAAKDPKCSAKDAEAGILAMEALHKQVMPFLLRRTKDEVLSDLPEKIIQDRYCNLSLLQLKLYDKFSNSNAKQEISTIVKENELDQSTSQPKATRHVFQALQYLLKLCSHPLLVTGESPPDYLVDLLKEIGMGTGDELHDLHHSPKLVALQEILQECGIGSEISSPDASAAIGQHRVLIFAQHKALLDIIEKDLFQSHMRSVTYLRLDGSVEPEKRFEIVKAFNSDPTIDVLLLTTHVGGLGLNLTSADTLVFMEHDWNPMKDLQAMDRAHRLGQRKVVNVHRLIMRGTLEEKVMSLQRFKVSVANAVINAENASLKTMNTDQLLDLFASTPASRKASVLPSSSGGDQSKDSKGKSGGNGLXSILNGLDELWDQSQYADEYDLNQFLAKLNG

SEQ ID NO: 25073 - protein, 1445 aa, Oryza sativa; identical to SEQ ID NO: 17861
  Clone ID: TF_OsC72210_1.pep

SEQ ID NO: 25074 - protein, 229 aa, Oryza sativa
  Clone ID: TF_LIB4309-046-R1-K1-A2.pep
VFPKYERRLLAAASLLLSADAQGQPPHAAAQLGVGVTAELKPHQVDGVAWLIRRYQLGVNVLLGDFLGLGKTLQAISLLSYLKIHSISPGPFLVLCPLSVTDGWLSEFNKFCPSLRVIQYVGDKLHRRDLRRMMFQDVQKSSSSSHSTELPFDVMMTTYDIALMDQEFLSQIPWHYVVIDEAQRLKNPSSVLYNVLEQRFIMPRRLLLTGTPIQNNLSGLWALMHFCMP

SEQ ID NO: 25075 - protein, 248 aa, Oryza sativa
  unsure (1)..(248): unsure at all Xaa locations
  Clone ID: TF_LIB4309-004-Q1-K1-B9.pep
GLTSAYRFDFSAKGGEEEQEDSEEKRKVDVVSKLHAILRPFLLRRMKEDVEHMLPRKKEIIIYANMTDHQKQIQNHLVEQTFDQYLHEKSEIVLRKPGIKAKLNNLLIQLRKNCNXHPDLXWSLRMTHQXLYPXPVEKLLEQCGKFQLLNRLLSLLLARKHKVLIFSQWTKVLDIIEYYLETKGLQVCRIDGSVKLEERRRQIAEFNDLNSSMNIFILSTRAGXLGINLTSADTCILYDSDWNPQMDL

SEQ ID NO: 25076 - protein, 1342 aa, Oryza sativa; identical to SEQ ID NO: 17868
  Clone ID: TF_OsC1528_2146.pep

SEQ ID NO: 25077 - protein, 1407 aa, Oryza sativa
  Clone ID: TF_OsC4180_1.pep
MASPPPFDICGDLDDDPTPPAPTPLAAPTPNGLNDRLLRLTRTHQRGPSQNPNPNPNPNPKPPPPPPPQEPEPAKVKLAGRRRLCKLSTAGDESAGDDDSIRDILDDLTTRLDSLSVDRPTARPRPHVSPLPCALHADPDPSQSQLNDGTKPSSSFVDCDDDDDDAGGAYGGFGVKEEVTRKVFKASSSFGGRGNDDKMKAKGAYAFDTVSRKTTTESKASKFFGDYDDEDDIDQDAENGKENHADDVGWEKTEDFKMEPTGTGVTRKPYNLPGRIFNMLYPHQREGLRWLWVLHCRGTGGILGDDMGLGKTMQVSAFLAGLFHSRLIKRVLVVAPKTLLTHWTKELSVVSLKDKIRDYSGPNANARNYELKYAFKEGGILLTTYDIVRNNFKMIKGNFTNDFDDEEETLWNYVILDEGHIIKNPKTQRAQSLFEIPCAHRIVISGTPIQNNLKVQSKELRERIKPYFLRRMKNEVFLDSGTGEDKKLAKKNELIIWLKLTSCQRQLYEAFLNSELVHSSMQGSPLAAITILKKICDHPLLLTKKAAEGVLEGMDAMLNNQEMGMVEKMAMNLADMAHDDDDVELQVGQDVSCKLSFMMSLLQNLVSEGHNVLIFSQTRKMLNIIQEAIILEGYKFLRIDGTTKISERERIVKDFQEGPGAPIFLLTTQVGGLGLTLTKAARVIVVDPAWNPSTDNQSVDRAYRIGQMKDVIVYRLMTSGTIEEKIYKLQVFKGALFRTATEHKEQTRYFSKRDIQELFSLPEQGFDVSLTQKQLQEEHGQQLVMDDSLRKHIQFLEQQGIAGVSHHSLLFSKTAILPTLNDNDGLDSSRRAMPMAKHYYKGASSDYVANGAAYAMKPKEFIARTYSPNSTSTESPEEIKAKINRLSQTLANTVLVAKLPDRGDKIRRQINELDEKLTVIESSPEPLERKGPTEARTLKDWESLKAKEEEAGGRARGEGRKGSELNSTPFRLNSTSSTLVVFKVPSTFTTGRGALAAAAANGRFVPMAPTSQPQPQQEVEVEVDEDEELVNMVVEAGVGAIKMKMKIPRRVLGSLYPHQRDGLAWLWALHCTATGGILADDMGLGKTIQEGGILLTSYHIVRNNYMLLRGNGNGNNVDNNEEEPLWDYVILDEGHIVKNTKTQRAQSLFQIPSAHRIVLTGTPIQNKLKMSWFELRYEKPILCGNDKNATDQEKQMASNAAKRRLYEAFLNKDPVRSQTGALKGSSLEASTILRKICDHPLLLTKRDTDDFLEEMGAMLNNRDMCMVERILEDNLYADKRLQIVQGASCKIAFILPLLRNLVEEGHYVLIFSQTRVMLNLIQDAVSIEGHKFLRIDGTTKISERKKILKDFQEGLDSPILLLTSHVGGLGNTLTKADRVIVVDPAWNPIVAKQKVDPRALNSPSTRV

SEQ ID NO: 25078 - protein, 80 aa, Oryza sativa
  Clone ID: TF_LIB4309-030-R1-K1-F3.pep
WDQTLFISGTPIQNNLKEMWALFYFCCPEVLGDKEQFKARYEHAIIQGNDKNATNRQKHIGSNVAKELRERIKPYFLRRM

SEQ ID NO: 25079 - protein, 329 aa, Oryza sativa
  unsure (1)..(329): unsure at all Xaa locations
  Clone ID: TF_OsC55194_1.pep
CRICASRNWGHHPPVSRWRAAACGEREKNRRLAQSSTTLAERLHFSLGPRLRSPLPRPPPPRVRVVLRLPLPRTSPIAALLPHGLRHVFRSGVVTAPPAEDEDFATAADLQFEPPLKVVKYPDPILRARNKRINTFDDNLRSLTDEMFDVMYKTDGIGLSAPQVGVNVQLMVFNPAGVKGEGEEIVLVNPVVYKMSKRLLVYEEGCLSFPGIYANVVRPDNVKIDAQDVTGAKIKVKLSGLSARVFQHEFDHLQGILFFDRMSLDVLESVREGLKDLEKKYEESTGLVXLKVLRTTKEERISLVSQDEXLSVLAVFQNILLSFTLKIVY

SEQ ID NO: 25080 - protein, 1432 aa, Oryza sativa; identical to SEQ ID NO: 17874
  Clone ID: TF_OsC112724_1.pep

SEQ ID NO: 25081 - protein, 667 aa, Oryza sativa
  unsure (1)..(667): unsure at all Xaa locations
  Clone ID: TF_OsC73310_1.pep
MAGLGGGWGGGYDDDDDWGLSAEQLDQLERDAYRKLAERKASSSAASTATSPLPSAAYSPVKNSHHHPASRVSQESCFGKVESLSPSRLSQPNASGNAVNNSQGNMSKVSVHLFLHSTGVIAAKFQYHQKLVNIPKEDIMVRLPRTGGLNKXRTLIGXSNNKGVCNLDGVVNVISXDVVLVKQELTPSLYSGDLLDLDGKIPTDVESKLMPFQREGVRFALQHGARTLIADEMGLGKTLQAIAVASCLHDAWPVLVISPSSLRLHWASVVLPQTGGSNKAGYRLVYSNTKGDFNLDGVFNVISYDVVPKIKDMLLDLDFKIVIADESHFLKNAQAKRTMHSLPVLQKAKYVVLLSGTPALSRPIELFTQLQALYPTVYKNVNEYGNRYCKGGFFGLYQGASNHEELHNLMKATVMIRRLKKDVLSQLPVKRRQQLETVKIKIQSCDSQETMDSLKFAQKNLINKIYNDSAEAKIPAVLDYLGTIIEAECKFLIFAHHQSMLEAIHQHLLKKKVKCIRIDGQTPVPVRQTLVTDFQNKDDIKAAVLSIKAGGVGLTLTAASTVIFAELSWTPGDLIQAEDRAHRIGQVSSVNIYYLLANDTVDDIIWDVVQGKLENLGQMLDGQEKTLDVSQSDTRPSPSKQKTLDAYLKRCSNSTEADQPKLKNPRF

SEQ ID NO: 25082 - protein, 1132 aa, Oryza sativa; identical to SEQ ID NO: 17875
  Clone ID: TF_OsC5164_1.pep

SEQ ID NO: 25083 - protein, 199 aa, Oryza sativa
  unsure (1)..(199): unsure at all Xaa locations
  Clone ID: TF_LIB4309-023-R1-K1-C11.pep
LFEIPCAHRIVISGTPIQNNLKEMWALFYFCCPEVLGDKEQFKARYEHAIIQGNDKNATNRQKHIGSFVSKELRERIKPYFLRRMKNEVFLDSGTGEDKKLAKKNELIIWLKLTSCQRQLYEAFLNSELVHSSMQGSPLAAITILKKICDHPLLLTKKAAXGVLEGMDAMLNNQEMGMVEKMAMNLADMAHDDDDVEMQ

SEQ ID NO: 25084 - protein, 539 aa, Oryza sativa
  Clone ID: TF_OsC86959_1.pep
GLQEFGTRQKNGEESSAGNKRKQPPSARSKSKKKKKKLKDSDIYLASGAVARVRWFRVVLDEAQTIKNFRTQVAKACCGLRAKRRWCLSGTPIQNAIDELYSYFHFLKYDPYSTYNSFCTMIKHPIARNAVHGYKKLQTVLRIVLLRRTKETLIDGEPIIKLPPKTINLDKVDFTKEERAFYLTLEERSRQQFKAYAAAGTLKQNYANILLMLLRLRQACDHPLLVKGHQSEYKGDGSIEMAKQLPKEMIINLLAKLEVGEFCSVCSDVPEDAVVTMCGHVFCYQCIYERITTDENMCPSPNCGNTLSTDSVFSSGALRICMSGVSSSHASGSSSLDDESSSISQTSYISSKIQAAIDILNSIINTYALTDSDTVESNPSRVAPVKAIVFSQWTGMLDLLELSLNSNLIQYRRLDGTMSLNSRDKAVKDFNTDPEVRVMIMSLKAGNLGLNMVAACHVILLDLWWNPYAEDQAIDRAHRIGQTRPVTVSRLTIKDTVEDRILALQEEKRAMVSSAFGEDKSGGHATRLTVDDLKYLFRF

SEQ ID NO: 25085 - protein, 1001 aa, Oryza sativa
  Clone ID: TF_OsC1528_2344.pep
MAAAGRDPPATPSSRMYYCRQRKASSEVNANVFVPGGQNGISFPASNRAHDWGYGGVREEWEASYARKLQLINFLSSLHQRTANSLITTRMDANMDTPLEQKQKDSSAIIVLDSDDEDEAERCEQLASENNKQQAPSGPTSPCTTWIVSSAKDQVNGTLHVDGVQSTQIVPYGQNAPLINQSPLQTSWQPSIQYERVILQRRPEEQRVQDLVAASHAEKIAETQVFLTLPTLPNERKRRKSEPTTLVDGDGGTNLGKGKRKNHQNQAAVDSILDLQQTVVPLQQNDVPSQSYRTMIEEEKPVKESDGLEDLWKDFSLAAECTKLDTNEDMSNEKDVDDENEMDDDCNHDIRIHEDLGHVCRICGMIVRKAETIIDYQWKKKNLLWGIFSLLKYFLKWESVFITNYIDIDTALEYIASRTRTNYYESRSKDADDIDTGAVKVSEDFIVSDIAIHPRHAKQMRPHQLEGFSFLVKNLVGDKPGGCILAHAPGSGKTFMLISFIQSFLAKYPSARPLVVLPKGILGTWKREFQRWQVEDIPLYDFYSVKADKRTEQLEVLKSWEARMSILFLGYKQFSRIICGDGDGNIAAACRDRLLMVPNLLILDEGHTPRNRETDVLASLKRVQTPRKVVLSGTLFQNHVSEVFNILDLVRPKFLKMESSRPIARRIMSQVAISGIRSLKGVHDSAFTESVEDTLLNDDNFTRKSHVIRSLRELTKDVLHYYKGDILDELPGLVDFSVFLKLSTKQKEIVHKIEAYEKFKRSAVGTALYIHPCLSEISEGDAADRATNLTDATVDSLIESIIIKDGVKAKFFFNILSLANSAGEKLLAFSQYILPMKFLERLLVKRLGWHVGKEIFMISGDTSADDREVAMDQFNNSADAKVLFGSIKACGEGISLVGASRVIILDVHLNPSVTRQAIGRAFRPGQQKKVFVYRLVAADSPEVKFHETAFKKEVIPKLWFEWSELCTTEDFKLNQVDIDDSEDELLEANAIRQDIKALYRR

SEQ ID NO: 25086 - protein, 1454 aa, Oryza sativa
  Clone ID: TF_OsC52680_1.pep
RSPPSRGGAAANGGGLSYSTLFNLEPLLNFKVPLPEDLDRYRRSSPNGSMSSQGQGSLSDQYNGINDASHGLHRKRKRNLDGASDDDEVDAYSNQITEEHYRTMLSEHVQKYRRSKFKEDVFSSDPPQVIVPQKHKNGSARVTKYRSDTRNVAMLGGVEATAEYNGTKSTNAYGGFNKVVASLDSSYLDMGDNVSYKIPEGYDKLALSLNLPVFSDIRVEETFLNGTLDLRTLAAMLSTDQKFETTNRGGLAEPQPQYESLQERVKVQKFSLQVTEDPFAIPEGAAGRIRRFIISESGSLHVHYVKVLEKGDTYEIIERSLPKKQIIRKDPSEIAREESEKTIKLWHAIAVKGIPRHHRNFMALLKKRQVDAKRFSENCQREVKFKVSRSLKLMRSAAIRTRRLARDMLIFWKRVDKEQYELRKREEKEAAEALKREEELREAKRQQQRLNFLLSQTELYSHFMQNKAGESAPSDEASVPEEDEEDPEEAELKREALRAAQHAVSQQKRMTNAFDSETGRLRQSSDSGIPTDDLASMEPNKIDLLHPSTMPEKSSVQTPELFKGALKEYQLKGLQWLVNCYEQGLNGILADEMGLGKTVQAMAFLAHLAEDKNIWGPFLVVAPASVVNNWAEEILVNEEKLLRRVKWQYMVLDEAQAIKSSSSQRWKTLLSFNCRNRLLLTGTPIQNNMAELWALLHFIMPTLFDSHEQFNEWFSKGIEGHAEHGGALNEHQLSRLHAILKPFMLRRVKIDVIAEMTKKKEEIVPCRLSSRQQVFYQAIKNKISLNELLDGSRGNLNDKKLLSLMNIVMQLRKVCNHPELFERNEGSSYFYFADIPNSLLSPAFGELQDVHYAGKRNPIMFEIPKLVYKGIVSNMEMPVRGCGFLYGSFNRMFNIFSPSYIHQSAFPEAISPNNTVLLSGAFGFTRLINLSPVEASFLATCSLFNRLAFSAVRWNKKYTDELVDVFLDSESTDLESTHNDLTTVRAVVRLLLSPTKAESSFLRTKIETGPSDSPYEALVLSHHERLVSNIRLLRSTYAFIPPARAPPINVWCADRNFAYKLTDEMHDPLAKKLVLGFARTSEFNGPREPTSPHSLIEELHTDLPFPEPMLQLPYRIFGSSPPMSNFDPAKMLTDSGKLQTLDILLRRLRAENHRVLLFAQMTKMLDILEDYMNFRKFKYFRLDGSSAISDRRDMVRDFQNRNDIFVFLLSTRAGGLGINLTAADTVIFYEIDWNPTQDQQAMDRTHRLGQTKEVTVYRLICKDTIEEKILQRAKQKNAVQELVMKGKHVQDDHLMRQEDVVSLLIDDTQISHKLKEISMQAKDRLKKRRTKGIKVDKEGDLMLEDLDDQTSGAAEHDNTSSKKKKSSQKKLPKLQDNGSVDKNAEAEGGEVEDEDSIAAPRPKRSKRLMKNLNEDKEPEQEPTTDGDNPAEAAENNISPDDNDTEEAKDRTPSA

SEQ ID NO: 25087 - protein, 801 aa, Oryza sativa; identical to SEQ ID NO: 17843
  Clone ID: TF_OsC303753_1.pep

SEQ ID NO: 25088 - protein, 1874 aa, Oryza sativa
  Clone ID: TF_OsC10987_1.pep
MLMLMDPPARSRRCTLLTRALLLAVAALALRLIYAAFLAGMALYPPLPAAAVLGSKTYLHSAVATPDAWRTRDWRKAVDYHATLLAPHLADGILSPTSRAVCLGAVQEALAMRELGVSTAVAVARKRSPPLAVAGNDRRLPFQDSSVDFVFAARALDSSKRPADLAAESARILKPDGHLVVLTTSAADAFSLRALQALLPSLRLLRSRQIKGPDDSTLRELVFQKIQDSTDDPVNKCTIGDHKLQLLTHAEPLIQEEPRKPWITLKRNIKNIKYLPTLADISFKRNYVYVDVGARSYGSSIGSWFRKHYPKQNHTFQVFAIEADPAFHSEYAAKKAVTLLPYAAWVKNETLNFEINADPGKEDEAKANGRGMGRIRPMAGKKMSGEVRSVPAFDFAEWLKRTVSEQDYVVMKMDVEGTEFDLIPRLFDTGAICLIDELFLECHYNRWQKCCPDRAEAFEMAKGVSCFYWSIQFPNFKDHLCFRNCSNASSTRHFSYRSLLIRTEKPVTTRNHAYAEVVVFVLDQNPMFFLFLRFFYPAIQRGPNCWSSANSTVMRQAFEVFYDGSWHGVNCIRIRNGNLFVKFIYSGSTVEHNVDGDCLRLRSRRATCSDCSNVLKPGVDVCVQSSHTPEASSQGGTNASVLLRHDARLITIKKNHQEDKCLCLFVVILYKNQCPGNAEKVITDRRAEVVTINDIFLLQKLQPEVHEGSMKWSFSKDRLSLNKGRLISARFSSEITHLIVLSILRGMEFNIKLVEGQIVYQIIKGDQAQWNLDSMAIPPGFGNTMEIISFQLRDEALRPTITNIPITHVKKNNITEDMRFTVKSEMDSELDRALDVEILYEHVDLRRSKRLKTQPDRFTSYDTPRFLSGYKKKEASSSPTKHVRGAVHCDSPVDDSKKEVESCCVEIPGNVTQKQTGVHSPMVDEKSNSPEGQHKNTTKRTTCSLVKEKASSPEGQHEKTTKRTTCALPVKEKASSPEGQHKNTIKRTTCSLPVKEEPSSVEIEEKSSKEQSAPEFHIPRTPAQNKEKHNRPPFSCKPKLFTSSGTLGVNCEPAFCQKVGGKRKRHMCEREYKQMIDQCIGNIESEMERDSMFNFDANMMNYVQHSYREEDFTWPPSADNQEVEEDELEELWKEMDYSLTTLALLEQKQVMAQSRINMLVDNFDGLRLDCLTLTDDYRCYYQKKEKFAESGSVNESTDYFGKVGGIPCHHECILDEELGLACRLCNVVCTEAKDIFPEMFNGNDYKDRPGCSNICLDDDILDPSLLANLAPELSELKNSGSVWSAISDLDPKLLPHQRKALDFLWKNLAGSIQVEGMDNSNVSTGGCVIAHTPGSGKTLLLISFLVSYMKAHPRSRPLVLTPKAAIHTWKREFEKWGISLPLHVFHHANRSGKPLGAMDSKLRSLLNNFHRPTWTNMRLMDSLDKLFKWHAHPSVLLMTYSSFLGMTKQDSKVRNRYREFIAEVLMNNPGLLILDEGHNPRSNKSKLRKLLMKVKTEFRILLSGTAFQNNFEEYFNTLCLARPRFIGDIMSELVPERKRETVGRRAKHQEAVARRAFVEKVGQKIESDNKHIRSDGISLLNKLTRGFIDSFEGAKLINLPGIHVYTVFMKPTDIQEEMLAKVTMPKLGSSRFPLEVELLITIGSIHPWLIKTTKAVSTFFSPAEVKKVERYKRDFAAGCKAKFVIDLLHKSSFRGERVLIFCHNVSPITFLVKLIEMVFGWRLGEEVLVLQGDQELPVRSDVMDKFNGDSAGKRKVLIASTTACAEGISLTGASRLVMLDSEWNHSKTRQAIARAFRRGQERTVYVYLLVASGTWEEEKYNSNRRKAWMSKMVFLGRYVDDSSQNRVTDIDDEVLKELADEDHTGTFHMIVKQD

SEQ ID NO: 25089 - protein, 1148 aa, Oryza sativa; identical to SEQ ID NO: 17844
  Clone ID: TF_OsC108092_1.pep

SEQ ID NO: 25090 - protein, 1122 aa, Oryza sativa; identical to SEQ ID NO: 17845
  Clone ID: TF_OsC3901_1.pep

SEQ ID NO: 25091 - protein, 1158 aa, Oryza sativa
  Clone ID: TF_OsC3901_3.pep
MGKPGKYGDGDDDDSEEEQLSPSSSAGEEEEEEVEEEEGEEQQEEQGEEEEGFSGDEEEQEVEGEADGEQVEEEEEEESSVGEEEAEAEGEEEEEEVEEEQGAGEEEEEEVDEEEIEAVTTGAGGDDDDEEVGDDGGAEEESQSTEDDEVAAGKDGGGEDGDKLEDATGNAEIGKRERAKLREMQKLKKHKIQEILDAQNKAIDADMNNKGKGRLKYLLQQTEIFAHFAKGNQSTEKKSRGRGRHASKMTEEEEDEEYLKEEEDALDGAGGTRLVSQPSCIKGKMRDYQLAGLNWLIRLYENGINGILADEMGLGKTLQTISLLGYLHEFRGITGPHMVVAPKSTLGNWMKEIQRFCPVLRAIKFLGNPEERNHIRENLLVPGKFDVCVTSFEMAIKEKTALKRFSWRYIIIDEAHRIKNENSLLSKTMRIYNTNYRLLITGTPLQNNLHELWSLLNFLLPEIFSSAETFDDWFQISGENDQHEVVQQLHKVLRPFLLRRLKSDVEKGLPPKKETILKVGMSEMQKQYYRALLQKDLEVVNAGGERKRLLNIAMQLRKCCNHPYLFQGAEPGPPYTTGDHLIENAGKMVLLDKLLPKLKERDSRVLIFSQMTRLLDILEDYLMYKGYQYCRIDGNTGGEDRDASIEAFNKPGSEKFVFLLSTRAGGLGINLATADVVILYDSDWNPQVDLQAQDRAHRIGQKKEVQVFRFCTEYTIEEKVIERAYKKLALDALVIQQGRLAEQKAVNKDELLQMVRFGAEMVFSSKDSTITDEDIDRIIAKGEEATAQLDAKMKKFTEDAIKFKMDDTAELYDFDDDKDENKLDFKKLVTDNWIEPTSRRERKRNYSESDYFKQALRQGAPAKPREPRIPRMPHLHDFQFFNTQRLNELYEKEVKYLVQANQKKDTVGEGDDEDQLEPLTVEEQEEKEQLLEEGFSTWTRRDFNTFIRACEKYGRNDIKNISSEMEGKTEEEVQRYAKVFQERYKELNDYDRVIKNIEKGEARIYRKDEIMKAIGKKLDRYKNPWLELKIQYGQNKGKLYNEECDRFMLCMVHKLGYGNWDELKAAFRMSPLFRFDWFVKSRTTQELARRCETLIRLVEKENQEYDERERLARKDKKNMSPAKRSSSRSLDTPPQSSSKRRRQSYTEANAGSGRRRRG

SEQ ID NO: 25092 - protein, 958 aa, Oryza sativa; identical to SEQ ID NO: 17846
  Clone ID: TF_OsC1528_2264.pep

SEQ ID NO: 25093 - protein, 54 aa, Oryza sativa
  unsure (1)..(54): unsure at all Xaa locations
  Clone ID: TF_LIB4506-028-R1-K1-C10.pep
TRPGVVDTTQALXQVRTQRTNCVNVDSPLQNNLMEYYCMVDFVREGYLGSXPXF

SEQ ID NO: 25094 - protein, 64 aa, Oryza sativa
  Clone ID: TF_LIB3431-031-P1-K1-H7.pep
SVLGSSMEPGKFLTILCHSATMMKIPFYTAGLRTLRVSICRTLFTTSCALQLNKLIKLVPIAVW

SEQ ID NO: 25095 - protein, 121 aa, Oryza sativa
  unsure (1)..(121): unsure at all Xaa locations
  Clone ID: TF_jC-osflLIB3477P006e01b1.pep
MGRGRVELLRLVNKITWRAPFAECGXGLLKKAYQLCALCDAEVALIISYNRGQLYESCSGQSMTRTLERHPKARYGGPDSAIHNKENESVQSSRNEYLTLKAQVVXLHRTLRNLLGEDPET

SEQ ID NO: 25096 - protein, 180 aa, Oryza sativa
  Clone ID: TF_OsC39886_2.pep
MARKKMKLLRIVIDVKRRVTFRKHLKGLMKKVSEFATLFLMVYGEVEVQATKVWPSVWEATRVLEHFKAMPQLGRYKKMIDLEGILNKQIDKLKEKLHKLGREADESETKLLLIEAINGRHPSLDGLTIEQIISLGRMANSRLKIVNDRLKKLRAPSSFASVLPCPPPPPPPRRPASPPP

SEQ ID NO: 25097 - protein, 547 aa, Oryza sativa
  Clone ID: TF_OsC1664_1.pep
MHPPIQHHQAETLRSADSTTHLNLNREISSVQRQRAARLLTFARLVEPSRARSERIHIDAALMSALVDRWRPETHTFHLTVGEMVPTLQDVSYLLGLPIAGPAVGPTMVNAGWADDLLASFGGVLPVALEDLTDGHGPTKSWLNQFRQDVFPDDQEEWIVQRHLVAYLLWLFGWVMFTGTHADSVDKHFIHFAEQIAELPIAEIPQYSWGSAVLAATYAGLCDACVRNSKQSSLPGCPLLLMLWAHERFDIGRPQLDSYANYGLREMYRSGVDDIDDRPTMGSLWTHREPQWVSGTTRRVYTQFVADFDQLTPDRVRWTPYTQHDVNDRAPHGLADLCTRDMQLWRTTCHLVLDVHVEPHNVHRVLKQLGMYQDFPPRDGRPLADSLHRYFRKGLGLSYELVIVTTVQPTVQEWEHAADNLALQTPPDDGSYYGAYLRWYRSVTRWRCFPPQRDSTVPHQAAITDTFAPQPRSAYKSMAEFVEHVHVESDTLLQRLEARPPVVRSDDVASVLRNFRARAAALLRRVSCRSAADVVQTSGRRLSRPEI

SEQ ID NO: 25098 - protein, 385 aa, Oryza sativa; identical to SEQ ID NO: 17895
  Clone ID: TF_OsC76961_1.pep

SEQ ID NO: 25099 - protein, 417 aa, Oryza sativa; identical to SEQ ID NO: 17896
  Clone ID: TF_OsC12322_1.pep

SEQ ID NO: 25100 - protein, 152 aa, Oryza sativa
  Clone ID: TF_uC-osflM202089a01b1.pep
MGRVKLQIKRIENIPNRQVTFSKRRNGLIKKAYELSVLCDIDIALLMFSPSGRLSHFSGRRRIEDVLTRYINLPESDRGGTIQNREYLINMLTQLKCESDVTEDLTNTSSKAPVNSNIEELQHEIRRCQHQMQLTEEQLRMFEPDTARSASM

SEQ ID NO: 25101 - protein, 164 aa, Oryza sativa
  Clone ID: TF_OsC1638_1.pep
MARRGRVQLRRIEDKASRQVRFSKRRAGLFKKAFELALLCDVEVALLVFSPVGKLYEYSSSSIEGTYDRYQQFAGARRDLNEGSTSINSDENASIHSRLRDITAWSLQNNADESDANQLEKLEKLLTNALRDTKSKKMLAKQNGEGSRSRANSSGSRGQEEGSA

SEQ ID NO: 25102 - protein, 275 aa, Oryza sativa; identical to SEQ ID NO: 17901
  Clone ID: TF_OsC330374_1.pep

SEQ ID NO: 25103 - protein, 137 aa, Oryza sativa
  Clone ID: TF_uC-osflcyp126b06b1.pep
MDGGMGMGGERWTRRDPSWFPETRYAAEHLGFPTRWRSIGMGRGRVELKRIENKINRQVTFAKRRNGLLKKAYELSVLCDAEVALIIFSNRGKLYEFCSTQSMTKTLEKYQKCSYAGPETAVQNRESEQLKASRNEY

SEQ ID NO: 25104 - protein, 351 aa, Oryza sativa
  Clone ID: TF_OsC49770_1.pep
MGLIGSDRRRPGIRMGRVKLPIKRIENTTNRQVTFSKRRNGLIKKAYELSVLCDIDVALLMFSPSGRLSHFSGRRGVEDVILRYMNLSEHDRGEAIQNREEIQQEIYSSQQQLQITEDRLRMFEPDPAAFGTSSEVDGCEKYLMELLTRVVERKNNLLSSHMAPFDATTAAMQGADGTQMYVSQADGLATFGGDAAMWGPDGGADPGHPMFSASDPLIYLRDHDVYDANSQVAGLHGGDPCAAGGAAAAAAAVGCVDDDVAGGHAAAADAWRQAYTCTELLSTLIPTTPFPLMPHCLGPEDQYLSMEHGMVAAAQEPVEASTASCSYVPSDENSGTPVMAYDSNPPPANIA

SEQ ID NO: 25105 - protein, 209 aa, Oryza sativa
  Clone ID: TF_OsC39886_1.pep
MARKKVKLQGIVIDVKQRVTFMKSLKGLTKKVSEFATLFLMVYGEVEVQATKVWPSVWEATRVLEHFKAMPHLVRYKKMTDLEDILNEQVNKLKEQLHKVGRDADESETKLLLIEAINGHRPSLEGLTIEQITSLGWMANAHLKIVNDRLKKLREEGLIPASVSLSSTEVPIQREGLLVDVARGIGSMGYNRFGGSSGSGTAGSNGDMA

SEQ ID NO: 25106 - protein, 223 aa, Oryza sativa
  Clone ID: TF_OsC8260_1.pep
MEKAAANQAGKVLKKGKKKQAKDELDRQKQAEKKRRRLEKALANSAAIISELEKKKQKKREEQQRLDEEGAAIAEAVALHVLIGEDSDEPCHLMLNKHRRCNHWDHSAGFDFAVDAQGADIYPPDGLIQCADHVYAPKGRCIDWGIGQPLPSWGEVKDLQLQAPCYQGMFHQSVACPGFIAAQAVSSLQIGGDSSDITSPSQGATVVNRMLGATNRLNLYREI

SEQ ID NO: 25107 - protein, 92 aa, Oryza sativa
  Clone ID: TF_OsC354917_1.pep
MAVELGPELLGALANSGNSASPTSPTSTSHQNRPSAFACKIFAVMPRIRAFSAATSALVSPTAYLSISRSTSLPNPPLWTGAGSASSPGTGP

SEQ ID NO: 25108 - protein, 48 aa, Oryza sativa
  Clone ID: TF_uC-osflcyp174g12b1.pep
MGRGRVELKKIENPTNRQVTFSKRRMGLLKKANELAILCDAQIGAIVF

SEQ ID NO: 25109 - protein, 604 aa, Oryza sativa; identical to SEQ ID NO: 17916
  Clone ID: TF_OsC341899_1.pep

SEQ ID NO: 25110 - protein, 77 aa, Oryza sativa; identical to SEQ ID NO: 17917
  Clone ID: TF_OsC392063_1.pep

SEQ ID NO: 25111 - protein, 235 aa, Oryza sativa
  unsure (1)..(235): unsure at all Xaa locations
  Clone ID: TF_LIB4506-004-R1-K1-A10.pep
MGRVKLXIMRIVNMLNRLVTFSMRRNGLVKKAYELSVLCDIVMGLLMFCPSDRLSHFSGRRRIEDVLTRLINSPRKXHEEXNYVKYMRVFRSHMLTQLXARATLTEDLTNTSSKAPVNSNIEELEQEIRRCQHQMQLTEEQLMMFEPDPARCASMEDVQASDKFIAGILSRVQEMKRYLLCNMGSFDVTASTSAMQHLYLPQQHQHGDITDDGFGSDEVASWVSEGSRLQPRRWR

SEQ ID NO: 25112 - protein, 74 aa, Oryza sativa
  Clone ID: TF_OsC345886_1.pep
SERVAAHDGGPDPPKRPGELRQLRLPERLDVGGLPPPPEPPPRDVAQPRHLHLGLVRRPPQRLGLAVVDTGAGA

SEQ ID NO: 25113 - protein, 450 aa, Oryza sativa; identical to SEQ ID NO: 17918
  Clone ID: TF_OsC91_2112.pep

SEQ ID NO: 25114 - protein, 490 aa, Oryza sativa
  Clone ID: TF_OsC256615_1.pep
MEREFCGEMESQICQFGTFLEVNNQHSATPKGKTIPVKCTDCLPGVASRSLTVIPLEVPHDVLLSAREAKTQYNSTFEHNLSETNFVTGTYNGAHHANVKDVPPDIYETEFRHQFPRIETSFSIIGAHFLSSMVRRGRRKGVRYIEEDRDRSLTLSKRRDGLFKLANDLSLLTDASVAICLHDSNKAQFFGAPSVKPVVDAFVSEAEPFADEQLKAKLTSMQSELVQLENEEEEKDKKTEESIQRFKEAQEESLGMGMAKHLFSRLEDLSHDDMRELLDVLLPLQQDFKKRLPPLRRGSKLQIGGSSAWAHQQPSCSRFLASHRPFTPLLPGGTSGVPMIPPPPVPGSPWSQIFPLRPPLFPSPELVPSQQLPPVSPPQNTVAPPPMHAPLVQQPLTNQSSAVPLLTQWQMRFGDQPPAEVQACTPVEQPQNDNAVHTPTFSDSFLLELLADVSDDGIATAEPLCSPPIDDQFLADIDWLAELDTIDGNL

SEQ ID NO: 25115 - protein, 59 aa, Oryza sativa
  Clone ID: TF_uC-osflM202096e01b1.pep
MGRRKVQLKRIEHNMNRAVSESKRRHGCDKNCHEIVARVKGMVVLMRLAETGELYELSI

SEQ ID NO: 25116 - protein, 50 aa, Oryza sativa
  Clone ID: TF_uC-osflcyp139b07b1.pep
MGRGREELKRIENKNNRLVTFEKRRNGLHKKANEFYVLCDAEVCLIIYSN

SEQ ID NO: 25117 - protein, 268 aa, Oryza sativa; identical to SEQ ID NO: 17885
  Clone ID: TF_OsC383105_1.pep

SEQ ID NO: 25118 - protein, 241 aa, Oryza sativa
  Clone ID: TF_OsC136517_1.pep
MGRPRGGTSKGKQKIEMCCIDGKEKRQVTFSKRRRGLFKKASEISTLSGASIAIVSFSKAGNVFAFGSPSVDAVLRRHVVAGPSTSTSHAHAGGDVFADDGGDNPEVLNALKRATDEAAAEVAAEDARQSGVEGKITEAMAAGRRRFWWDAANVEALGEAELPVFERALHKLRGAVAQGGNNPIQERWDRIPAQGSPGGSYGWEDLSPTGKLYNQPPFAYRLPVMQSIVSDQLGVVRAMLL

SEQ ID NO: 25119 - protein, 135 aa, Oryza sativa
  Clone ID: TF_jC-osleLIB3474029f03b1.pep
MGRRGREELRRIEDRVRRGICFRKRLAGLEKKVEELAVLCDAHVGFVDLSCSGDDANPHHFAAPATIENIVERYEHSQAAQKGVHGRCILQKRKSKDFQVLKETIDKGPINDDMRPIDEKDISTLNMDQISQNEI

SEQ ID NO: 25120 - protein, 483 aa, Oryza sativa; identical to SEQ ID NO: 17887
  Clone ID: TF_OsC373794_1.pep

SEQ ID NO: 25121 - protein, 185 aa, Oryza sativa
  Clone ID: TF_OsC42645_1.pep
MVASRRKMESEEARKVCFSKRRADLFKMASELSVHFNADVAAVVFSPAGNRAYSIGDPSVMDRFLSSLPAPAPPAETEPEPEVDWSVMEELSRLCGQLQAMVDAHKARLEKAEEKLRESGAAAWMMDLEAEVGRMAPEDVLALVTKLAVLRDGVAERAHEMLREALLAVAAPTPTTPTTPPPAGF

SEQ ID NO: 25122 - protein, 68 aa, Oryza sativa
  Clone ID: TF_LIB4309-018-R1-K1-C9.pep
FASSFRKQRYAAFIMRLREPKTTALIFASGKMAWFNFLHRDCKCSVLFICLLTCELVCYLSNGQLLIL

SEQ ID NO: 25123 - protein, 241 aa, Oryza sativa; identical to SEQ ID NO: 17922
  Clone ID: TF_OsC714_2.pep

SEQ ID NO: 25124 - protein, 203 aa, Oryza sativa
  Clone ID: TF_OsC714_1.pep
MAAEAAAALEGSEPVDLAKHPSGIIPTLQNIVSTVNLDCKLDLKAIALQARNAEYNPKRFAAVIMRIREPKTTALIFASGKMVCTGAKSEQQSKLAARKYARIIQKLGFPAKFKDFKIQNIVGSCDVKFPIRLEGLAYSHGAFSSYEPELFPGLIYRMKQPKIVLLIFVSGKIVLTGAKVRDETYTAFENIYPVLTEFRKVQQ

SEQ ID NO: 25125 - protein, 121 aa, Oryza sativa
  Clone ID: TF_uC-osroM202023b12b1.pep
MAAAEAAAEAAAALEGSEPVDLVKHPSGIIPTLQNIVSTVNLDCKLDLKAIALQARNAEYNPKRFAAVIMRIREPKTTALIFASGKMVCTGAKSEQQSKLAARKYARIIQKLGFAAKLRTS

SEQ ID NO: 25126 - protein, 218 aa, Oryza sativa
  Clone ID: TF_OsC104933_1.pep
MAAAAVDPMALGLGTSGGGGGGESAVGGDGAEPVDLVEHPSGIVPTLQNIVSTVNLDCRLDLKKIALQARNAEYNPKRFAAVIMRIRDPKTTALIFASGKMVCTGAKSEDHSKLAARKYARIVQKLGFPAKFKDFKIQNIVGSCDVKFAKRFTLPLRTCSRCSLNTGKLSSAEGMICRQNGEFAPAVHTILRTCPGPDFETCTWRHSFFFPLFFVAVG

SEQ ID NO: 25127 - protein, 119 aa, Oryza sativa
  unsure (1)..(119): unsure at all Xaa locations
  Clone ID: TF_LIB3434-047-P1-K1-E1.pep
RLDLKKIALQARNAEYNPKRFAAVIMRIRDPKTTALIFASGKMVCTGAKSEDHSKLAARKYARIVQKLGFPAKFKDFKIQNIVGSCDVKFPIRLEGLAYSHGAFSSYEPELXPGLIYRM

SEQ ID NO: 25128 - protein, 192 aa, Oryza sativa
  Clone ID: TF_OsC12862_1.pep
MAATTTGRVVALGAVAVVVALTFLAGGADADCYDFCFKDCMARENNMVDYCSYACDKTCQPDKPTLYSSSSSSRLAGDMECQLSCALGSCHRLLPDGKGAVEACFGQCYDGCKTTAAARLPRPLRAGHYVLSSPPDDVDHDPDHRYVFSSPHDDVDHDPDQVFASPPDDIDRHVFAAPPDVLAALPGEPDHA

SEQ ID NO: 25129 - protein, 259 aa, Oryza sativa; identical to SEQ ID NO: 17924
  Clone ID: TF_OsC420086_1.pep

SEQ ID NO: 25130 - protein, 307 aa, Oryza sativa; identical to SEQ ID NO: 17934
  Clone ID: TF_OsC45299_1.pep

SEQ ID NO: 25131 - protein, 450 aa, Oryza sativa
  Clone ID: TF_OsC903_2.pep
MRGQNLASCFNFRSSPFRLTVGERELKLEEDKNQLSKGLDPWTSNPTASASTLHYLLQEKERAQQAHEQLQIYQQQQGFGSFLQHRIRQPASRGPGGGGGGGDGGGSSGESTPVEALATAFGAGRIVRSAAGRKDRHSKVCTARGLRDRRVRLAAHTAIRFYDVQDRLGYDRPSKAVDWLMRNAKAAIDELPDRAEAPPPPAAASTEQPEATEQATSTSYGFGNTTGGTMTSAASAAAGSFLPHSLGADRVSDSVKSLFPSSSTASGAASAGHDEYRGSPPDLLSRTTSNQQPQELCLTLQSNQHQIFSHVSSNHHGMISSAGVPGWPDHSQRMQAWHAPENSTGDGRGGGNGDGYMFAMPSRQGLDQSQLFSHGEPLQSSGRGWASARAWLDPLAVAAIHHQPSTMAAGQVGFGHLVGGAGGGGGFMGFLAPAAQRLEGEEEHGSEVIR

SEQ ID NO: 25132 - protein, 337 aa, Oryza sativa; identical to SEQ ID NO: 17936
  Clone ID: TF_OsC12862_2.pep

SEQ ID NO: 25133 - protein, 59 aa, Oryza sativa
  unsure (1)..(59): unsure at all Xaa locations
  Clone ID: TF_5003300.pep
GKDRHSKVYTAKGIXDXRVXXSVSTAIQFYDLXDRXGYDQPSKAIEWLIKAAAXXSASS

SEQ ID NO: 25134 - protein, 277 aa, Oryza sativa
  Clone ID: TF_OsC12862_5.pep
MQVVAAVTGNRRMQGLGPKRSSNKDRHTKVDGRGRRIRMPALCAAWIFQLTRELDHKSNSETVQWLLQQVEPAIVTAMGTGVGTDIQGPSLPSPNCALSRSHHHHHHMWAAAAAPPAASAAFAGLSQDGHIGVLSARSLSQFYHQVGDASAAVVTPAAPWMVAGLSPSKCLGESSIFFTPQSAHDMLFERLLDELMYLCLCSFLQVYNSRELDGLDHRCRVSALFVIAGRCVDIQVFLQLERSSFFPFYESDDPLMCDKYDVRQTDPHPRAVSATQI

SEQ ID NO: 25135 - protein, 388 aa, Oryza sativa
  Clone ID: TF_OsC2035_1.pep
MLPFFDSPSPMDIPLYQQLQLTPPSPKPDHHHHHHSTFFYYHHHPPSSPSFPSFPSPAAATIASPSPAMHPFMDLELEPHGQQLAAAEEDGAGGQGVDAGVPFGVDGAAAAAAARKDRHSKISTAGGMRDRRMRLSLDVARKFFALQDMLGFDKASKTVQWLLNMSKAAIREIMSDDASSVCEEDGSSSLSVDGKQQQHSNPADRGGGAGDHKGAAHGHSDGKKPAKPRRAAANPKPPRRLANAHPVPDKESRAKARERARERTKEKNRMRWVTLASAISVEAATAAAAAGEDKSPTSPSNNLNHSSSTNLVSTELEDGSSSTRHNGVGVSGGRMQEISAASEASDVIMAFANGGAYGDSGSYYLQQQHQQDQWELGGVVYANSRHYC

SEQ ID NO: 25136 - protein, 373 aa, Oryza sativa
  Clone ID: TF_OsC1117_1.pep
MEAQAQDKAEEGEEEGTRQQHAQAGPVGAAGGGGGGGAAAVAMSAIPMNSWLVPKPEPVEFFGGMAMVRKPPPRNRDRHTKVEGRGRRIRMPAACAARIFQLTRELGHKSDGETIRWLLQQSEPAIIAATGTGTVPAIATTVDGVLRIPTQSSSSSGPASSAVVDGEESSAKRRRKLQPTRAVAGASPLATAAPAAYYPVIADPLLQGSGGAAISVPSGLAPITATGAPQGLVPVFAVPATGSPAVAGGNRMIPQATAVWMVPQPAGAAGAGNQPTQFWAIQSAPQLVNFAGAQFPTAINVADFQQQQQQQPVSTTIVQNSNSGEHMHFSGADSHEQQRRGRKEGNSGGVVDHPEEDEDDDDDEPVSDSSPEE

SEQ ID NO: 25137 - protein, 343 aa, Oryza sativa
  Clone ID: TF_OsC900_3.pep
MDVTGDGGGGGQRPNFPLQLLGKKEEQTCSTSQTAGAGGGGVVGANGSAAAAPPKRTSTKDRHTKVDGRGRRIRMPAICAARVFQLTRELGHKTDGETIEWLLQQAEPAVIAATGTGTIPANFTSLNISLRSSGSSLSIPSHLRLAGLAGPRFGGGARAADAWDRVVGLGFGGAADAPSSATSSSSSPLLLSFHSGSSQIPAGTVWMVPSSNAQAAGGGAPPGGGGESIWTFPQSGSGGGGGAATVYRGVPSGLHFMNFPATPMALLPGGQQLGLAGAGGGGEGHPGILAALNAYRAQAAQPDAGAAAQNGAQGSSQHRQHQHHGGGGGGGDERHESMSASDS

SEQ ID NO: 25138 - protein, 213 aa, Oryza sativa
  Clone ID: TF_OsC900_1.pep
THPQREGGRQAARRHQIHSPLLFQTTTSLTSLKNPIKERYSWFISVYIYHGLIDDHGRSPETPEVARRPNFPLQLLEKKEEQPCSSSAAGGGTGPSSAGGNGNNGSGPGGAGGEMQQLRKAAPKRSSTKDRHTKVEGRGRRIRMPALCAARVFQLTRELGHKTDGENEWLLQQAEPAVIAATGTGNPGNFTSLNISLRSSGSRCPPRRTSRVT

SEQ ID NO: 25139 - protein, 445 aa, Oryza sativa; identical to SEQ ID NO: 17948
  Clone ID: TF_OsC219434_1.pep

SEQ ID NO: 25140 - protein, 211 aa, Oryza sativa; identical to SEQ ID NO: 17950
  Clone ID: TF_OsC6287_1.pep

SEQ ID NO: 25141 - protein, 311 aa, Oryza sativa; identical to SEQ ID NO: 17951
  Clone ID: TF_OsC1116_2.pep

SEQ ID NO: 25142 - protein, 357 aa, Oryza sativa
  Clone ID: TF_OsC934_1.pep
SCSLQGAQLTASERFRVAQSELLLVGPSNSGASSPGSSVSIDPLQTKRRRISHEVAQASAMEEVVVGGKERKRPRGALVGVGGGGASAATAAAWRTSRVARAAAGGKDRHSKVVTSRGLRDRRVRLSVPTAIAFYDIQDRLGVDQPSKAIEWLIRAAAAAIDALPSLDCSLALPAAASSPPPPAADDAEVSTSETSKSSVLSLANAPCDNGGGAFAELLHCSNTNGSKPLQQQQQATLAYYAAAQSAHMAAPMSFEVMAMPPHLAFSQEQQQHATVAAFDRGTLQSNASLWPPPPQPPPSQHPFLLQRFAAAPAEVAGLPFFLAGGVGGAAAAAPAATTNGGERRLQLWDFKEERKT

SEQ ID NO: 25143 - protein, 422 aa, Oryza sativa
  Clone ID: TF_OsC900_2.pep
GTSGGLRAAAAAAEGGMEQQAAPSSSTSTSTNSSRSTSDHHAAAAAAAAAAAAQVAHQHHPFYYAAAQGGANTMPAPASFMGSLAIVPAAAAPGGGGGQVQAAAAPVASSEKKAVVAAGAGAKRPTKDRHTKVEGRGRRIRMPALCAARVFQLTRELGHKTDGETIEWLLQQAEPAIVAATGTGTIPANFSSLAVSLRSAASHSSSPRAAPFHHLQQQQQHDVAAMLGFHHHHHQLLPPPPPHQHPEPTPQDPGAGEFMRKRYREADDLFKDTSRQDPVDGATGEAEQKARAAAAAAAPPPTAPSAMWAVGPNTTGATAAFWMQPAWAFPHGAGAGAAGNTVQAPLQFMSRSSFPTAMNVTMADNNNSSNNNLGMLAALNAGGGGRSGEHQHQHEGQSPAEMDHQRRANGGGGEAGGAASSQ

SEQ ID NO: 25144 - protein, 646 aa, Oryza sativa
  Clone ID: TF_OsC901_1.pep
CPIHGIASSLVPHSSPGYGIRRGGWTRIGAATVAAGKKAAGDLDPRHHHHRVTHGGDGGGVGGGGSGGQEEADEQQQQQHDHHRLLQLHHHQGVQQDQEPPPVPVFHLQPASVRQLSGSSAEYALLSPMGDAGGHSHHHQHGFQPQLLSFGGVGHHHHLHQFTAQPQPPAASHTRGRGGGGEIVPATTTPRSRGGGGGGGGEIVAVQGGHIVRSTGRKDRHSKVCTARGPRDRRVRLSAHTAIQFYDVQDRLGYDRPSKAVDWLIKNAKDAIDKLDVLPAWQPTAGGAGAGNAAAPPSSSTHPDSAENSDDQAQAITVAHTAFDFAGGGSGGTSFLPPSLDSDAIADTIKSFFPMGGTAGGEASSSTTAAQSSAMGFQSYTPDLLSRTGSQSQELRLSLQSLPDPMFHHQQHRHGGGGGGGNGTTQQALFSGAANYSFGGGAMWATEQQAQNQRMLPWNVPDPGGGGGAAYLFNVSQQAAHMQAAAAALGGHQSQFFFQRGPLQSSNQPSERGWPETVEADNQMSHHQGGLSPSVSAAIGFAAPGIGFSGFRLPARIQGDEEHNGGGGGNGDKPPPPSSLAPPLPSRNCRLHSGGAKFGGSTSALLLMLLHIGWLVGWFSIDLFCCCACHWFLFQEFTRSFLELGL

SEQ ID NO: 25145 - protein, 315 aa, Oryza sativa
  Clone ID: TF_OsC902_1.pep
GTSRVRATGGKDRHSKVYTAKGIRDRRVRLSVATAIQFYDLQDRLGFDQPSKAIEWLINAASPAIDTLPSLDPAAFAAIPHAAADAAPTRRRSQQQQQQLSNKSGCSSTSETSKGSDKEVTVASAPAQAASFTELLIAGVAASSAGGGAIGNGADCVGIAHPGKGGAEGASTYGFSAASSFGDAPPIGMVPAPPFNFSAPGADMAAHYSLAQDQLAAPPPPAGGDYNLNFSMSSGFLGANRGTLQSNSPSNMSGHHHHHHQQQLQRLDGSTISFLLGHAAAAAHPAASEGQITSTAALQLWDGFRHSGMKEKSKN

SEQ ID NO: 25146 - protein, 119 aa, Oryza sativa
  unsure (1)..(119): unsure at all Xaa locations
  Clone ID: TF_OsC934_2.pep
MAAAWRTSRVACVAAGEKDKHSKVVTSRGLPDRRVRLSVPTAIAFYDIQDRLGVDQPSKAIEWLIRAAAAAIDALPSLDCSLVLPNAAXAPHPPEAEAVERAAFGGAGAHEEGYGGGVA

SEQ ID NO: 25147 - protein, 370 aa, Oryza sativa
  Clone ID: TF_OsC1116_1.pep
MLLQETRQRKEGGLACLLVCCTSHSWRQSHVQLQMLCQEMNKRNLQQAHVPSSPCVWRGRAPARSAPPSRRCTCRCSPAESSLSPPPPPPLNDCIGHWRLLLFSPVAVQPIPHTPHHYPTCPCPTPPLRSSPLLMTTRPDGGGGGGGAPDKQLVPASNANGTALAVRKPPSKDRHSKVDGRGRRIRMPIICAARVFQLTRELGHKSDGQTIEWLLRQAEPSIIAATGTGTTPASFSTSSPSSLRSNSTSNSNDLLLPRAAPFILGKRLRAADDHTTSPAPAPDATAPTQAFWALPARADFGQLWSFAAAPEMMVAAAAAPAMPGEASAARVGNYLPMAQGNLNLLASFSGGPGGAGATAATGRPEEESAR

SEQ ID NO: 25148 - protein, 326 aa, Oryza sativa; identical to SEQ ID NO: 17931
  Clone ID: TF_OsC45299_2.pep

SEQ ID NO: 25149 - protein, 116 aa, Oryza sativa
  Clone ID: TF_OsC201546_1.pep
MAMSALKFCGECSNMLYPREDKETHTLLYACNSCEHQEPATDTCVYKRVLRKPAGEPKDILKDAATDPTLPRTRSIKCYNCGHPEAAFFQAPTKGEKGLTLYFICCNPSCGHRWRD

SEQ ID NO: 25150 - protein, 114 aa, Oryza sativa
  Clone ID: TF_OsC138347_1.pep
MSTMKFCRECNNILYPKEDRDQKILLYACRNCDHQEVADNNCVYRNVVHHSAGEFTQVLQDVAGDPTLPRTKAVRCAVCGHGEAVFFQATARGEEGMTLFFVCCNPSCGHRWRE

SEQ ID NO: 25151 - protein, 114 aa, Oryza sativa
  Clone ID: TF_OsC6358_1.pep
MSTMKFCRECNNILYPKEEKDRRLLLFACRNCEHQEVSESKCVYRNEVAHAAGERTQVLQDVASDPTLPRTKTVRCAACGHGEAVFFQATARGEEGMTLFFVCCNLTCAHRWRE

SEQ ID NO: 25152 - protein, 189 aa, Oryza sativa
  Clone ID: TF_OsC11113_2.pep
MPESVIGEDEPATAFTRRRRLALPPPSPSPVLHRRPSERRPPSPANHRLEEKEHFAGDGGGGGMAFWQARDFLFCGVCGTLLKFDSVRSASCPLCGFKRKAKDIEGKETRYTVTAEDIRRELKLDPYVILETTLKEEDVIVERATVNKECEKCKNPELQYYTKQLRSADEGQTVFYKCANCRHEFNENQ

SEQ ID NO: 25153 - protein, 156 aa, Oryza sativa; identical to SEQ ID NO: 17955
  Clone ID: TF_OsC11113_3.pep

SEQ ID NO: 25154 - protein, 373 aa, Oryza sativa; identical to SEQ ID NO: 17958
  Clone ID: TF_OsC110921_1.pep

SEQ ID NO: 25155 - protein, 367 aa, Oryza sativa; identical to SEQ ID NO: 17957
  Clone ID: TF_OsC44273_1.pep

SEQ ID NO: 25156 - protein, 121 aa, Oryza sativa
  Clone ID: TF_uC-osflcyp081e09b1.pep
AYNGVDVNRGKDGLWPGCGMLLQIQPATGGNRLRFYCPTCPYVCPVKNKIVKKARLVKKEVEPIFSDSDAMKNAPKTTTTCPRCQNGDAYYRQMQIRSADEPMSTFYKCCREECQFDLRED

SEQ ID NO: 25157 - protein, 885 aa, Oryza sativa
  Clone ID: TF_OsC42013_1.pep
MEAQADAGGDDLAAMREQCRSLEEAIGFRRETQMGLVASLQRLVPDLVPSLDRSLRIIAAFNDRPFVPTPNPDGGHGKSPAALKPHHRRALPDPARSTRRKTSPGSSPASVAAAPGGLDAVRTMVAVCLLELVPFAEIDAAALARRMQAESSSASEAERTALADLAAELGGSAASAVVLALRRIAEDTGGVQIEEAMIGGKSMTMVWAIDRNKLLKELPESATLPLLQPPPAPQMPPSETDAGSAMIPRTPQQQQPQPDMWPHSMPPIFPRPRGMTMQGMQRVPGVPPGLMPLQRPFMGPAGVITMGGGVGPSPNQQKQKSEEDELKDLELLLNKKTYREKQNTKTGEELLDLIHRPTAKETAVAAKSHTVSPVVVNELAVADLGFEPRGLNVKTIAYKEMGDTRSKSSKIYSMFKTKGGSQLKEYCTNLTKEDCRRQSGSFVACDKVHFRRIIAPHTDTNLGDCSFLDTCRHTKTCKYVHYELDQTPDIPPMMAGALAPPRQIRLQRAEYCSEVELGEAQWINCDIRNFRMDILGQFGVIMADPPWDIHMELPYGTMADDEMRTLNVPALQTDGLIFLWVTGRAMELGRECLELWGYKRVEEIIWVKTNQLQRIIRTGRTGHWLNHSKEHCLVGIKGNPLVNRNIDTDVIVAEVRETSRKPDEMYPMLERISPRTRKLELFARMHNAHAGWLSLGNQLNGVRLVDEGLRARYKAAYPDSEELLEGAHTGSPMRPRGGEGVAVSLPGETHTTVGFPGRIRAPNPMGLSGAIGLHLGPCQLFSKLSPRMTISPAGPGPLRGPDPTGAGAISDPWIVKKARLVKKEVEPIFSDSDAMKNAPKTTTTCPRCQNGEAYYRQMQIRSADEPMSTFYKCCREECQFDWRED

SEQ ID NO: 25158 - protein, 562 aa, Oryza sativa; identical to SEQ ID NO: 17961
  Clone ID: TF_OsC298014_1.pep

SEQ ID NO: 25159 - protein, 538 aa, Oryza sativa
  unsure (1)..(538): unsure at all Xaa locations
  Clone ID: TF_OsC167645_1.pep
MYCSHCQDNCPVVKDPDKNYTCCGLCGKVLDDQVYDGEPTFQKGADGQARLAGSILSSIESGNSVSHERTINKGREEIRQIVSSLHVAGGDTIISMAHRYYTLAVDKNFTRGRRTTHVAAACLYIACRQSKKAYLLIDFSDHLQISXLCQVLLLAEHPVIQKLIDPSLFIHRFXNTGRKPSGLCGAALYIAALSHGYDYTKADIVAVVHVCEATLTKRLIEFENTDSGSLTIEEFLAKADEQVLVTKISPKSGEVLCKHKDKAEHFAHGLCEKCYNKFMKLSGGLEGGSDPPAFQRAEKQRLEAAKNAKGTAASKEAALESVCEARESDVENNITTPPKNIIGDKHSTIPSVKVAGDSVATEDPEGEGKNDKADEGPESLSDIDDAEVDGYLHNEEETQYKKIIWEEMNKEYLEEQAAKAALAAELAARGVVVEEGKRKRRRHNEDGKNATPAQTPAEATQNMLKRKRLGSKINDEAVNKLYNTKDEDGKADKEMDFNDEYGQDTGDGETFEGGYDYPDYNYDGYGDGAYGDYDGVDF

SEQ ID NO: 25160 - protein, 312 aa, Oryza sativa; identical to SEQ ID NO: 17959
  Clone ID: TF_OsC715_1.pep

SEQ ID NO: 25161 - protein, 47 aa, Oryza sativa
  Clone ID: TF_LIB3599-014-Q6-K1-A11.pep
RCKEKRENIHTYFRKGKESGKNRTEHAKTCRYCDELNRLYFRYVYCS

SEQ ID NO: 25162 - protein, 79 aa, Oryza sativa
  Clone ID: TF_8857106.pep
AGQLVPVPAPRAKADAWAAAGGDGSGTTAPSRWPKEEVQALIDLRMEKEEQYNDMGPKGPLWEEIAAGMQRIGYNRSAK

SEQ ID NO: 25163 - protein, 410 aa, Oryza sativa; identical to SEQ ID NO: 17968
  Clone ID: TF_OsC14298_1.pep

SEQ ID NO: 25164 - protein, 86 aa, Oryza sativa
  unsure (1)..(86): unsure at all Xaa locations
  Clone ID: TF_OsC46205_1.pep
KRSTKDGRAGHGDGKTXRFFTELEALHGAAASARPPPPVSLAPAPVAMAPXATPAGLSALRIRHSASPSPVAPLRPSPPRSIPPAS

SEQ ID NO: 25165 - protein, 547 aa, Oryza sativa; identical to SEQ ID NO: 17969
  Clone ID: TF_OsC198059_1.pep

SEQ ID NO: 25166 - protein, 432 aa, Oryza sativa; identical to SEQ ID NO: 17971
  Clone ID: TF_OsC88912_1.pep

SEQ ID NO: 25167 - protein, 385 aa, Oryza sativa
  Clone ID: TF_OsC26571_3.pep
IAAVPPPPLQPTPVASAAPPPPIQVQPHHIMPMTPQPQLQPPQPQSKEANTVVRAAPPPQEQHDTAASGGGGGASSSRWPKAEVHALIQLRTELETRYQDSGPKGPLWEDISAGMRRLGYSRSSKRCKEKWENINKYFKKVKESNKKRPEDSKTCPYYHQLDALYRTKAANAAAAASASPAPATTTVLAPVPLSQTPPHVDHGGSNGNGNGWASANNGGGGSSSGGMQTKASNNGTATAGGLPVVSVAGGNGNGNGVAATTDNKGSKQVPVAKETAGQRQPQPLAMNHNYGNDRMADDMDSDSMDDDDDDDEFDDDENDDDIGGGKMQVQYETSSHFQRPQLQNQNVVVGRPNASGGGGGGAPTTPAGPPPPAATSGTSFLACVQ

SEQ ID NO: 25168 - protein, 977 aa, Oryza sativa
  unsure (1)..(977): unsure at all Xaa locations
  Clone ID: TF_OsC26571_1.pep
MAIYYLEREGLTHNMPMHGHFYTPLPLNHWHADTTNAADMTRGPMRMWAPHVSGMNFIFFISKEKVLMRVEMVSSPDVLIIPSPPFPSGNTRGGGGGGGGSSPARGPQPAPPHPAPGQHPPLLQPARRARPQAAGGPPGVLAPQPARSAPPPAAPLPRLPRRRLRGHCNRAAQRAADTEPARAPGAEHTARRRQPHPRPLRRHGGHDQAADATDRAHAAAAGGGXQFGAVAPEMSPFSPALHASAEAASPISSRPPPAASSPSPAAQQQQHRTRTNFDELAGGDXRGGGGGFPDAEALAAAAVGEEGASGGAGGNRWPRQETLALLKIRSDMDAAFRDATLKGPLWEEVSRKLAEEGYRRSAKKCKEKFENVHKYYKRTKESRAGRNDGKTYRFFTQLEALHGTAAGVVAAPSPVTSLAPPPATAVGVSGGVRAPAEPPPAVVMGNVMSFSTSNTEEYSDEEDSDDEGTEDMGGGGGDERGKRKRLSEGGAAAGVGGGGGGGGGSGKMMRFFEGLMKQVMERQEAMQQRFLEAIEKREQDRMIREEAWRRQEMARLAREQEILAQERAMAASRDAAVVSFIQKITGQTIPMPPIIAAPAITVMPPPAPSQXPPPVPQPKRRGQPQPPPPPPQPPPITSAPHQQQQQQPQLKXTKSPLPVTPRXQHATCGLMTRRQAAEGHDDNCGVRGGGGGQPSSSRWPKAEVHALIQLRSNLDNRYQEAGPKGPLWEEISAGMRRLGYSRSSKRCKEKWENINKYFKKVKESNKKRPEDSKTCPYFHQLDALYRNKAALNSSSSSAAAAAPALPPPEHAEPAVTVAAPISQTPPPPPPQPVTTTKNGNGTSSTNGANGEGGGGGSGGMQMQASNGSVVAGNKFFTGAAAXAKAEDIVKEMMEQTPQQFTTDGTDSDNMDDDYNDDDDEDDDDVKMQYGIQFQNQNPAAASTAXTAGGNPGTRGPHHGADEHPPTTGSGSFLAMVQ

SEQ ID NO: 25169 - protein, 202 aa, Oryza sativa
  Clone ID: TF_OsC331190_2.pep
MDPFHHLNSSFSNPYHPLLASPPHHFAPDPLPPPPPPPPPPLLPADPPSLERERLPQWSHAETAAFLAIRADLDHSFLSTKRNKALWEAASARLHALGFARTPDQCKSKWKNLVTRFKGTEGAAAVAAAGTDQMQGGQGGGAAARGASSSFPFHDELRRIFDARVERARALERKKVKGKDPDDDHDGGGDGDEDDEEEADHH

SEQ ID NO: 25170 - protein, 711 aa, Oryza sativa; identical to SEQ ID NO: 17978
  Clone ID: TF_OsC19996_1.pep

SEQ ID NO: 25171 - protein, 435 aa, Oryza sativa
  Clone ID: TF_OsC10945_1.pep
MEGSNPPGNMTQGPSYGSLDLHGISKQMHPPNSGNQGFNQPQIPGNFTIPMDRVTEPDNISDGVQLGQHGKIAHHHHHHRHHSKNHGSDEEEHDMNEDAADGKDKKGSPWHRMKWTDSMVKLLITAVSYTGEDPGADLGGGRRNYSMMQKKGKWKAISKVMGERGCHVSPQQCEDKFNDLNKRYKRLTDILGRGTACNVVENHSLLDHMDISEKMKEDARKILNSKHLFYEEMCSYHNNNRISLPEDPALQQSLQLALRCKEDNDFMRHASGDAELDDDQSEDSDYEENEEEHRAVDTNIRGPSMHKRMWHVVDHGDVGFVTSCSNDGSGRSDPYDVLDINKPFPDGCDLALVQKDLALKAAEIQKHRLQIETKAVQLAKQRLKWEMFRKNKDLELEKLALENEQMMLQNKRFELDLRHKELELEIKIKGNANHP

SEQ ID NO: 25172 - protein, 608 aa, Oryza sativa; identical to SEQ ID NO: 17983
  Clone ID: TF_OsC26571_4.pep

SEQ ID NO: 25173 - protein, 385 aa, Oryza sativa; identical to SEQ ID NO: 17986
  Clone ID: TF_OsC78604_1.pep

SEQ ID NO: 25174 - protein, 128 aa, Oryza sativa
  Clone ID: TF_OsC1713_3539.pep
MAIQLYRWAPSSSLMADLTVADWLLRLHGCATSSLLIVMALFGFIKQLIEYNIIAFCHPSTVFIFGKSTREIMARMIEAHGFGGDENGSSADNRWLRQDTLELLTIRPEMDTVLQEATLNGAIWEEIS

SEQ ID NO: 25175 - protein, 908 aa, Oryza sativa
  unsure (1)..(908): unsure at all Xaa locations
  Clone ID: TF_OsC57118_1.pep
RERERGDAGAGHSLSLLSPPPTPPCAMVALASLSSLSPCGLARRRSASSAASISCCAAPPPPSAKGSQESRTPRRRVRKTEGATKSLEDSVKRKMEQFYEGLDGPPLRVLPIGGLGEIGMNCMLVGNYDRYILIDAGVMFPDFDEFGVQKIIPDTTFIKKWSHKIEAVIITHGHEDHIGALPWVIPALDSSTPIFASSFTMELIKRRLKEFGIFLSSRLKVFRVRKRFQAGPFEVEPLRVTHSIPDCCGLVLRCADGIIFHTGDWKIDESPVDGKIFDRQALEELSKEGVTLMMSDSTNVLSPGRSISESVVAGSLLRHISEAKGRVITTQFASNIHRIGSIKAAADLTGRKLVFVGMSLRTYLDAAFRDGKSPIDPSTLVHLIESRFLLKVKVEDMDAYAPNDLLVVTTGSQAEPRAALNLASFGGSHALXLSKEDVLLYSAKVIPGNESRVMKMLNRLTELGPKIVMGKDAGLHTSGHAYHDELEEVLQIVKPQHFLPVHGELLFLKEHELLGRSTGIRHTTVIKNGEMLGVSHLRNRRVLSNGFVALGKEDLRLMYSDGDKAFGTSTDLCIDERLRIASDGVIFVSMEIFRPQKELASSQSGLKGKFKITTRCLWLDNGRLLDALYKAAYAALSSCPVNCPLSHMERMVSEILRKMVRKYSGKRPDVIAVATENTTVSFVEDSETKSSGKFGSFSAPRHSSRSSGRSLEESDKSCPENTEGEAKENLPDVLRTTRDDATTSSNGEAFFSSDLHKPKTLEHFWDSFKSPTAVKIARIVNGSAQGSKSKIGKISIVGKDSSDPSSAPVKSSKKNKWKPEEIKSLIQMRGEMNEQFQTVKGRMVLWEEISSSMLSQGISRTPAQCKSLWTSLVQKYEESKKDEESVKTWPYFLDMDRVLSSQGEMATQ

SEQ ID NO: 25176 - protein, 152 aa, Oryza sativa
  unsure (1)..(152): unsure at all Xaa locations
  Clone ID: TF_OsC1326_7.pep
LCRPPAGGEEAGGELLLRDRELRGRTRRRGRRVPPHLLNXHHSFYDGLYVGGVADARIRPALRTLKQNMSLLLSVLIDRVQPVAVQEASEAARRSDGKGAAQRELLEHNGLLGGEEGDRSGSRAGNRWPRQETLALLKIRSEMDVAFREAIL

SEQ ID NO: 25177 - protein, 122 aa, Oryza sativa
  Clone ID: TF_OsC1713_4560.pep
MALFGFIKQLIGYNIIAFCHPSTVFIFGKSLRGYCGDYGYPIPTRHARWSHGSSLNHDRLASVKGDENGSSADNRWLRQDTLELLTIRPEMDTVLQEATLNGAIWEEISRICDVFFVGDFVM

SEQ ID NO: 25178 - protein, 277 aa, Oryza sativa; identical to SEQ ID NO: 17973
  Clone ID: TF_OsC248026_1.pep

SEQ ID NO: 25179 - protein, 65 aa, Oryza sativa
  unsure (1)..(65): unsure at all Xaa locations
  Clone ID: TF_LIB4309-015-Q1-N1-E2.pep
VVRNTQHPRSYYRCTQHNCRVNKRVQRLAQDPRMVLXSSEGRHVHSPSREEDGPARASADMTFIW

SEQ ID NO: 25180 - protein, 50 aa, Oryza sativa
  Clone ID: TF_LIB3433-042-P1-K1-H2.pep
MRKVDTFAPHNDGHQWRKYGEKKINNCNFPRYYYRCTYKDNMNCQQRSRF

SEQ ID NO: 25181 - protein, 147 aa, Oryza sativa
  Clone ID: TF_uC-osflcyp011c08b1.pep
LSQPGVAEREVAHVYVLIKTHQPVLGGHQQPQQLAHGPLIHSMRALNVALSVMNQPHASSSSAAAAAAAGHHYPAMTMIRAESTPANRPAADASYNHGDGRQEDHHPPNEEGLTVRTSDCGFTTQMALHEDGYQWRTYGQKKIQGTH

SEQ ID NO: 25182 - protein, 78 aa, Oryza sativa
  unsure (1)..(78): unsure at all Xaa locations
  Clone ID: TF_OsC143436_1.pep
RVERDGXDPXYVVTTYDGVHNHGTPGCVGGGGHLPYPTSAAPPWSVPAAAASPPPAQEQAWGAPLHAAAAAHSSESSF

SEQ ID NO: 25183 - protein, 194 aa, Oryza sativa
  Clone ID: TF_OsC547_384.pep
PYLMGDVLRAQATASAEEVAGGVWPCELDDHLIGELLGDDGLFVPAAEHPTLYYSFGAGSSAAAAAAPCNGGGSADHERRPRPAPAVSRDLCSVYSGPTIRDIEKALSSSASPRPPYPSGRRYSSLYLVEAESKYTSKVRSCGGKMPADGYKWRKYGQKSIKNNPHPRSNLLLTVKFGKPGVVIGLESASASKS

SEQ ID NO: 25184 - protein, 148 aa, Oryza sativa
  unsure (1)..(148): unsure at all Xaa locations
  Clone ID: TF_LIB4371-040-R1-N1-F8.pep
MHSKKKMHVSLILLCLQYCREGTRTMASSSSHGATKNRPWTLTLGQRNSPRRRRRVTWPGTAATARWRRRRRPAASVSRAGGSSDDGYNWRKYGQKQMKGXSENPRSYYKCTFPGCPTKKKVEXSPDGQVTEIVYKGAHSHPKAAAER

SEQ ID NO: 25185 - protein, 217 aa, Oryza sativa; identical to SEQ ID NO: 17995
  Clone ID: TF_OsC352149_1.pep

SEQ ID NO: 25186 - protein, 61 aa, Oryza sativa
  Clone ID: TF_OsC46056_2.pep
PRVRIFLIDFCRKTSTEKKRHQIRVSSTGGVENPPVDDGHSWRKYGQKEILGAKHPRLVFF

SEQ ID NO: 25187 - protein, 59 aa, Oryza sativa; identical to SEQ ID NO: 18018
  Clone ID: TF_OsC352156_1.pep

SEQ ID NO: 25188 - protein, 493 aa, Oryza sativa
  unsure (1)..(493): unsure at all Xaa locations
  Clone ID: TF_OsC1528_2199.pep
MSDEFDNSIDPAEIYTTDMFMAEHSVLNSFAGRIDKRIKARLEGGTSRRTSGPRKYINRNHEGAHDQLFADYFAEDPLYSAATFRRRFRMRRHVFLHIVDELGKWSSYFTHRVDCTGRLGHSPLQKCTAAIRMLAYGTAADALDEYLKVPQSTALECLENFVEGVVEVFSSRYLRRPTAEDLERLLQVGESRGFPGMLGSIDCMHWRWKNCPNAWKGQYTRGDQKYPTIILEAIASYDLHIWHAFFGIPGSNNDINVLNQSPLFIEAIKGEAPQIQFAVNGTXYNTGYYLADGIYPEWATFVKSIRSPQLEKHKLFAREQEGKQKDIECAFGVLQARFNIVHRPARSWSQKVLRKIMQACVILHNMIVEDEGEMAEDPIDLNAAPGTSIVLPPEVHAGSNDHPSFSDMCTIYELAVVFXRTFEGGLTWGSRTLTDRTGRNSSPCRQSAPPPPRPPRSRPRRSPSVPPRTPRTPPLGPMSARSTAAERLRRLLR

SEQ ID NO: 25189 - protein, 361 aa, Oryza sativa; identical to SEQ ID NO: 18013
  Clone ID: TF_OsC46056_1.pep

SEQ ID NO: 25190 - protein, 219 aa, Oryza sativa; identical to SEQ ID NO: 18021
  Clone ID: TF_OsC143437_1.pep

SEQ ID NO: 25191 - protein, 540 aa, Oryza sativa; identical to SEQ ID NO: 18017
  Clone ID: TF_OsC116595_1.pep

SEQ ID NO: 25192 - protein, 117 aa, Oryza sativa
  Clone ID: TF_OsC175690_1.pep
RNLIDPLDYDRKNAEHTGSTVAQAPHNDGHQWRKYGQKWISRAKHSRSYYRCANSKVQGCPATKTVQQMDSSGNGTPELFNLVYYRLLSCRGEGFPRPHLVVTAHHSMGTYQSKRMQ

SEQ ID NO: 25193 - protein, 249 aa, Oryza sativa
  Clone ID: TF_OsC4053_2.pep
LTRKLNSIHKSSKSFPRTFLFYIDPCFFDFPIAPIRSENNNPSPIHVHKHAFVKRRGRPTWRGGPRRRPGGRPPFRGGGGGGPRRGGSPCGNSPTGGPPAFLRGSCWGCTCSNSLGGGCCCSPLAHTSSTRSRGVRIHGAQVREAGGRLAVAAPHAAAALDRPLDPWEQRVQTAMVRREHHAMVRPGGGGVVVDQLRQLGKLVLQARQWRKKGRRGRRRVRAERRVERGREASRLQLAPFHARIHAATN

SEQ ID NO: 25194 - protein, 659 aa, Oryza sativa
  Clone ID: TF_OsC17758_1.pep
MALELSLVSASPPGGLAASPPPPAAIPGKEQQVAGVGILLQISMLVLSFVLGHVLRRHRFYYLPEASASLLIGLVVGGLANISNTETNTRTQSGFSLSPKPFFANFGAIVTFAILGTFIASVVTGVLVYLGGLTFLMYKLPFVECLMFGALISATDPVTVLSIFQELGTDVNLYALVFGESVLNDAMAISLYRTMSLVRSQAAAGENFFMMVFQFLETFVGSLSSGCITAQNILNYFKGTFGIVVLELDLSLLLYPFPKFYMETLFAKHERLCMLSIDHVKLQYLCITIYHLLIACFTVNYFIYYLILCNLDHSVYLFKYAGLDIDKYMLAEGLGLSGIVSILFTGMVMKHYTFSNLSNNSQRFVSAFFHLLSSLAETFVAVNVFSCAYLVNMSRPEHRRIPLKHQKALWFSGLRGAMAFALALQSANELPGGHGKTIFTTTTAIVVLTVLLIGGSTGTMLEALDVIGDENRSIENYDDNNGYIPPTYEEGSSSGGGLRMKLKEFHKSTTSFTALDRNYLTPFFTSQTDEDDDVFEIGHYATPKSGFRQNAILPNGFVKMPCTRDTKHLFCHLRQFSPFLPNFASGLTKIPLRAGSRPVLRNTSSGCAAAAACADQYSAATSPKPSAGRRMLTMRVAPAAWAAALAGSRCASRGLWCTR

SEQ ID NO: 25195 - protein, 319 aa, Oryza sativa; identical to SEQ ID NO: 18031
  Clone ID: TF_OsC346291_1.pep

SEQ ID NO: 25196 - protein, 348 aa, Oryza sativa
  Clone ID: TF_OsC277_1.pep
MDPWISTQPSLSLDLRVGLPATAAVAMVKPKVLVEEDFFHQQPLKKDPEVAALEAELKRMGAENRQLSEMLAAVAAKYEALQSQFSDMVTASANNGGGGGNNPSSTSEGGSVSPSRKRKSESLDDSPPPPPPPHPHAAPHHMHVMPGAAAAGYADQTECTSGEPCKRIREECKPKISKLYVHADPSDLSLVVKDGYQWRKYGQKVTKDNPCPRAYFRCSFAPACPVKKKVQRSAEDNTILVATYEGEHNHGQPPPPLQSAAQNSDGSGKSAGKPPHAPAAAPPAPVVPHRQHEPVVVNGEQQAAAASEMIRRNLAEQMAMTLTRDPSFKAALVTALSGRILELSPTKD

SEQ ID NO: 25197 - protein, 308 aa, Oryza sativa; identical to SEQ ID NO: 18034
  Clone ID: TF_OsC104544_1.pep

SEQ ID NO: 25198 - protein, 309 aa, Oryza sativa; identical to SEQ ID NO: 18035
  Clone ID: TF_OsC89344_1.pep

SEQ ID NO: 25199 - protein, 424 aa, Oryza sativa
  Clone ID: TF_OsC7069_1.pep
MEGMEEANREAVQSCHRVLTLLSSPHSQLVPNKDLAAATGEAVAKFCSVASRLNNGNGLQGHARVRKIKKPLPIFDSNLFLESPALAVAMAAKTPNSSPITSLQLFPRYHQMEGSSSKDPVRIPAQFPKRLLLDNPAVDSDGPSRGPPLQLIQPVSVAPPAGTPHPALPSAHLHFIQQHQSYQRFQLMQQMKMQSEMIKRSGLGEQGGSNGGGKGVNLKFDSSNCTASSSRSFLSSLSMEGSIASLDGSRSSRPFQLVSGSQTSSTPELGLMQRRRCTGREDGSGRCTTGSRCHCAKKRKLRIRRSIKVPAISNKVADIPADEFSWRKYGQKPIKGSPHPRGYYKCSSVRGCPARKHVERSGLQGECGKATDKRSDRQPFVSVLLCPKSKPCKSEMACFLVATSPLGKLELMPDTQGPTAPSTP

SEQ ID NO: 25200 - protein, 565 aa, Oryza sativa; identical to SEQ ID NO: 18038
  Clone ID: TF_OsC47923_1.pep

SEQ ID NO: 25201 - protein, 623 aa, Oryza sativa; identical to SEQ ID NO: 18041
  Clone ID: TF_OsC2081_1.pep

SEQ ID NO: 25202 - protein, 210 aa, Oryza sativa; identical to SEQ ID NO: 18042
  Clone ID: TF_OsC123567_2.pep

SEQ ID NO: 25203 - protein, 507 aa, Oryza sativa; identical to SEQ ID NO: 18044
  Clone ID: TF_OsC44619_1.pep

SEQ ID NO: 25204 - protein, 315 aa, Oryza sativa
  Clone ID: TF_OsC209019_1.pep
MGFAKTTTETDIKLFLMGPCGASKQNNSKRGGSRTVARAEASSNDSSQEARRLFGACHVRESANPHARVPMYMAAAAAGASTPFNFCRHGSHAEYDAVFSGSWMARRPSAAPHGGGASGSGSGSGYGAASYVAPTFGAAFRQQHLDLLDYLSDDQGVPAPPPAAVPSASYVTPAPAMAPAEPVVPDAVAAAGGYPRSVAAAAAAVAGEGRDRTTTDKIAFRTRSDDEILDDGYKWRKYGKKSVKNSPNPRNYYRCSTEGCNVKKRVERDKNDPRYVVTMYEGIHNHVCPGTVYYAAQDAASGRFFVAGISHPDLN

SEQ ID NO: 25205 - protein, 194 aa, Oryza sativa; identical to SEQ ID NO: 18051
  Clone ID: TF_OsC140224_1.pep

SEQ ID NO: 25206 - protein, 389 aa, Oryza sativa
  Clone ID: TF_OsC457_1.pep
METPREPLTGRSRTVPPGIDTVRVIDGRPRLRPPPAGCSNGDGSIRSRMTSSMSPAPAPAYAQVMEDMEKGKELAAQLQGLLRDSPEAGRFVDQILHTFSRAMRALDKAAVSAAGGEGSEVQSEVTCGGGASAGGKRKAPAADRKANCRRRRGVFEKGIEEIGKIRKTRTQQSSGNSVVVKNLDDGQAWRKYGQKEIQNSKHPKAYFRCTHKYDQLCTAQRQVQRCDDDPASYRVTYIGEHTCRDPATAPIIAAHVIHQVAAGDNDDGCGGLQAGSRLISFVAAPAAPVDAAAAPTTSTITTVTAPGPLLQPLKVEGGVGSSDQEEVLSSLTPGSSAARGGAAAAESRVPSGRTRAMSRPPCTGATTPSPAWSSSRTTRLSSIWTTLWV

SEQ ID NO: 25207 - protein, 406 aa, Oryza sativa; identical to SEQ ID NO: 18054
  Clone ID: TF_OsC340734_1.pep

SEQ ID NO: 25208 - protein, 419 aa, Oryza sativa; identical to SEQ ID NO: 18059
  Clone ID: TF_OsC47923_2.pep

SEQ ID NO: 25209 - protein, 318 aa, Oryza sativa
  Clone ID: TF_OsC177829_1.pep
MDDDGDGSSSPTDDSAAAGLLPLFSRSPAEDLEEKLRRAMEENARLTRALDAILAGHHAHQRALLAPSLSPPPPSATARAPSVSTSCAAREDAAPAVAAAAASTACPSRQQPPTAEPRPKVRTVRVRADAADATDANSMAETVKDGYQWRKYGQKVTRDNPYPRAYFRCAFAPSCPVKKKLQRCAEDRSMLVATYEGEHNHALSTQTTEFVASGCTTSQHAGGSSSSPLPCSISINSSGRTITLDLTNQAGSGSIASCGVEAAAVSGELVTVLSPELRRHLVEEVVQVLKNDAEFVEAVTNAVAARVVDQIPHIPVHL

SEQ ID NO: 25210 - protein, 117 aa, Oryza sativa
  Clone ID: TF_OsC17758_3.pep
RRSYYKCTTVGCPVRKHVERASHDTRAVITTYEGKHNHDVPVGRGGGGGRAPAPAPPTSGAIRPSAVAAAQQGPYTLEMLPNPAGLYGGYGAGAGGAAFPRTKDERRDDLFVESLLC

SEQ ID NO: 25211 - protein, 618 aa, Oryza sativa; identical to SEQ ID NO: 18061
  Clone ID: TF_OsC11608_1.pep

SEQ ID NO: 25212 - protein, 342 aa, Oryza sativa
  unsure (1)..(342): unsure at all Xaa locations
  Clone ID: TF_OsC732_1.pep
MDAAWRGGVGCSPVCLDLCVGLSPVREPSAARHELLDRPAGCRGGGDSKSGAFLQAKIVEAKVTQMSEENRRLTEVIARLYGGQIPRLGLDGSASPPRPVSPLSGKKRSRESMETANSCDANSNRHQGGDADHAESFAADDGTCRRIKVSRVCRRIDPSDTSLVVKDGYQWRKYGQKVTRDNPSPRAYFRCAFAPSCPVKEEGAAERGGQLAXVATYEGEAQPPAPVSARRRAPGGGGGGRWLAAVLHLHQLLRPDHHARPHQERGSRAGGRGGASAAAAGPQGGVPGGRVAGVPDRAGGADGQRAHQRPQVHRRARRGDPPEAARILASFTILQFFLQEKT

SEQ ID NO: 25213 - protein, 280 aa, Oryza sativa; identical to SEQ ID NO: 18062
  Clone ID: TF_OsC47394_1.pep

SEQ ID NO: 25214 - protein, 106 aa, Oryza sativa
  Clone ID: TF_uC-osflM202091c10b1.pep
RRSVEKRVVSVPIAECGDRPKGAGEGPPPSDSWAWRKYGQKPIKGSPYPRGYYRCSSSKGCPARKQVERSRADPTVLLVTYSFEHNHPWPQPMSSSCHASMSSLGR

SEQ ID NO: 25215 - protein, 415 aa, Oryza sativa
  Clone ID: TF_OsC1773_1.pep
MGYPAASAPAPPSPFPVPHGLSPTAFLGGSPGLFSPTGNFEMSHQQALAQVTAEAVHSPYSMINQSDFSLPFSSTTTSVLASQHVNSSANVSSPREIPTLPSHTDNSNIESTEVSHGFQTTALTEDKPADDGYNWRKYGHKAVKGGEYPRSYYKCTHLSCPVKKKVERSSDGQITPILYRGQHNHQRPTKKSPKMVALYLNEADVSREKEDASIRSEQGSQDYSGKFKASNDGGPSSSRRGDRGEQISGSSDSKHQGEEEVKVEGRATSDGNANKRHVPAPAQRIIVQTTSEVDLSDDGYRWRKYGQKVLKGNPHPRSYYKCTYQGCDVKKHIERSSQDPKAVITTYEGKHSHDVPAARNSSHSSANANVSSSSNLPPKGQGATVVVQRWFAECIFSFFLPVKGGGGMAGNLGGV

SEQ ID NO: 25216 - protein, 339 aa, Oryza sativa
  Clone ID: TF_OsC62508_1.pep
MASSTGGLDHGFTFTPPPFITSFTELLSGGGGDLLGAGGEERSPRGFSRGGARVGGGVPKFKSAQPPSLPLSPPPVSPSSYFAIPPGLSPTELLDSPVLLSSSHILASPTTGAIPAQRYDWKASADLIASQQDDSRGDFSFHTNSDAMAAQPASFPSFKEQEQQVVESSKNGGAAASSNKSGGGGNNKLEDGYNWRKYGQKQVKGSENPRSYYKCTYNGCSMKKKVERSLADGRITQIVYKGAHNHPKPLSTRRNASSCATAAACADDLAAPGAGADQYSAATPENSSVTFGDDEADNASHRSEGDEPEAKRWKEDADNEGSSGGMGGGAGGKPVREPR

SEQ ID NO: 25217 - protein, 310 aa, Oryza sativa; identical to SEQ ID NO: 18068
  Clone ID: TF_OsC329265_1.pep

SEQ ID NO: 25218 - protein, 319 aa, Oryza sativa
  Clone ID: TF_OsC146479_1.pep
MDGEWSDGAAVSSPTMSGGGGREQMKGGEDVAAADCPGSPVSPSPAAAQRSAAGAAASPSGRSRRSAQKRVVTVPLADVTGPRPKGVGEGNTPTDSWAWRKYGQKPIKGSPFPRAYYRCSSSKGCPARKQVERSRNDPDTVIVTYSFEHNHSATVPRAQNRQAAPQKPKAQACSPPEPVVEVEPEETHQYGVTAGPATGGGGGAAAIEVRDEFRWLYDVVSVPATSTSPSDIDAADEMQLYDQPMFFGGAVVGTAALLPDEFGDVGGLGGEGLGEEEALFEGLGELPECAMVFRRRAGDGLEMGGGVKIEQPAESTAMT

SEQ ID NO: 25219 - protein, 326 aa, Oryza sativa
  Clone ID: TF_OsC10544_1.pep
MITMDLMGGYGRVDEQVAIQEAAAAGLRGMEHLILQLSQTGTSERSPAPAQEQQQQVDCREITDMTVSKFKKVISMLNRTGHARFRRGPVVAQSSGPAASEPAPVRSSPSAVSRPMTLDFTKAASGYGKDAGFSVSGISAASSSFLSSVTGDGSVSNGRGGGSSSLMLPPPPATSCGKPPLSSAAAAMSAGAGHKRKCHDHAHSENVAGGKYGSTGGRCHCSKRRKHRVKRTIRVPAISSKVADIPADDFSWRKYGQKPIKGSPFPRGYYKCSTLRGCPARKHVERDPTDPSMLIVTYEGEHRHSPSAAGQDHPPAPPPPLALPLA

SEQ ID NO: 25220 - protein, 314 aa, Oryza sativa; identical to SEQ ID NO: 18063
  Clone ID: TF_OsC171299_1.pep

SEQ ID NO: 25221 - protein, 500 aa, Oryza sativa
  Clone ID: TF_OsC57056_1.pep
MGTPAKLPSPPSLPIARQCCCHLLQLGRRGGAGVARASAKKKNPWLDPFDDGPDDEFDYRGAFSGGKQEEDPRPPEDPANPYGFLRFPAGYNPELDSLASKVRRDVRRACCVVSGGVYENVLFFPVVQLLRDRYPGVVVDVVASARGKQVYEMCKNVRYADVYDPDDDWPEPAEYTHQLGVLKNRYYDLIISTKLAGIGHALFLFMSSARDKVGYVYPNVNSAGAGLFLTEMFRPPTTNLADSGYNMYQDMLEWIGRPAKGVPEHPVPPLRVSISKKLRAFVEDKYSRAGVEKGKFVVVHGIASDSFANMRSRGDDDCLLPLEHWAEIAKEIRFFTSPHSLTQARLLLHLHFQLGTDCEKVELKPKKWWCLGSSEDNGLKPLFVIPHQKHREEVEETVGKDTNILFITTPGQLTCLINDSVGVVATNTAAVQLANARDKPCVALFSSKEKARLFLPYLEEKKGCTVVASETGKLIDIDVEAVKKAVKEFKAAPSVALAQT

SEQ ID NO: 25222 - protein, 203 aa, Oryza sativa; identical to SEQ ID NO: 18079
  Clone ID: TF_OsC338525_1.pep

SEQ ID NO: 25223 - protein, 148 aa, Oryza sativa
  Clone ID: TF_OsC153308_1.pep
MASNSQMNNRGAGGGRGQGDDEEPTPTPPPAPPPETAPSTVGGGGDGVQLVMPEDGYEWKKYGQKFIKNIQKNRSYFRCRDQRCGAKKKVEWHPHDPGLNLRVVYDGAHHHGSPSSAAGEGGTSAAAAANQYDLSTQYFGGAGGPRSQ

SEQ ID NO: 25224 - protein, 650 aa, Oryza sativa; identical to SEQ ID NO: 18082
  Clone ID: TF_OsC2081_2.pep

SEQ ID NO: 25225 - protein, 264 aa, Oryza sativa
  Clone ID: TF_OsC132992_1.pep
MALIATGATATATAAPVASPAASSMASELMAQGRESAAVLEALLHGASLPPAHGGAHALAAEILRCCDRALAALRAGGDAESSSADTKRKPATAQPSTRRRRRYIYMYVSSRSCDGARDRAATQQEIFCRATASGGGAAAAAEPARVEKARTSEDGFLWRKYGQKEIKNSKHPRLYYRCSYKDDHGCTATKQVQQSEEDPSLYVITYFGDHTCSCQTAAAAAMDDDDDDENSQHFVINFGPATASRSGSPPLLYDDGDDGDVCA

SEQ ID NO: 25226 - protein, 514 aa, Oryza sativa; identical to SEQ ID NO: 18087
  Clone ID: TF_OsC339450_1.pep

SEQ ID NO: 25227 - protein, 224 aa, Oryza sativa
  Clone ID: TF_OsC35308_1.pep
MALDSVPSYPSDLGSSRARTPQQQRVSPRKEERTWTTDTYAPYDDGHQWRKYGEKKLSNSNFPRFYYRCTYKNDMKCPATKQVQQKDTNDPPLFSVTYFNHHTCNSSSKIVGSTPDSTVQSRKAISICFNSHGQTGEQPTFLSSSASLLSPSMQSYSSNQQPDMNTYSRQFQWADTSSSTSNAPVKMEADDYAEASASPSTTGALSRTLLPIGQSRCIEYFHFL

SEQ ID NO: 25228 - protein, 225 aa, Oryza sativa; identical to SEQ ID NO: 18095
  Clone ID: TF_OsC348254_1.pep

SEQ ID NO: 25229 - protein, 299 aa, Oryza sativa; identical to SEQ ID NO: 18090
  Clone ID: TF_OsC313723_1.pep

SEQ ID NO: 25230 - protein, 333 aa, Oryza sativa; identical to SEQ ID NO: 18074
  Clone ID: TF_OsC227792_1.pep

SEQ ID NO: 25231 - protein, 363 aa, Oryza sativa
  Clone ID: TF_OsC62577_1.pep
MEEEVEAANRAAVESCHRVLALLSQQQDPALLRSIASETGEACAKFRKVVSLLGNGGGGGGGGGGGGHARGRMAGRSRPSAVLREKGFLESSSGGGQLGMMMSGAATPSTSSAAHLRNRIGGGSGVPPDSLRGLDLVSSSSKGGAHQFDPPKLVQPLSVQFQFGATAHRYPFQQHQHQQKLQAEMFKRSNSGISLKFDSPSATGTMSSAFMSSLSMDGSVASLEGKPPFHLISGPVASDPVNAHHVPKRRCTGRGEDGSGKCATTGRCHCSKRRKLRIKRSIKVPAISNKIADIPPDEYSWRKYGQKPIKGSPHPRGYYKCSSVRGCPARKHVERCVDDPAMLIVTYEGEHNHTRLPTQSAQT

SEQ ID NO: 25232 - protein, 372 aa, Oryza sativa; identical to SEQ ID NO: 18076
  Clone ID: TF_OsC246772_1.pep

SEQ ID NO: 25233 - protein, 1747 aa, Oryza sativa
  unsure (1)..(1747): unsure at all Xaa locations
  Clone ID: TF_OsC22739_2.pep
MDNQSGQPQYGMADHGFRPFSASISAPSTAQQHTGSSSNTAVIQVATPPSHTDYGNIYLADDGYHWRMCGQNTIQGEPCQTIFYYQCAQANCMVQKSVARSADGQTTQTFSMGVHNHPQRGPTPPRSPSVDPPVPFSSPSCSPPRSPVECAERGCASLSPARANPPSEFEHVPPGDPELRVNREICVLPFSAAMREREAQLRRAVVAVVVGAARTPSAAQVHDELCSEFSLSPHSFSVRRFFPEDFLVTFQSDEIFDRVARRRSIPLGQFRLLVAPWSRQLHAREGSMLFRVRLHLEGIPGHAWDEATAAAVLGSSCRIISCDPVSSSASDMAVFKLYAWTSDPASIPKEKWLRIVEDGGPVVTPQGTCERYLDYVVLIHLTAMEDHISPPEPYLPFAPSSGDSGRPSSDDSDDGPPRRHFFHTSRGRRDGSPPPPQSGQGSTGGGGGGGHRAAPVAVMPAELCSGRLLRRAGALAPEKPVRAVAGAEAAMARRRRPRGRRRQQKVLKWKSKFLKLSPVRSCCRWQPRKGQDTSEPVSVAKAKESSALQSLSLGSVVGQEDREFVLPVSAASEADSAVSSRRDMVGLAASPVGLEAQQGGLVLSTVAGPAVESAGSRPEVQSQPSPLAMEEAHHDASTFLQGSVSAHADPFLSVVLAAKPSMAMAAPGESALPPPDSVPDATLGVEAVSAPLVCPEQHLAASSTPLSQVFSPVSALPTASAVVVVAEIGGPFPDEVVPVDEMAASPPAPSTAVFAAAVEEASAPPPTLITFSRRAKKAIPPALLPPPAPQQPPQPAPLQTPRRSVRQALQATHGAPTFSRCQSVLAKKMGEKDTAVPAAPAPTVCTIQQYNELFEKELSQDQMLALADLFGICLPPPASAVETKLDAISVPLATQFLGPNLADFCYLPSIQTRGGVLLAWDRSVVSCDSHSLGEFSLTARLSFCDGNSCWITVVYGPQPDADKVRFLQELRDTRSTRDGPWMVVGDFNLIYQDQDKNNSNLNRRMMGRFRRAINDLALNELHLNGRSFTWSNGWEHPTLERLDRIFVTSDLEELFPQSFLKALPSVISDHCPLLLSTLPSLPAKGRFRFENFWCKLEGFEEVVQEAWSADCRLQDPISRLDFKLRSTGRALQSWSDKKVGNVKLQLEMARELIGRFDRMEESRGLSGQERFLHRELKRKYLALASLERTMARQRSRISWLREGDANTRFFHQHAAWRRRRNFVQQLEHGSQVATAPDEKAALAHDFFDGVLGSVSHRNFSVNLDFFESRGQHIEELEDPFTEDEVRKAIADSPHDKAPGPDGFSGMFYHRCWVIIKDDPCLVHSFVKLFTKILSRRLSPKLDSLVAKNQSAFIKKRCIQDNFMLVRQSAKYLHDRRTPSVLLKLDIAQAFDSISWQFILEVLEHKGFGVRWRSWIAMLFRTASSRVLINGEPGCPIIHRRGVRQGDPISPMMFILAMDVLSSILAKAENVGLLRPLGIPFRVSLYADDVVAFIRPAVEEIHVATEVLSIFGEASGLRTNFAKCSALPIQCNEADLQILHDELPCQVASFPCTYLGLPLSIFRLKKEDLQPLIDKIGRRLPFWMSHLMTPIGRTTMVKAVLSSIPIYLLMAINAPKWVIKGIDKIRRGFLWAGKATANGGVCRVAWARVCSPIEYGGLGILDLERLGIALRSRWLWQQRTSSDKPWQGLNIPVSQKERNLVSISXFAQWAMGSWYGSGRIVGCRALQFGRWRPQSTQLFPLGSGTDER

SEQ ID NO: 25234 - protein, 563 aa, Oryza sativa; identical to SEQ ID NO: 18098
  Clone ID: TF_OsC1517_1507.pep

SEQ ID NO: 25235 - protein, 335 aa, Oryza sativa; identical to SEQ ID NO: 18100
  Clone ID: TF_OsC73968_1.pep

SEQ ID NO: 25236 - protein, 528 aa, Oryza sativa
  Clone ID: TF_OsC17758_2.pep
MQPQFNGGKRSRAAPDNGGDGEGQPAEGDAKADSSSGAAAVAVVAAAAAAVAEDGYSWRKYGQKQVKHSEYPRSYYKCTHASCAVKKKVERSHEGHVTEIIYKGTHNHPKPAASRRPPVHPPPPSPATTTTTPLPPGDAQADHAPDGGGGSTPVGAGQAGAEWHNGGVVGGEGLVDATSSPSVPGELCESTASMQVHEGAAAAQLGESPEGVDVTSAVSDEVDRDDKATHVLPLAAAAADGESDELERKRRKLDSCATMDMSTASRAVREPRVVIQTTSEVDILDDGYRWRKYGQKVVKGNPNPRSYYKCTHPGCLVRKHVERASHDLKSVITTYEGKHNHEVPAARNSGHPAGSASPGGGAGSSSQPHGVGVGGRRPEVPSVQESLMRLGGGCGAAPFPPHFGLHLPPPPPRDPLAPMSNFPYSLGHAPSPALRGLPPPPPPPPSASALAVAGLGGVVEGLKYPMLAPPSVHSLLRHRQGGGMEAVVVPKAEVKQEAMRPAAAVAGAGRGAAVYQQAMSRVSLGNQL

SEQ ID NO: 25237 - protein, 396 aa, Oryza sativa; identical to SEQ ID NO: 17999
  Clone ID: TF_OsC143704_1.pep

SEQ ID NO: 25238 - protein, 707 aa, Oryza sativa
  Clone ID: TF_OsC1528_1720.pep
MDRDHAGGPPPVHGTDCPDRPGGRSDGAGGGLAWLCSAQNRPAGLGERRRRAAAGDGKRRRGRRRQPARKRRRTAEDDDARADRSGAHGRERGKEGGERDSSLARTAAGAKEEGGGDNRRCGGADGRRWHPRREQRWVRGGLWISQGFINPEEDSQPEDTGLQYFNELFCRSFFQNGPSRDDDHKDKFVMHELFHDLACSVSKDECFSSGEAFCSLPENICHLSVVLPDSKSVVLTKVQRHLQSLMVVKRSASEYPGSFVPLLKILGLNDLLMKCRFLRALNLSCTTIRELPSSIMKMKHLQFLALNNTKIQSLPAEIGQLQTLQTLELKYCCCLIELPESTMNLTKLRHLDVQKEPGNVHVSMPHGIGQLTDLQTLTVFNTGDDLSHCSIGDLKNLSGLRGHVHITGLQNITASDDAKEANLVGKQFLGALTLEWCWSSQDMEDDSDKEIANQVLHNLQPNTNLQELSIRNYSGNLFPNWIQDSSLSMLVSITIDDCQDCNEIPHLGDLPFLKYLLIHKMDKYTVKYLLKKTTTDDGWNWRKYSEKDLLGSKYKRSWYRCNQKQSTGCVARKIVEPNNDDPNTWLVTYLYEHNHKQEARPCDKPSPSDLHVQLASGNTQWCVLRGFYGGVRQMTVGSNTQLHERDYTGNANHSGIIARQTWIEMLRRGCTAGHSQRRAVTYWIYCDDSSSIKDKLEIVDVDVLYQQ

SEQ ID NO: 25239 - protein, 358 aa, Oryza sativa; identical to SEQ ID NO: 18025
  Clone ID: TF_OsC318264_1.pep

SEQ ID NO: 25240 - protein, 246 aa, Oryza sativa; identical to SEQ ID NO: 18027
  Clone ID: TF_OsC82840_1.pep

SEQ ID NO: 25241 - protein, 583 aa, Oryza sativa; identical to SEQ ID NO: 18028
  Clone ID: TF_OsC93838_1.pep

SEQ ID NO: 25242 - protein, 307 aa, Oryza sativa; identical to SEQ ID NO: 18000
  Clone ID: TF_OsC271102_1.pep

SEQ ID NO: 25243 - protein, 320 aa, Oryza sativa; identical to SEQ ID NO: 18001
  Clone ID: TF_OsC278621_1.pep

SEQ ID NO: 25244 - protein, 316 aa, Oryza sativa
  Clone ID: TF_OsC61691_1.pep
MAAGEEVMDRSTSAEDGYCSAGTDSPRAESVDEQGAAEESSPRGGQKRELPSPSASPSSPLPPAAKRSRRSVEKRVVSVPIAECGDRPKGAGEGPPPSDSWAWRKYGQKPIKGSPYPRGYYRCSSSKGCPARKQVERSRADPTVLLVTYSFEHNHPWPQPKSSSCHASKSSPRSTAPKPEPAADGQQPEPAENESSASAELEVPEPEPEQESEPVVKQEEEQKEEQKAVVEPAAVTTTVAPAPAVEEEDENFDFGWIDQYHPTWHRSYAPLLPPEEWERELQGDDALFAGLGELPECAVVFGRRRELGLAATAPCS

SEQ ID NO: 25245 - protein, 170 aa, Oryza sativa; identical to SEQ ID NO: 18003
  Clone ID: TF_OsC102358_1.pep

SEQ ID NO: 25246 - protein, 555 aa, Oryza sativa; identical to SEQ ID NO: 18004
  Clone ID: TF_OsC26646_1.pep

SEQ ID NO: 25247 - protein, 283 aa, Oryza sativa; identical to SEQ ID NO: 18005
  Clone ID: TF_OsC387129_1.pep

SEQ ID NO: 25248 - protein, 183 aa, Oryza sativa
  unsure (1)..(183): unsure at all Xaa locations
  Clone ID: TF_LIB4371-013-R1-N1-H3.pep
QGGSNGGGKGVNLKFDSSNCTGXSSSRYFLSSLSMEGSIASLAGSRSSRPFQLVSGSQTSSTPELGLMQRRRCTGREDGSGRCTTGSRCHCAKKRKLRIRRSIKVPAISNKVADIPADEFSWRKYGQKPIKGSPHPRGYYKCSSVRGCPARKHVERCVDDPSMLIVTYEGDHNHNRVLAAQPA

SEQ ID NO: 25249 - protein, 609 aa, Oryza sativa
  Clone ID: TF_OsC337842_1.pep
MTWDNRIKEESSLLIALLIRLRHPDIDLDASGEVALGFKTVPHFSCTKRDKGTQDYQKEARSMSSKKKRAAIDLSLEAERRRPEERGGGSDREASDGAAAAAEEDGDVKQREGPKEETGGEEEKVVEVVVDQGEDGSNEEIKYRTQQAEMIEEDKQPAAAANVDDDGGDSDGVGASAEEKHMVTEATGGEGDDGGDSRTPMAQDELSEMQEEMERMKEENRMLRRVVDKTVRDYYELQMKLAAYQQQPAAADEPKETEVFLSLGATAAASAGCGGGFPEAKSKEQAAWRRRSVGSDDSDCGKEDLGLSLSLGASSSYDDDQKAVEARPHDVDGAAAAAMIGGDGSRPAPRGQSVNPANRKTRVSVRVRCQGPTMNDGCQWRKYGQKVAKGNPCPRAYYRCTVAPGCPVRKQVQRCLEDMSILVTTYEGTHNHPLPVGATAMASTTSAAATFMLLSSTTSSSSVSDASAAPSSSYLSPYLLNSASPLLMPGATGGGGGMQHLNLFGNSPSSSSLLAPQAPGSSKYPWSPNHPPLAGAGGNKRPFWSAGGDGDKPAPAALAENVGAVMSDPNKFSAAIAAAINNFMGKDGESSSGKSSSKWGVVESLPPHE

SEQ ID NO: 25250 - protein, 319 aa, Oryza sativa; identical to SEQ ID NO: 18012
  Clone ID: TF_OsC61565_1.pep

SEQ ID NO: 25251 - protein, 108 aa, Oryza sativa
  unsure (1)..(108): unsure at all Xaa locations
  Clone ID: TF_LIB4371-039-R1-N1-B10.pep
EHMPPVPLTQKRHRVPSXYHTFIKVHIRSIXATDXSLSRTKAFGTGSKNFAHFWSIPNGVGCPHSSKKPDRAMDAPSPQKVLILDCLSSQDNRVDPTCLLISCCKYLH

SEQ ID NO: 25252 - protein, 207 aa, Oryza sativa
  Clone ID: TF_OsC14991_1.pep
MSAQIAPAEQVCYVHCNFCNTILAVSVPGNSMLNIVTVRCGHCTNLLSVNLRGLMHSAPALQDHHHHHLQESGLSGCFRDQSGYPEFGFSAASSSSKLRLPPAAAAMVSYSQQNQQLEQALHARPPEKRQRVPSAYNRFIKEEIRRIKANNPDISHREAFSTAAKNWAHYPNIHFGLSPGHEGGKKLVDVDPIPTAPSSKKIQGFYS

SEQ ID NO: 25253 - protein, 194 aa, Oryza sativa; identical to SEQ ID NO: 18105
  Clone ID: TF_OsC256574_1.pep

SEQ ID NO: 25254 - protein, 186 aa, Oryza sativa
  Clone ID: TF_OsC1295_1.pep
MSAQIVPAPEHVCYVHCNFCNTIFAVSVPSNSMLNIVTVRCGHCTSLLSVNLRGLVQALPAEDHLQDNLKMHNMSFRENYSEYGSSSRYGRVPMMFSKNDTEHMLHVRPPEKRQRVPSAYNRFIKEEIRRIKANNPDISHREAFSTAAKNWAHFPNIHFGLGSHESSKKLDEAIGAPSPQKVQRLY

SEQ ID NO: 25255 - protein, 169 aa, Oryza sativa
  Clone ID: TF_OsC1294_1.pep
MSVQFTSEHVCYVNCNYCNTILVVNVPNNCSYNIVTVRCGHCTMVLSMDLAPFHQARTVQDHQVQNRGFQGNNFGSYDIASRNQRTSTAMYPMPTSQQQVSPIRPPEKRQRVPSAYNRFIKEEIQRIKTSNPEISHREAFSAAAKNWAHLPRLHFGLSVADGGGGGGSN

SEQ ID NO: 25256 - protein, 80 aa, Oryza sativa
  unsure (1)..(80): unsure at all Xaa locations
  Clone ID: TF_jC-osflLIB3479001b04b1.pep
YGXXYKYGRXPMMFSXKNDTEHMLHVQPTXKRYRVTSVYNIFIKEDIRRIKSYNPGIRHKKXFNTGCKNWAHFPNIHFWV

SEQ ID NO: 25257 - protein, 256 aa, Oryza sativa
  Clone ID: TF_OsC17966_1.pep
MSSSSSSSAVFPLDHLAAPSPTEQLCYVHCNCCDTILAVGVPCSSLFKTVTVRCGHCANLLSVNLRGLLLPAPAPAPANQLHFGPSLLSPTSPHGLLDEVAFQTPSLLMEQAASASLSSITGRSSSSCASNAPAMQMPPAKPVQQEPELPKNAPASANRPPEKRQRVPSAYNRFINDEIQRIKAGNPDISHREAFSAAAKNWAHFPHIHFGLMPDQGFKKTFKPQDGSEDILLKDSLYAAAAAAAAAAANMGVTPF

SEQ ID NO: 25258 - protein, 266 aa, Oryza sativa
  Clone ID: TF_OsC17966_2.pep
MMSSAPETFSLDHLSQHQQQQPPPLAEQEQLCYVHCNFCDTILAVGVPCSSLFKTVTVRCGHCANLLSVNLRGLLLPAAASTANQLPFGQALLSPTSPHGLLDEVPSFQAPASLMTEQASPNVSSITSSNSSCANNAPATSMASAANKATQREPQQPKNAPSANRTSEKRQRVPSAYNRFIKDEIQRIKASNPDITHREAFSAAAKNWAHFPHIHFGLMPDQGLKKTGIQSQDGAGECMLFKDGLYAAAAAAAAATAASSMGVTPF

SEQ ID NO: 25259 - protein, 308 aa, Oryza sativa
  Clone ID: TF_OsC1270_1.pep
MRVQCDVCAAEPAAVLCCADEAALCSACDRRVHRANRLASKHRRLPLVHPSSSSSGDGGAAAAPLCDVCREKRGLVFCVEDRAILCADCDEPIHSANDLTAKHTRFLLVGAKLSPAALAEQPLPSSDCSSDDDAAAAATEEEYHSSAASTGAAVSAPLDASSNGAGGGGGVGGSSISDYLTTICPGWRVEDLLPDDDAFAAAAAQAGKEKDERVPFLDADLFDVVAGRPEKKGGAWAPHVPHLPAWCLDEVPVVVAASAAPAATPVKAKQGHVRDSHWSDSDAFAVPEFSPPPPPAKRARPSSQFWCF

SEQ ID NO: 25260 - protein, 250 aa, Oryza sativa; identical to SEQ ID NO: 18108
  Clone ID: TF_OsC280_1.pep

SEQ ID NO: 25261 - protein, 337 aa, Oryza sativa; identical to SEQ ID NO: 18107
  Clone ID: TF_OsC1270_2.pep

SEQ ID NO: 25262 - protein, 384 aa, Oryza sativa; identical to SEQ ID NO: 18109
  Clone ID: TF_OsC1273_1.pep

SEQ ID NO: 25263 - protein, 335 aa, Oryza sativa
  Clone ID: TF_OsC1273_2.pep
MLKLEPEFPGLPQRCDSCRSAPCAFYCLADSAALCATCDADVHSVNPLARRHRRVPMGVVAAPGAGGAFVVRPAGGVNSSWPIREGRRCDYDDDDADAAGEEDEEATSWLLFDPLKDSSDQGLPPFGDALVADFLNLGGGAGEKEDASSSKDCSSSHGKSSEGSHEFAVPGEPVPERQGFGAVSMDITDYDASNFRRGYSFGASLGHSVSMSSLENMSTVPDCGVPDITTSYLRSSKSTIDLFTAAAGSPVAAHSIMSPPQFMGAIDREARVHRYREKRKTRRFEKTIRYASRKAYAETRPRIKGRFAKRSDTDLEVDQYFSTTADSSCGVVPTF

SEQ ID NO: 25264 - protein, 408 aa, Oryza sativa
  Clone ID: TF_OsC101635_1.pep
MGALCDFCGEQRSMVYCRSDAASLCLSCDRNVHSANALSRRHTRTLLCDRCASQPAMVRCLVENASLCQNCDWNGHSAGSSAAGHKRQTINCYSGCPSSSELSKIWTFVSDIPNVAPEPNCEQGISMMSISDSGVSNQDNAAGDSSLLDIASATLMSDLGTAGKPKSLIGSSSEAGVNLLPLATDQMAGSVDSTSAKVPYTADQDMFSKDSIYEDFCVDDVDLSFENYEELFGTSHIQTEQLFDDAGIDSYFESKEIPSGNSDEQPKLMQPVTSNAVSADSGMSIPGAKGDSSLCIPVRQARSSISLSFSGLTGESSAGDYQDCGVSPVLLMGEPPWHPPGPEGSFAGATRDDAITRYKEKKKRRKFDKKIRYASRKARADVRKRVKGRFVKAGEAYDYDPLCETRSY

SEQ ID NO: 25265 - protein, 314 aa, Oryza sativa; identical to SEQ ID NO: 18122
  Clone ID: TF_OsC91_2417.pep

SEQ ID NO: 25266 - protein, 103 aa, Oryza sativa; identical to SEQ ID NO: 18123
  Clone ID: TF_OsC376286_1.pep

SEQ ID NO: 25267 - protein, 170 aa, Oryza sativa
  Clone ID: TF_OsC267651_1.pep
MLTAVSAFSQEGRGVAATSGGGGPFTGWCSSRRRRPEAPAAMDRYNGGGGGGEEGDEQLDLNLSLQPSQANEPPGYFTCTYCDKKFYSSQALGGHQNAHKFERSVAKRTRELAAARRQQAADEEARRGAGTTTTREPTGNASSSYQRASPPAEARRRDLLTDDIDLSLKL

SEQ ID NO: 25268 - protein, 320 aa, Oryza sativa
  unsure (1)..(320): unsure at all Xaa locations
  Clone ID: TF_OsC33740_1.pep
MDVDFWGVVIEPCNKKEIFCPEDTLYHLTSVALDEAYGLKDSNVKVFVEVNDEKFAIGTLSSKRHPHIKVDFCFKKNFQLFHTSLISKVAFCGYQVKNLGKFTDSEGDESDEEVPPDNMIKEAQKSKLPAKSATVASAMQKAFVKEIEHYEKSKADDDNNERYRDISVVGESTGNEDSSDDADYEGKSSDEEETTAKEGESTDEKETPAKEGESSDEEETPAKNTKEENEPVVTPLKTFPHXDGKIEAPITDNKTGTNTSKRGSHLQVTNPHPAKQAKRTPIKNDTPKRSASYVCNSCKKTFNSSGALKDHSKAKHPATN

SEQ ID NO: 25269 - protein, 1678 aa, Oryza sativa
  Clone ID: TF_OsC9089_1.pep
LTPPRQFARRGAAAAAADPHPSRERAGRRRSSCCIRRIAQCEVIEIHTDFLVKQHYGAKGVDQWTGYGHDTTGVPTSFTQCFLNLGHGISSHLDCEGQFCELENLLDAKIYTYDALITELQNKRSDMYKDADDITKESKRRLSKSIAKICYCLDDVGLICASEATKICIERGQEKGWLKEVVDATDQQTDANGSRLFAENSALHMKFFEEALHLIDKRLQQGIDMLLNSESGCVEAAKTGYISPKLYELIQIFHSFSNSRHARCLIFVDRKITARVIDRMIKKIGHLAHFTVSFLTGGRSSVDALTPKMQKDTLDSFRSGKVNLLFTTDVAEEGIHVPECSCVIRFDLPRTTRSYVQSRGRARQEDSQYILMIERGNVKQNDLISAIVRSETSMVKIASSRESGNLSPGFVPNEEINEYHVGTTGAKVTADSSISIVYRYCEKLPQDKCYSPKPTFEFTHHDDGYVCTLALPPSAVLQILVGPKARNMHKAKQLVCLDACKKLHELGALDDHLCLSVEDPVPEIVSKNKGTGIGTTKRKELHGTTRIHAWSGNWVSKKTALKLQSYKMNFVCDQAGQIYSEFVLLIDATLPDEVATLEIDLYLHDKMVKTSVSSCGLLELDAQQMEQAKLFQGLLFNGLFGKLFTRSKVPNAPREFILNKEDTFVWNTASVYLLLPTNPSFDSNVCINWSVIDAAATAVKLMRRIYSENKRELLGIFDSDQNVGDLIHLANKSCKANSLKDMVVLAVHTGKIYTALDITELSGDSAFDGASDKKECKFRTFAEYFKKKYGIVLRHPSQPLLVLKPSHNPHNLLSSKFRDEGNVVENMSNGTPVVNKTSNRVHMPPELLIPLDLPVEILRSFYLFPALMYRIESLTLASQLRSEIGYSDSNISSFLILEAITTLRCSEDFSMERLELLGDSVLKYADEGQLSSIRCHMICNATLYKLGIERNVQGYVRDAAFDPRRWLAPGQLSIRPSPCECPVKSEVVTDDIHIIDDKAIVLGKACDKGHRWMCSKTIADCVEAIIGAYYAGGGLRAAMAVLKWLGIGAEIEEDLIVQAILSASVQTYLPKDNVFEMLEAKLGYSFSVKGLLVEALTHPSQQELGAKYCYERLEFLGDAVLDILLTRYLFNSHKDTNEGELTDLRSASVNNENFAQVAVKHNFHHFLQHSSGLLLDQITEYVNRLEGSSMDKVELLSDGLPKGPKVLGDIVESIAGAILLDTKLDLDVVWGIFEPLLSPIVTPENLELPPYRELIEWCGKHGYFVGINCRDQGDTVVATLDVQLKEVLLVRQGFSKKRKDAKAHASSLLLKDLEEKGLIIPKNASKTEQFEKHCGSTNPFNNLHVDAMDTQTPKPTKEKNAADSRNISDPLLGKPLHVIVKTSKGGPRIALYELCKKLQWPMPTMESEKVQPSFSSVCSSPGGSSQKATPQAFAFASTITLHIPNADVISLTGDGRADKKSSQDSAALFLLYELQRRGIEVKPGKAVSFNTTSVFLCDEDENMSDICDIMGKHLGRPVAEEGKKDNSDDGMDLSSSDDDDDSLDSSSSDDDDDESGDEDDGSDELPAEMESSEEEDGSDGQDESSSSMVSTDEEDESDEEDEIPEKPESSKLTAAGSTLSSGDKNTHPAKEDGKTPAISKPNKETPESSGTHACKYCSKAFSSDKSLRSHQKARHPAK

SEQ ID NO: 25270 - protein, 245 aa, Oryza sativa; identical to SEQ ID NO: 18127
  Clone ID: TF_OsC312792_1.pep

SEQ ID NO: 25271 - protein, 178 aa, Oryza sativa
  unsure (1)..(178): unsure at all Xaa locations
  Clone ID: TF_OsC1713_4288.pep
GINALLSLSSPAXATSMAPTSSSTPAGSRALAAEGVFECKTCNKSFPSLQGLGGHRTSHTRLQAKLLSDPAAAAAERDRARIHEGETGTTTVVLTAADVDDSGGATVPQPPEAMLDLNYPPPVAVPPSPAAARARRSAAPICSLPAACASAAALPACLLNRVAPPPPPGFTKPTEHTD

SEQ ID NO: 25272 - protein, 427 aa, Oryza sativa
  Clone ID: TF_OsC12651_1.pep
MGKKKKRVEKVFCYYCDREFDDEKILVQHQKAKHFKCHVCHKKLSTAGGMAIHVLQVHKESVTKVPNAKPERESTEIEIFGMQGIPPDVLAAHYGEEEDPSSKVAKVEVPSLRPPVMPNPAGMVYPPRPAYGVAPPMYNPALNPLMARPPIWPAPPPQPWFTQPVVSVPQMASGLAPQQPLFPIQNMPAPMTSAPANLLQTSFPMAHVGVPSPVTPQVSQPLFPVSTSAGNGAVSSPYVASVAPGSIPTSSPSVAPAGVGYAATNQGTGGPAAVPPPASNNKAPATQPGANEVYLVWDDEAMSMEERRLSLIKYQVHAETSQEFQVGIYIVLPGGARVLRPDELLLDHYYYHHSSSSDPYYSTPILPPYGDAFSPPNPPPPPPPMSPSDLISPIIPAPTFTYSSPPPPPLYYPPPPDISPSPPPSIP

SEQ ID NO: 25273 - protein, 605 aa, Oryza sativa
  unsure (1)..(605): unsure at all Xaa locations
  Clone ID: TF_OsC83960_1.pep
MHEASEVKIPARPRSNTICNPRLDVIVAANHSVFIKGVLSLAICMQVSTAVGSCDYASTVPAAIVSSGSGVVNHTSYCTCRSIDIMLQLPLPWPLALHLNCXKWSGVVVLCSSNIQSIRKQQAKKQHHSLHELAKRIAMVEPGRARETKVTASASSSAGSDAAVMKKKKKKKKKLVVASRKVDEKDKKQVDYKCSRSSGRDECCKVESRHQQCTEPESPSYRNSSSSSHAGHHHHRAADGKKLGCNSASICKVKQDNPMQQHMRRAEDELKVKDKPPVAEPYCKRRASVSACNISSERSVKKSVKQQQQEASSSLQSSASISASSCSSTAGGGGSFRGMQQLSLRRLSGCYECHMVVDPISGVFRDSSSMRATICSCPDCGEIFVRPDSLHLHQSIRHAVSELGAEDTSRNIISIIFQSSWLKKQSPVCAIDRILKVHNAARTLARFDDYRAAVKAKAMAHRHPRCTADGNELLRFHCATLSCDLGLHGATHLCDHLSCAACAIIRHGFRPPAPGAGIRTMATSGRAHDAVVSSGSEGDRRAMLVCRVIAGRVRREEAAAAAAEEEEEEYDSVAGTTPGLYSNLDELDVFNPTAILPCFVVVYRA

SEQ ID NO: 25274 - protein, 154 aa, Oryza sativa
  unsure (1)..(154): unsure at all Xaa locations
  Clone ID: TF_LIB3598-028-P1-K6-G8.pep
MVLDGAAPMLSSSPAASGEEVGARKPQQRCGGAEGWSKRKRSRRRHRDRAAAPPPHGGGEEHLALSLLMLARGHRDPSPAPQEQHGCSVCGRVFSSYQALGGHKTSHRPRTPPTMAAVVVVDEPAATTASPAVSSSNSGFCXGGGGGNMVHECS

SEQ ID NO: 25275 - protein, 512 aa, Oryza sativa
  unsure (1)..(512): unsure at all Xaa locations
  Clone ID: TF_OsC154858_1.pep
MALSTLLLPSSSSSSSKTATATDTSDRRRHHHHHNHTKRKKKPPPPPSLXAPPSHSPCCVGAGAGGLGAKHRGDNLQVELAXSATVRSARSTASSRCTTXARTVAPFEAAPVSSSWEQLKSLLSCRSATAAARVHDPAAPSSALSRLRSHGAGACGASLCAIRDVVDAASSASAASTAAASLDRDTTPLTRSSRRAHRAATSSSGGGGGHHASLRGLSGCYECRAINVEPMSRRYPRPRELCACSQCGEVFNKADSLEHHQAIRHAVKIGWQKYIKRYLCLAIFCMLAVASASPFVEVSELGPEDSGRNIVEIIFKSSWQKRDRPICQIDRILKVHNAARTVARFEAYRDAVRTRCRATAARAAADGNELLRFHPAALACPLGLNGATSLCDDDDACGVCAAIRHGFAPWAGAHPLGVRTTASSGRAHDCGAAAAAAQQAGGCRAMLVCRVIAGRVRRNDDDGGAEEEEGAFDSVAGDEAASSVYGNLEELFVANPRAILPCFVVIYRVVPE

SEQ ID NO: 25276 - protein, 439 aa, Oryza sativa; identical to SEQ ID NO: 18178
  Clone ID: TF_OsC254894_1.pep

SEQ ID NO: 25277 - protein, 327 aa, Oryza sativa
  Clone ID: TF_OsC64601_1.pep
MQATDHADTERALAFVAMSVEDKHAGVVKRKRTKRPRHHAAPASSSESTTTEEEDMAHCLILLAQGAAVPPVLAAPAPAPPPPQPPVVVVKSERYTSRKYTEAATTADGVRAGFYVYECKTCNKCFPTFQALGGHRASHKKPRLPGADDDNVNNVTNTNAIVVKSKPPLTTTTTPSAPSPPPPQADAVVVPDVTTVLSLNNVAAAGSIINKLRVHECSICGAEFGSGQALGGHMRRHRPLHAPPERAATTAATTAATATAPDTKKEGSTSINLELDLNLPAPSDEESVSPPPPPPPPVLLALGGQFNDGKKPILQLTASAALVGCHY

SEQ ID NO: 25278 - protein, 1292 aa, Oryza sativa
  Clone ID: TF_OsC63096_1.pep
ITCAAGRNYNTKANDEVGPNIPESLGELGQHTQKKNIAPKDVWERSSGWRLSKSQWKLQAIARAPGSLTRFMPDDVPGVTSPMVYIGMLFSWFAWHVEDHDLHSLNFLHTGAPKTWYAVPGDRAVELEEVIRVHGYGGNTDRIASLAVLGEKTTLMSPEVLIDNGVPCCRLVQYPGEFVVTFPRAYHVGFSHGFNCGEAANFATPQWLKFAKEAAVRRAVMNYLPMLSHQQLLYLLAVSFISRNPRELLSGIRTSRLRDRKKEDRELLVKQEFLQDMISENELICSFLGKKSVDNVVLWEPDLLPSLTALHPCSSCSKAPEKKGEDGPRIGSTQSSSKDDSSSDGTACMTGTQSKGLSMDSKQAPEGEKLDTDDGDDLPFDLSIDSGSLTCVACGILGYPFMAILQPSRKALEEISLVDKERYKLSCEKEICSNVLPCSPNDGSSGCPLIANRSSSPVENANLSHQDVKPIRSDISLMGKEFNGTLGKHIGTSCSCSSENTIHPYGDTETPEKKIPSDCPGSELSKQSGRGDVNVPDVEGSEETISWNTGCAFARPRIFCLQHALEIEELLASKGGVHALIICHADYVKLKALAISIAEEIEFQFDYKDVALANASKSNLHLINISIDDEGYEEEGTDWTSRMGLNLKHSSKIRKETPESQEQPPLSFWGLFSKPSPISVVSNLKWLCRKARTPYKVIGYASSPDVVATPDKVKPAVTKTQIDTSGNAHENIGSEQTLQQDCVLQESNDVADMCKRPKVNDQDGHSLINIPIAVAEYPMMHQVCERPDSPTTVAVSAGKPTREQCGAESTELSTVKQFLDNGLIAEGGSMNFISNHEHLESDNATSVCKDEQLQVQQDQLAMVLCNNPNTELVAGELHGGAASSTLENEDSCGNTSYCSDTVLKNSEPDTDDQPETCDRSVVLVTPKSSCDQMISSSDRSCSLTLDCPVSTDAAFSSEKLSMAHDLMGSELQAVHNSKAEVVASLTDVKGAKLNSIHTTQLPHESPSSDFIISEGAQSASTTAIPRKNGTSMHTESNSIDILLGVLADESKVSSGKDEVGKASLTLMTLAGNDQSADDVTQDEVAEITDPSHGFCSSDIVSRSIGSSNRTNIICYARRKHKRKSGSEFNINSPQSLGSFVRSPCESLRPRTRPAIVEDMTNETKTAEASTANKRKKAKVEAFQCDIEFCDMTFETKAELRAHQRNICTDESCGKRFSSHKYLKRHQCVHRDERPFKCPWDGCPMTFKWLWAQTEHIRVHTGERPYKCSAPDCGQSFRYVSDYSRHRKKFNHY

SEQ ID NO: 25279 - protein, 522 aa, Oryza sativa
  Clone ID: TF_OsC43957_1.pep
MDSGLGRSSETSLKALPSMASNATRNTDPDQQGVRFSSTDQPPCFARPGQSFPAFPPLFGVQSSSLYLPDDIEAKIGNQFESNPSPNNPTMDWDPQAMLSNLSFLEQKIKQVKDIVQSMSNRESQVAGGSSEAQAKQQLVTADLTCIIIQLISTAGSLLPSMKNPISSNPALRHLSNTLCAPMILGTNCNLRPSANDEATIPDISKTHDYEELMNSLNTTQAESDEMMNCQNPCGGEGSEPIPMEDHDVKESDDGGERENLPPGSYVVLQLEKEEILAPHTHFCLICGKGFKRDANLRMHMRGHGDEYKTAAALAKPSKDSSLESAPVTRYSCPYVGCKRNKEHKKFQPLKTILCVKNHYKRSHCDKSYTCSRCNTKKFSVIADLKTHEKHCGRDKWLCSCGTTFSRKDKLFGHVALFQGHTPALPMDDIKVTGASEQPQGSEAMNTMVGSAGYNFPGSSSDDIPNLDMKMADDPRYFSPLSFDPCFGGLDDFTRPGFDISENPFSFLPSGSCSFGQQNGDS

SEQ ID NO: 25280 - protein, 1205 aa, Oryza sativa; identical to SEQ ID NO: 18183
  Clone ID: TF_OsC82170_1.pep

SEQ ID NO: 25281 - protein, 385 aa, Oryza sativa
  unsure (1)..(385): unsure at all Xaa locations
  Clone ID: TF_OsC87628_1.pep
MALDGKPPVPPPSTPPMDSWACGGRRSKRRGGGGGSSGSSGSSGGGGGGESEEEYLAACLLMLAHGVRDEAEVVGVAAATAKPQHGYECSVCGKVYGSYQALGGHKTSHRKPPSPAAEPAAGEEPSSGGVAGEAKVHRCSICLRTFPSGQALGGHKRLHYEGGAVGDAVKEKNSLKTKAAVATAVLKDFDLNLPAAATTAGDEAESSPPEAKRARLLXSRLIHFWLGDGDGWHDKHAVFRWLASSSGGNNIMGPHDSPARCVEYSYSPTCRYGTFATGGCDSFMAFGMALAKVPQPSNTHVTSLLVFQQGWPSASLSHPGARSISLTFLLRYQSYETHWVSTGYTIPNGYGHGYEFLPANSIGYQSGGQKRVRHKPDAIFICNVN

SEQ ID NO: 25282 - protein, 513 aa, Oryza sativa
  Clone ID: TF_OsC2514_6.pep
MRPERRSRRRPGRPSAGRARAAQAGPAAGAAAASAQQQRSCSPGRRAMWNLTSASGDQASVSSHPAPPPAKKKRSLPGNPDPEAEVIALSPRTLMATNRYVCEICGKGFQRDQNLQLHRRGHNLPWKLKQRNPKEVVRKKVYVCPEAGCVHHDPARALGDLTGIKKHFSRQHGEKKWKCDKCSKRYAVHSDWKAHSKVCGTREYRCDCGTLFSRRDSFITHRAFCDALAEESARAVTAAAAVAGQQQHGGGMLFSQVADVLDHQAAMAMGGHGLMQELCLKREQQQQQQQFAPSWLTAQQQQQQLEAMAGAGNPAAMYGSARLDQEFIGSSTPESGGAQQAGLSFGFSSTSSAPPHPAASSAHMSATALLQKAAQMGATLSRPSSHAHMAAAAAASTHNSSSSAATTNAPPPPPTSNVSSTCVGAGGYGLAFEASHFIAADESSRGARSDRDTGNGVAGAGNDGLTRDFLGLRAFSHGNIMSMAGFDPCMSTTSASSAAPYDHHHHSNKPWHS

SEQ ID NO: 25283 - protein, 247 aa, Oryza sativa; identical to SEQ ID NO: 18191
  Clone ID: TF_OsC182396_1.pep

SEQ ID NO: 25284 - protein, 170 aa, Oryza sativa; identical to SEQ ID NO: 18192
  Clone ID: TF_OsC32707_1.pep

SEQ ID NO: 25285 - protein, 578 aa, Oryza sativa
  Clone ID: TF_OsC3319_1.pep
MTYIPVRDGLSVTGVSSVTELERLARLEEEGEFLVVREEVGVVTGGARAEADIMLSSCAPTAVPPQDASGAATEPFRSLQIATASAGSAKKKRRPAGTPDPDAEVVSLSPRTLLESDRYVCEICNQGFQRDQNLQMHRRRHKVPWKLLKREAGEAARKRVFVCPEPTCLHHDPSHALGDLVGIKKHFRRKHSGHRQWACARCSKAYAVHSDYKAHLKTCGTRGHTCDCGRVFSRVESFIEHQDACNAGRPRAAEASSSPGRGGGVVVGAPAAASSSQQQQLFAVPASLSRTASSASPSSDLVVSPVAWPATGGGGPAMVSPRAAAPAPAGGSIAAFHHRFTDPALSPPTPCGGRRGGCHTTHSLELQLMPPRTTTTCAGGSLGGTPVATAVGYYASSSPHSPAAALPSRQPVADAMRLQLSIGFGGARDDGNNNSSSSSGEVSASATRLKEAAHEQLRLAMAEKAAADEARAQAKRQAELADQELATARRMRYQAQVELSRAHVLRDHAIRQVDATQLQITCYSCSHKFRARAAAMSSDVARSYVSSVVTEGGDADDPLDVVDATRRRLQHANSMGIM

SEQ ID NO: 25286 - protein, 171 aa, Oryza sativa
  Clone ID: TF_OsC722_1.pep
MTITREEAESKEMESLRVHASALLSLSSPAASASQPTSSSSTTEGVFECKTCSKRFPSFQALGGHRTSHTRLQAKLLSDPAAAAAAAAERDRARVHECAVCGVEFSMGQALGGHMRRHRGETGTTTVVLADADDSGGATVPQPPEPMPDLNYPPLEDAGDGSEPELLNLLV

SEQ ID NO: 25287 - protein, 144 aa, Oryza sativa
  Clone ID: TF_jC-osleLIB3474010a01b1.pep
MCSGDDIDGDMRVEATQHRDIRRYKCEFCTVVRSKICLIRAHMVAHHKEELDKSEIYKSNGEKVVHEGDHTCQECGASFQKPAHLKQHMQSHSDERSFICPLEDCPFSYIRKDHLNRHMLKHQGKLFTCSMDGCGRKFSIKANM

SEQ ID NO: 25288 - protein, 396 aa, Oryza sativa
  Clone ID: TF_OsC1528_2323.pep
MCSGDDIDGDMRVEATQHRDIRRYKCEFCTVVRSKKCLIRAHMVAHHKEELDKSEIYKSNGEKVVHEGDHTCQECGASFQKPAHLKQHMQITGWDDHLVKLQQDCLLTLFQERSYICPLEDWPFSYIRKDHLNRHMLKHQGKLFTCSMDGCGRKFSIKANMQRHVKEIHEDETATKSNRQFVCKEEGCSKVFKYASKMKKHEESHVKLDYVEVVCCEPGCMKTFTNVECLRAHNQACHQYVQCDICGEKHLKKNIKRHLRAHEEVPSTERIKCSLEGCECSFSNKSNLTKHIKASHDQVKPFACRFTGCEKVFPYKHVRDNHEKSSAHVYTQANFTEMDEQLLSCPRGGRKRKAVTVETLTRKRVTMHGDASSLDNGTEYLRWLLSGGDDDSSQTH

SEQ ID NO: 25289 - protein, 198 aa, Oryza sativa; identical to SEQ ID NO: 18197
  Clone ID: TF_OsC14_2.pep

SEQ ID NO: 25290 - protein, 341 aa, Oryza sativa
  Clone ID: TF_OsC83619_1.pep
MTKHPRDGEVISLSLSLTLGAAADSGERKKPRRGSSPAASGSGDFVCKTCSRAFPSFQALGGHRTSHLRGGHGRSVGLAPATAKGTTKKVQEKPAAAATHECHICGQGFEMGQALGGHMRRHREEAAAAAAAVQMLPLSGGGHRAGPNLEVFELGHVRSGIGATTLAVTKESDTRGLGINGASSCQALEGGRANATSGVAVSEECKARFQELRAGRAHRFVVFKIDDAMRQVVVDRVGPRDAGFDELTASLPADGCRYAVYDHDFTVSDATATAAAGEGGEAPRSKIFFVSWSPAAADVRSKMVYASSNEGFKKELDGVQIDLQATDPSELTLDVLKDHTS

SEQ ID NO: 25291 - protein, 217 aa, Oryza sativa; identical to SEQ ID NO: 18177
  Clone ID: TF_OsC171199_1.pep

SEQ ID NO: 25292 - protein, 228 aa, Oryza sativa
  unsure (1)..(228): unsure at all Xaa locations
  Clone ID: TF_LIB4309-044-R1-K1-G6.pep
DPDAEVIALSPKTLLATNRFVCEVCNKGFQREQNLQLHRRGHNLPWKLKQKNPAQAQRRRVYLCPEPTCVHHDPARALGDLTGIKKHFCRKHGEKKWKCDKCSKRYAVQSDWKAHSKICGTREYRCDCGTLFSRRDSFITHXRAFCDALAQESSRLPPTSLSSLTSHLYGASNAGNMALSLSQVGSHLTTSLQDGGGHHHHPSPELLRLGGAGGGGGGRGWEQHRRAV

SEQ ID NO: 25293 - protein, 636 aa, Oryza sativa
  Clone ID: TF_OsC2514_9.pep
MEVMPPNRTGTEGEPGPAVEPAPAGAGAAPVVKKKRNLPGTPDPDAEVIALSPGTLLATNRFVCEVCGKGFQRDQNLQLHRRGHNLPWRLRQRGPGAAPPRRRVYVCPEPGCVHHNPTRALGDLTGIKKHFCRKHGEKRWTCQRCGKRYAVQADLKAHTKTCGTREYRCDCGTLFTRRDSFVTHRAFCGALVEETGRVLAVPAPPSPRPPDLEAEENVDKDKDKEEEVKEKEKEKELEENEDSPVAEVDEPQPSQAVAEVPQQCAPSPPPPPPILQEHPQPVVAVVPNVDEQEVVAKPAVIAKIEVEDERDEEVCFQEVDRYKDAELEDSNLLDNDTPMLPCFLPSPSEAIGTDGSSTSCGTGSSVTNAIAPATTTSTFAGLFASVTTSSTPQSRSLRDLIGVDPTFLCLAIGAPSSLFPQTNASDPCSFAPPPAPHMSATALLQKAAEVGASQSSSSFLKEFGLAASTSSSPPSKLSQGRFTTGNTPTTSHPHPHPHPHPHPPQGRFMDNVPQPPPPAKLPHRMFTDNSVQQWHHRSNQQMEMEPGPMLPGGLGLGLTYDTGNSGLPDLMMGPSALYGPKPATLDFLGLGIGGTMGGSTANGGLPALMVGGELDMGSAQAPWEEAKRKTNGRTIL

SEQ ID NO: 25294 - protein, 238 aa, Oryza sativa
  Clone ID: TF_OsC13219_1.pep
MRVPAPVRDEFVVDEEPEDVALCLVMLSRDTGRPWNSRPSDEYSSLMYNSSYHHHHDAVSDDDLELSLSSPYADTEIRTKKRRKTTGAASTAGGEKRGRYECHGCGRAFLSYQALGGHRASHKRINSNCSLVKPPADQPEPSIETSFSSASTSVSPADTMISAATISKTVKKATKFVCPICSKEFGSGQALGGHKRSHSIAGELYERGHADGIVKLEQPLLADRFLDLNLPAPGGDDG

SEQ ID NO: 25295 - protein, 306 aa, Oryza sativa; identical to SEQ ID NO: 18208
  Clone ID: TF_OsC3878_2.pep

SEQ ID NO: 25296 - protein, 395 aa, Oryza sativa
  unsure (1)..(395): unsure at all Xaa locations
  Clone ID: TF_OsC4331_1.pep
PRAAGKKVGVGNEVHHPPTRRRRWRRLRRATNGCHGADAGHGSRGSLWRPRRRGRRRRSRRRRRGCPRRAPPVGCSRRPHGRRPPPHRRIYIRRIRAPLFLRHPLRLLRDLLRCPPRRPQRRLPPLFHRRLPPGSTSASGYYRPGAPPRGGLRASGTXQEAAKGDGDYDVVELDASELLAEHVHFCDICGKGFRRDANLRMHMRAHGDRFKTLDALSRPGQPKPPAGREVRFSCPYAGCNRNRAHRRFRPLKSAVCARNHFRRSHCPKLYACERCGGKKRFAVLADLRSHLRHCGEEAQWRCSCGTTFSRKDKLFGHLALFEGHTPAIAEPNKGVATAAAEASISMMEEGGVEANCDREEDEEGGFDPKFFQEWMEELRGGAVAPNWSAPSEAGH

SEQ ID NO: 25297 - protein, 269 aa, Oryza sativa; identical to SEQ ID NO: 18209
  Clone ID: TF_OsC478_3.pep

SEQ ID NO: 25298 - protein, 377 aa, Oryza sativa
  unsure (1)..(377): unsure at all Xaa locations
  Clone ID: TF_OsC111363_1.pep
MPMPIGPGIRGYPDPWVKLPSPGTREGTVVVPEPGTRILKPEPAKTCLLHYRFYCLVRVEGFSFSQXGSVELGAEEREGLIRAHVLEHHKDEVDDLDDYLGRGGGETCKEMDHDCKHWIPENSKMREGLEWTNGCPFSYSRKDHLNRHLLTHQGKLFACPMEGCNRNKKEFICPEENCGKTFKYASKLQKHEESHVKLDYSEVICCEPGCMKAFTNLECLKAHNKSCHRHVVCDVCGTKQLKKNFKRHQRMHEGSCVTERVRCHLKDCKLSFSKKSNLDKHVKAVHEQKRPFVCGFSGCGKSFSYKHVRDNHEKSSAHVYVQANFEEIDGERPRQAGGRKRKAIPVESLMRKRVAAPDDDAPACDDGTEYLRWLLSG

SEQ ID NO: 25299 - protein, 420 aa, Oryza sativa; identical to SEQ ID NO: 18212
  Clone ID: TF_OsC3319_2.pep

SEQ ID NO: 25300 - protein, 181 aa, Oryza sativa; identical to SEQ ID NO: 18198
  Clone ID: TF_OsC24770_1.pep

SEQ ID NO: 25301 - protein, 311 aa, Oryza sativa; identical to SEQ ID NO: 18199
  Clone ID: TF_OsC328939_1.pep

SEQ ID NO: 25302 - protein, 401 aa, Oryza sativa
  Clone ID: TF_OsC11776_1.pep
MEYAAPAGAGAGGYYYYPPSQQHKPRRPPRPAARWVKHWIPQDLATSSGKCALYKWVREDVYKNLKDGKAVPEPEAVKPEPTTEILFLCSYENCGKTFVDVAALRKHAHVHNERQYICQEPGCGKKFVDSSKLKRHHLIHTGQKDFICPHPGCGKAFSLDFNLRSHLKTHALENYHVCPFPACGKRFTSDSKLKSHVKGHEKTGTPITAQYVPSSDKPQSSSKPATPATTKPTTPAATKTTTPASTKPTTPAPTSFAERPYVCPYDGCGKAYIHSYKLNLHLKTQHPEHGQEENGRIAAHASEHAVNDRANQYNYAEIVDLAPNPKRSKTNSGHKTPSSNKAYNVKISSVLPADISGVKNQWPGKYEDDSEETEEDQGNNIEDGWRYGNQNADDEETEYED

SEQ ID NO: 25303 - protein, 226 aa, Oryza sativa
  Clone ID: TF_OsC343306_1.pep
MGERPLAIAAGRDPMFVTAYAVHPDGHDSDFLDFLLELMAVGKMKERVNVLISLPTMEVATNTATRSPVKLMLVLTLSPASKVIAKGGGGVKRVHLDGGAFQCRTCGRRFSTFQALGGHRTSHKRPRVRADGLDLLLGARPGKLGAGGASTPVVHRCDMCGKVFATGQALGGHMRRHRPLVSRNGTMSTTWTAAAAAAATMSGSSSEERDDDDDDDVHNYNFIHFF

SEQ ID NO: 25304 - protein, 438 aa, Oryza sativa; identical to SEQ ID NO: 18217
  Clone ID: TF_OsC3878_4.pep

SEQ ID NO: 25305 - protein, 122 aa, Oryza sativa
  Clone ID: TF_uC-osroM202007h05b1.pep
MMQTAGRRRHRWVKEWVPQDLVVAGGPCALYKWVREDRLSALKSRDKEQEAELAKPEPTTEVLFLCSYEGCGKTFVDAGALRKHAHVHGERQYACHYAGCDKKFLDSSKLKRHFLIHTGEKN

SEQ ID NO: 25306 - protein, 366 aa, Oryza sativa; identical to SEQ ID NO: 18218
  Clone ID: TF_OsC3878_1.pep

SEQ ID NO: 25307 - protein, 476 aa, Oryza sativa
  Clone ID: TF_OsC337334_1.pep
MAVNSGDRARARGHHGDDDEEGVAVVGEDYPYCSDSDSDDDDDVDRYVFLARQPAPPVDRDDAEADAGAEGTGCCKRKRRVVDDDDHDDGFSPRQPALLDGSGGQAAEEEEDAEGSSDDDDAMAPRGEAGGGGRGRGVGKVSRKKARLVDLIRSPLLPAELDGSDKAAPPPPRGVCPKKIAVVVQAKNRKRRRFVDGGEEQEPQPQPPVRGKRSRGPDLEASEGLQTASAAAAAAAAEAAERASKRFVCSICGRCFGSHQALGGHVLGHKKKAKNAAIAAAARDATTTAVTEAVAPASQRQSFFAADINGQDERGCDGAEGSRYDDDEEKSPVVVDDVAACHDADVDESRGHGKAESASAIDAGGDAGNNKVAHGDGEENDKIAGVVVASSHDGDSDVGKMKIVQHKCDECGKVCLTGQALGGHMSKHRRTRPAANGGEGPATATVADGGAQTVRLIGDDVCLQRAVAIAGFHSAQ

SEQ ID NO: 25308 - protein, 149 aa, Oryza sativa
  Clone ID: TF_rsiceg_8849.y1.abd.pep
TRGFPSTHSAHSSISSASYGADGYYGGEGSVTDYSSASESVDLTHSRTLPRPSALLGANMPPAPQSMMGQVSSKVSSSSQKKHKCKICDKRFTRPSSLQTHMYSHTGEKPFACEVEGCGRHFSVVSNLRRHRKVHKNDGGADHPSPEDA

SEQ ID NO: 25309 - protein, 159 aa, Oryza sativa
  Clone ID: TF_OsC48690_4.pep
MTAALQALLDPTALSLGLPTPAINKEEYLAICLAALACTRAGKALVGVGGQQQVQACNKWLCPAPAAPEELRFRCTVCGKAFASYQALGGHKCSHRKPPSPGDHYGAAAAAQQLASAGDSKEDSASSAAGSTGPHRCTICRRSFATGQALGGHKRCHYW

SEQ ID NO: 25310 - protein, 651 aa, Oryza sativa; identical to SEQ ID NO: 18225
  Clone ID: TF_OsC57972_1.pep

SEQ ID NO: 25311 - protein, 680 aa, Oryza sativa
  Clone ID: TF_OsC78077_1.pep
MVGGDLTGAFPLRPCLQGHHGSCGRGALPHYDPQVRRLEVDSAGFLLHLLSLCYFQRPNKTWVGKRRGERGKFGSPRFRQVGYSEGEWMYWRADLVGARGWVGRIKLPHKRHVNVTWDKDLVKGATFRRTRGIAAIMQPSPSSPRAPPPTAAQASGYKHFCRVCNKGFTCGSALGGHMRAHGVGDGDGLGADDDDDDDDDSLGDEAVRRARGGADDPWNAGGPSSSGAATHVYELRTNPNRVTRSRQVCKNCGKEFTSWEHFLEHGKCSSGEDDDDEDDVDHSLQPWSPSPEADGEEDSAPAAGWLKGKRSRRCKGTGVDLSPTPSACAAGEEEDLANCLVMLSSSKVDQAGVTEAEQRSSSSASKEHKRLITFMEPTTYVLDTVMALPPPAPAPQYVSTVPRGMFECKACKKPQEGEGLLRCQAGEQPPEVAEPSHHAEVADRSEDNPAKATSDARRNVHASIDGDGNAGTSDAAAELSMAIVPIEPPVAALAAAPLKKKGKMHECSVCHRLFTSGQALGGHKRCHWLTSSSADHTASVPPLADDLVPLSFRPMLDAPEPALDLSIAANPPLLASAATVRPKVGGSSFHLDAPPPVYIPSSPAIPSQRNKATATTGSQNANDAVGLSTAAAEDEADSTTVKRARLSDLKDVSMAGETTPWLQVGIGSSSRGGADDNDKE

SEQ ID NO: 25312 - protein, 655 aa, Oryza sativa
  Clone ID: TF_OsC2514_1.pep
MASNSSAAAVAALFGIRDGDHEDQIKPLFAQQQQHHHHQPPMAPSNAAAAASAAGSAAGQAAVAAPPAKKKRTLPDPDAEVIALSPKTLLATNRFVCEVCNKGFQREQNLQLHRRGHNLPWKLKQKNPLEAVSRRVYLCPEPTCVHHDPSRALGDLTGIKKHFCRKHGEKKWKCDKCSKRYAVQSDWKAHSKICGTREYRCDCGTLFSRRDSFITHSAFCDALAQESARAGRAGREGGGAAGRRGARRLGGEGGAGSREATRGGPEGERLPPAAAGHLYGSAGAANMALSLSQVGSHLASTLQDHGHHHHHHGASPDLLRFGGSGGGAMAARLEHLLSSSSASAFRPLPPPQQQPPAPFLLGAAPQGFGDGGDGSGPHGFLQGKPFHGLMQLPDLQGNGTGGPSPSGPGLYNLGYIANSANSSGTSSHGHASQGQMTNTDQFSEGGGGGGGGGGSETSAAALFGAGGNFSGGDHHQVSPAGMYANDQAMMLPQMSATALLQKAAQMGSSTSSANGAGASVFGGGFAGSSAPSSIPHGRGTTMVDQGQMHLQSLMNSLAGGGNADHQGMFGSGSMIDPRLYDMDQHEVKFSLQRGGGGGGDGDVTRDFLGVGGGGFVRGMSMARGEHHGGGGSDMHGPLEAEMKSASSSFNGGRMQ

SEQ ID NO: 25313 - protein, 345 aa, Oryza sativa
  Clone ID: TF_OsC46145_1.pep
MMQTAGRRRHRWVKEWVPQDLMGSLAVAGCLNSMGEDRLSALKSRDKEQEAELAKPEPTTEVLFLCSYEGCGKTFVDAGALRKHAHVHGERQYVCHYAGCDKKFLDSSKLKRHFLIHTGEKNFVCPHEGCGKVLAFSLDFNLKAHMKTHSVDNYHVCKYPECARRFTQESKLRAHIKQQHEKGGLQNPGGSATNRSGLADHSHNSHTPKPSAAPPTPSADRPYVCPYDGCAKAYIHEYKLNLHLKKEHPNHYQDAGAQAASSKMSKRRSKPSLTAKMPLPKVPKRRGYTEPYQPPVSVVEEHQWPRNVLYEDDSEETEEEGDNVGDGARYRAASSDDDEETEDEE

SEQ ID NO: 25314 - protein, 504 aa, Oryza sativa; identical to SEQ ID NO: 18227
  Clone ID: TF_OsC3319_3.pep

SEQ ID NO: 25315 - protein, 395 aa, Oryza sativa; identical to SEQ ID NO: 18231
  Clone ID: TF_OsC3878_5.pep

SEQ ID NO: 25316 - protein, 538 aa, Oryza sativa
  Clone ID: TF_OsC2514_4.pep
MANARVMRDGEMIDGDGDRSSVRSRGGADPDAEVIALSPKTLLATNRFVCEICNKGFQRDQNLQLHRRGHNLPWKLRQRSGKEVRKRVYVCPEPTCVHHDPSRALGDLTGIKKHFCRKHGEKKWKCDKCSKKYAVQSDWKAHTKTCGSREYRCDCGTLFSRRDSFITHRAFCDALAEESAKARAAPPPPADEDGTSASAGAPPPQAPLPPPAPVPAPAPPPPPAAAPAPAAQPEQRDRDAALDQFATPAPAPAPPPVTAPPPPPVAAPNDCVSSSSSGVAPTSQSLLSSMFAPPSVAQAPQYADPIGVGAGGHQERAVPAKPPALCLAPNASSSLFTAPVPADRQQFAPPPPPSPSPHMSATALLQKAAQMGATSSSSSFLRCVGLDMSSSSSAPPSSSGQQQQHHHHHHQETMQVPLPASSLPEWPPRLQPEPSPMLSSGLGLGLPYDATGGPVSLPELMMGQSTLFSAKPATLDFLGLGVSPTGASTSRGFPTFIQPIGGAVSLAGSATVAAETFGAAHGGQANPWERNPSSSPIL

SEQ ID NO: 25317 - protein, 513 aa, Oryza sativa
  unsure (1)..(513): unsure at all Xaa locations
  Clone ID: TF_OsC154556_1.pep
MDAGGVELSGVMHRCRVCGKGFSCGRSLGGHMRSHISFGEAAAELGANGGVVGYGLRENPKKTRRLSEFDGDGDGEEVEVEEGGDGGELRACRECGKLFSSWRSLFGHMRRHASGGGGRNHDDDDDDDVDVEDEFGGGEEEEIVAPAPAAVTVIAAPPRRRRRSMRVAAPAPAPAPPRPVLLGGFEKEQEDVALGLLMLSRDTGVWRSPVARADRSYLAWTMARHRWYVQAVALLVVLKAAAGSAAPPTTTRSRSSSTVVAGMVFXRPVQGRRQRPLRLPALRCAGGDRVRRRGEPGDGAGVQHQLVRGILRPHGGHARDEPLPLPRNGYGYGYNSDEDSALLQYGGDVAKSRKRRASYHSPNSISSKKKQQPRAAAPAKRTRYECPGCGKVFASYQALGGHRASHKRINTSCSAPKVSPATAAAAAPAPEPSSETYASLSTLSPSASPGSAAAGIGDRKANNKSSAEEEKFGGACSSDELYAELELEQRSPAAAAGFLDLNFPPASSEVGVN

SEQ ID NO: 25318 - protein, 531 aa, Oryza sativa; identical to SEQ ID NO: 18164
  Clone ID: TF_OsC2514_2.pep

SEQ ID NO: 25319 - protein, 277 aa, Oryza sativa
  Clone ID: TF_OsC348190_1.pep
MRFLVLWCSRLCSWLVGLVLFVANFSVLLPVSVEFCFLSSEDLSVLQAEETIAEFMFALSYNVHRISSLATVETIESSSFPEQPGVPHLFCFLFSTRIVETRSKKHPDMAPRGKPWKHCCNKCDKSFRSGNALGGHMSCHRSVGNQPKSTSSPPTLVRDAALRKPRTDNSDEEMKFGDLPAAAMKDNSHRCNTCGKSFGSGQALGGHMRRHYVRKCNRQRGVADHAGSVLMKVQKLKLRLDPILFDVTLPALTDGDCCISVGVKPEPQLWCVTSNLQ

SEQ ID NO: 25320 - protein, 1349 aa, Oryza sativa
  unsure (1)..(1349): unsure at all Xaa locations
  Clone ID: TF_OsC391117_1.pep
MSLQPPAVEPPEWLRTLPVAPEYHPTLAEFADPIAYILRIEPEASRYGICKIVPPLPRPPEDDTFRRLQAAFAAAASSNGDPSPTFPTRLQQVGLSARNRRAASRRVWESGERYTLEAFRAKAAEFEPPRHAAPPRNPTHLQLEALFWAACASRPFSVEYGNDMPGSGFASPDELPDAANATDVGETEWNMRVAPRARGSLLRAMARDVAGVTTPMLYVAMLYSWFAWHVEDHELHSLNFLHFGKAKTWYGVPRDAMLAFEETVRVHGYADDLNAISEPLCDCNSLXTVLSPEVLLSAGVPCCRLVQKAGEFVITFPGAYHSGFSHGFNCGEASNIATPHWLQVAKEAAIRRASTNCGPMVSHYQLLYELALSLRPREPKNFYSVPRSSRLRDKNKNEGDIMVKENFVGSVTENNNLLSALLDKNSCIIVPNADFFVPSFPVALESEVTVKQRFTAGPCSISQQGAENMAADHVAVDKVTEIQDMSGSLYPCETSLVGCSNRKLYETKYGQRDAAALCLSTSEIQSRGIDTARSHPAGGILDQGRLPCVQCGILSFACVAIIQPREAAVQFIMSKECISSSAKQGGIGASDDTSNWIDQSHEISPPPGPASGTDDNVKHAVSLAHVSDRCRELYASNTDGCTSALGLLASAYDSSDSDDETTEDVSKHSKKNDSVNQSTDPQILETSASCSSTVQCQKTNSHLHEEECEARATSLMKPVSHNSRPISQSNRDTDIDHFIELGKSGTQCSGYLDLVDDLTTSVLKSSSDTCVSAAKASMDPDVLTMLREKKTCVYNYMSNYTKGINCKYPRAESAAKVIAEELGIKHDWKDITFKEATEEDVKKIQLALQDEDAEPTGSDWAVKMGINIYYSAKQSKSPLYSKQIPYNSIIYKAFGQENPDSLTDYGCQKSGSTKKKVAGWWCGKVWMSNQVHPLLAREREEQNSSVVYGKAMFTTISHGKVQDEASTRCNTSNRTPSRRTSRRKKGVSAEKSKPKNKRSTASDEASMLCSGLGMNSGVIHDQTENSDDYDKHGNGDEIEEGTNPQKYQQRKLQNVTRKSSSKKRKDEKRTDSFHELYDEDNGVDYWLNMGSGDDATLGNSRQQSPDPVKVKSGGKLQGKRKSSKYKSNDDLLNEENKLQKMNKKSSSKKQKNDKINRQLQEDQTEDDHMDHLVDVAVADEVTLDNEDKITEDKIDDVKVKSRGKSQNGKRKGSKHQATDGLRAGNKVAKFPCDIEGCDMSFSTQQDLLLHKRDICPVKGCKKKFFCHKYLLQHRKVHIDERPLKCTWKGCKKAFKWPWARTEHMRVHTGVRPYECQEPGCGQTFRFVSDFSRHKRKTGHSSDKRRKNST

SEQ ID NO: 25321 - protein, 254 aa, Oryza sativa
  Clone ID: TF_OsC48690_1.pep
LIRFYEKPRAKPSRWRSRSPRRRLVRSPHATAPNPSAAAPDPPPPPPWSSSWSSSPPDPPPPVLSAAELAPERGGEQPVSSPPPDPPAAPEELRFRCTVCGKAFASYQALGGHKSSHRKPPSPGDHYGAAAAAQQLASAGDSKEDSASSAAGSTGPHRCTICRRSFATGQALGGHKRCHYWDGTSVSVSVSASASAASSAVTASASGSGSSSVRNFDLNLKPVPETVAAGVRRWGEEEEVQSPLPFKKRRLSSP

SEQ ID NO: 25322 - protein, 726 aa, Oryza sativa; identical to SEQ ID NO: 18170
  Clone ID: TF_OsC359_7099.pep

SEQ ID NO: 25323 - protein, 558 aa, Oryza sativa; identical to SEQ ID NO: 18169
  Clone ID: TF_OsC78077_2.pep

SEQ ID NO: 25324 - protein, 719 aa, Oryza sativa; identical to SEQ ID NO: 18373
  Clone ID: TF_OsC198558_1.pep

SEQ ID NO: 25325 - protein, 261 aa, Oryza sativa
  unsure (1)..(261): unsure at all Xaa locations
  Clone ID: TF_OsC135231_2.pep
MATVGQPDAMRRITVHYVNPPPIAGAGEAHVDGLDDEVLDYVIGDVLQDQEGLYQSILYGKYGDDMRGARNTALAQSDGLHYYYHGENSSGEATTSRNSEIDQQIEYDLVFARQLQAMDNLTIETPADEDDDISCVPSPSDSETDEPAEGNNEEAATQDDNDDPDNMTYEQRQALVESVGNENRGLSDLLISYLETWKYKSGFFPRKANHDNCPICLSAFRRRETLITLACKHSYHEGCIARWLKIDKACPVXKYEVFGPS

SEQ ID NO: 25326 - protein, 996 aa, Oryza sativa
  unsure (1)..(996): unsure at all Xaa locations
  Clone ID: TF_OsC13232_1.pep
MATPLADEGSIAAAVMPRSPSPPAAAAGSAAEAPMLIFVYFHKAIRAELERLHAAAVRLATERSGDVGELERRCRFLFSVYRHHCDAEDAVIFPALDIRVKNVAGTYSLEHKGENDLFAHLFSLLKLDVRNDDGLRRELASCTGAIQTFITQHMSKEEEQVFPLLIKKFSHEEQADLVWQFLCSIPVNMMAEFLPWLATSVSSDEHQDILNCLHKIVPDEKLLQQVVFAWIGGEAVKTISHDFCSPCSKSNVRCKDAIDQTDKYGCSHEHFKTGKRKRAESSYSQLVMHPIDEILCWHNAIRKELSDIVEETRRIQQSGDFSDISDFNVKLQFIADVCIFHSIAEDQVIFPAVNDQVSFEQEHAEEERRFNKFRCLIEQIQITGARSTAVDFYSELCSQADQIMEKIERHFKNEETKVLPQARIHFSSEKQRELLYKSLCVIPLKLLERVLPWFVSKLNDQDAEAFLQNMFLAESFRSLSLNYSAPSLYSSLFSWETDAAFSGPDNISRPIDTIFKFHKAIRKDLEFLDVESRKLIDGDESSLRQFIGRFRLLWGLYRAHSNAEDEIVFPALESKETLHNVSHSYTLDHKQEEELFKDISTILFELSQLHADLKHPLGGADAVGANHIHPYNRIDWSKKNNELLTKLQGMCKSIRVTLSNHVHREELELWPLFDKHFSVEEQDKIVGRIIGSTGAEVLQSMLPWVTSALSLDEQNNMLDTWRQVTKNTMFDEWLNEWWKRSPTSSGPSSDASHPEEDHFQEKFDQSEQMFKPGWKDIFRMNQSELEAEIRKVSRDSTLDPRRKAYLIQNLMTSRWIAAQQKSPQPQSEDRNGCTVLPGCCPSYRDPENQIFGCXCHDKVSDHTMERXHKCREKMLEMNCPICCDFLFTSSAAVKGLPCGHFMHSACFQAYTCSHYTCPICSKSLGDMTVYFGMLDGLLAAEELPEEYRDRCQSFQLPGPNSLENQEKPNQMGTKGVSSQGIGGMWGNKIVGTQIWK

SEQ ID NO: 25327 - protein, 1193 aa, Oryza sativa
  Clone ID: TF_OsC13232_2.pep
MATPTPMAGEGTLAAVMPRSPSPTASAAAGSAAEAPMLIFLYFHKAIRAELEGLHAAAVRLATERAGDVGALAERCRFFVNIYKHHCDAEDAVIFPALDIRVKNVAGTYSLEHKGENDLFSQLFALLQLDIQNDDSLRRELASCTGAIQTCLSQHMSKEEEQVFPLLTKKFSYEEQADLVWQFLCNIPVNMMAEFLPWLSSSVSSDEHEDIRSCLCKIVPEEKLLQQVVFAWIEGKTTRKVTENSTKSNSEATCDCKDASSIDHADNHISSHEDSKAGNKKYAESIDGQVERHPIDEILYWHNAIRKELIDIAEETRRMQQSGNFSDISSFNARLQFIADVCIFHSIAEDQVVFPAVDSELSFVHEHAEEERRFNNFRCLIQQIQIAGAKSTALDFYSELCSHADQIMETIEKHFCDEETKVLPQARMLFSPEKQRQLLYKSLCVMPLKLLERVLPWLVSKLSDEEASSFLENMRLAAPSSETALVTLFSGWACKARSEDKSNSGEYLCLTSGEMRCLLDEVDGLEKCRPFCPCASRSNTDASLHPQTENGSRPGKRGNDAESVPGTNGSDLSQTDDTEARPCSKKPCCIPGLRVETGNLAISSSLASAKSFRSLSYNSSAPSLYSSLFSWETDASLSCSDGISRPIDTIFKFHKAIRKDLEYLDVESGKLIDGDESCLRQFIGRFRLLWGLYRAHSNAEDEIVFPALESRETLHNVSHSYTLDHKQEEQLFGDISDALAELSQLHERLTHPHIEVSEAEKNDFNSSDEIDWTRKYNELATKLQGMCKSIRAALTNHVHREELELWPLFDEHFSVEEQDKLVGRIIGSTGAEVLQSMLPWVTSALTQEEQNMMLDTWKQATKNTMFGEWLNEWWKGAPTSSDSSEEASSAPEDSHLQDKIDQNDQMFKPGWKDIFRMNQSELEAEVRKVSRDPTLDPRRKAYLIQNLMTSRWIAAQQKLPEPKSEECSEGAGIPGCAPSYRDQEKQIFGCEHYKRNCKLVAACCNKLFTCRFCHDKISDHTMERILMLPDHTRESDTGDDVHGLGVDFFHCMKCNCCLGMKLTEHKCREKRLETNCPICCDFLFTSSAAVKGLPCGHFMHSACFQAYTCSHYTCPICSKSLGDMTVYFGMLDGLLAAEELPEEYRDRCQDILCNDCERKGRSRFHWLYHKCGFCGSYNTRVIKIDRADCSTSD

SEQ ID NO: 25328 - protein, 259 aa, Oryza sativa
  Clone ID: TF_OsC4555_1.pep
MPQGDHIELHQKRHGRRLDYEERKRKRAAREVHKRSRDARQLLGAKGKRFAKKRYAEKAQMKKTLKMHDESTSRQKVDDVQEGALPPYLLDRDQTQRAKVLSNTIKQKRMEKAGKWEVPLPKVRPVAEEEMFKVLRTGKRKTKQWKRMVTKATFVGPGFTRKPPKYERFIRPTGLRFTKAHVTHPELKCTFNLDIISVKKNPNGQMYSTLGVLTRGTIIEVNVSELGLVTPAGKVVWGKYAQVTNNPENDGCINAVLLV

SEQ ID NO: 25329 - protein, 4737 aa, Oryza sativa
  Clone ID: TF_OsC2965_2.pep
MDPGGMLLEDFGQRVDLTRRIREVLANYPEGTTALRELIQNADDAGASRVRLCLDRRAHGAGSLLAPALAQWQGPALLAYNDAVFTDEDFASISRIGDSRKVSQVWKTGRFGVGFNSVYHLTDLPSFVSGKYIVLFDPQGAYLPNVSAANPGKRIDFVSSSAITLYNDQLSPYRAFGCDMKAPFQGTLFRFPLRTAEQASLSRLSRQVYTEDDILSLFAQLYEEAVYNLLFLKNVLSLEMYVWESGMSEPKIVYSCSIGSQHDNLRWHRQALVRFSGTAAESSEQKIDSFSMDFVSKSFLGEKFEKKSYTYFIVQGMASALSKIGIFATTAAKDYDLHLLPWASVAACISNVGPEEVILRQGRAFCFLPLPVKTGLSVHVNGYFEVSSNRRDIWYGADMDRGGKLRSDWNMLLLEDVVAPLFRELLLQLRTVLDSKISYYSLWPTGLYEEPWSILVEQICKFIYTSPVFHSEIKGGTWITPAESLLHDEGFSRSDDLSEALVMLGMPVVRLPGAIADMFPKFHSKYMLKIVTPATVRHFLKDFENLGTLEKSQKLILLEYCLADLDSGNIGKCMNGLPLIPLANKQFGIFSGISQENQYYVCDSIEYELLSAVSDRIIDRSIPPVILDKLYQIASSSQVNISLIEGRTFLQFFPWLFPPGWKCRNQVPWDPESGGSSPTAAWFKLFWQYIGDCSYDLDLFSDWPILPSTSGHLYRASTVSKLINTGSLSNLMKELLTKLGCKILDTKYLSTCQHLSNYVYDGDASGVLHSIFGVASLEGVDLQALFQRITPAEKNELYQFVLDAKWYLGPHLSDMSINLCKKLPIFRVFDGGSPSSYGFSDLSTSRKYLPPLGVAEQLLNDDFVFCISPSDEDIIMRYYGIERMPKSNFYQRYVLNRLDELQTEFRDSVLLTILQDLPQLSLENPRFKEALKVLRFVPTTNGVLKSPQSLYDPRVEELYALLQESDCFPHGLFQNPEVLDMLLCLGLRTSVSIDTIIQSARHIDSLVHKDHHKAHSRGKVLLSYLEVHAHKWYVHKPFDGRKKVNMLAKVTTVLRSRDTSWEADLEKFWSDLRMICWCPVLVTAPSPALPWPSVSSMVAPPKQVRMQDDMWIVSASSRILDGECTSSALSYSLGWLSPPSGSVIAAQLLELGKNNEIVTDQVLRQELALVMPKIYSLLSNLIGSDEMDIVKVVLEGCRWIWVGDGFAKTDEVVLTGHLHLAPYIRVIPIDLAVFKDLFLELGIKEQLDPVDYASILTRMATRKASTSLQAEELRTAVLVVQHLAEFRFQDHQTQIYLPDSSARLCLSSELVFNDAPWLLDFDEDITGNAPSIAFNSKKYVHNFVHGNISNDVAERLGVRSLRRLLLAESSDSMNLSLSGVAEAFGQHEDLTTRLKHIVEMYADGPGILFELVQNAEDAKASEVVFLLDKTHYGTSSILSPEMAEWQGPALYCFNDSIFSPQDLYAISRIGQDSKLEKPFAIGRFGLGFNCVYHFTDIPGFVSGENIVMFDPHASYLPGISPSHPGLRIKFVGRRILEQFPDQFTPFLHFGCNLQQPFPGTLFRFPLRNEAAASRSQIKREQYTPQDVEMLFSSFSEVVSEALLFLRNVKNITLYVKESDSQEMKLVHRVSKHNSYEMAKEPHALNTMLAFINGNQPSGMDRNQFFNKLNKTKDSDLPWSSQKVSIFEQSPAACLVHSWILTESIGGGHARKLSTASGSKSHFFVPWASVAAYLHSVTVDNTKELSGEAEVNLDDLVLKQLSLGSSKDRKFFEGRAFCFLPLPINTSMPVHVNAYFELSSNRRDIWIGNDMAGGGRVRSEWNLALLEDVAAPAYGHLLAAIAQELGPSDLFLSFWPTAVGVEPWSSMVRKLYVSIAELGLHVLYTKARGGHWVSTRQAIFPDFSFSKAIELAEVLSEAGLPVVSVSKQIVDSFLNVYPSVHLLNPHLLRNLLIRRKRGFRNREEAILVLEYCLSDMGDPSFPDKLQGLALLPLANGSFTTFTNRGEGERVFFSSQMEFELLKDSIPHLVVDNSLPDAILKKLYDIACSARSNIYLFTCNFLLELLPRILPPEWQHAKQLFWSPGHQGQPSVEWMVSLWNFLRHSCEDLSIFAKWPILPLVDGKLMQLGNASNVIIDDGWSENMYSLLQKLGCFFLRSDLQIEHPQLANFVQEATAVGVLNAVQSVASNFQDIKELFMGISLAETHELRSFIFQSKWFSGNHMNSSHMNTIRNLPIFESYKSRELVSLTSPRKWLKPEGVHEDLLNESFIRTESAKEKSILVSYFAIREPQKAEFYKDHVLPRISEFLSQPAVVSAILRDVKLLAENDTSVRAALHETPFVLAASGAWVHPSRLYDPRVPELHKLLHKETFFPSEKFMTTEVIELLASFGLKSKLGFSTLLDIARSVSLQQDDALEHGKRLLTYLNFLEFKASNMEDKKTFHGDDNQEASKTDGSFEAENDGDGYDPEETILSLFSNFDHDLPEDEFWSELKNISWCPVHVAPLLKGLPWFISEDHVAPPITTRPKSQMWLVSSKMRILSADSCSMYLQRKLGWLDPPNANILSSQLVEISKSYDELKMFSEDSTNDAVPQKEIQLIYSKLQDIIDTADTNILKRNLDGHPWVYIGDRFVPPQALAFDSPVKYHPYLYAVPSELSEYKRLLSVLGVKQTFDAADYLNVLQCLQSDAKGEPLSTEQLSFVHRVLEAFVDCYPDNQAPDMMVNSLLIPDSFGVLTPARNLVYNDAPWMNADPTSKSFVHLSIGNDLANRLGVRSLRGSSLLDNELMTDLPCMEYAKISELLALYGESDFLLFDLIELADHCNAKKVHLIYDKRDHPKQSLLQQSLGDFQGSSLTVVFEGTIMSREEVCSLQLPPPWKLKGNILNYGLGLLSSYFVCDTLSILSGGYFYIFDPLGLTGGTTSTATSSARFFSLIGNDLVERFHDQFTPMRVTQEASLSSANSTVIRMPLSSKCLKELEAGCNRVKHIFDRFTQNPSSTLLFLRSIIQVSLSTWEGGASQPTLNYSVLVDPSVATLRNPFSEKKWRKFQLSRIFASTSAAIKMQAIDVHVIDNGCNYIDKWFVALCLGSGQTRNMALDRRYLAYNLTPVAGVAAHIARNGVSTNIHASSCILSPLPLSGSISMPVTTLGHFIVRHNGGRYIFGSSHDKSLSDLEMHKNKLVEAWNKELMLCVRDSYVEMVLEFQKLRKDPLSSAIESRSAHSVSTILQAYGDRVYSFWPRSKQHPASLTGYGSTVTNVNSPRASKADWQSLVEQVIRPFYVRLADLPVWQLYGGNLVKVDEGMFLSHSGSGDDDNLPSASVCSFIKEHYPVFSVPWELVREIQAVGVNVREIRPKMVRDLLKASSSILLRSIETYMDVLEYCFSDMDPYRFSDLHIHEESRVSNQQSEIMNSSISNSMPSSSSSVSYHRNTQRQGASGGDALEIVTYFGKALYDFGRGVVEDISKTGGSASHRTQAAENNVLSSIITELKGVPFPTSTKCLTRLGSTELWIASEEQQLLMRPFLHHFIHHQCLQKPFLELLLTTQVIHRPLKLRSFSPHLLSGHLKHIFDERWVHLAVEKKSPWIPWDNNANSSTAGPSPEWIRLFWKIFSSMSGDLSLLSDWPLIPAYLDRPVLCRVKECHLIFVPPADDSNPDSGDSAARVVDTSAHPGDETGEAEQNSILDTAFQSMNSAFPWLPALLYKLNIPVFDLSFPECGTICNLFPSRDRTLGQIIASKLVAIKNGGHLPLPLSLSSEDCDKLFALFVSEFRLSSNHLYQREELDVLRELPMYKTVTGTYTSLSGSDHCILSPTAFFHPADSRCLSSTANADLFLQALGVEQLSDQEILVRFALPGFGNKSAQEQEDILAYLYSNWKDLQLNSSVVNTLKETNFLTSANEFCTELFKPRELLDPSDALLTSVFSGERHKFPAERFLSDGWLVILRKAGLRTSTEADMIVQCATKIESMGNDIVSSSEDPSDFEADFSGSKNEIPFELWSLAESVVNVILANFATLYDSSFCEKIGKIAFIPAEKGFPSIGGKRGGRRVLASYSESILSKDWPLAWSSAPILTNQAIIPPEYSWGAFRLRSPPAFTTVLKHLQSVGRGNGEDTLAHWPTSSGIMTVEDAFLRILQYLDKIWGTISSSEKNELQTLAFIPVANGTRLVTVKSLFARLTINMSPFAFELPSLYLPFVTILREIGMQETLTNTYARELLLDIQKACGYQRLNPNELRAVMEILDFMCSGVNQATDGSEDIFDSVIPDDGCRLVSAVSCVYIDPYGSHLLSNIDTSRIRFAHPDLPQNICNTLGIKKLSDVIVEELDGKEELKMVNSICSVTLDKIKEKLLSKSLQDALRIVMIGVSNHFPSFEALNLAQIESVLKDISQNLQFVQRLHTRFLLLPMLQDVTRSSQRPPFPEWSSNGKHRSVCFVNKSTGQILVAEPPNFLTIHDAIAIVVSYRLGAPVILPIASVFACPDGTEKEVLKILRLGTDIGVSKREGRYNGSLGAELLSQDARQVQFLPLRPFYSGEIVAWKTGKEGEKLRYGRVPEDVRPSAGQALYRFPVETSAGETCMLLSSQVYSFKSVSMADLSPAPLQLDSGRAAGGQQGFSPINTGTEAADDVATGLEYGKVSSTELVQAVHDMLSAAGVRMDATKETLLQTTLSLQDQLKESQVALLVEQEKAEAAVREADVAKSAWSCRVCLNAEVNMTIIPCGHVLCNRCSSSVSRCPFCRTQVSRMMKIFRP

SEQ ID NO: 25330 - protein, 543 aa, Oryza sativa
  Clone ID: TF_OsC359_6081.pep
MGQVAYAASSHLSRHPPWKRCPHGVSFHSAAAASSLSRQIAQLSCSCPSSTSSLGASTIAALLDARVGAAAAAASADDDGIVVGTSSSSKKLRNISHKLMRIADAAVGEVPQWSRGSALLAALYRALCESCTKTDPSATFGGCPLFLSIWAAERIAIGRPEVDQHAYEESLYEERPEVDYPTMGTLWCRRQRRWAHVQVRRSYPEFVMEFDRLLPTDVVWEPYSAAATQARASLGLSTLCTRDQAYWMTTVPMVFDICVEPHAPFRVMRQFGFRQPFPVPFPTTVPAAVHRVTFAPLEQQPHVASTRDLYARHRDQDFARAVDDINRVVVNGSTTIQRLGVGIPVPVEEHLTTYTWMVESMRSILRVLTCRVDDVARADAAVQRPPVLTGPRPAAHVPRPTPPPHGGFRAPFSTPPSSARPSVVPPTAQFWQYTGTSSQAAGTSSQGPPLDHAGTSSDRLLPSTLLFDITDFDFASGSTEDVIGPSQLGGAPPVQTQDQAQATPPRDTRATRAVPPDRFTYSQDHVRAQARRTKRGRGAGQGQ

SEQ ID NO: 25331 - protein, 236 aa, Oryza sativa
  Clone ID: TF_OsC13033_1.pep
WLIASIILLLYIVLDADLPICSFAAGGNCPYGEECPQMHGDLCTTCGKMCLHPYRPDEREEHTKLCEKNHKRLESLKRSQEIECSVCLDRVLSKPTAAERKFGLLSECDHPFCISCIRNWRNNSPTSGMDVNSALRACPICRKLSYYVIPSVLWYFSKEEKLEIIDNYKAKLKSIDCKYFDFGTGTCPFGSSCFYKHAYRDGRLEEVILRHLDADDGSTVIAKNIRLSDFLSRLHL

SEQ ID NO: 25332 - protein, 404 aa, Oryza sativa
  Clone ID: TF_OsC2967_1.pep
MAFAAEPMDLEVSPDSSPAAAAAAAVCSICLDAVACGDGVAARSTARLQCGHEFHLDCIGSAFNAKGVMQCPNCRNIEKGHWLYGNESQPCSHSDTGDWLNGETFDYPFSFEFGWCPFNTPLTSVFGESESEPNPFLEYIGSLHGFHHPMYAPSSSTASTESIPFHQRPTGTEGHATTDLRNTQVFNESEPRNHEREQQYLGSVQMPGTLNHSTAPFGIGMPRYDGGNQQRLRPHMHDNSLFHRPTARRASNLAHLRSLTAASETRGHGHGMTSHAVQQTIPSSMASNPQPPATRRVRPRALSITSFIAASSSAEIRAPHDFPLTETASTTNGNIRNGVGAPRHANQSYSWSSETFWPQTGEPHWWSPMAPVHNRSYDNFSGRSATELLSIYGAQNGLPTPRFL

SEQ ID NO: 25333 - protein, 1902 aa, Oryza sativa
  unsure (1)..(1902): unsure at all Xaa locations
  Clone ID: TF_OsC32063_1.pep
MGKHKGRAASSGLAASLLPHAQGAVPIVGFGGYHGASRVEPAAPSSSTDPDASILLPPDVDSEVLQHLRRLGRKDPTTKLKALSTLSIRFAQQHSQEVLQIASQWAFEXMRLLLDYKNEIRRATRDNMPGLDXTVNGGADPHVKVFMCPSWFSQCDPVLEAAXAARHSFEAAFPQSDKRLDALMLCVKETFLHLNENLKLTTQALSDKATPMDELEDMHQRGGIEAGQVTGTVCHKSLQQPSDEHKQLFVGWVISSSLLAMATLIDILLGVKLQNCVRDNSSSENTSLSKVLSGTLSSAESAFSMNKYFLDFLKSKSAIIRSATYSLLASYIKHVSHVFNEEAMKVLSPALLGAFNEKDPSCHSSMWDAFLAFSRRFPEAWSYCNIHKVVFSRFWHFLQNGCYGSKQASYPLLVQFLESIPSKAVTTEQFVFDFLHNLWAGRNQRQLSAADSLAFFTTFKQSFLWLLKVLPRHSGGGSSDDIPIKLITYFLAKVVWHDYLRIPSSKNQDISLSGLSDEAISGDCQLSHKESLLASSTRYPTYYLQDLGKCIIEILDEISAMENHLLNIACETLLKDCLDIIHQRESLPNFQYHVEQVVSFFISLDQLIVQKGKTWPLESLARPLNEQSVPAIKSMIQKDTPIVVKLLSVLVEIFRPVPLFLKNSQKESEESVQDECFFDQWCTIIKYTSAKQKHPVDNKNSHVDDQFELLTLILQKVRERIAGGKLRNLQKNGSLPEHWRHDLLDSAAESVFCDLPATDSHVHYVCAALGGSDQDDQICFLSADTVHKMLGSILKCLTSVLMTSTFEWARFAYVVLLPTEPKDSKVIGAQSFSSNIKMAHFAFKVLEGSLFALRRLEEDSLFPSVLAALFIIEWEYSMALTLDEEHDLKGYKEDIDVGSSACNSSDDHLDEGIHLKANLAESIHTFCQSLSPSFWSDLHPFTLNNLLNILAQSVRCALFQTLELPTESTSVLCSEWMVNMLKLISLDHTKLQSFFYLLLSEGEYWPLWVKPSLQNENAPVKIKFEPVITNETGLKHHQFVAFVDKLVLNLGFGEVILGVPGNTCYNTSQSIDTTSTVPSLSRAWVAAEILCTWKWKGGSVFSTFLPSMIQHLKMESCAEVSILSILLDTLLEGAFHECNQWVLFNAWHISDNEIEKIQDHFLRALVALLFSINSINECIWRESEALVFFEKLLSNLFIGSTVNRKCVKTLPFVMSTIIKPLSGKLKLNEASCYTDLVGQNILSWLDVAISCLSSSPREVLQQDIVDWMQVVLSCFPLNITCGTQKLEVKIEREISDTERSLLLTLFQKYKIFCAIEAPSLSTSGTTLSTMVELLGVKLIAVMVGYCWTELQENDLHFVFHTVQKWIESAVLLVEEMTDAINDAVINQKSNEDTLEKLKLVVSSIDELTLSFGEFALVTLCHLNHLVDIQETENFQSLQIIKSGDFADRNNNMMESMLRLFLASGVSEAIAKSSCEEASSIIASSRVAYMHFWELVASFVIYASPQTRRCALESMELWGLAKGSVSGLYSILFSSQPISHLQFAAYSLLLSEPLCQFSLIKECSLGSNRPLTQESCMGQSIELMPDSEKTLDLREELSSLIEMPTSELLQTDLLAHDRVDAFIAWSLLLSHLQLLPPASITRERHIPLRTGAPCGKKKDAELMPEAEVAAQASKNAIITCSLLPCIESLWPVGTWQMASLAGGLYGMMIRLLPSYVRTWFTSLRDRSLSSSIESFTRAWCSPPLLLDEFSQVKDSLYADDNFSVSVNRSAYEIVATYKKEETGIDLVIRLPSCYPLRHVDVECTRSLGISEVKCRKWLLSLTAFVRNQNGAIAEAIHTWKSNFDKEFEGVEECPICYSILHTSNHSLPRLACKTCRHKFHGACLYKWFSTSNKSTCPLCQTPF

SEQ ID NO: 25334 - protein, 391 aa, Oryza sativa; identical to SEQ ID NO: 18533
  Clone ID: TF_OsC302675_1.pep

SEQ ID NO: 25335 - protein, 439 aa, Oryza sativa; identical to SEQ ID NO: 18545
  Clone ID: TF_OsC63595_1.pep

SEQ ID NO: 25336 - protein, 93 aa, Oryza sativa
  unsure (1)..(93): unsure at all Xaa locations
  Clone ID: TF_8955298.pep
MSGGISGFGGDKPKNWGAWRRIACHGLRGRGTSSKERNFGVGGRRPCCFCQEXMLXGRFXTLDCGHXFHVGCVRQWLVXKXTCPXCKXXXLKF

SEQ ID NO: 25337 - protein, 145 aa, Oryza sativa; identical to SEQ ID NO: 18573
  Clone ID: TF_OsC71294_1.pep

SEQ ID NO: 25338 - protein, 355 aa, Oryza sativa
  Clone ID: TF_OsC93699_1.pep
MGGSSSTSRRRRDEYYAARPPPPPHHYYTYPPPPPPPPHHHHHPPPPPPPPHHHHQHPYRPPPPPHHATSSSSYYYHHPPPPHAYHGPWHPAPRPPHPEQPALTGPPPEFVDHQQARKVKNDVNLHKDTIRLVPDVTDPDRRLVAFTFDAVTDGSITIYYFGRVRKNCTFSSVYPELQTPTKIPFQKGLAQKFVQTSGSGVDLGFFSLDELSNPSGEVFPLVVYAEACPPPEESHQPNSTRAQITLAVIEKHHNDLRVKVVKQMLWSDGEKYELQEIYGIVNSTEADVPDADDSDMGKECVICLTEPRDTAVFPCRHLCMCSECAKTLRFQTDKCPICRQPVEKLMEIKVRSPEP

SEQ ID NO: 25339 - protein, 557 aa, Oryza sativa; identical to SEQ ID NO: 18235
  Clone ID: TF_OsC100587_1.pep

SEQ ID NO: 25340 - protein, 231 aa, Oryza sativa; identical to SEQ ID NO: 18236
  Clone ID: TF_OsC392270_1.pep

SEQ ID NO: 25341 - protein, 826 aa, Oryza sativa
  unsure (1)..(826): unsure at all Xaa locations
  Clone ID: TF_OsC140765_1.pep
MATSSVAAMPHDSTPWRDPSRASSRQPARGFFNILVPPPQSPRPRCPDHQHHHHHHHHHDAAGGAAAAAAAAAAEPTPRRRKQILDRWAAAAAAASATASAEAPAPQEQRRRARDAELSALASATRPVTARAAVFREPSPAPSDASXGAGAGCGGGARCGAELPPAAPRASSLIQRWREIEAVGPATPRPCDLASDSDGGSPRGRVGCIVKKLSGTSSIPDDELDAANKEVAMSQSAPPSPAPMRAGVEPPTNIAGINGSRPTQLVVRTVRGRRAMEELVAMMAHCRRCELAAVADRHVVSRFSHKGRIQSPKDGAIWLFGRSCSQLALLIIVMCKSHYHVSFCRLYLCEHKYFLSLFVPYVASANIVMLFDTLQSMLRLRLLRQGFKVKDEVWTLPKPVRPRLPKHEHEAYTTSQCLTQAFLSKCIAGNQHKGGQVLAEKSTGSVERLVSSDGLGNEQNDGQNSNSENQCQEGCKNMVKLCTQNQEYSEPSSFVRYDEHSTVDDVSPSTISTLHELCTPSSRGDNLREEDNQSLNGSWEERALWISSLGWPAPVEAMSPDSWNQDEIGDIENHTQNEFNDRPWIDSPNSWRSLCVATQADSGALSGNADICNLLESKNVSKSLESDFSNKMNNMLLTILRKQRQQHMIDDFEGYYDERLYWRQNDEQQNADQRVSAQCSLAPVSHLHQQEGWQHSSFEHQHHENQNFLEMEVRVRSEMAQVHHEIYELRKLVESCIASQVKIQHSIKEEMCSALREAGLMPSQPDTPAKRGSCCICHQTQVDSLLYRCGHMCTCFNCADQLKSSNRSCPICQSPIEDVVRAHMNF

SEQ ID NO: 25342 - protein, 378 aa, Oryza sativa
  Clone ID: TF_OsC46309_1.pep
MASGTDEKAKMEGLTSAAAFVEGGIQDACDDACSICLEAFCESDPSTLTGCKHEFHLQCILEWCQSVCQELLEAVERERNVRTNQTRNTTIFHHPALGDFEVQHLPVVGNDAELEERILQHLAAAAAMGRSHHLGRREGHRGRSGSHGRPQFLVFSSHPNMPSAGSVSSSSVQGEVDNESSPVHTTGELSLHANTHEEAGNQSPGMLTYDADQDAVVSSGNSTPVSSPRFFNRRHSTGQSTPVNNDRAGPSDLQSFSDSLKSRLNAVSMKYKESITKSTRGWKERLFSRHSSVADLGSEVRREVNAGIASVSRMMERLETRGSNGRTSDGPAISTSEVIPSTESSNERVTENNPTTAATSSGNTSASSAPCVTTTGSN

SEQ ID NO: 25343 - protein, 1076 aa, Oryza sativa
  unsure (1)..(1076): unsure at all Xaa locations
  Clone ID: TF_OsC67131_1.pep
MSSPGRSGFSPGLAQLLSSRDEAKVSSQKSHLVSYHDEIGHQDIERTLEHIFDLPHKSVVRPPGPIDVGFVRSVLRNQARKFDLGGKDSRKYDDGVLIVDKGAGQTKVVLDDSSICGKFKSIWGPLLVESSASFSSARANTCVWNGKWMYEVTLETSGVQQLGWATLSCPFTDQKGVGDSDDSYAFDGRRVTKWNNDPEQYGQMWAVGDVIGCCINLDAGEISFYRNGNFLGVAFDGIRKVGPRKGYYPAISLSEGERCHLNFGSHPFRYPVDGFNPIKDFGILHQRDSSCIPDVFRLLEVQNLEKSESAYFEKLRRVKKFAPLRELFRPISEGICAEFFGAAEGSQGCSEYITWGSFITLLTDVFRVREPHDFLCLDQVLELFLQFPGCSSLLQELIVALSCMCKAAPLVLTECPFSGPYPFLALACHILRHKDVMHLWWKSEDFAFSFEGFLTMKIPNKQDLQYLVPSVWWPGSSEDEVSMTLSMTTLSDAIKXSFTFGTVNPKRRKMDHADCLIHFCSIWRRRQLGASEFFPSAFLEDCIAMVVKSERLIFSLXKDQVIVKTKKDSITGLQKEASAQGGKPVPPKEGFTESNTRWFILEGPLVFFPRISLNKSLTIFLKKKKKITVGLRFKENAKYIPSTSKGPCKSMHEKSAHIASECSAFYFVSQQSQSISLLEETDRQIREKSCMEQVRRLKEARNSYHEELVDCVRHCVWYRATVFSSWKQRGMYATCMWVVELLLVLSDSSSIFHYIPEFYVESLHGLASFVTLVVKHFDDPRIYKEFMFNVLLRETCIHEEELFLSFLNRLFNTLSWTMTESSMSIREMQEKRRVADLQQRKCSVIFDISCSLARILEFCAREIPHAFLMGPDMNLRRLAELVVFILNHIILAADAEFFDMTLRRPGQHQEKTNCTMILAPLVGIILNLMESSSTSGHRELNDVITVFTSMDCPATIHFGLQYLLSYNWSNVLRGDASLAKLAQLEEFSHYFMHITMSADGNEEQGFSTASNEEDNCCICYNSDSDTTFEPCHHRSCYGCITRHLLNSQRCFFCNAVVTSVTRIADSRIESRSPLAP

SEQ ID NO: 25344 - protein, 494 aa, Oryza sativa
  unsure (1)..(494): unsure at all Xaa locations
  Clone ID: TF_OsC44374_1.pep
MEPPAGGSSDHRRGAGTGAGAGGAASPSGLRRYGFRFSASSLLQAPLAALLEYSGVVPSGPGAPQAGPPSALSSSPSSSSSSSEADGLLSAAAAGDGEVSIRIQGGPGEADAAGVAGAASSGEDSIEATAAGDVDPASAAAGRGGGADAEASGGGADGASGNGGGDRAYQRYDVHHVARWIEQILPFSLLLLVVFIRQHLQGLILILLCSCHCVIISGFFVTIWIAAVMFKSNDILRKQTALKGERKIAVLVGITVIFMIHVFGVYWWYRNDDLLRPLFMLPPKEIPPFWHAIFIIXVGISNQMPLADTMVRQAAMAIKCMLLMYYKNSRGRNYRXMLTLVEYLLLLYRALLPTPVWYRFFLNKEYGSLFSSLTTGLYLTFKLTSVVEKVQSFLAAVKALSRKDVHYGSYATAEQDTPLNSHSILFKELVFCWNLVQEKMHVPVLLRCKHIFCEDCVSEWFERERTCPLCRALVKPADIRSFGDGSTSLFFQLF

SEQ ID NO: 25345 - protein, 78 aa, Oryza sativa
  Clone ID: TF_LIB4833-026-R1-N1-C5.pep
MEHALPCSDLHHLRVGKTAEQSCSVCLKNFEEGDYIWSMPCSHTFHQLCILGDRSCRVCHPAAPPSTEEKPEAPRTVN

SEQ ID NO: 25346 - protein, 833 aa, Oryza sativa
  Clone ID: TF_OsC37567_1.pep
MAAFATAHPGERASIQAALGSLPRAPSSTMYYRFGSHGLQVLGENREPSASGGGGQAQATQQQQGTSSGVADNRREHAFDFGVGSSSSSSGRRHAMGAAPSVATGISGSKRVAREEGGHSCGFEFEGSDQGRHAARGQACGLGGLDQGPSGGSAHDEDARGYGFGDARCVGQRKDAAPTHQLRIGAGRDQGRSVRLRRDAREDGRGRRLEEGNRAGDGYVAASVQAHGDACVEDQGAGSSSVQQLPSSVDGSDGMIAFEVGKELTLHGSVVSSPWNELWLGKPLIFHDLDLVRAMKDQGGMPNERIDLSGKITSILLSHPGPVSYFRIDSSVINNGAQQKIEEWCDVLRKKNVETVVMANCQWPSHPIEFPLQSLNCSSLRTLHLCFFNIPDMYLDHVSSLAVIDLACCRISDENLFALVCQCVSLRELDIGMFSEGKERIRSESLKFLQIWRSSVSHITIQWAPKLEKVIIGAAQGMKSFSSRTSSSTWISILGAPMLREVWFNLSSQTRSIDNVYLDVGHVPITSLRKLELSIAFKERKGRHALLNFFRSCTELKELVLWREDKVYFEEECDVHSDDWSSALKDIACLKSHLQVLKLFDYGGGETEIAIASAVLEHGASIENLTIMSTTSNADDILSQAKQKLEKVERDSQITGDKKKYSIRDSQENWRQKIQIIQRVAVKQALIPREFIQSINSPRGLRFLLRGWGSSRVTDPAGAVAQDAELMESVGAGHRPDVVALLEILEAHRAALLCRLAHSQVVKIAAGECMFHGVRGGGGGGGGGILAKVAGLHTMHWRIPYHPTRDLLDEVALGICRGGCGIHACANASRSRG

SEQ ID NO: 25347 - protein, 995 aa, Oryza sativa
  Clone ID: TF_OsC382714_1.pep
MADTGSLEKMGRELKCPVLGSLSLLSSAVSISCNHVFCNDCLTESMKSTSSCPVCKVPFRRREMRPAPHMDNLVSIFKSMEAAAGTNVVSTQEAPVVKLADGSDCVNSGKNSKRSQKSLTRKRKVTSEMEKNTAKDATASASQPTTKPSFSTNKRIQVKPFPESETPIRAEKIMKPEEPKNNLNNDVEGKNKAVASGQPGSPSLSPFFWLREQEEQEGCTAETLSETQSLDTPLRHNAPSFSDIKDSDDEIPLNTTPNSKAAATELFDSEIFEWTQRPCSPELYSTPLKKQSKAKSKLDQIEEKGDEEDVHIGGSFDKLGNASNAAQLVNTKATKQKRKKTSPSNKNSAKLSNRAEPCIKKSDANQQGSNRRKSAALKSCQKSSSAVGRNTSGRRNKASSNSKPIHGSSDNSPESYLPKEGLDVEAPDKPLSERIQNLEKTSRRKGSARKLEMAGKTISDTTEKNSEPRSKRVRRMSDHAIAKPVEVPSGSGNETEIPQLHTLTKGSIQRKSSNARRHSKVCGEQEGKNKLENTTMTPIILHGKCQNKEAVCTAPSVRTASVKYKQAKFSEQPDCFGTENFGNLQACPARNVLLKKCEVSTLKVSCAFCQTDVITEESGEMVHYQNGKQVPAEFNGGANVVHSHKNCLEWAPDVYFEDDSAFNLTTELARSRRIKCACCGIKGAALGCFEMSCRRSFHFTCAKLIPECRWDNENFVMLCPLHRSTKLPNENSEQQKQPKRKTTLKGITGFSRSSQIGSNQDCGNNWKWPSGSPQKWVLCCSSLSSSEKELVSEFAKLAGVPISATWSPNVTHVIASTDLSGACKRTLKFLMAILNGRWIVSIDWVKTCMECMEPIDEHKFEVATDVHGITDGPRLGRCRVIDRQPKLFDSMRFYLHGDYTKSYRGYLQDLVVAAGGIVLQRKPVSRDQQKLLDDSSDLLIVYSFENQDRAKSKAETKAADRRQADAQALACASGGRVVSSAWVIDSIAACNLQPL

SEQ ID NO: 25348 - protein, 94 aa, Oryza sativa
  unsure (1)..(94): unsure at all Xaa locations
  Clone ID: TF_LIB3432-023-P1-K1-D7.pep
ELLALGDRMGTVSTGLSEDALSKCLDRSMYMATTSGTHEDCERKCSICQXEEYSDGEEVGKMVCKHYYHFSCIKNWLRQKNWCPICKSVALNTN

SEQ ID NO: 25349 - protein, 369 aa, Oryza sativa
  Clone ID: TF_OsC45320_1.pep
DQPIMSSLCPFAKLASAGATCPVKSDNKTTSCPVTANNHTDDDDNEKTGNANTDPRVVPAKCPFGYDSNNTFKLGPLSCVVCHALLHQSSKCTPCSHKFCKACILRFKDCPLCGADIQGIEPDDELQGLVDRFIDGHARIKRSHAAGDGEAASDKTKVIYEHVSMERGAFLVQQAMRAFRAQNIESAKSRLSMCAEDIREELKSKEDNQELCSQLGAVLGMLGDCCRTLGDAPSAITYYEESAEFLSKLPKKDLELVHTLSVSLNKIGDLCYYDGDLHSARSYYARSLDVRRSAVKEHSAVASQVIDVATSLAKVADVDRNLGNESMAVEGFEEAIKCLENLKLESGEASLEQRRLSVLDFLQKQLDDK

SEQ ID NO: 25350 - protein, 79 aa, Oryza sativa
  Clone ID: TF_LIB4309-027-R1-N1-G2.pep
ALQDLKGYPTDLSDDGSKWDPVRKGTCCVCSDAQIDSLLYRCGHMCTCSKCANELIRSGGKCPLCRAPIAEVVRAYSVM

SEQ ID NO: 25351 - protein, 177 aa, Oryza sativa
  Clone ID: TF_uC-osflM202026e07b1.pep
LLPPWRGTRLLVLAVPTHVSPDDFVRFCGPYIEHASDIHVVRDDGVEDRYSVLVEFEDQKSADGFYLDLNGWRFSSSEVEVCHVLFIVAVQYTPSTKPAVTPPVGSTELPTCPVCIERLDQDISGIMATTCDHSFQCSCVSMWVNSSCPVCQFCQKQSKNPTCSVCQTSGNLWICII

SEQ ID NO: 25352 - protein, 2036 aa, Oryza sativa
  Clone ID: TF_OsC34959_1.pep
MAEDHDAEGVRMTGEGAADGCDAHSLAGGEEEIGDQRRRRRASSTHRPPPPPRGYLRGRWPSSTSPPLGPSTPAHEGLATEDERSGAPDAPPAVGERGGASRVLDGEAGDAEVVGESANAVLAVIPLGGGKRGTDAGGGMAEEPPETASDLEAALDVARTAASPSTEVAMKVVSLSHDAEQGMRQFVTEVVSVGRFRHRNVVPLLGYCRRRGELLLVYDYMPNGGLDQWLHGQVHLRRRCPVLRATIYLQRCLGIASSPLQRVAGMLGDNAWERIQLLWNFQEDVQDMKSKMTDLKVALSYADKHSRETDDDALVLRHWLNKYKSVAYDMEDTLDELLTNAMIWENNPCTVKLFFSSINPLIVRITMSSKMRNIRMKLDKIAEDQKKFPSMQLANPTGQDSTDKWRETFIGHTDEIEMVGRAREKKEILIKVLQNDGGQEISIIPVVGLGGMGKTTLAKAVYTDKETHMFDVKAWVHVSMEFQLNKIVSGIISHVEGSTPANIADLQYLKSQLDRILCNKLYLIILDDLWEEGWSKLEKLMEMLQSGKKGSKIIVTTRSEKVVNTLSTIRLSYFHTVDPIKLVGMSIDECWFIMKPRNMENCEFSDLVDIGKEIAQRCSGVPLVAKALGYVMQKHRTREEWMEIKNSNILDTKDDEEGILKGFIQDTDGQPLQKVAMEYVNELLGMSFLTIFTSPTVLASRMLFKPTLKLHMHDMVHELARHVAENRNTKRDNLNFHYHLLLNQNETSSAYKSLATKVRALHFRGCDKMHLPKQAFSHTLCLRVLDLGGRQVSELPSSVYKLKLLRYLDASSLRISSFSKSFNHLLNLQALILSNTYLKTLPTNIGCLQKLQYFDLSGCANLNELPTSFGDLSSLLFLNLASCHELEALPMSFGNLNRLQFLSLSDCYKLNSLPESCCQLHDLAHLDLSDCYNLGKLPDCIDQLSKLEYLNMTSCSKVQALPESLCKLTMLRHLNLSYCLRLENLPSCIGDLQLQSLDIQGSFLLRDLPNSIFNMSTLKTVDGTFTYLVSSKVEKLRENLKLEGCCKLDGGSTDLCSRITELKKTHCHELEIQGLEDFKHLEGIEHAILLNSLKLTKLIFSWQPKQYTNETAHHKTVLGMLVPPRSVHHLAIKGYCGIELPKWMLDIRSYLPHLTTIFLHGLMECNRLPPLGCLPHLRALLMTKMPKIKSVGPEFYGDYGSCQKLRMIILASMDNLEEWWTTRSSKQDNELSLIPDLQMLWASDCPKLKFLPYPPRSLTWFIENSNHVLPEHGFGNLTSATYPLHLSIERAPNSREMWRRAQHLSSIESLTLMSIAGLRALPEAIQCFTSLWRLSILGCGELETLPEWLGDYFTCLEEISIDTCPMLSSLPESIRRLTKLKKLRITNCPVLSEKCQGEDRHKIAHILEPIFLLADTVSRVLVTANWRSKPLDFRWHLSLLKKRKGWLSCRSSLSVAAYQAGLNLDICLSVRQVSRWGSEKFRTGGGAHIRESVPPNHMEDYPSGRSKAAIGFLRRGGGFSSRNQSTEERTIQNYDGPGITTRLNPMKTRLSDNQERPRYLRDSFRSSTSMAIHGSSSKVPLRKFGDEKRRQTLLAGVDIAESSSRNAGGKHLEGSNKRIVVDDRSSDVLHTETEGLATEQDQLIAPNAGVSDSASSSDISEHAVESLVRSAAPSSRTRRQKDKELNLGQSGVCSSSCTNRPTISRYAPADVKRPCNHASGVQQHGHNNLDCTSVPNFLPSGCSSGSVYSRRFDAMRKRTSDGGSFSRSRGLSGTASLDDSPPAYPAIAGPRIRTTTTERASQQNALRSRRNFQDSAVSVRTRRPPWGARFRISEEREDGMISQRDSSIGNQQSDQVHSSSEEASTESSSRPFSAELPHAIYSSRGEGSNAFTARRRRSSSLYEERPPQTFHDLFRERNGRRHISIEGIAEVLLALDRIEQEAELTYEQLMVLETNILLGAFTSHDQHSDMRMDIDNMSYEELLALGDRIGSVSTALSEEQFVKCLRRSIYIPVATKANAQVVDDIKCSICQGVYCY

SEQ ID NO: 25353 - protein, 419 aa, Oryza sativa
  Clone ID: TF_OsC88477_1.pep
MGANCCIAAKERPQPCVTPIEVSAFRNVRHSPSWSFRWDNRTHIEDIMEMPALFSNHSSGSIRPETKSGSIAPTDGFSNGGSPSDMFNKLKCHKSDRKRESSKIARSDLRAGRSTTSNSSPEAKLSRKSLDTVSVASDSKMSISVPSTPPAISRADPSSSSRGHSLPTDADSMRKARRSPGYQLYRQVSDSKIPSLRSLNEGASPEGRPSSSMLSVCSNDLSAVGSHGESSDGWSMRTFSEMVASSQRERWSVDSELLGSVSSKMTRSNASNNPTTHSPDQEVCKLCLKLLKERSTWNAQELAVVAVLLCGHVYHADCLDSLTAEADKYDPPCPVCTHGEKCTVKLFGKLESKTKNKIPKNVIVDVNLDGSSKHQKEKIPLEEELYSQARASMRELKSSRIGANDMTWLLNDLRIEGFS

SEQ ID NO: 25354 - protein, 532 aa, Oryza sativa
  unsure (1)..(532): unsure at all Xaa locations
  Clone ID: TF_OsC84895_1.pep
MNELVEPSSTICGHIFCKQCIKASIQAQKKCPTCRRKLTMNNFHRVYLPSADPKQGASTTRAAAATTQCIIHPTAPFNTHVSIPLTPTTITRGQAGEQEARKKKKTWWCRGGHTDVDAEGPAAPSATPRKRFSGVAPPAALIFFVLVFAGGAIVTLDHKELRPREMVVSETETRAPTSEVQETETRAPTSEVQEAGTGAAAGGVQRAELAGSSICENQCRPSGSEPLPKGIVQDKSNFEMEPLGGNPERRAAVARPAKSLLAIPVGIKQKAVVDKLVSKFPGDRFTVMLFHYDGEMDGWRELGWSDRAIHVAAKDQTKWWFGKRFLHPDMVAEYEYIFLWDEDIEVDGFDPIRYLRVVRRERLEISQPALDHRSQIHHRLTLRARKGQVHRRFYKTRGGGRCDDNSTGPPCTGWVEMMVPVFSRAAWRCAWHMIQNDLIYAWGLDFKLGYCAGGDRRLAVGIVDSEYVLHRGIPTLGDGGGKPAAKRXSSTATKAATDRLAVRQRSYTELQIFNRRWKAAAEGDVCWTDPYP

SEQ ID NO: 25355 - protein, 374 aa, Oryza sativa
  Clone ID: TF_OsC74850_1.pep
MAAAAEAEEEVRQEVEAVASVYGDDCRVVRGFPPHLVVHVRPRTADDSSQQFVELFLGIKASSQYPKAPPHVYAVESKGLDENRQVYLISSIQNKARELSCYPMLVTLCEEAVEMLSNMNHPAGDCPLCLYPLVKENDGSALPFMKLMSCYHCFHSDCIMRWWEWLQNDDTDSKKSSTAATTEVIHASEGLDLSSSAKHHNVSQHKGLCPVCRKVFDEKDIEHVRDLLGANTSQLASLSIDLDEDEKEVLHSESEKIRQEKFASLFNLQQERNGLIEPKKDLSIQPGMYIPRPPSAPTASEGDTVDDSCEDTTTSTSGTEPLNQTNSTGGTTKHNSSSGHRRRHRSHASRRQPHGQGQPARQQWQRKGGDTSHQ

SEQ ID NO: 25356 - protein, 138 aa, Oryza sativa
  Clone ID: TF_OsC116722_1.pep
KVEAPSTDTICPEGQEKLKLKSLFPISFTEENTDQKNKKSVEKSYMCPSCKSTLTNTMSLVTISTCGHVFCKKCSDKFLVTDKVCLVCNKPCKERNFVPLEKGGTGFAAHDERLEARDFKHLGSGSGLGLVKPAPKNY

SEQ ID NO: 25357 - protein, 126 aa, Oryza sativa
  Clone ID: TF_OsC57414_1.pep
PQVVDTACPSNSRQQALHFILLLTSKLSTELVIRRNLTRTLGGGGEAEERGRSATPPGPRNPRSGGGGWGAPSASPIRHGGDGRAGDHRIGAPPRRWRQQRQGGGERERERESAGLPRACRIPAAR

SEQ ID NO: 25358 - protein, 116 aa, Oryza sativa
  unsure (1)..(116): unsure at all Xaa locations
  Clone ID: TF_LIB3432-009-P1-K1-C1.pep
FDSTKDISALHCGHTIHLECLYEMRSHQQFSCPVCLRSACDMSHAWQKLDQEVAASPMPVIYQKKXDMDPMQRLWDDIERAIPHIGTQVPRMQLLQHPADKSRPCCRVLQSLNSEE

SEQ ID NO: 25359 - protein, 387 aa, Oryza sativa
  unsure (1)..(387): unsure at all Xaa locations
  Clone ID: TF_OsC252488_1.pep
MAMEAGAPRGAAATTSGGGGGAPEAGAELGSSGAPVTWGRVWRAGQEAAAHALLLCFTALLALKLDGLFRGSWWVLFTPLWLFHAVIARCRFSLPAPSSPQSCQMASCHSIVATPLLVAFELLLCVYLEGHDEPFIDLKLVFLPLLALEIITLVDNFRMCGALMPGHGETMTDEAIWERLPGTPSNAKFFPLRAVFLPILLLQVTTVSFAIWIFFERLVTKLRAKKITDGYISFSSKIDELFMMMQHGSRLIAWWSIDEDSKEEQAHLCYANNSGYSTFCSYPPEMVKEMPKKVLDKEVXKTQDKILGAIXMAKLSPLQCDKLKNALILCRICFERDICIVLLPCRHYVLCEACSDKCRSCPICRVSIENKLPVCDAMSSADSISDT

SEQ ID NO: 25360 - protein, 704 aa, Oryza sativa; identical to SEQ ID NO: 18259
  Clone ID: TF_OsC380357_2.pep

SEQ ID NO: 25361 - protein, 532 aa, Oryza sativa
  unsure (1)..(532): unsure at all Xaa locations
  Clone ID: TF_OsC565_9.pep
ERVASAGAASSSGSWGDEHAFFKRDENEISPYSWNITGTYKGSWNFAGSTNGSSRFLEFTKLKGDAVLELLSTPTKISGVHYVQGSVTFHDVLDNAHDRGVAQIRLEGVYIWPFRQLRMVANSGADGEPLQEEDYFLSNPYHLLRIFSSQVFQETSEEKNRRKNSLTYDMEKHCSVEIAAKVVRVSSNLNEGEHEKYRLEGLMESTAVDDDGECFSPILLNATSLNVEVYYNKAVNYTLMVTFISFLQVLLLIRQMEHSNTQSGAAKVSILMIGQQAIMDAYLCLLHLTAGILVESLFNAFATAAFFKFVVFSIFEMRYLLAIWKASRPLNSGEGWEVMRRELSVLYSRFYGILLGGILLMYELHNFLRPLLFLMYSFWVPQIVTNVIRDTRKPLHPQYILGMTITRLAIPLYIFGCPSNFMRIEPDKTWCIAVTIFMGIQAAVLLLQHYFGSRCFIPHQILPEKYCYHRKVEDNTNQPIDCVICMTTIDLTQRTSEYMXAPCEHIFHSGCLQRWMDIKMECPTCRRSLPPA

SEQ ID NO: 25362 - protein, 181 aa, Oryza sativa
  unsure (1)..(181): unsure at all Xaa locations
  Clone ID: TF_OsC68848_2.pep
DTSAPSKTSGQVPVVTSSSSTYNGWDVPGTSSGQSSSKHNKSQNSTFVVPQEALPSLPVPTAPPLAVGTFYDGPIQYPSIDSTPVDVTMPSADGGTAVSSAKPAENEXDAKPAESDANASNSGNTPPGTCVICLDAPVEGACIPCGHMPGCMSCLKDIESKKWVCPICRAKINQIIRLYAV

SEQ ID NO: 25363 - protein, 233 aa, Oryza sativa
  Clone ID: TF_OsC15124_2.pep
NELLIAQELAHSRVPGRKGRSAGRGRDEVGTWSLDLEDMKMELQARKQREAALEAALAEKEHLEEEYKKKFDEAKKKELSLENDLAGMWVLVAKLKRGALGISDLNVDDRSINLADITNGTKENKADKNVAVVEKQLSDNTVKSLTAEEYRNPEFEPLLVRLKAKIQEMKEKETDSLGDKDGNSHVCKVCFESATAAVLLPCRHFCLCKPCSLACSECPLCRTRIADRIITFT

SEQ ID NO: 25364 - protein, 643 aa, Oryza sativa; identical to SEQ ID NO: 18262
  Clone ID: TF_OsC102400_1.pep

SEQ ID NO: 25365 - protein, 378 aa, Oryza sativa
  unsure (1)..(378): unsure at all Xaa locations
  Clone ID: TF_OsC88980_1.pep
MSARDRETAVALARLAAALDGAVLGLGTAALAVASWVKWLAASGQLRRIASAPAAAIPDLRSLLAEYGGRRRXGDQPILAEVRGHVRAAPRGKYLVPPGSGEHCVVAKHTQLCLFNEWRGIFGWTFDLHALFFKSIKEQIITSFRWVPFVYVDPENLTGMVHVKLDLAMQPLPLTTVYHKLTPVDSTPYTLFQTIIGNGYPIALLDEEKILPVGKEITAIGYIRPHKASVEISSCSEIPFFLSDLTKDEMEAELSSRAKTLFWASVVLGTMSVCLLGFATYRSWKKIKERREARQAQEVFRQTTDEVTDDQSSDEEAGEMGDGQLCVICLRKRRKAAFIPCGHLVCCCKCALIVERQFDPLCPMCRQDIRYMIRIYDN

SEQ ID NO: 25366 - protein, 219 aa, Oryza sativa
  unsure (1)..(219): unsure at all Xaa locations
  Clone ID: TF_OsC63513_1.pep
PGLQAHNRKRSQNRLEGPGLSVSQKVXYCISTVGGQYIWSRLQSFSAFRRWGDSEQRPLARRAWGLVQHAEGLYRASSFFNLLLFLYGARYKTIVERILKAXLVYESPNMNRAVSFEYMNRQLVWNEFSEMLLLLLPLLNSSSVKKFLLPFSKDKSASSSGDEADCPICRSSPSIPFEALPCQHRYCYYCLQTRCAATNSYRCARCNEIVVAIQRQGSS

SEQ ID NO: 25367 - protein, 260 aa, Oryza sativa; identical to SEQ ID NO: 18266
  Clone ID: TF_OsC32218_1.pep

SEQ ID NO: 25368 - protein, 164 aa, Oryza sativa
  Clone ID: TF_LIB4833-034-R1-N1-D8.pep
RMWNFASSAWGSGLGKKNTPNCTPSNGDCSDDEASSCTSREEGLECPICWESFNIVENVPYVLWCGHTMCKNCILGLQWAIIKVPTVPIQLPFFVSCPWCNLLSLRIIYKGNLAFPRKNYFLLWMVEGMNGERARSRSAIHSEQQTTWALSSSRASGMEVIRIP

SEQ ID NO: 25369 - protein, 162 aa, Oryza sativa
  Clone ID: TF_OsC25814_1.pep
MKLRSPAFLRTDKDFFSQSIMQVRGLPCAHNFHVECIDQWLRLNVKCPRCRCSVFPNLDLSALNNLRPSSEPDRPSASEVTAATMARYVRSSQPAGQSYLLRLQGLLLRQVVVRHGGGDDMASAENGASHVAAAVTAPATTGGVESELPSIVVDGGHQLPDR

SEQ ID NO: 25370 - protein, 163 aa, Oryza sativa
  unsure (1)..(163): unsure at all Xaa locations
  Clone ID: TF_OsC192480_1.pep
MHKRTDFYQRITAPSQFTCSPIQESSEKNXEISKNRCPEPRNRRQQSLRIQQELVKNRDLSHDRXGGNARISRIQSRLGGRRQTARSPATAAXPTRCRRGGAVRWXATGGRSTGGRCGYIRGGCARRGRPPCHRGRSSRAPSCGQQDIADETIGEETQKQSAT

SEQ ID NO: 25371 - protein, 263 aa, Oryza sativa; identical to SEQ ID NO: 18268
  Clone ID: TF_OsC88712_1.pep

SEQ ID NO: 25372 - protein, 456 aa, Oryza sativa
  unsure (1)..(456): unsure at all Xaa locations
  Clone ID: TF_OsC4354_1.pep
MQRRRAQTWAGVGKTAQAAAAHAALFCFTLLLALKVDGRTAYSWWIIFIPLWLFHGIVARGRFSMPAPSLPHGRHWAPCHSIVAAPLLIAFELLLCIYLESLRVKSKPTVDLKIVFLPLLAFEVIILADNFRMCRALMPGDEESMSDEAIWETLPHFWVAISMVFLIAATTFTLLKLSGDVGALGWWDLFINYGWFNPMIHKSPNPGEASSSSAAIRYRDWESGLLLPSLEDHEQERLCGLPDIGGHVMKIPLVIFQVLLCMRLEGTPPSAQYIPIFALFSPLFILQGAGVLFSLARLLEKVVLLLRNGPVSPNYLTISSKVRDCFAFLHRGSRLLGWWSIDEGSKEEQAHWGHPTXCGYPLEVVTNLSEARLGAGVWRLXAALGEQSEITKCTKXQEFERLQNEKVLCRICYEGEICMVLLPCRHRTLCKTCSDKCKKCPICRVPIEERMPVYDV

SEQ ID NO: 25373 - protein, 165 aa, Oryza sativa
  unsure (1)..(165): unsure at all Xaa locations
  Clone ID: TF_jC-osroLIB3475009f05b1.pep
YSYGSKSFSKPSTYPQSSTSSSSYPHYETAQSSSPAVPSSTYDNQVCPICLVNPKDMAFGCGHQTCCDCGQSLESCPICRSPISTRIKLYXQWQFGSFANGWHTGDHLVSHWAMDCIGCFKCNPCKAFERLADKPVKYWVCIDKDRKASNPLLQDCGAGDVSSIE

SEQ ID NO: 25374 - protein, 67 aa, Oryza sativa
  Clone ID: TF_LIB4371-053-QB-K6-F7.pep
MYRNGGFGSVPASSKAMAELQEAQVSEARESDCAVCFEGFDQGEKLTRMPCSHCFHATCILDWLSLS

SEQ ID NO: 25375 - protein, 94 aa, Oryza sativa
  Clone ID: TF_LIB3434-055-P1-K1-B3.pep
HASVNNKVVLPNCSHAMCMKCYRQWRSRSQSCPFCRDSLKRVNSGDLWMLTDDRDVIDMATITRENLRRLFMYIEKLPLVAPDNIFYAYDSHVK

SEQ ID NO: 25376 - protein, 216 aa, Oryza sativa
  Clone ID: TF_OsC183489_1.pep
MALVYSESSLTGIQLIICKAARPGDQAQPNRKLPRNSSNLKTPKEFHATDPWGHMVRVYQLLLKGRDALMKLGITGKKYTQPARCYMIAFVLVYTNTINHLWLMPLALELPLPTAHWAKWCGCLRIDPLEYAVEMESVVAGAPDERAIVAGELTIRAAAVECHPAYTTGFILGVPCPRSHRMPLKNLDLHLWSGCLRIDPTSVCSGDGKRGCRSPR

SEQ ID NO: 25377 - protein, 105 aa, Oryza sativa
  Clone ID: TF_OsC46775_1.pep
RVPLPPPFASYNTISRAAPSRANSFRSMPSHPRDEAPVDSAITASVTSPPSVDARAAEPQLCPVCLSKPRDMAFGCGHQTCAECGPQVEHCPICRRPIDTRVKLY

SEQ ID NO: 25378 - protein, 292 aa, Oryza sativa; identical to SEQ ID NO: 18278
  Clone ID: TF_OsC1795_20.pep

SEQ ID NO: 25379 - protein, 139 aa, Oryza sativa
  Clone ID: TF_OsC37567_2.pep
MDPTAGTGSSTKKIPSWMVTELPMLSTEANRLPQIPSWMIRKPLMLCMEAGRSGKAAAAATATADAMEQSCSVCLKSFEKDDCIWSMPCSHTFHQLCILGDRSCRDMNANEECKELSLVEDEASTAREASELGRTRGSF

SEQ ID NO: 25380 - protein, 326 aa, Oryza sativa; identical to SEQ ID NO: 18286
  Clone ID: TF_OsC49416_2.pep

SEQ ID NO: 25381 - protein, 153 aa, Oryza sativa
  Clone ID: TF_jC-osleLIB3474039b05a1.pep
AKQLPCMHLYHSSCILPWFSSRNTCPVCRYELPTDDAEYERSKQATTNVRDIQVVEENSDEQEVQVTRQMAVGAIEETNTSEHNVRVDEQPSSARRRSGWLFIAAAPVVSLIGFALVLCFTNPARSGRRQLYCRSPSATEVHVGTKKSWWSMF

SEQ ID NO: 25382 - protein, 173 aa, Oryza sativa
  Clone ID: TF_LIB4371-036-R1-K1-F5.pep
IVTDSGKIQALLIRVWGLAVSVIPNIIRIMSTASTARSRKRAHDGSRQKVDVINLETTAPVVNTGSQHEALILRGTRTSPIDVEALDDKRRSRKIMRRSVAVVDPEKDTGPGGYGVAGAIFSRGRNFQGAVHVICLSPIGKKGPASRKMWPKPVRRMPRLLQRNQPLPVLGGV

SEQ ID NO: 25383 - protein, 136 aa, Oryza sativa
  Clone ID: TF_uC-osflM202003c01b1.pep
MRHLLQSSEHLTAATATAAASGGRGVHTDTFLILAAVLCFLLCVVGLALVARCSRLCNPSSFAVEAEEAMPPAPCKGLKRKALLSLPTVSFAEAAAAEEEEERPECAICLAEFARGDEVRVLPPCGHGFHAACVDV

SEQ ID NO: 25384 - protein, 233 aa, Oryza sativa
  Clone ID: TF_OsC349_4.pep
KKSHLPIPTWSGGIPESGSIESSRCRPWRPTSTRRRPPSPPPPAPARDPPLPPAPTPASPTSASRSRSGTPSRGRFSSRPNLLLLLALPSHPRVRHGQGRRRRGRAPLHRRRLLLRGQEGQALRDQEVERCLPLGLGHRRGQLRHLPQPHHGPLHRVPGEPGERHQRGVHRRLGSLQPCIPLPLHQPLAQDPSSVPSRQQRVGVPEVWSLDNSLSGAKAASSFSYQVLALSDN

SEQ ID NO: 25385 - protein, 151 aa, Oryza sativa
  Clone ID: TF_OsC1795_44.pep
QCKCDFFFFWLLFREGFIHKAHKKCYTRRSTLLLRGIYTVQAQTARNGKKRDKVRGESAKKAKSSLSSFLRPHGEATRRRWRVAGAGRLVGESNRVESNPLAKSGPRRRRRPAARRSRRGGGSGRAGRWRGRSQAMSRGRRGGRCDRRGGG

SEQ ID NO: 25386 - protein, 173 aa, Oryza sativa
  Clone ID: TF_OsC134110_1.pep
MASPSSSSVISIFLLVAGVALMLVVHIVVVFWALRRGRGASRGEEEAAPGRAAEGNGGGARGGGGKGLSADEIGALPCHDVVKGGGGGDCAVCLEELEAGDRCRRLPRCEHSFHAPCVDSWLRKSRWCPVCRADVVGRAPEGERKMAAAAAAVKTTVAGRSSSPATGEIVAER

SEQ ID NO: 25387 - protein, 244 aa, Oryza sativa
  Clone ID: TF_OsC17323_1.pep
MRTASTATRRVSAGAPLPTSLPFSSSPSRQPGMGFPVCCYSELLLPKQLLHLLLLLGYIRRFLLWAFHAVGLGDLLDLGDEQQAVLQDHAREHRAPAQALPPQQQHRRAEFRTVPAMVIEEVLPVVRFDELVAAAPAVCGGGDCAVCLSGIGGGDEVRRLSNCRHVFHRGCLDRWMEHDDQRTCPLCRAPLIPDEMASALWAAAGVPDASDFDFSYFGAPLTPMPTPTLLRPHELLLTGLGGYQ

SEQ ID NO: 25388 - protein, 188 aa, Oryza sativa; identical to SEQ ID NO: 18384
  Clone ID: TF_OsC337952_1.pep

SEQ ID NO: 25389 - protein, 407 aa, Oryza sativa
  Clone ID: TF_OsC25814_2.pep
MAVICFEESIHLLLCLIGFRIMVSINWKRYRLCAHPLHIWIVVDYTTVFIFRLLMFVDNGLAAGMGLALDNVYTCLFVKFGHLRHFHLPEEGQKWGFLIWLLFSYCGLACIACVAVGKWLSRRHALQQRAQQGIPVSEYGVLVDMIRVPDWAFEAVGLEMRGMGQDTAYHPGLYLTAAQLDKISMYLFASDLRDAKKSLKTSGFVLRSKVTLKSSVIEQNDFKLVLLLQREAVEALIQELPKFRLKAVPTDCSECPICLEEFHVGNEVRGLPCAHNFHVECIDQWLRLNVKCPRCRCSVFPNLDLSALNNLRPSSEPDRPSASEVTAATMARYVRSSQPAGQSYLLRLQGLLLRQVVVRHGGGDDMASAENGASHVAAAVTAPATTGGVESELPSIVVDGGHQLPDR

SEQ ID NO: 25390 - protein, 379 aa, Oryza sativa; identical to SEQ ID NO: 18399
  Clone ID: TF_OsC29695_2.pep

SEQ ID NO: 25391 - protein, 274 aa, Oryza sativa
  unsure (1)..(274): unsure at all Xaa locations
  Clone ID: TF_OsC7412_3.pep
EARRPFTALSQVDADLALARVLQEQERAYMMLRMGGGVGEGSDYGSSDAGSYEXEDEAEEDYEEELEHHLRVHHHEHAVGEGRGEGERDGEGAEGSEFEEEGFDEEYDEEEVEPELDPAEYEDDEAYARALQDAEEREVAARLMALAGISDWRPVEPVEEHANDPQDAWQEVDPDEYSYEELVALGEAVGTGHRGLSAATLASLPSVTYKAEGVQDGNTEQCVICRVEFEDGESLIALPCKHSYHPECINQWLQINKVCPMCSAEVSTSDSNQA

SEQ ID NO: 25392 - protein, 513 aa, Oryza sativa
  Clone ID: TF_OsC76986_1.pep
MAGSTLFRWLFLLLAIVSLAAADSGSGEAETTVPGQIRLSCGASASATDGDGRAWDGDAVSTFAPSVTGVAADASYQDPSLPSPVPYMTARVFSSSYTYSFPVKPGRVFLRLYFYPSAYGNLGAAAAAADALFGVTAGGITLLRDFNASQTALAVGYAYIVREFSLNVSSGATSLNVTFAPSPRGAPGHGSHHYAFVNGIEVVPTPDMFTTPVPAFANGGRPNPMPLRADTAFQTMYRLNVGGEAITPRDDAGGFYRTWDNDAPYIFGAAFGVTFAKDSNVSVRYNPPSVPKYAAPEDVYATARSMGPNAQINLNYNLTWILPVDAGFYYLLRFHFCEIQYPITKVNQRSFFIYINNQTAQSQMDVIVWSGGIGRAVYTDYLVVTAGSGQMDLLVALHPDLSSRPEYFDAILNGLEVFKLHKYGTHSLAGPNPPIPLKQVFSTVDGSRSESRKKSVVCAAVGGVAAGCFLAVLVAFAVAWAVRRRQRKAAAEKPADGLLGPTKGSALYDPVQK

SEQ ID NO: 25393 - protein, 130 aa, Oryza sativa
  Clone ID: TF_uC-osrocyp036f12b1.pep
LSEAVGLEMRGMGQDTAYHPGLYLTAAQREAVEALIQELPKFRLKAVPTDCSECPICLEEFHVGNEVRGLPCAHNFHVECIDQWLRLNVKCPRCRCSVFPNLDLSALNNLRPSSEPDRSSASEVTAATMA

SEQ ID NO: 25394 - protein, 370 aa, Oryza sativa; identical to SEQ ID NO: 18400
  Clone ID: TF_OsC20421_1.pep

SEQ ID NO: 25395 - protein, 217 aa, Oryza sativa
  Clone ID: TF_OsC409067_1.pep
MDPPARRLMDSRAAQLAAPLPDPYSAETFEDLLRELGVDPSIHTIVRSAGRWMDPAAAAARVPVRFHRTLQRLGIDPNSDARSIRDMLQEFYRVVYHGEVYWAGRVIRPRPSSMPTPVIGRRRRAADGDAPMQPPSKYARVHAVSRDVLLGLALTKACDARQEECAVCLSDFEEKDRLRTMPCNHSFHEICLFRWLSDSCLCPLCRYALPKQQQVRL

SEQ ID NO: 25396 - protein, 170 aa, Oryza sativa; identical to SEQ ID NO: 18393
  Clone ID: TF_OsC343295_1.pep

SEQ ID NO: 25397 - protein, 213 aa, Oryza sativa
  Clone ID: TF_OsC17119_2.pep
MSLTNAPSSMVSIVTPVTDRDSGRTVAGVPPVLVGASVSSAPELRGRAYLVHHVFYEDGSASADGGGGVAPASRASIAALREVEEEDDDGEEASDCAICLDDGEESRETCGSGRRKEMPCGHRFHGECVERWLGIHGSCPLCRHEMPPATAAEAEEEEVVVAMVHGERVVMRGRRVVLSVLVMGRAHDDGEGPEQRGTDPIPPLPRVLIDDVD

SEQ ID NO: 25398 - protein, 250 aa, Oryza sativa
  Clone ID: TF_OsC206824_1.pep
MNGSRQMELHYINTGFPYTRAAGFGACLEGLTYAHADFAIADAFHDQANPYWAMMHTNSYKYGYSGAGNYYSYGHVYDMNDYMHRADGGRRIWDNATPVNNTESPNVVLQGGETPHANTSSTTEECIQQQVHQNSSSPQVIWQDNIDPDNMTYEELLDLGEAVGTQSRGLSQERISLLPVTKYKCGFFSRKKTRRERCVICQMEYRRGNLQMTLPCKHVYHASCVTRWLSINKVCPVCFAEVPGDEPKRQ

SEQ ID NO: 25399 - protein, 137 aa, Oryza sativa; identical to SEQ ID NO: 18394
  Clone ID: TF_OsC350539_1.pep

SEQ ID NO: 25400 - protein, 212 aa, Oryza sativa
  Clone ID: TF_OsC3972_1.pep
MGFPVGYSELLLPRLLLQVLLLLGHLHRFLLWAFHAVGLGDLIDNPPGLAATEQDMMLQGRGGGMAEGWASSSALQHRRPEFRAIPPMAIEEALPVVRFDELVASAPAAVCGGGDCAVCLSGICGRDEVRRLSNCRHVFHRGCLDRWMAHEQRTCPLCRAPLIPDELLPAASGLPDPSDYDLSYYPSPLPLAPTPTLLRPHELLLNGLGGFQ

SEQ ID NO: 25401 - protein, 153 aa, Oryza sativa
  Clone ID: TF_OsC12910_1.pep
MEAQMEAMPEIVVIAVSHLEHSLIDSLIYWRFGVDESDEDASSDRHRGMRMDIDDMSYEELLALGETIGTVSTGLPEDELSNCLKRIHYVPSASTSHEDGDIKCIICQEEYLPAEEVAEMACKHYYHLACIQQWLRQKNWCPICKSVGSATKH

SEQ ID NO: 25402 - protein, 375 aa, Oryza sativa; identical to SEQ ID NO: 18464
  Clone ID: TF_OsC29912_1.pep

SEQ ID NO: 25403 - protein, 338 aa, Oryza sativa; identical to SEQ ID NO: 18465
  Clone ID: TF_OsC185398_1.pep

SEQ ID NO: 25404 - protein, 363 aa, Oryza sativa; identical to SEQ ID NO: 18467
  Clone ID: TF_OsC12034_1.pep

SEQ ID NO: 25405 - protein, 645 aa, Oryza sativa; identical to SEQ ID NO: 18466
  Clone ID: TF_OsC5703_1.pep

SEQ ID NO: 25406 - protein, 523 aa, Oryza sativa
  Clone ID: TF_OsC1528_2358.pep
MVSCSSRADAPPRRRAAARGLGLGLAGCFGGGSSGAATGGGGGGGATAASSSRAHEVESWQAARAVAEMDFRASVAAKDIRISSESDPRVHPSSSTISHHLRFNHLNSHENKEDALGTEIAETSVRQSSSGKEVMPRGNFSNEVAYAEITSREGISHIGRDILEPAANNAETDTVCIPEVGGPVSESGFSSSQRASERIMADLEAGEIAHGTSSTTIMSSERSDTSQSSLTSVLPATSTAPSTIGESLPDTVPSREDVPIFSGTQGEIGGNTLHDDMMSIFSNDGPARVRDSSSNEMRRSHRRVLWDTFSRRSSRGYLDSDTDDLGFYSRWLDLGDELFADEIEEARFFHRRRHGSIRVSQYSRSRIREHRRAVFDSGTDQSTVACPLGIHQIGRCTCDSFLIAEESSARASISRIVMLTEALFEVLDEIHRQPASLSLSMVSAQAPESVVNSLPCKSYKKQTAQCSDDMEQCHICLTEYEDGDQIRSLPCKHEFHLLCVDKWLKEVHRVCPLCRGDVCEGAA

SEQ ID NO: 25407 - protein, 325 aa, Oryza sativa
  Clone ID: TF_OsC1867_1.pep
MVRGVEQGGPAMDESSSSSSPSPVSAPAGQAAMTAGGIATVAAVLIVFAALTLAFVLLQCYCDERRRAVTTTSTSGRGRRPRPRRRSGSGGDGGTGGGVDPEVLRSLPVTVYSRSTAAAAAKEEEEEDDDGVECAVCLAELEDGEEARFLPRCGHGFHAECVDMWLGSHSTCPLCRLTVVVPPPPLPPVPPEPPASYTVSLPASVLLGLSDHGAGAVTMTAEGRSTLVIEIPESAASTTPRDAAARSSPSLARLRSLRRLWSFGRQGAAGSTSSCSCATGGDNDDGDVEHGVSVTVAIRAVEAATPARPPEAEAGARTAAAHVRN

SEQ ID NO: 25408 - protein, 191 aa, Oryza sativa
  Clone ID: TF_OsC4209_1.pep
MSSSSASAVPPEDDVCSVCHDRFRIPCQANCSHWFCGECIIRVWNHGPSVQPCKCPICRRLINLLVPANVSIDNDDDPQIQHVLGEVQHYNRIFGGTPRNLTQRLQDLPFFIRRLFRELLDPQRTLPLVFRARMVMMVALSAIYVLSPIDILPENVLGLFGFFDDFLVLLIVFLHLAAVYRSLLLYRHGGH

SEQ ID NO: 25409 - protein, 197 aa, Oryza sativa; identical to SEQ ID NO: 18414
  Clone ID: TF_OsC387972_1.pep

SEQ ID NO: 25410 - protein, 164 aa, Oryza sativa
  Clone ID: TF_jC-osroLIB3475P014f09a1.pep
SCPIIVDDINDDVVIYSASSFPQVRQQAPRTEPVVTIEDDSETTPGQAGDAVDEHVDILLSLTLGRYPRHGHQRSSNISTSPVIHIIDTPSNALPEPEKAVPKEPTFNCPVCMNELVEPSSTICGHIFCKQCIKASIQAQKKCPTCRRKLTMNNFHRVYLPFAE

SEQ ID NO: 25411 - protein, 143 aa, Oryza sativa
  unsure (1)..(143): unsure at all Xaa locations
  Clone ID: TF_LIB4309-041-R1-N1-C4.pep
PPRPCPWDDLDFSHHTEHHPLVVGHDKXSXTFHKSGSLGESKNADSISNSKAVKDDGPSTAVKDDGSSVKHHSDGLHIGKEQVHDLFDFEDDCPICLEEYDYENPKMTLQCNHNFHLCCIYEWMERSQACPVCSKVMLFHEDS

SEQ ID NO: 25412 - protein, 123 aa, Oryza sativa
  Clone ID: TF_LIB4506-014-R1-N1-H7.pep
SVVEKVQSFLTALRALSHKDFHYGSYATSEQVSATGDMCAICQEKMHTPILLRCKHIFCEDCVSEWQPMLMPQLCADKKAGKQAGRCFRCVRLCCSRLRAEQPYVVLNQSPRLPHQLKAKKST

SEQ ID NO: 25413 - protein, 233 aa, Oryza sativa; identical to SEQ ID NO: 18415
  Clone ID: TF_OsC8285_1.pep

SEQ ID NO: 25414 - protein, 385 aa, Oryza sativa
  unsure (1)..(385): unsure at all Xaa locations
  Clone ID: TF_OsC99441_1.pep
MGAVSMSTTTRLPLVAALLSAAACVAAAQPATAEAAPETPGVGIKVSFRPXXXXXXXXFTMIFSLTFLLLMYAKFCHPSSPVAAPAPTVVPAAAADDGVAKPVIESLPFFRFAALRGARQGLECAVCLARFDDADLLRLLPRCRHAFHLDCVDRWLESKASCPLCRARVDAEDAALGLKYASSARFVPAGGASESERFDGDQDLLGIFVERVPSSRMEPAAAAHCPDLDRYKHRIVVSDAVFKSRWSEINSSDLIALDTELLRSMETMEVEMEMELYKETEEEETDHDHQRKTLLAASGGRSSVDAAARARMISSSSSSGSVRSMSEMVSLPRLRAAMRERLAHEDRWVPIARRTARWFAGRESRHDEAAPVVDSPPASHSNSLV

SEQ ID NO: 25415 - protein, 266 aa, Oryza sativa
  unsure (1)..(266): unsure at all Xaa locations
  Clone ID: TF_OsC326943_1.pep
RPTRSPCFPATSARKTAVAAAAXECAVCLEAFQAGDRCRVLPRCEHGFHARCVDSWLRQSRVCPICRAEVEVSGYAGKPAAAVAEASQATTLEIVTERLGGTERLEVSNVCEVHPLDSVDRMKGDNSNVFLVAGLSLVVVVHVLVLLWALWWGYGRSRLALARARVVGQHDVARGGLSAEQVGELPCHVVKEGAGECAVCLEAFRAGDRRRVLPRCERGFHAQCVDSWLRVSRLCPICRAEVAASRGKEGDAPVAEAASLEIVAER

SEQ ID NO: 25416 - protein, 138 aa, Oryza sativa
  Clone ID: TF_OsC18246_1.pep
CGQSRPRRPSARSTGSRRTWSRCPATAPSPTRRRRRRTRRAVCARCAWPAEYAAGDEVRVLPSCGHEFHRECVDRWLLTRAPTCPVCRAPVVARVEGPDDDAKEDYCGDGESVERHGGGGGDIGFLSVAGESRVLPAI

SEQ ID NO: 25417 - protein, 174 aa, Oryza sativa
  Clone ID: TF_OsC104843_1.pep
MATPNTYSVHISSETHRIEAWLASDEALARQLQEEENAHDAIATREFAGNASLEPSSPAVEYRPPNNAAQVATEDNVDPDNMSYEQLQALGEAVGNQSRGLSDDLICYLVPFKNKCSFFSRKKNDEECVICKSTYKSRQKLIRLPCSHCYHADCITRWLKINKACPVCNEEVFG

SEQ ID NO: 25418 - protein, 109 aa, Oryza sativa
  Clone ID: TF_OsC85903_1.pep
VDHASSSENLSEGGILGPGTKKERIVSAEDAVCCICLTKYGDDDELRELPCTHFFHVQCVDKWLKINAVCPLCKTEIGGVVRSFFGLPFGRRRVDRMAGRGIASSRFTV

SEQ ID NO: 25419 - protein, 211 aa, Oryza sativa; identical to SEQ ID NO: 18424
  Clone ID: TF_OsC394643_1.pep

SEQ ID NO: 25420 - protein, 60 aa, Oryza sativa
  Clone ID: TF_jC-osflLIB3477P007c06b1.pep
GFFPRKAYHDNCPICLSAFRRRETLITLACKHSYHEGCIARWLKIDKACPVCKYEVFGPS

SEQ ID NO: 25421 - protein, 210 aa, Oryza sativa; identical to SEQ ID NO: 18428
  Clone ID: TF_OsC105234_1.pep

SEQ ID NO: 25422 - protein, 386 aa, Oryza sativa; identical to SEQ ID NO: 18430
  Clone ID: TF_OsC157607_1.pep

SEQ ID NO: 25423 - protein, 320 aa, Oryza sativa
  Clone ID: TF_OsC253211_1.pep
MDADRDPIFPVQQMPSLLFPPPPPRPLALDSTSSASSSFVPHHPSITSFPILVLTVLGILTTSVLLLTYYIFVIRCCLNWNSSSSSDTRTAGLISRRRRGAASSSLPAVAEPRGLEEAAIQSLPAFRYRKAIKDTTADSSECAVCISEFQEEERVRLLPSCLHVFHVDCIDTWLQGNANCPLCRAAIATNDSQLPLDQFVRPEVVVIQVITGAEEEGAQAPQQEANTAASDPAVDATSTNQQVSSKKTKNQNAWHVSISKGDECIAVRRDRNVLPLRRSFSMDSLGGAGEVHLQIQNILQRSTHFHRDISDSSSSSTGTL

SEQ ID NO: 25424 - protein, 371 aa, Oryza sativa
  Clone ID: TF_OsC29884_1.pep
MSSQPVARVLPRGGGGGFRAFPESAPASLRFSVGRRRAARLGARARGCPPEGEFPPSAHPQHYPGWPGSLGAPHPCGLQPAMLTPYVEHQKAITIRNDVNLKKETLRIEPDEECPGRFLVAFTFDATLAGSMTVYFFAKEELNCNLTAVKEDLIKPVTVSFKEGLGQKFRQPSGTGINFSVFEDSELLKQGDMDVYPLAVKAETTMPVDQKLEGEDQKMKTPNSQITQALFEKKESGDYQVRVASQILWVNGTRYELQEIYGIGNSVEGDADANDPGKECVICLSEPRDTTVLPCRHMCMCSECAKVLRYQTTRCPICRQPVERLLEIKVNNKAEEQQQPSPDSPIKVNSKAEEHQQQPSQSLPIPHREEV

SEQ ID NO: 25425 - protein, 170 aa, Oryza sativa
  Clone ID: TF_OsC35881_1.pep
REVALRVPAVGLRRGGCARAAGKKQKAICIERYRRRDEDQKMVISEIDDNIEEECGICMEINGKVVLPTCSHAMCIKCYRDWRSRSQSCPFCRDSLKRVNSADLWIYTDNRDIVDIATVRKENLRRLFMYIDKLPTVIPETVFDVYDSHCCRNCGALGVHAAPLVEAVSS

SEQ ID NO: 25426 - protein, 148 aa, Oryza sativa
  Clone ID: TF_OsC428898_1.pep
MLFLKELPIWQAFGFSLLTGALAGSTLYAVCVLLLCCVDRRRRHAGAPPPDPKIWLPDHAHHRRRRDESSEMECSICLGELEEGERCCTLAACRHEFHKECIYRWLANRNTCPLCRHIPLPPASSPPPAPPPHHASPPPSNVPPAAHV

SEQ ID NO: 25427 - protein, 527 aa, Oryza sativa
  Clone ID: TF_OsC49150_1.pep
MLQRNMVWTHQVASPENQVQPENFYHGGAGSNLSNLSVQVAVGVPGNTDFRSHYESINLQHQHVQNPYPHVGVASSSVFPSTMYNPCISTTAVDRYVPPIQSFGLGNPLLLPLYHQLAQGSMDENGSSGNFCDSVREFIKRKNALLVGGHHFVNSFASSSSSAYVPPNPLHRSWNASFEANILPSTGVSNPPEYSSADSLNNSNSMASHPELVHHGNYVFPAGHMSQYNAWIAQASRTGGVPQWEHGNAAANPPGGFVHSGTIDMPNGGLQGYQAGPFANYYGPLPHFHQNPLNSMQHPALFNHIQMQVPHQHCLSNNLLHHPSGNGLPLDPRILAISSNSGHTFGPTAQPSLANQVNAGSSRIQPYEFLFFKLDNTKFKGYQNLVEKYHLILFLNAPFVDLSRLYEAGVIDEHRDMRLDVDSMTYEELVALEERIGNVNSGFTESYIEENLKSSSYVPDADCMPDQSSVEKDACIICQEEYEAKELVGTLGCGHKYHAMCIKGWLMVKNLCPICKTTALPADRRNG

SEQ ID NO: 25428 - protein, 295 aa, Oryza sativa
  Clone ID: TF_OsC60245_1.pep
MAGAPMASPPPYDNPTAGFPIAIVIAIGFMVTSLILASYYFLVVRCWLRGTGGGGAAGAGLLHRSRRESAAERVAAVFFTDYEAEVGGGLDPDVVAALPVVKYRRAASGKSASPQECAVCLSEFVRDERLKLLPSCSHAFHIDCIDTWLHHNVSCPLCRTVVTGGAIGLLVRDDQYDASSRELAAGERRIDAAARMGHGISSCRFPKTGAEQEPIRRSFSMDCFLGDLGRKPPPPPPKDPAGSEAGPSHPDAAGSSSIVGTAGAGETSGRFRRLLSSFGLGRSSRSTVLPIHLDP

SEQ ID NO: 25429 - protein, 251 aa, Oryza sativa
  Clone ID: TF_OsC200433_1.pep
SISAACSGRQLQAPHTQLLRLHVHFTGVAISNPKPKDFIGLRGEWSCCAAAAAAVFDGEKPRKRRTMNTPNSWLFADNSKYSTRARLLFMGLSFSIGILSFLVYLAIWYTCTRRRRSRQLRGGGSASADQEAPEANSHGMSAAAIAALPTFGYEASAAAAAALDCAVCLGQVDAGEKVRQLPKCGHLFHAECVDAWLRAHSTCPMCRAAVEGPATAAIAKKASSGGGATDTPPVVAPAPPAAAEALPLPPV

SEQ ID NO: 25430 - protein, 902 aa, Oryza sativa
  Clone ID: TF_OsC1713_5244.pep
MAPASLAPSPCRRGGAMLRDRAFDAGYKDDVFVCSSLLHLYARWGAMGDAVKVFVRMPRRDRVTWSTMVAGFVSAGQPLDAIQMYRRMREDGVKGDEVVMIGVIQACTAARNVRMGASVHGHLLRHGMRMDVVTATSLVDMYAKNGLLDVACRVFGLMVHRNDVSWSAMISGFAQNGQSDEALRLFRNMQASGIQPDSGALVSALLACSNIGFLKLGRSVHGFIVRRFDFNCILGTAAIDMYSKCGSLASAQMLFNMISDRDLILWNAMIACCGAHGRGQDALTLFQEMNETGMRPDHATFASLLSALSHSGLVEEGKLWFGRMVNHFKITPAEKHYVCLVDLLARSGLVEEASDLLTSMKAEPTVAIWVALLSGCLNNKKLELGESIADNILELQPDDVGVLALVSNLYAATKKWDKVRQVRKLMKDSGSKKMPGCSSIEIRGTRHVFVMEDQSHPQREEIVSKVAKLDLEMRKMGYIPRTEFVYHDLEEEVKEQQLSYHSERLAIAFGLLNTGPGTRLVIIKNLRVCGDCHDAIKYISKIADREIVVRDAKRFHHFKDGVCSCRDYWLPRTSMARGCVLLYVYPTDPPRRGPSEEVQPRKAATSVRPSRGTRRRGSGAVPVAFAIPGRGRHLSRRKRPGRWRQRLLLPTRWGARVADDHPRPLHCTCPMWEQHPAWPVRNATPLRCRRHPRRLLCALICVVGLAAVARCARNRRNSGGAGAGAGSASPSHSPAHAGHFGGGGSGGGGVTTTTAATTAAKGLKKKALKALPKLAYADAVAAAAAARGTVVGEEEEGKVEVLAECAICLSEFGEREEVRVMPQCGHGFHVACVDTWLRSNSSCPSCRRPIVLDDPSPPKRCRKCEAIVLEAVVAASSSSSSSAATATGSGGGGGGGGGRFLP

SEQ ID NO: 25431 - protein, 349 aa, Oryza sativa; identical to SEQ ID NO: 18443
  Clone ID: TF_OsC342884_1.pep

SEQ ID NO: 25432 - protein, 209 aa, Oryza sativa; identical to SEQ ID NO: 18446
  Clone ID: TF_OsC355497_1.pep

SEQ ID NO: 25433 - protein, 171 aa, Oryza sativa; identical to SEQ ID NO: 18452
  Clone ID: TF_OsC32419_1.pep

SEQ ID NO: 25434 - protein, 238 aa, Oryza sativa
  Clone ID: TF_OsC91373_1.pep
MDRTSAVPGRVSDPGSAWFGGGERSSSAGPGRNVRLIATAVAAFVSVLGLALFLHLYVCHVRRRNRRRAAEAAALATANAGAPPKQVGLDPSAIAALPTAAYGKVAGGDAAGGTTECAICLGAMQEADAVRVLPACRHVFHVACIDKWLASSSSCPVCRAGVEPPPPPPSTAAARCVHEKQDAEKEEAAAGSSAPVRVLGASLMKMLSRERPSPRRQPGVHAVEMEDLESQLPRPQQQ

SEQ ID NO: 25435 - protein, 1119 aa, Oryza sativa
  Clone ID: TF_OsC4340_1.pep
MLAKLFKWEALNQRSVPYGMTMMDHHPPPPSPPRDSGGSLEVRLFYVRLSPRGPTPPPRLALALRSSRGGDEEEAPTPLSLPLRLDRRDPASGEATYVSTASARLPPPSAAFEVADHRGAALLRGSLRRCPDAKPDSSPAWAIDCIPAAGAEAETSAFEVYVAGCCAGEPAVLTCALRLATPEEQKAAGGLVRRRSPTSNAAGDEDVNGSIQHPEGWYSDDDDGQLTWFNAGVRVGVGIGLGVCVGVGASGFFSPPLPNPTTRRGGGGHRSHPPDATAADDDDAAMTGAAAWPVCTICYEDLRPLSDQHLHCLPACGHVFHALCLEQWLEYCPGGKKKLTCPICKQPCGAAHPPTRLFFQSTGACPTQTASSSPSRHEPTDGGADRDELAAEVARLEQKAASLGRVLDEQRDGIQKLNAEASAAAGPPNLGGSCVAMWREKAAEAEVMKESVRREKECVQHLLNAKTEELSRKSSECGRLQEKGLSLAKELAALKLSTDMNLQEEEILKLASLGNHGNAANAVDVLTRSLALRNKSYKELMIQCNVLGRSESRSQQRFEKAKELIKKLKARVQDLEKEQEEKENGVIRDLRSAKKFKADQTNSGNTTVNNGFSGLAAGCGDYPMKLDEVVQDPCDKPGPSPEAKNDLNIKDKMDDKHADVIDLDADDSVFQHEHKKGLSAKPFGNDATRMAPGTGPQQVHNFNSLSDDFQIPIRNLGGEGTGKSVGKWCKGVATPGSLNTNANKRNLIAVGPDGRGGKDSKTQALWPKAQKVGSRAIVPSLGEVAVALRRKAAEMASTAAAASSQGCISWALRQRGLGGGGARAVPVLPRRRFCVSAAAGAGFDNENREYVIVGGGNAAGYAARTFVEHGMADGRLCIVSKEAYPPYERPALTKGYLFPPDKKPARLPGFHTCVGSGGQRQTAEWYKENGIEVLYEDPVVAFDGKTHTLKTSSGKILKYGSLIISTGCEASRLPAKIGGNLPGVHYIRDVADADSLVSSLGKAKKTVVMGGGHSQIALKPVPFELFPLSASIAAADHSKGSVLSSPAEGGGDGFHGRGGVVAGVHLVGAAGAWAWWWWCAGCPGASPWECLRLSGGGYGGSKGYSRVCCRWWRHQGWLP

SEQ ID NO: 25436 - protein, 376 aa, Oryza sativa
  Clone ID: TF_OsC339987_2.pep
MCCHSHPDLTGLLLLVSCSLHRRRPGQQLSTMARKLRGQAASSGTQNSNGLSNSSLELPSEHHFLAARTGMNGFAPTGYQQPPPPPAASASPGGWIASTAIFMSIFFSTFLLAMAVSVYCCLLCRDRVRSDRDDTGAAAERARGGGTVAPLPVEALPPAYPYVVGSSEDGGATAASGGGGRECAVCLGAVREGEMVRRLPACEHVYHADCIDRWLAAHRTCPLCRRELDPGKNPPDQLPRAHPPSPATRRAEVDEEVGRRHRARPPKVLVTEPPLLLVTEPRRCRSSSSATSHPPAPQDPPSRESALRVPSRRIRRLQALPLSVPPSARLVATGSAASRVTEAPPVDQATARHELHRRSSRGPAGGRMERWRKEGE

SEQ ID NO: 25437 - protein, 190 aa, Oryza sativa; identical to SEQ ID NO: 18501
  Clone ID: TF_OsC339987_5.pep

SEQ ID NO: 25438 - protein, 155 aa, Oryza sativa; identical to SEQ ID NO: 18502
  Clone ID: TF_OsC99948_1.pep

SEQ ID NO: 25439 - protein, 701 aa, Oryza sativa
  Clone ID: TF_OsC1548_1.pep
MAEHLASIFGTEKDKVNCPFYFKIGACRHGDRCSCLHNRPTISPTVVFANMYQRPDMITPGVDAQGQPIDPRQMQEHFEDFYEDIFEELSKFGEIENLNVCDNLADHMIGNVYVQFREEDQAAAAHTALQGRFYSGRPIIVDFSPVTDFREATCRQYEENSCNRESHNEAGAAAQAQAHAIGGSDMIVMTIEDVTITLVVVEGGVEAADMKGMMMEEGVGTVVALQGVRGVQSGRAARSAGPRSNSGIVKGTKSRGDRLCPSLARACDRTAMRRLTKRLLPSFRGAGRACHRRMARYRQAGTGTPGGGGGFLLICSTGDALFDETEFTFGKVEIFNTMHSCFKFSNDLGNQLKTIFFKKENKGGMQGKSKSMYNPCMSTTSMNQYVSHTQSFGLPSNQVVLGSMDEESAQHGNYAFPTSHISQCFQPTSNTWISQSANGIADGIPQWEYVNGMNNAPGMTETVNGSFREYQNGPSTLCRGPLPYFHQHAGMHAHNLLDHTQVQAPYQQCHNNPVLHGVNHSGNRFHLGPRIPVLFSNSERTFGPPHHPLLANPVNHRNIRILPPEHATIMDFSRLYEVSNVVDEHRDMRLDIDSMTYEELLALEEQIGDVNTGLAKSYIVEKLKTSLFVPGSSCMSNKSSESSMENDACIICQEEYQVKECIGTLDCGHRYHEDCIKQWLMVKNLCPICKTTALSTGRRSG

SEQ ID NO: 25440 - protein, 562 aa, Oryza sativa; identical to SEQ ID NO: 18471
  Clone ID: TF_OsC12376_1.pep

SEQ ID NO: 25441 - protein, 285 aa, Oryza sativa; identical to SEQ ID NO: 18473
  Clone ID: TF_OsC50914_1.pep

SEQ ID NO: 25442 - protein, 1506 aa, Oryza sativa
  unsure (1)..(1506): unsure at all Xaa locations
  Clone ID: TF_OsC389823_1.pep
THEALLCRIILALGKPETIANVFSFISLGGFDSGFRDREDFYYWXLHFAQAIEKKPRFVTKXTAKIMENEAKLDLLLKKMEKTERKREEGEKRQAXEMRLFKEAVESWIPAVEKKVDVLQSTVDLLQMQVNQLESSSANKTEQTTPAGTLDSPGVRPNGSTGLDGHRVQILNREEAEGFTPKPIPANGTYASHNVSPIPFHLDASAMNSFQSALSVGMTGGVAPMTCPKFDGDNPIMWKSNCEAYFDVYGIHPGNWVKVATLNFTGNAAFWLQAVRSQLEGVTWSELCEKICTRFNKDRQQALIRQWIKICQTGSVADYVEQFDCIMHQMMAYDPSLKPVYFVTKFVEGLRHAIRSAILLQRLGDLNVACTLALLQEEALEGDKPKESKKSDGYQKQSVKGAMPLPLPPTTKGGPPIISNDRRGTELSNHSREYDRLSALKSYRRSKGLCFVYGEKWGRDHKCASSIQLHVVQELLDVLQGSSQSEQAVSEPPESDTLMAISXQAINGTDSNHSIRLRGWVQGIEVLMLIDSGSTHSFVYQQIGLKLSGVKAMPVLARVKVADGGFLTCSLHIIDCDWLTQGIHFKSNFRLLALGAYDVILEMDWLERFSPMRVDWVHKWLEFQLNDSMVRLQDTLIPXSKPVFIRPYRHTPGHKDEIERQVQEMLQNGVIQHSSSAFSSPALLVKKKVGSWRVCIDYRQLNNITQKGTYPMPVIDELLDELAGARYFSKLDLRAGYHQIRMAEGEEHKTAFQTHSGHYEYKVMSFGLTGAPGTFQGAMNDTLSPVLRKCALVFFDDILIYSPDLPTHLTHLRQVLQLLSNHQWKVKLSKCAFAQEHISYLGHIISGAGVAKDPSKIQSIVDWVRPTTIKKLRGFLGLAGYYRKFIKNFGAISKPLTQLLKKDAPFNWTAEVEQAFQLLKQSLVSAPVLALPDFQQPFTLETDASDLGIGAVLSQNQHPIAYVSKPLGPRTQGLSTYEKECLAIMMVVDHWRPYLQFQEFLILTDHHSLMHLAEQRLNTPWQHKAFTKLLGLQYKIVYRKGKHNVAADALSRNVPAEVSEFLALSECSPVWLQDIIXGYDQDPVSVKLLTELAVNPASHPQYKLHKGLLKHKGRVWVGNNSSMQQQIISALHDSPMGGHLGFPVTYHRIKSLFSWPHMKDTIQQQLNACSICLQSKPDRAKYPGLLQPLPVPDGAWQIISMDFIEAMDVAKVFMLNVYKLHGLPQAIISDRDKIFTSTLWEQLFIRSGTKLHLSSAYHPQTDGQTERVNXCLEIFLRCFVHATPSKWSEWLHLAEFWYNCSYHSSLYKSPFXEVLYGYPPTHFGIREDACSIPDLAQWLSERKLMAQLLKQHLNRARQVMKYQADKKRSFQEFXVGDWVFLKLQPYVQSSVAKRANHKLSFKYYGPYQIIAKVGQVAYKLQLPLDCAVHPVFHVSQLKGSCGFKHPVQSQLPGPTSSIQFPVQVLDTRLHKKDEATWEDEANLRQRFPAALTWGQVRASIICMSTT

SEQ ID NO: 25443 - protein, 83 aa, Oryza sativa
  Clone ID: TF_OsC388462_1.pep
QHVQRRRRWVAGVVPASSTAVAAALQEAVSSEARERECAVCFEDFEEGEMLARMPCSHCFHGSCISDWLRVSHLCPLCRFPPH

SEQ ID NO: 25444 - protein, 114 aa, Oryza sativa
  Clone ID: TF_OsC82536_1.pep
FIFENRIYNKTIINNCLTKKKKETAKKADDDLEHIPTELQEYSMTSVTEGIDAIATTRVVVTGDVSDSKHALTGHSFNRAFSGSGGALDIVVSSVRAYLSAHEQDVQFCWGYQG

SEQ ID NO: 25445 - protein, 323 aa, Oryza sativa; identical to SEQ ID NO: 18472
  Clone ID: TF_OsC200748_1.pep

SEQ ID NO: 25446 - protein, 407 aa, Oryza sativa
  Clone ID: TF_OsC72063_1.pep
MAVPPVESETRSEETDNFPLLADHMENTGHHAHAVDIPWDSSPSTSRRDNHNGFDQLPRILEGSPGTSTPSNSQNGPLARRDDNRGRRQPSPLNSGCWISVELVVNVSQIIAAICVLSVSRNEHPHSPLFEWVIGYTVGCTATLPHLYWRYLHRNLPTTGQEPTVQNIPPNNTPEANSYGVTGTNGVSRNNEATVNPRFQAFADHFKMALDCFFAVWFVVGNVWVFGGHSSAHDAPNLYRLCIAFLTFSCIGYAMPFILCALICCCLPCIISILGFREDLNQNRGASAETINALGTCKFKSKKTRDGDGNEVGVGVVAAGTNKERVISAEDAVCCICLARYVDNDDLRELPCAHFFHKDCVDKWLKINALCPLCKAEIDGVSTSAPAIGFGRRHSDNRVGNDIESQL

SEQ ID NO: 25447 - protein, 252 aa, Oryza sativa
  unsure (1)..(252): unsure at all Xaa locations
  Clone ID: TF_OsC38650_1.pep
MGGFCCCLCTDDFEEYAHPNNPIYRQGVCLRNFFHNFFGGYTATFQRLESRPSNPAQGAAPLASTNPSTNITDNSLSETYHLVSRPPPYDTDPRYARVQREGLVSRREKSINLTQEESLALRRNGSSSGIEHLAAQKKWSSTEPEGEYKVHRSESTKSLSAKSYNSSFAVVTSEDEDVCPTCLEEYTPDNPKIIAKCSHHYHLSCIYEWMERSDTCPICGKEMEFCETPXEISRWLYQWKAKDLQCDMLESL

SEQ ID NO: 25448 - protein, 231 aa, Oryza sativa; identical to SEQ ID NO: 18379
  Clone ID: TF_OsC341901_1.pep

SEQ ID NO: 25449 - protein, 338 aa, Oryza sativa
  unsure (1)..(338): unsure at all Xaa locations
  Clone ID: TF_OsC8961_1.pep
MAEEAAAGGLYYCHMCASTVSAVAAAEGEVEIKCPYCHSGFVEEIESARGVATGGGGAISSVWAPIIDGMVGGGGGDAVRRHRRSRRLADAAGADDGYYRDLALLDFSESRRRTAALLLLMQEFRERQLQRLESATATISAAAAEAGAVVGTSRDAEGVALADYFLGPGLDALMQRVGDGDAGRQGTLPAKKEAVESMPTVEVAAGGDCDSACAVCLEDYAAGERATEMPCRHRFHAKCIVPWLKMHSSCPVCRFQLPTDDDDDSSKSARGGAAHSGGGRRLSQPSPXVDGGGLGRLPAVKRYICSGFYHAEILQHFYLNRVSNFTLYLTAVSFAQYI

SEQ ID NO: 25450 - protein, 266 aa, Oryza sativa
  Clone ID: TF_OsC101000_1.pep
MELESEQHGCEHYTRGCRIRAPCCGEVFGCRHCHNEAKNSLEIHLNDRHEIPRHEIKKVICSLCDKEQDVQQYCSGCGACMGKYFCEKCNFFDDDVSKNQYHCDGCGICRTGGVDKFFHCDKCGCCYSNVLRDSHHCVEGAMHHNCPVCFEYLFDSTKDISVLHCGHTIHLECLNVMRAHHHFACPVCSRSACDMSDAWKKLDEEVAATPMPEFYQKKMIWILCNDCGATSNVNFHVLAQKCPGCSSYNTRETRGCGRPAAARSTV

SEQ ID NO: 25451 - protein, 179 aa, Oryza sativa
  Clone ID: TF_OsC49416_1.pep
LISGFLLVNRMQVYADGTTALPEWEREASIRQFYGVIFPSLLQLPSGITELDDRKQRRLCLQKFRKVEERVSEVDLERELECGICLEVNAKIVLPDCAHSLCMRCFEDWNTKSKSCPFCRACLKKVNPSSLWLYTDDRDVVDMDTLTRENIRRLFMFISKLPLVVLHVVDLDIYEYRIK

SEQ ID NO: 25452 - protein, 128 aa, Oryza sativa
  Clone ID: TF_OsC2447_2.pep
IISSLFSGRIVWEKVSPALQRAVQSQMSLLSTPFIDTNDLFETGNTGGMSRDLINRIPKTTFSAATNPDQETDNCCAVCLQDFGASQFVRVLPHCQHTFHARCIDNWLFRHASCPLCRAGVHIDHIHM

SEQ ID NO: 25453 - protein, 373 aa, Oryza sativa
  Clone ID: TF_OsC76986_2.pep
MASLPPPAPPAIGGDPLAATIPPSLPSPAPSSSSLNLSPSLLIITALLAFVFFASVSIHFLLRCLARPSHPAPSPLPRASAAAQRATTASAVEAGEATAASAVGRSQGGGGGGGGGGGGDDEKERLVASLPVFTMASALAALPKSSPDCAVCLSPFAPEAELRLLPACRHAFHASCVDAWLRTTPSCPLCRATVSLPHPPLPTAAAAAASNAAQQDPLDSRSSNNSRSFRVEIGSISNRRSSAAADDRRTYSLGSFDYRVDEEVEAVVSRIARPAAAKSTTGSVTPAPGEALAEAAGSRGWLREYVDRLASSASSLSGRWSGRWSARWSQSHHSNRQEDSWRWDPEAAVMSAPRGVDDDEPGFVTLYRWIVGV

SEQ ID NO: 25454 - protein, 77 aa, Oryza sativa
  Clone ID: TF_OsC64502_1.pep
MERSCQAKEPGNYFTYFSPSAEDEDVCPTCLEDYTSENPRIVMQCSHHFHLGCIYEWMERSEACPVCGKKMEFDETT

SEQ ID NO: 25455 - protein, 382 aa, Oryza sativa
  Clone ID: TF_OsC2127_2.pep
MRGGGGGDAGTSSRGGGSGGAPARPRRFPEAAQPEIMRAAEKDDGYAAHVTEACRDAFRHLFGTRVAVAYQNEIKLLGQSLYYLLTTGSGQQTLGEEYCDISQVATSHGLPPTPARRILFILYQTTVPYLAERISSRIVARGIALEDSQLDDHSESDSSSIGTAAQPSPIRNSPSRSLSFSHLSRLRGRVHTLWEWVLRKWPSMLPFAQDFIQLTIRTNLMFFYFEGLYYHLPKRAAGIRYVFIGKPLNQRPRYQILGIFLLIQLCILGAERLRRSRGVPVLNEDGNIISDIRHGKTADLATSSELLRLSVSSTSCYATEFYLKKKATKHPVVRANAPFVSVPVRIPLPQPVAMSSAGVALWSGVMRSLNAPYAELRLHIRV

SEQ ID NO: 25456 - protein, 146 aa, Oryza sativa
  unsure (1)..(146): unsure at all Xaa locations
  Clone ID: TF_OsC2127_9.pep
IGKPLNQRPXYQILGIFLXVQVCILGAERLPRSNLSTIASSINQISSGGYPSSTRPGVPVLNEDGNIISDIRHGKTADLATSSEASSGKSKCTLCLSTRQNPTATTCGHVFCWSCIMEWCNEKPECPLCRTPITHSSLICIYHSDF

SEQ ID NO: 25457 - protein, 155 aa, Oryza sativa
  Clone ID: TF_OsC392272_1.pep
SPEHGDHRTIAAAPRHVQEAAGSHGSGRGLALYFGAPPALPEADRRTIAAAPPEGYSNGRFGSVPACSEAIAALEETSAGEAKEKDCSVCLEAFEEESDKPMRKMPCCHAFHESCIFEWLQVSRLCPLCRFALPTQAEAEAGLWPLPTPGSGSGT

SEQ ID NO: 25458 - protein, 200 aa, Oryza sativa; identical to SEQ ID NO: 18493
  Clone ID: TF_OsC48373_1.pep

SEQ ID NO: 25459 - protein, 717 aa, Oryza sativa
  Clone ID: TF_OsC91370_1.pep
MAFGREKGIQGNTMRESRAIEGPHVLRQTLSNGCNCSTKLFMAVKEAGGPNAKAGCSIVVLEKQSWRKEEKEMETRGVRKRQLRRTFHGGGGRLTRGADVDESHAAHESRRGANGRICLRGGGHVRGISAPCAETGLRKVEDSGRSISTTGFLRRGSSVSLKDQGNEERPNKTKLNPMNARWADSKEKPRYLREPFRSSGTKAACPSSSKAPVRKYFEEKQGRTFLGEADNAESSSRRTEANRLQCSKKAVVEEDVHPYGQQDEPEDLLSTSTTEDQPAELDPELLDSSVSSGVSAHAIGSVVRNAALRSKSRQQKGKEELCQIRPQTASAFVNRSTIPRNSTNGVKSSNAAGPGVQRRTLKNLGCTSISDVLPSGCSSANSIHNKRAEVMRNRAFDGESSSRPRGLNGHSSLGHSPAMYSGITGPRVRTAEQSASQQTRTSSRSIQESADSSRIRRPSTQHARVRVPNEREDSVFALRETLARDRQPEWAHFSLGEAAPRRSMRPFSMELPHEIYSSSRQGSSNQTARSRSSYRPDESPPQMFHGLLVERENYRRINMEGIAEVLLALDRIEQDDELTYEQLLVLETNLFLSGLGLHDQHRDMRMDIDNMSYEELLALEERIGSVSTALSDEQLVKCLKRNVYKLPNSDLEANRAVLDDAKCSICQEEYIEGEEVGRMQCEHQYHVSCIHEWLRQKNWCPICKTSAIPSEMDKGGT

SEQ ID NO: 25460 - protein, 501 aa, Oryza sativa; identical to SEQ ID NO: 18497
  Clone ID: TF_OsC4561_1.pep

SEQ ID NO: 25461 - protein, 502 aa, Oryza sativa; identical to SEQ ID NO: 18498
  Clone ID: TF_OsC49241_2.pep

SEQ ID NO: 25462 - protein, 181 aa, Oryza sativa
  Clone ID: TF_OsC280106_1.pep
MEILVSALLLLLVPPLSALLAVAAPSLAWPSGSSSVRKLIAKKVAPEQAARDELLRVARYSSASAAAAASAVQQPGGGESSRPAAAAADDGGRPDQCAVCLSDIEEGDEVRELRCRHLFHRGCLDRWWLSARPPATCPLCRCRLLQSPSAAADDGDGDGEEDSDSDMVMFMAYLRSSSTWL

SEQ ID NO: 25463 - protein, 271 aa, Oryza sativa; identical to SEQ ID NO: 18509
  Clone ID: TF_OsC180148_1.pep

SEQ ID NO: 25464 - protein, 179 aa, Oryza sativa
  Clone ID: TF_LIB3599-059-Q6-K1-A9.pep
HASAHASARRADASASRPHPSPVDFDADFPSDFDRPIEHSRSGLEPLAVAAIPTMKYNCEAFHSEDDTQMFCCNRCSICLSEYKEKDILRIVPICHHNFHLYCLDAWLLKQTTCPICRISLKELPDGKSTVSSAPTMSQPPTLPESSVNPTSHFLPVHQEHRSHQDGPDMPESVEVVIE

SEQ ID NO: 25465 - protein, 202 aa, Oryza sativa; identical to SEQ ID NO: 18513
  Clone ID: TF_OsC120717_1.pep

SEQ ID NO: 25466 - protein, 178 aa, Oryza sativa; identical to SEQ ID NO: 18515
  Clone ID: TF_OsC344717_1.pep

SEQ ID NO: 25467 - protein, 115 aa, Oryza sativa; identical to SEQ ID NO: 18514
  Clone ID: TF_OsC4737_1.pep

SEQ ID NO: 25468 - protein, 423 aa, Oryza sativa; identical to SEQ ID NO: 17204
  Clone ID: TF_OsC359_7750.pep

SEQ ID NO: 25469 - protein, 260 aa, Oryza sativa
  Clone ID: TF_OsC335815_1.pep
MPSSSSSSVAAAPSGSNGTRRDGGSGSVTGCLPADQACFALSSSASSPGYLHASATTTRRDASATVARACCTTASYVVVLGISFGSLLAILLILCIIRWYLVWRSARPRRDDGAADEAVGSAKKRSAGLDDDAIAALPVFAYKQREEGGGGAVGAAEEEEEERECAVCLPVMADGEAARRLPRCMHVFHRGCVDVWLREHSTCPVCRAEVVVRPAGAARVEKLPESSASRALTSPVPAPAPRPTGTVVDDGRERDLEAQQ

SEQ ID NO: 25470 - protein, 474 aa, Oryza sativa; identical to SEQ ID NO: 18516
  Clone ID: TF_OsC164176_1.pep

SEQ ID NO: 25471 - protein, 188 aa, Oryza sativa; identical to SEQ ID NO: 18518
  Clone ID: TF_OsC18246_2.pep

SEQ ID NO: 25472 - protein, 293 aa, Oryza sativa
  Clone ID: TF_OsC394647_2.pep
MAATHPGSSREHASAAAMTLCLARWQGGGNDHSGSTWRGGNGEEETSAAARCGAEAVAVATMLGGGDEAMTVAAQRQEEVTALAAVASWRSQRHEVKADGEQAAGEENQAAGVLEHIPGPGEPGNSIVQERVIISNPMNTLLFLHIYTGGKASSAGGDVSAAVVSSMATSRGGERSHRHIGQVRCECSHMSMHSTWNRCLHDGISRTISPACSSSRHIEHGSPFPASRSPPPLSPYATRRAMGAYMVTHGKNLWSQHAFQVTADLESGLYECECKTWITQAAHMLRGCSAISR

SEQ ID NO: 25473 - protein, 303 aa, Oryza sativa
  Clone ID: TF_OsC147962_1.pep
EIDPHRAAAAAAAAAAVAMSSSSSSLLSSLATLGLGYSIAIALGFLVLLASLLLASYFCFRRGGGGGHFSGVLTPSSSSSHLSITVPRVLFVAEGSESPDAYSSGVAAASSPVGLDPAAIASYPKVPFYSGAGADADAMCSICLSEYADGEMLRVMPDCRHRFHVCCLDAWLRRNASCPVCRSSPIPTPVATPLATPLSELVPLSQYAADRRRSRGLCLGYLEKFGRCKTTTRDHALGENRSLVTCLGKRRGQGELAVVIVAATEVALPLHVADEVVSPLQVATAKIRRCQWPLDCREKGAGG

SEQ ID NO: 25474 - protein, 197 aa, Oryza sativa; identical to SEQ ID NO: 18520
  Clone ID: TF_OsC401067_1.pep

SEQ ID NO: 25475 - protein, 572 aa, Oryza sativa
  unsure (1)..(572): unsure at all Xaa locations
  Clone ID: TF_OsC337609_1.pep
MAMGGIRCPVCFAAMAAGQAIFTAECSHTFHLRCVPGGAAACPVCATPWRDAPSPLTTSSIPAAYDDDDPVEPVATAARNSSGGGGGVLVLKTHCEYPALSRGAARDGFAVLVHAKAPAAAAEAAGRAPLDLVTVLDVSTSMTGDKLALVKRAMGFVIDSLGAADXRLSVVAFATPXARRVLPRLRLTRMSEDGKATAKRAVDALVANGNTNIRDGLDVDAKVLDGRRHTDAVASVILLSDGQDNQTMGYRGRFHMTDFKAAATSYDVLVPPSFTRAGGGERCAPVHAFGFGTDHDAAAMHSISEITGGTFSFIENLAVIQDTFARCIGGLLSVAAQNARISVECLDPGVRVRAVKSGRYESRIDAEGRAATVDVGELYADEERRFLLLLDVPRADGDAAVATRLASVRCTYRDTATEQSVDVAGEEDAVVLRPAVATGVAPSMEVELERERVRLEAADDIALARAAAERGAYGEAARILDARREALSRSAPAASGDAMCAALVAELRELSERVADEREYAQTGRACVLAGMSSHGQQRASSVQLGELRVRVFVRVRDTGDAEDGEALGDFA

SEQ ID NO: 25476 - protein, 252 aa, Oryza sativa
  Clone ID: TF_OsC4182_1.pep
MFHGGRPLSLRGSLKALEADIHHANTLAHAIHRAYGGACVQMRLSYSSMAPIILNLIQWMDCSCSLSYTLPSYLGLLEVLVYKVYVDEDASISTNIERRASLKEFYAVIYPFLQQLEGNLMEKDCNEKGWCKEAASGGGGRKLYADDKDDEREDECGICLETCTKMVLPNCNHAMCINCYRDWYTRSQSCPFCRGSLKRVRSRDLWVLTGDDDVIDTVTLEKENVRHFHSFIDSLPLIVPDNLLLVYYDYLV

SEQ ID NO: 25477 - protein, 102 aa, Oryza sativa
  Clone ID: TF_OsC42947_1.pep
AAAAGGPSLADRFRSRFRPARFGRRRGGGAGAADCRVCLARFEPESVVNRLPCGHLFHRACLEKWLDYDHATCPLCRHRLLPATTESPSPSPATATPHFARI

SEQ ID NO: 25478 - protein, 123 aa, Oryza sativa
  Clone ID: TF_OsC60386_1.pep
MEGSEELENYFIFNDRYRGMRMDIDGMSYEELLALGDRIGTVSTGLSEDALSKCLDRSMYMATTSGTHEDCERKCSICQEEYSDGEEVGKMVCKHYYHFSCIKNWLRQKNWCPICKSVALNTN

SEQ ID NO: 25479 - protein, 437 aa, Oryza sativa
  Clone ID: TF_OsC240623_1.pep
GCRFRTRVSLPLPTGHHRRSPSIPRAIAASSLVLPLPPHPGEHILRHRCLLRSPFIARASTASSLVLPLPPHPGEHILRHRRLLRSPSIARASEGRRRSSCCFRRIDKMPNRATHWCYACRRPIRVSGQDITCPNCNDGFIQEISEIGGSLNTYGIFDPSFDERRDRSFGMVEAMSDLMRQRMAEMGRNRVLDFHGTRGASSHQGRQPTVRPMLIFGSNAPDRVSSSSEEADILLRQGRRIGADRPNFSRFLVGPSLEALFEQLLLHNNRQGPPPAPQSAIDSMPVVKINLRHLRDDPHCPVCTDKFEVGTEAREMPCKHLYHAECIIPWLVQHNSCPVCRHPLPSSSHRSGSTRSSSTHSNEAISHGVARSDADPVPVARSDDSRNHEMHGSFSFLWPFDSPTPDSSSYTHEGGVGEPTVHDDAGQMTYSEWHYDY

SEQ ID NO: 25480 - protein, 261 aa, Oryza sativa; identical to SEQ ID NO: 18477
  Clone ID: TF_OsC47412_1.pep

SEQ ID NO: 25481 - protein, 163 aa, Oryza sativa
  unsure (1)..(163): unsure at all Xaa locations
  Clone ID: TF_OsC2423_4.pep
MECGIKKEMLQVLPVLVXRPPTRARETRVSVCLADYQPDERLQRIPPCGHTFHIDCIDHWLSTNTTCPLCRVSLLPSPKTASIDPVDLEAQTVEENSSLDVQYQEGRIDENTRQEDQTLQQGSEGPTHQAEENEETSVRVTTEPQVEAEGSPSTTCRPCKTKK

SEQ ID NO: 25482 - protein, 246 aa, Oryza sativa; identical to SEQ ID NO: 18481
  Clone ID: TF_OsC355955_4.pep

SEQ ID NO: 25483 - protein, 403 aa, Oryza sativa
  Clone ID: TF_OsC7776_1.pep
MHASRMEQTTGVSGHEHIIDIPRDSGPSTSTSHSVARENHGEPNPVDRSATRALVPALQAPSAVGAPSAGHTSGARRSDNYVRRHRSPLNSGLWISIEVLVNVSQIVAAIVVLSLSRKEHPQAPLFEWVIGYTVGCFATLPHLYWRYIHRNIVNGENEPAHTLQGSSQNNSTEPSASASERRRNAARNAVLANPRINALFDHFKMALDCFFAVWFVVGNVWIFGGRSSAADAPNLYRLCIVFLTFSCIGYAMPFILCAMICCCLPCIISVMGFREDTNNTRGATSESINSLPTYKFKTKKRRHSSGNEAEGQDGGIVAAGTDKERSLSAEDAVCCICLAKYAHNDELRELPCTHCFHKECVDKWLKINALCPLCKSEIASSSGTSDTRRSDHTDIPVQEIEMH

SEQ ID NO: 25484 - protein, 439 aa, Oryza sativa
  Clone ID: TF_OsC62963_1.pep
MGAREEVREEEGEEGEGVGGKEEEKAAAAAAAVSCSICLDAVVAAGGERSTARLQCGHEFHLDCIGSAFNAKGVMQCPNCRKIEKGNWLYANGSRPTQDVNMDEWAHDEDLYDVSYSEMPFRFHWCPFGRLAQLPSFFEEGESSPPVTFHDFMGQHMFTEHVAAVSSAPGAAHPCPYVAYLHPLPSLASSSSSHVPERTMDGPAYHDPWHPLAGPSDGRPLQSVQPADFHHNHWAHVPNSYPQPNNNNGVAEQQGVPFGTTRAARVDGDTQRRGSSISPSYFSNGSGSRSRAPNVPPMVPQFMRAHGSISEQYQQSSSSSLFAGAHRSGGMRTAPPPPLPENPAFCLFPPGSSGHNSMETDDAGGNRFYAWERDRFAPYPLMPVDCETNWWSSQQSHGTSEPAPAPRRLFGQWIGVGRSSPENRSPEGSSYRQMHTPRM

SEQ ID NO: 25485 - protein, 133 aa, Oryza sativa
  Clone ID: TF_uC-osflcyp016a05b1.pep
LMSLGHYSMRVCFSGMAFYLRDAVLLLNLRALIASFWKRIKTYAKLRKALSSLDGALPDATYDEICAYDDECAICRGPMARAKKLSCNHLFHLACLRSWLDQGLMDGYSCPTCRRPFFLSSQGHTRSTAEVGN

SEQ ID NO: 25486 - protein, 521 aa, Oryza sativa; identical to SEQ ID NO: 18528
  Clone ID: TF_OsC260574_1.pep

SEQ ID NO: 25487 - protein, 156 aa, Oryza sativa
  Clone ID: TF_OsC32442_1.pep
MGGCCCSSTRSASVGAPVYIYHQQNPASTIVAIDKNLDTSTPDTYRAPPTPLPYDVGLVLKDNPDLEKTGIKRKIHEHKESLMMDDNESLQKCVSEDKPDEEDVCPICLEEYDEENPRSMTKCEHHFHLCCILEWMERSETCPVCDQITMINAMYE

SEQ ID NO: 25488 - protein, 156 aa, Oryza sativa
  Clone ID: TF_OsC30400_3.pep
MYRPGSRTLLTQEEAHEIIRERLRSDIRRGRIELDADFLQQLVDQVRDHILQRQRRGTATAIAMDGVVEVEDAYRNGGFGAVPASSKAMAELQEAMASDARERGCAVCLEDFEAGEKLTRMPCSHCFHATCILDWLRLSHRCPLCRFPMPTQDQSY

SEQ ID NO: 25489 - protein, 342 aa, Oryza sativa
  unsure (1)..(342): unsure at all Xaa locations
  Clone ID: TF_OsC863_1.pep
HRRIALAVLVTLLLSAFRPCLAQQSNDDTSKHHRSATAGGFTPTTVVVLVALITAFVLLTVFSVLINRCAQARAPPRRAFRSTASHQPVGGAAAXSRASRGLDKEVVEAFPTAVYGDVKARMAAKSGPLECAVCLAEFADSDELRVLPACCHVFHPDCIDPWLAAAVTCPLCRANLTAPPVSLAAAESSDLTAPEEAVQEEESEELDEASLMATFTPESVIDFGATHDHEFDRAGYPHYRRTQSAMDAAPDRHTLRLPEHVMKELAADRRHRRAASLAGYPDSVERTPRTWTHSATPDAAALAKFFIWHCRNRCSGKRKAKERCSGMNQTETRPAIADSSGG

SEQ ID NO: 25490 - protein, 353 aa, Oryza sativa; identical to SEQ ID NO: 18529
  Clone ID: TF_OsC863_3.pep

SEQ ID NO: 25491 - protein, 257 aa, Oryza sativa
  Clone ID: TF_OsC47750_1.pep
MEAVAVHASFSSYSPPVVAGGRDDAGSSRSMSRLPARVAGAVARGIVTFVFATVGTILGAITGGLIGLATESGMVRGTGIGAISGAVVAMEVVDSSVAMWCSHDSGIWSVLYVLDVIWSLLTGRLVREKVDPAVQNAVDSQMNAADAPFRESAPTLAEMFDTGIPGVAAAATGMPADAIAALPVTTFAAAAGGDDRAGCSVCLQDLEDGERARRLPECGHTFHLRCIDSWLLRHASCPLCRRTVVAAAVAVDDVVVG

SEQ ID NO: 25492 - protein, 158 aa, Oryza sativa; identical to SEQ ID NO: 18537
  Clone ID: TF_OsC400246_1.pep

SEQ ID NO: 25493 - protein, 246 aa, Oryza sativa
  unsure (1)..(246): unsure at all Xaa locations
  Clone ID: TF_OsC50873_1.pep
RLGQARSVVPSDSVFPEVELAEDDAVVCSRVTPDGGGEVVAWCKIRRGGDVSAATIWNLSLDAIIVDGRVIQQEAVDIKPGSEIVPGPQKDGYLLYTFDITGLNDXDKNNIKIVLGIENAKCSICLNLWHDVVTVASCLHNFCNGCFFEWLRRSSANSRDKSQSAACPQCRTAVQSVGGNHFLHNIEEAILQVFSSLQRSDEEIALLESYAPVKTNIVRHAFIPFPWSYAGAMILRSTMGINISRG

SEQ ID NO: 25494 - protein, 255 aa, Oryza sativa; identical to SEQ ID NO: 18539
  Clone ID: TF_OsC105470_1.pep

SEQ ID NO: 25495 - protein, 568 aa, Oryza sativa
  Clone ID: TF_OsC3910_2.pep
MIRRGILFSMGLVGFLFWRSTVSLTFGVAPGLAILALGVLSLKVWRSGKSSLPFILAQAAVAAAVAWKHFQAYTTPVAGSPAAAAEMIRLQTYAAFSLMATATAVYYAFSSREQFYPAMVYLSTSKICFVLLLNTGLVAMCVAWQLVKRLFLGTLREAEVERLNEQAWREVVEILFAVTIFRQDFSVSFLAMVAALLLVKALHWLAQKRVEYIETTPSVPMLSHARIVSFMLFLLVVDCLFLSNSAQVAHTQAGRRLLQSSFSFGDMLMEGQWEKKAVYTFYLELISDLVHLSLYMLFFIAIFLNYGVPLHLIRELYETFRNFRIRIADYVRYRKITSNMNERFPDATADELNASDATCIICREEMTTAKKLLCGHLFHVHCLRSWLERQHTCPTCRAPILPPDNGRTAARPHGVHPGVQPGNGTPGSERAAGENISRRQAKLEAAASAASLYGRSFAYPPANNLNRYSTPPQSTSNGPQSGEASTSNQSPKGHATADPSAPTFYARGAVSSVTTTRELESSLQKAYENAIKSQIERLMQAACKFLDMSVVNTSLTALKLHAWYEPLG

SEQ ID NO: 25496 - protein, 514 aa, Oryza sativa
  unsure (1)..(514): unsure at all Xaa locations
  Clone ID: TF_OsC59119_1.pep
MNCTKGGGFPLLFCAVICLMAQQGACNVVLIANNTTLSFDDVEATFTPEVKDSGVNGAIYAVEPLDACSPLRKKAANGPVSPFALVIRGGCQFDDKVRNAQNAGFKAVIVYDDEDSGVLVSSNFTVAGSSSGIYIYAVFLSKASGEVLKKYSGQSDVEVWILPVYENSAWSIMAISFTSLLAMAAVLATCFFVRRHQIRRDRGRIPVTREFHGMSSQLVKAMPSLIFTKVQEDNSTSSSCAICLEDYSFGEKLRVLPCRHKFHATCVDMWLTSWKTFCPVCKRDASAGTSKPPASESTPLLSSVIHLSAESTALSSFRSTVAVSPPRPIRRHPSSQSTSRAYSISSAPRNYNLQRYYTNSPYISTSRSNVDLANMSSQWSHTPHQASMHSLRSGHLSLPINIRYTIPHVSRSDYGSASLGLSHDSCSHHGSPSYYHSSLGQQRSYLMHRTESGPSLSTMVLQSPQXVSSSTMANQEKSISCGLTRSLRQAYVQHCLDSDGSLSAVTSDQSLPRC

SEQ ID NO: 25497 - protein, 129 aa, Oryza sativa
  Clone ID: TF_OsC273200_1.pep
CAVCLTEFRDGETLRLLPRCRHAFHRGCIDTWLRAHVNCPLCRAPVQISDKSAAAAAAAAANAAPGAAAAVPGGAPAPNPRNAAAAEADRGELQGSPERGVRRAASMVTLPRRPWPEVSLRSPASNSGR

SEQ ID NO: 25498 - protein, 76 aa, Oryza sativa
  unsure (1)..(76): unsure at all Xaa locations
  Clone ID: TF_OsC359_5960.pep
GGEETAETHVCAICLGEFADGEKVRVLXRCRHGFHVRCVDAWLVSHGSCPTCRRQVIGGGGSTPPPDSDTIAVVVA

SEQ ID NO: 25499 - protein, 107 aa, Oryza sativa
  Clone ID: TF_uC-osflcyp009g02b1.pep
FSRAAAKAVVESLPTVVVDAARGDTQCAVLQDGMEAGERARRLPCAHLYHDGCILPWLAIRNTCPLCRHELPTDDPEYENWKARRAAAGGNGDGDRYGIIRQLSMID

SEQ ID NO: 25500 - protein, 166 aa, Oryza sativa; identical to SEQ ID NO: 18546
  Clone ID: TF_OsC270054_1.pep

SEQ ID NO: 25501 - protein, 338 aa, Oryza sativa; identical to SEQ ID NO: 18549
  Clone ID: TF_OsC52635_1.pep

SEQ ID NO: 25502 - protein, 233 aa, Oryza sativa; identical to SEQ ID NO: 18550
  Clone ID: TF_OsC359_6976.pep

SEQ ID NO: 25503 - protein, 357 aa, Oryza sativa
  Clone ID: TF_OsC15014_1.pep
IFEIQSNDYPCYHLEGGWRNVRGRHDHSTIHLEQSPAAACPSSSINVPPYHPNANGPFGSAPVQRDRAPLSVHPRILPPGPDGSSIAFRERPYYPAPQSTNISAPVPTLPISCDSAPFAHGGYAPRSAHRNNLRTYPPPAFASSSNPGAVSHEPAIPSYPPAAPSYPPATSAASSSVQPFHAEAAAHLRHPRHVSVGGSGSARSRRMRDSYHGFHHLMIEDNNLGRSAAERFMMLDQLVIHESREAFDPHWDMRLDIDDMSYEELLALEERIGHVNTGLADEKISGCVMEVACCSSSHLQDDQDNERCVICLEEYKHEDTLGRLKCGHGFHCNCIKKWLQVKNTCPVCKAAAADEGS

SEQ ID NO: 25504 - protein, 192 aa, Oryza sativa
  Clone ID: TF_OsC72920_1.pep
MEVAAAEDALEESGVAVYLPRLLAGVISGALTGLFALAGALTGAVTGALAGRASDSGVLRGAGLGAFAGAVLSIEVLEASRAYWCSDRLGSHGTSSMVSISDFGHDDLYDIFGDCSSKGLSRESLNKLPHYVVTDQTRNSFGEDLSCTICLQDIVTGETARRLPNCSHTFHQPCVDKWLVGHGSCPVCRQCV

SEQ ID NO: 25505 - protein, 583 aa, Oryza sativa
  Clone ID: TF_OsC56795_1.pep
GAPCSAGSGGATSPGTTRRSRSGSARRRRRRRRGSRRSGPCGTTRGGSAGSRGSSTGRCTTYSVTARKNQSVNANYLLNFHYDPISRPQPRGPRTYPTRRQRKIRPYNKDLFLQANFKFVVLDTGSYEIELMDPDKMLQWEDIVCVRYYSPCEVQCPICLESPLCPQITSCGHIYCFPCILRYLLMGKEDYKGESWKKCPLCFMMISTKELYTIYITQVQHFHVGDNVTFTLLSRSKNSLTPSIKNLTDESTIDEDPCSAFSKFILTSDVELSVREAKTDLVNWLHMADLGLVDDLEKLPYVSTALEQLEERMKYWSEYKLLEYIKIDQSTTNSSGNGTQVTARKNQSVNANYLLNFHYDPISRPQPRGPRTYPTRRQRKIRPYNKDLFLQANFKFVVLDTGSYEIGVRDPDKMLQWEDIVCVRYYSPCEVQCPICLESPLCPQITSCGHIYCFPCILRYLLMGKEDYKGESWKKCPLCFMMISTKELYTIYITQVQHFHVGDNVTFTLLSRSKNSLTPSIKNLTDESTIDEDPCSAFSKFILTSDVELSVREAKTDLVNWLHMADGLVDDLEKLPYSTALEQ

SEQ ID NO: 25506 - protein, 465 aa, Oryza sativa
  unsure (1)..(465): unsure at all Xaa locations
  Clone ID: TF_OsC24423_1.pep
MATSGGEDPSGSASSSASALDSLPFSSGNPRIEETRGVVLLHPEPPAASSSSLLPVGRKPRVCVPGVPNHLTYADFGRFCASWASHILETRIIRIDGVEDQYGVLIKFDTQSFTDSFYMSFNGNRFSSLEGNVCRVRFVEDVHYTQLIEHAHSSVTSSAEQPTCPVCLERLDQDPGGILTTICNHSFHYSCMSKWADSSCPVCRYCQQEPEKSSCXVCGTSENLWICVICGHVGCGRYKGGHAIEHWKETQHCYSLGXRAAANYVHRLIQLETDGNLVEYNFYGDHSVDGMCSTCNGDAGISEALLDSKMEAIVEEYNDLVTSQLEKQRNYYESLLLEVKEDNEKEIAAATEKAVGIKVQKLQAKLDKCMEETGFLNDIHENLVKNMEMWRERIQKVKEREQAAIRLKDEKIEKLEEELRDLIAHFERQNTVAEASESMSSDINGSTILSVPSESSASSNSSIRN

SEQ ID NO: 25507 - protein, 418 aa, Oryza sativa; identical to SEQ ID NO: 18553
  Clone ID: TF_OsC158099_1.pep

SEQ ID NO: 25508 - protein, 339 aa, Oryza sativa
  Clone ID: TF_OsC359_8020.pep
MASSPVSYWCYHCSRFVRVSPSTVVCPECDGGFLEQFPQPPPRGGGGSGRRGAMNPVIVLRGGSLSGFELYYDDGSGDGLRPLPGDVSHLLMGSGFHRLLDQFSRLEAAAPRPPASKAAVESMPSVTVAGSGAHCAVCQEAFEPGASAREMPCKHVYHQDCILPWLSLRNSCPVCRRELPAAAAPESEADAGLTIWRLPRGGFAVGRFAGGPREQLPVVYTELDGGFSNGVGPRRVTWPEGDGHVDGGEVDNRVVFLLEFVPDEIKDSAFVSPDSIRRHRRGLAVPISEVDIRRLVLTYVVASVVPCMLTVVGSDKALSALGIPSRSFLRFLGVLISTC

SEQ ID NO: 25509 - protein, 383 aa, Oryza sativa; identical to SEQ ID NO: 18557
  Clone ID: TF_OsC299188_1.pep

SEQ ID NO: 25510 - protein, 705 aa, Oryza sativa
  Clone ID: TF_OsC84313_1.pep
MPQSFSLSAMGRRTWQWHAIAALGVACAAAAAVAADRRAFSVTSAAGGGAAAAAAVVAATPEEVGILRKVANFLWQTDGNSYHHVWPEMELGWQIVLGSLIGFFGAAFGSVGGVGGGGIFVPMLTLIIGFDPKSSTAISKCMIMGAAVSTVYYNLKLKHPTLDMPVIDYDLALLIQPMLMLGISIGVIFNVLFPDWLVTVLLIILFLGTSTKAFLKGVETWKKETIIKREAAKRLEQTSEEPEYAPLPTGPGAVADAKRPSDEAASLMKNIYWKEFGLLAFVWMAFLVLQVTKNYTATCSSWYWILNLLQLMFLFIPKKWKPLKITYSKSFTLYGIKIPVSVGVTMYEALGLMSGKRVLSSKGNEQTTLKFHQLCIYCFFGITAGVVGGLLGLGGGFIMGPLFLELGIPPQVSSATATFAMMFSSSMSVVEYYLLNRFPVPYALYFVIVAFIAAIIGQHVVRRLINWLGRASLIIFILAFMIFVSAISLGLSLEITGAKGEKRTFCVFLQGAMEPSSLSLRLKAAIYDLFNSNSLQTYVPFRIRHINGGGNPRPRQEDPGLTDAEFKKAMEQLNKQAYRSLDPHKMVESNRGGRNHAKSARSKPAPNNTEEEKACTICLETFLAGEQVVATPCNHIFHQECITPWVKGHGNCPVCRFALCERNTVSDNSQSGVGEVEVDLDLLEMMRAMEEIFSRVTFSNFMPYN

SEQ ID NO: 25511 - protein, 352 aa, Oryza sativa
  unsure (1)..(352): unsure at all Xaa locations
  Clone ID: TF_OsC170841_1.pep
MAGDRRGGGGVVSADGERRRGIRRLLLPRGEGSSSSSPPQPPPLQAEEGRRKGFASAALRGLGCTSAAASQAYAPGAGAAAAAAVRSSADWHGRRRRRGKEKRKERGGGGGGGGGGHLVGGGIGADVWCAPGIPFAAEASSVDCVVARHQMVGRGRGGDAERPHRERPCLSRRVTVQEQISSSFMDSPPPPHLDARRALXGADLLPSGRLRRMRGYRHSPVGLEEEIMMFQTRVLLGGMSMYDRYQDWRLDVDNMTYEELLELGDKIGYVNTGLREDEIVRNLRKVKHPAFDSSFRYSTEMEKKCSICQEEFEANEEMGRLDCGHSYHVYCIKQWLSQKNVCPVCKTAVTKT

SEQ ID NO: 25512 - protein, 320 aa, Oryza sativa; identical to SEQ ID NO: 18526
  Clone ID: TF_OsC16293_1.pep

SEQ ID NO: 25513 - protein, 167 aa, Oryza sativa; identical to SEQ ID NO: 18563
  Clone ID: TF_OsC32442_2.pep

SEQ ID NO: 25514 - protein, 326 aa, Oryza sativa
  Clone ID: TF_OsC87299_1.pep
MADGGGGGEAGSGGSAPVCSFVRKPPKNIRKRPTAPAGSDDDDEDGSGAIAAARAKKAPSSTSKLFFSSADGSSEPRRFQYESSRTIQASTDSRATATLETETEFDRDARAIRERQLKQAEESLKKNPSAPASSSGSGSGEVYKGIHGYTDYKAGFRREHTVSSEKAGGSHGPLRASAHIRLSARFDYQPDICKDYKETGYCGYGDSCKFMHDRGDYKSGWQIEKEWEEAEKARKRRIAMGGDGSDYEAGEEDDDDDEEALPFACYICREPFVDPVVTKCKHYFCEHCALKHHSKNKKCFVCNKPTLGIFNAAQEIRKKMAQDKKQ

SEQ ID NO: 25515 - protein, 215 aa, Oryza sativa
  unsure (1)..(215): unsure at all Xaa locations
  Clone ID: TF_OsC45498_1.pep
MVLMAGMLPGVECARRRRLRQGGGEAPCGTRRPSLCLTIVDQILNLQSPSXGIAIMLQQQRSACEEQQPGWWTLDSNVREAKERLDQKLRSQRESAVVVVKRHNKAQVAGTSSDGGEQSTATTAAPQWEVYTRKEGRRRMWFRRLGRRPTPEEEEECAVCLEELRAGEAVAHLPCTHRFHWGCAVPWVQTASRCPVCRAAVYLTSPAPAASNNYN

SEQ ID NO: 25516 - protein, 325 aa, Oryza sativa; identical to SEQ ID NO: 18566
  Clone ID: TF_OsC186358_1.pep

SEQ ID NO: 25517 - protein, 361 aa, Oryza sativa; identical to SEQ ID NO: 18571
  Clone ID: TF_OsC31425_1.pep

SEQ ID NO: 25518 - protein, 224 aa, Oryza sativa
  unsure (1)..(224): unsure at all Xaa locations
  Clone ID: TF_OsC108211_1.pep
GGPFPGSPRRPSRLSISPPVRRASNLPVASTASLGFGSLPPSCRHHGXXVPGRDVFVVMATVGAVDGVEVVSALIGQYYDGLALELVVFSLAIVVLRYAAVLYANHLVDSLSELQAAVGAGIGGSSSGGGLDSAAIARLPCFVLPPRRGGSAAAAAAECAVCLGAVEEGETVRALPCCPHAFHARCVDAWLRLRPTCPLCRADVPVPARPTAPRRRHVPRGTVE

SEQ ID NO: 25519 - protein, 119 aa, Oryza sativa
  Clone ID: TF_OsC108278_1.pep
HLVDSLSELQAAVGAGIGGSSSGGGLDSAAIARLPCFVLPPRREGSAAAAAAECAVCLGAVEEGETVRALPCCPHAFHARCVDAWLRLRPTCPLCRADVPVPARPTAPRRRHVPRGTVE

SEQ ID NO: 25520 - protein, 750 aa, Oryza sativa; identical to SEQ ID NO: 18570
  Clone ID: TF_OsC384049_1.pep

SEQ ID NO: 25521 - protein, 532 aa, Oryza sativa; identical to SEQ ID NO: 18575
  Clone ID: TF_OsC5813_1.pep

SEQ ID NO: 25522 - protein, 251 aa, Oryza sativa; identical to SEQ ID NO: 18577
  Clone ID: TF_OsC158582_1.pep

SEQ ID NO: 25523 - protein, 300 aa, Oryza sativa
  Clone ID: TF_OsC11064_1.pep
MDADEAAGSSRRMDLNLYLGLPRAPRPRRSDLGSDLALSTPMPSSPSFSAASVDAPPPPPELSHPPYSPSHADLSPPLQEVYSLYNPDDPPASETHLPPYAPPPAPVVSELPDDLEFGLHPPPPLPVTGGFSSRLEADGSVRGGLGRTFRHSVLKLTQLGVMLPQSQNGPSSLLPDGIDWLRGLTLLGYEDTERFASAMSDFRRITGPSQYGASASSSNPPNLESTFDRTHVVAAPSADQASNSSTAAVIQGDAGISESAGEPSNAGSSRSLRRRGRSSALGSLDADGGGLQRNKRRRIN

SEQ ID NO: 25524 - protein, 199 aa, Oryza sativa; identical to SEQ ID NO: 18580
  Clone ID: TF_OsC137168_1.pep

SEQ ID NO: 25525 - protein, 679 aa, Oryza sativa
  unsure (1)..(679): unsure at all Xaa locations
  Clone ID: TF_OsC25552_1.pep
MLGILIDVALRLDHSAMSEVILCVKDSLGVQLARSEFLSXALNGQNSSEDVIVALENHNDYLKEVVDNLRQAVSIINRKHEKYLDEIEAFKNNQSRELHEVKCLSGELEESMAELEESRRKLAVLQLQTGGGSLMNTSAPNGVNGSVSTDKSSDKGMGWRDLKDAVEEAKTLAANRLFELHETQEDNLILSKQLEDIQDQLKDENYIVTSKPYTILSDQLHHLNAEIERYRGLVEVLQAKIEDLEHEIQKLMAEKNDLEIKAEEALQDSGKKDFKDEIHVMAASXLQNERNQLLPKEEKMLAKAESVDAVQQSITTYKAKIEDLEHEIQKLXWLKRMNLEIKGLRKPGQDSGSKRQQGEDPSCERATHXREGIVGHSIEXRSKNAATEPLVLREKADYXEISNLRRKGHNGCNLXELMKLNESKRIKNAELDGRLSEIETIGQXHXDMQTLNQHHLKQVADRDDFNIKLVSDSVKMKQAYGSLLAEKNMLQKQLQHVNSSLESSKLKITSGEEQMKTYVAQAMKSSSENRHLAISLERTMLEVSDAEKELKWLRSATGSAEKEYEINQKKIAELKMELERERNERIKLEEEYEEVKNEVSELTSETEETTIQKLQDEIKECKAILKCGVCFDRPKEVVITKCFHLFCSPCIQRNLEIRHRKCPGCGTPFGQSDVREVKI

SEQ ID NO: 25526 - protein, 459 aa, Oryza sativa; identical to SEQ ID NO: 18582
  Clone ID: TF_OsC25552_2.pep

SEQ ID NO: 25527 - protein, 345 aa, Oryza sativa; identical to SEQ ID NO: 18585
  Clone ID: TF_OsC29049_1.pep

SEQ ID NO: 25528 - protein, 78 aa, Oryza sativa
  Clone ID: TF_LIB3433-011-Q6-K1-F4.pep
PATACAICKDDLPLAAPARRLPCGHLYHSECIVQWLEMRNSCPVCRSRLPSDEPQDAAAPSDPGPAPMRITIRLSTNR

SEQ ID NO: 25529 - protein, 455 aa, Oryza sativa
  Clone ID: TF_OsC13046_1.pep
MARHHGNHSLLPEMVQPNNEQLNQPLPLGQKLFVHAGNDAALKIGPSYHGNVAIRSNDLPSSSRVAQYSGHRVKNTGTLHNSYVHYPAGSSGGHVSYNPQTEPVITYPHRSEGEFARGSSQIDNRTAAVKRKNPVIYPEYSINGDGYCAGSSSSTQFSNYPQPAPFSESLHRQMPPSVGPINWNDQSLHMYLNDYVGASGMHSGEMPYTMGSSNSSVPVPTLQGSSSSAIFASGVFAPRHVHGDTVPSYIHLPSVASSSSTAIPHEVIIPSYQPATSATTSTPMRASQPLPVRAVASSRHARNVLIGHANSGRNRRARSSYYGIQPLMIDAQQLIMMQQFALRESREAQDPHRAMRLDIDNMSYEDLLALGESIGNVCTGLVDEKISGCVREVIYCSSDEQQNDQDDGKCAICLEEYKDNSLLGILKCNHDFHTDCVKKWLKEKNSCPICKSAAA

SEQ ID NO: 25530 - protein, 415 aa, Oryza sativa; identical to SEQ ID NO: 18586
  Clone ID: TF_OsC159094_1.pep

SEQ ID NO: 25531 - protein, 301 aa, Oryza sativa; identical to SEQ ID NO: 18590
  Clone ID: TF_OsC336525_1.pep

SEQ ID NO: 25532 - protein, 133 aa, Oryza sativa
  Clone ID: TF_OsC336525_2.pep
YFISSDPDTPPHAGGPPTSSIHDSSFVSGPSSSRPALATVITVTVSDDAAAAAACAVCTDALQLASPASRLPCGHLYHAHCIAQWLSLRNTCPVCRRSVPMRTEETAPPWSPPTETDQEAVPSPPPTTTRRLI

SEQ ID NO: 25533 - protein, 280 aa, Oryza sativa
  Clone ID: TF_OsC62541_1.pep
MAAAAAAAASASSSSSSSSSAESVPLPTTTLPIDKAAAVGGGGDRAVDCGVCAICLDKIALQETALVKGCDHAYCVTCILRWASYKQTPQCPQCKHPFDFLSVHRSLDGCIHDYMFEESVCLLLRATWFEPLIVEAHEEALDEEELYHIYQYDDGVEDDLDEEAYYMSRSPSIRIGNRRWGDNGYVRGGRKEARPVSRQSLNDTDAGPSRTPKKKDVSASGSGSVSKEVAGRRAKRALKREAADKAAAEKHLKHLQRLGLRKAPEATAEATPEVEPQLNE

SEQ ID NO: 25534 - protein, 299 aa, Oryza sativa
  unsure (1)..(299): unsure at all Xaa locations
  Clone ID: TF_OsC271396_1.pep
MKFGAIYEEYLREQQDKYLTKCSHVEYKRLKKVLKKCRVGRSLQEDCPNGDQQEGNNESPDICKCNSCTLCDQMFFTELTKEASEIAGCFSSRVQRLLNLHVPSGFLRYIWRVRQCFIDDQQIMVQEGRMLLNYVTMNAXIAIRKILKKYDKIHGSVSGRDFKSKMQTDHIELLQSPWLIELGAFHLNCNSSDIDETVGFLKNEFFKNFSCDLTEARPLMTMAISETMKYEYSLTCPICLDTLFNPYALSCGHLFCKGCACGAASVYIFQGVKSAPPEAKCPVCRSDGVFAHAVHMTEL

SEQ ID NO: 25535 - protein, 455 aa, Oryza sativa
  Clone ID: TF_OsC23902_1.pep
MAAESSAAAAAGGGERRGPMDLNLYLGLPPLPPPPGRLDVAADYPSLLLNSAATVANEQRGSVVVAAPPPAAAAYSPSNALSAPEQVLVDPVAAWLVDPGEQQPVPPLETPSYMARASSTLPQIFACAALEMLVQTGGAIPPTGLIRGAEIAAASRPMTPENRLRRLIQVSDQHGVGNGRAGTGPVSRSRRANSPEADNLARAIQRSHNSLEASRRQMLDGDGSDATKKDDGCGCNGSFECNICFESAKDPVVTPCGHLFCWPCIYQWLHGHSEHSDCPVCKGEVLEVNVTPIYGRGGGEENSSRNDIQIPPRPSAQRTESLRQQLQRPDTRGGIANMVRRLMQNQDIVVGQAASSAPRPRGRGRRQAKQDAPSAPATQQQVVNADAGSGNQAPLPPPDANGAAPAAAVAPQQSSSVEQASTSSTVGVIAGGPAQGRRSRVSESTPARRTRRRHQ

SEQ ID NO: 25536 - protein, 928 aa, Oryza sativa
  Clone ID: TF_OsC138281_1.pep
MSDHQFAGQPDVQCLVCTRPFTLDAQVTDTFEALAICRDCKMTVLNDDERDEITSTYRQNTRRRQISRTASIDFLEDAFLQEFSQLIDLARRQGRETDIDSSSVAPQHASFNSTPSQSQRWHASDDESDGLNYVDSVFGEIESAISLGDYGGDSDTSIEEHSVMTRRRISIQLDNDSYMNTDTDIDPMNARLDQWDSDDQEDVEESGFDEIVNTMTQHQQQSHDIQLSGLSEDESEDGVWNWSVSVRQRANVTNLLDDMEEPEMRTTFVGNPDDYVDARQFEMLLEQFAEDNDSRRGAPPAATSFIENLPSVIISASHQTNGDVICPVCKDPIPTRARAKQLPCMHLYHSSCILPWLSSRNTCPVCRYELPTDDAEYERSKQATTNVRDIQVVEEISDEQEVQVTRQMAAGVIEETNTSEHNVRVDEQPNSARRRSGWLFIAAAPVCFCQNSTQCPVESLALFYLCNILWLRAVKIRKKLRRQGIRGPKPTFLYGNTKEIKRIRQELKFSQKQGTNNFISTLFPHFLLCRETYGPVFLYSTGALEILQVSHPDMVKDIGRWTPSELGKPNYLKKSRKALFGGGLFTENGDEWAYQRKIIAPEFFMDKIKGMIQLIEDATVTVLEAWEDMIDDVGGCREIVVDDYLRNLSADVIARACFGSSFTKGEEIFCKLRQLQKVIAQQDSFVGLSALWKYLPTKSNQEIQMLDEQVRLLILDVAKEQHHYQDSHNSLVNAIIDGAQDGRSAAEAEDFIVGNCKTIYFGGHESTAVTAIWCLMLLATHSEAMEVTMVIQETLRLYPPASVMMQEALTDVKLGNIEVPRGTIVQVPRLMLHLDKEAWGADADEFRPDRFANGVAAACRAAHMYVPFGHGPRTCIGQNLAMAELKVVLARLLTKFAFSPSPRYRHSPAFRLTIEPGFGLPLMVTKLP

SEQ ID NO: 25537 - protein, 684 aa, Oryza sativa; identical to SEQ ID NO: 18560
  Clone ID: TF_OsC11987_1.pep

SEQ ID NO: 25538 - protein, 364 aa, Oryza sativa; identical to SEQ ID NO: 18558
  Clone ID: TF_OsC192138_1.pep

SEQ ID NO: 25539 - protein, 596 aa, Oryza sativa
  unsure (1)..(596): unsure at all Xaa locations
  Clone ID: TF_OsC260254_1.pep
MPAAESCHSRSLSWLVKSCIPADPARHIAVPVLCPTPQPPPPSSPPAPPISALPDDLLLECLARVPRASLPPLPAVSRRFATLLASDAFLHLRRAHAHLRPSLLALSVSDNGCAAQALLRFDASVPVLEVAALPLPPTLLHCGGSVFAHARAVVLGRDVFLIGRGATLRVDALTGAARACAPTLFPRKKFAAAAVGDRIYVAGGSARTAAVEEYDPEVDAWRVVGEAPRRRXGCAGASAGGVFYVAGGVAVSGEGARALEAHVCAGSVDALHVASGTWARPRALPGGGCVVGACGVGDHLYVVASHAVELSFWRWSGATGRGGDGRGWGGWVALEAPPMPRGSVGLGMAVRVAMAGLGTNRVAAVLRLKFCHAIFNSYAARIAARSCHYPAASSTSLQPQSPSIPFDLPTLLLRMHASISFALAPASSPDAASFAPTAADVGGAVCLGYGIAIAVGVLVFISTVMLASYICVRAKAGAAAVLLADDDGGGAPAASAVVVLGLDGPAIDALYPKLLHVGVGDDDDACAGAQCAICLGEFVAGDALRRGHGCGHRFHAECAERWLRVSATCPVCRDSPLPSPMATPLAEAVPLAAHAR

SEQ ID NO: 25540 - protein, 321 aa, Oryza sativa; identical to SEQ ID NO: 18599
  Clone ID: TF_OsC281408_1.pep

SEQ ID NO: 25541 - protein, 164 aa, Oryza sativa
  Clone ID: TF_OsC9428_1.pep
MGFPLVCYCMAIPKPLIALAKLLAAIREALQLMLFVVGICHHPERSGRPAAVDAPLPDEVKDRLPPLEFAQLLAASEHGCHGCDDDEAVAGCIVCLERLEADDVVRRLGNCAHAFHRGCIDRWIDLGRLTCPLCRSTLLPRARPAAGPRGRLGRLATRLTGVVW

SEQ ID NO: 25542 - protein, 449 aa, Oryza sativa; identical to SEQ ID NO: 18605
  Clone ID: TF_OsC20197_1.pep

SEQ ID NO: 25543 - protein, 369 aa, Oryza sativa
  Clone ID: TF_OsC50470_1.pep
MEQGQGDRYWCHHCEEVIEPVEPDMKCPSCDSGFVEEMGSAGFEPSTNLRSDRISLWAPLLLGMMGGSSRRARRLRRQIMEDDDDDDDDEDDEDDSDHELEDLFRRQRRGSSLVRLLQTLRDDLRGLDDIGRDSDRDRERERRERERLRERERERERMRERERERRRERTESLILINSNNEAIILQGTFGPDDNQDDSSNTSSGVSLGDYFLGPGLDILLQHLAESDLNRSGTPPAKKEAVEALPTVNIQEVLGCSVCLEDFEMGTEAKEMPCQHKFHSQCILPWLELHSSCPICRFQLPTEESKNPCESAGGIVSVNDDGDDAGTSSDVDSANQPGSPIFSALSALFSNPSSSSSSSSDDNAPHSSES

SEQ ID NO: 25544 - protein, 380 aa, Oryza sativa; identical to SEQ ID NO: 18604
  Clone ID: TF_OsC29695_1.pep

SEQ ID NO: 25545 - protein, 237 aa, Oryza sativa; identical to SEQ ID NO: 18609
  Clone ID: TF_OsC229931_1.pep

SEQ ID NO: 25546 - protein, 465 aa, Oryza sativa; identical to SEQ ID NO: 18606
  Clone ID: TF_OsC188649_1.pep

SEQ ID NO: 25547 - protein, 430 aa, Oryza sativa; identical to SEQ ID NO: 17624
  Clone ID: TF_OsC30324_1.pep

SEQ ID NO: 25548 - protein, 161 aa, Oryza sativa; identical to SEQ ID NO: 18611
  Clone ID: TF_OsC66084_2.pep

SEQ ID NO: 25549 - protein, 205 aa, Oryza sativa; identical to SEQ ID NO: 18596
  Clone ID: TF_OsC344781_1.pep

SEQ ID NO: 25550 - protein, 247 aa, Oryza sativa; identical to SEQ ID NO: 18594
  Clone ID: TF_OsC306848_1.pep

SEQ ID NO: 25551 - protein, 559 aa, Oryza sativa; identical to SEQ ID NO: 18597
  Clone ID: TF_OsC47408_1.pep

SEQ ID NO: 25552 - protein, 714 aa, Oryza sativa; identical to SEQ ID NO: 18401
  Clone ID: TF_OsC21047_1.pep

SEQ ID NO: 25553 - protein, 170 aa, Oryza sativa
  Clone ID: TF_OsC77502_1.pep
RRASCASARSRRVTGCASSATARTRSTRRASTSGSTRARPPARSAAPPSSPPPTTPTPPPSPPPPGTTSPPSDPCRQEPILLSTQHPLPPQEQQGFPPPFSTNGSNPIKMEEHTTQEKRDRERNQWRKKMRGERGGVCGGGVLLVGEALIMRRTRMATCTALDLVNFSPS

SEQ ID NO: 25554 - protein, 612 aa, Oryza sativa; identical to SEQ ID NO: 18311
  Clone ID: TF_OsC1528_2298.pep

SEQ ID NO: 25555 - protein, 272 aa, Oryza sativa; identical to SEQ ID NO: 18308
  Clone ID: TF_OsC3651_2.pep

SEQ ID NO: 25556 - protein, 189 aa, Oryza sativa; identical to SEQ ID NO: 18317
  Clone ID: TF_OsC264554_1.pep

SEQ ID NO: 25557 - protein, 191 aa, Oryza sativa
  Clone ID: TF_OsC12875_1.pep
MSTVSGTRRAPRRQSQDGPGDKVVVNLDAISSPVVGSRRAVPTSTGARASPIDVEALDDEVQTLSASQVPPPRRNRRTRRQPVAVVDLEVDASREGNKRQRVAPVIHCLSPERGEGSSLKTSNEPPKAKEPVFNCPVCWNKLEEPSTTICGHIFCTTCIKQAIQIQKKCPTCRKSLRANNFHRIYLPNSDS

SEQ ID NO: 25558 - protein, 132 aa, Oryza sativa
  unsure (1)..(132): unsure at all Xaa locations
  Clone ID: TF_OsC17688_2.pep
MMMMIRMILMIMIIKMKPGDIPQDAWEDVDPXDEYSYEELVALGEVVGTESKGLSLDTLASLPSKTYRAQDKQDGNMEQCVICRVEFEEGESLVALPCKHSYHSECINQWLQLNKVCPMCSAEVPTSQDTRA

SEQ ID NO: 25559 - protein, 232 aa, Oryza sativa; identical to SEQ ID NO: 18315
  Clone ID: TF_OsC20575_1.pep

SEQ ID NO: 25560 - protein, 235 aa, Oryza sativa; identical to SEQ ID NO: 18314
  Clone ID: TF_OsC55101_1.pep

SEQ ID NO: 25561 - protein, 283 aa, Oryza sativa; identical to SEQ ID NO: 18321
  Clone ID: TF_OsC60330_1.pep

SEQ ID NO: 25562 - protein, 238 aa, Oryza sativa
  Clone ID: TF_LIB4309-008-Q1-K1-B7.pep
MESFRRFLNPLVLNLQKMELELTCPVCLKLLNAPTMLPCYHTSCSKCATTRTMDGYSCAICKSAYRSQDLRPASHLEAIVNIHRSLSSTVSSMVTQQEAQADIPVAKTSFQGTPESGNRNGAEKSDQVKSYTPVASKLAYNQSTGLAYGNVDGVKERNPALETRGAADVTAMPTILVQKGPCRSQSSDGPRDLDCDSNDLEGELITSRSSPQSVLKREPNTANDDNREIKRQSPLIRM

SEQ ID NO: 25563 - protein, 85 aa, Oryza sativa
  Clone ID: TF_OsC2184_2.pep
NDYDALLALDENTPQHAGASESQINNLPQSVIQSNIENPCAVCLDNPSIGDTIPRLPCFHMFHKECIDEWLKRKKLCPVCKFGIT

SEQ ID NO: 25564 - protein, 193 aa, Oryza sativa; identical to SEQ ID NO: 18323
  Clone ID: TF_OsC400245_1.pep

SEQ ID NO: 25565 - protein, 173 aa, Oryza sativa
  Clone ID: TF_OsC46801_1.pep
MGGCCCCSSRGSETDRAPVHIYRQQNQEEHEPLSSAYDGSSPASAIVAVDTNLDTSTPDTYRAPPAPLPYDVSLPVPENPDLEKSDLKSKTDDQQEESLEVDEFKSCEKCVAEDKPDEEDVCPICLEEYDAENPRSLTKCEHHFHLCCILEWMERSDTCPVCDQITLIDDMYE

SEQ ID NO: 25566 - protein, 234 aa, Oryza sativa; identical to SEQ ID NO: 18327
  Clone ID: TF_OsC82048_1.pep

SEQ ID NO: 25567 - protein, 208 aa, Oryza sativa; identical to SEQ ID NO: 18329
  Clone ID: TF_OsC356927_1.pep

SEQ ID NO: 25568 - protein, 192 aa, Oryza sativa
  Clone ID: TF_OsC392220_1.pep
CPATRRRRRCSTRASAHSSPSSASSSWPSSSTPVRPPVTPPPARRPTRSPRSRGSSSSAASASAPTTSPCSRRSRTTPPPPPRPADAGLIGRGDAKAAADCCAVCLDELGEGAVVRMLPSCKHYFHATCVDVWLLSRATCPVCRGSPGQEKVRHFRPRVPLTAAAAAAPVRAVAAQGGRRRRRCRYVESQRR

SEQ ID NO: 25569 - protein, 392 aa, Oryza sativa
  Clone ID: TF_OsC1868_1.pep
MRSSCCIVMAGRFLLGGREIVRTGDDGPLDDGPAVAPAAGSSAPATSAAAARVTPAVLFITVVLAVVLLASGLLHVLRRLFLKSHRANASAEAVERQLQQLFSLHEDGAGGAGPGLDQAAIDALPAFTYAELLAGAAAPNGGGGNGKRQFDCAVCLCEFDGGDRLRLLPLCGHAFHAACIDTWLRSSSTCPLCRAALSARALAALAAAAADTPAAAQHRQPDVEDQKLDHHHPPPPSDEPATSFVLSVRLGRFKNTQRSDGDADASGGGSRCIDARRCYSMGSYQYVLADDNLLISVHWRPGDGISAATAAAAAGANVATARTGIKQGGGGGGGKKVFGRGDSFSMSKIWQWRGGDRRLPVLHSDASPPADDGLPWATAAAASTRTRQESDT

SEQ ID NO: 25570 - protein, 335 aa, Oryza sativa; identical to SEQ ID NO: 18331
  Clone ID: TF_OsC383872_2.pep

SEQ ID NO: 25571 - protein, 413 aa, Oryza sativa
  unsure (1)..(413): unsure at all Xaa locations
  Clone ID: TF_OsC54609_1.pep
PAVLPTEVGAWLDAFPDGAVVVTAAALPKGFEAATMAXGTGLVIRGWAPQVAIPRHRAVGWSLMHCGTNTMLEATSAGVAMLTWPMVADHFVNKILLVEAGVAMHLAEGADAVPDSGQMAKAIAAVVGDKGKPFRERAVALARMAAAAVAEGGTSYRDLERGRKWGIREKRRRANESNDIFLHFDLTPLPHNVTEVLRVEGKTGQEHVPGSKRDTSKGVASAGNITGQAGSTGSSSRLNRSVSDHGRLPDSVQQARERLLQRLNSVDLSGRRQNTSLSSETIHGGVAPGVSTTADSIFSSLTSCFHTDVSIAPCKLQESTAETFNTADKHTFIAHCSEPAPTQEVASCRVTDDDELAGPSTECSICLERCGDADGLLELRCKHIFHSACLERWLRSRSDCPYCRASVLLTAEG

SEQ ID NO: 25572 - protein, 357 aa, Oryza sativa; identical to SEQ ID NO: 18324
  Clone ID: TF_OsC240119_1.pep

SEQ ID NO: 25573 - protein, 207 aa, Oryza sativa
  Clone ID: TF_OsC359_8274.pep
GVHTKSMSWYMGTPASPSPGSAGEAQHALSSGGGGGSDASFDTNMVIILAALLFALLFALGLNSLARLIIRWARRAATGEGAGGGVEGAGAGGGLKKRALRSIPIEVYGGGGGGSPAAAAEVCAICLGEFADGEKVRVLPRCGHGFHVRCVDTWLVSHDSCPTCRGSVLHGATTKHKPTAAAAAAGSRRPGSEVDAPAAAAVTVVIA

SEQ ID NO: 25574 - protein, 354 aa, Oryza sativa
  Clone ID: TF_OsC388105_1.pep
MVAVPVVADDGGGGHGAKGEESVSGSVAGISPSILIIAVIVVVMLLASVSIHYFIRHLCRRSSASAAASSSAPVLPVVVRPASSAAVGEQVVGKASAERAAEMERLISRLPLFTLASSLAALPKSSRDCAVCQSAFRDDDELRLLPACRHAFHSRCVDPWLRANPSCPPCRAATALPHPPLPDLLRVELGSVSSRRSNPNSAAAVASAPPEGAAVRAYPLPPRPHSEYLVEEELEVVIKQPAAAAAPRTGEPSQHPLPAAQAERGQPSSVTPTASFSSARSQERWSNRWSSRWSSRWSSGRWSSRYDAGTVTAAATAEWWWDMDGGAAPAARRREVEEQGNAFHGFMRWLTGAY

SEQ ID NO: 25575 - protein, 222 aa, Oryza sativa
  Clone ID: TF_OsC31203_2.pep
MAAAGVSRSMVLTLLGFCVSVLFIVFVCSRLACALLRRRRGRARLRRASPLAVSGVLSIYVDRHGHHQPSSAAGAASGTGGLDPAAVAAFPTRAFSPAASSSASASTQCVVCLAEYEEKDVLRVLPYCGHGFHVACIDIWLMHHSTCPVCRISLCDYPDSKHTMSPVPSAVIIPLPQCSPGAARSDQCNWLLVGTGHSPRASTICSIGNIREKVDPWFAVIG

SEQ ID NO: 25576 - protein, 289 aa, Oryza sativa; identical to SEQ ID NO: 18336
  Clone ID: TF_OsC246997_1.pep

SEQ ID NO: 25577 - protein, 489 aa, Oryza sativa
  Clone ID: TF_OsC17809_1.pep
MGGAHFPGEGEVVAGEGDAVVPLRDVGKMEHGCEHYRRRCKIVAPCCGEVFACRHCHNDATASGDRHTICRQDVEKVVCLLCDTEQPVSQVCINCGVNMGEYFCDVCKFYDDDTEKGQFHCYDCGICRVGGKENYFHCAKCGSCYAVALRDNHQCVENSMRQNCPICYEYLFDSLKGTRVLDCGHTMHMECFSEMVEHNKYTCPICSKTALDMTHHWALLDQEIEATIMPPVYRYKICLRFTQPREPAHWEGIQGVRRFAQEGIGCRDFIPFHMIFGLAMGEYCSSSSNQSKVPIILLFSASTIVQSSIVNWFSVHSSSGTILMIMTCMHPFVSAMRLKIEKCLLSFEQIVVLKYHGSFSENITRLGRTKVRSCVAHVKESWVQCWNAITSTVLKCILTQPQARNTMEDNENTKVRAVNADIKDKDIILLSCWMFASCNDCNKVSEVDFHVIGHKCSHCNSYNTRSTSRPADLSGSSSPSTSDSSENNP

SEQ ID NO: 25578 - protein, 814 aa, Oryza sativa
  Clone ID: TF_OsC43568_1.pep
LPIRLTINLLFSDGTCAPIERDTLRSLVESGATESSGCLPGCHLGSDAPPLHLSTANALGDIFFPSSDLLQANEECALAALTKLPENDRSKQLQSTSSNLLSSLNNVVQALSNLQLKHKQLAEDYQNQRDSSARKRAEHRRLKEELASAASELEETNYKLAALKAQRDNTQGARIPYPTLGNTNMPEDKELISKRLVEIKRLHEERIEILNKIATFQNILMDFKSIRSSKAFQLVNDRLQKSQAELDHYQTLLEKLQVDKDKFVWQERQFNLKVDLAEIPERVSTYCESSIADLKKDIQKLCDEKNMLILKLEEASREPGAVVTIHFTKSNFQTCLAKAALVSSIPREMGAMQSEMTKHKEASLELNSLRAEVHSLSRILSRKERDNEEASCRSARAGSDITQLQSVISDLKQTNKELKLFADMYKRESTDSREIMESRDREFLEWAHVHALKSSLDESKLEQRVKAANEAEAITQQRLATAEAEIAESGQKLGTSRKDLVSLSHMLKSKQEECEAYRVEVECISLSHMLKSKQEECEAYRVEVECIGQAYEDIQAQNQQLLQQIIERDDDNTKDVRFGYIVNLIVPETQYFIEKLFTCVKLIFMEGVKAKQTQDALHLETYSLRRNLQQESSLMDLYNQKIVSLEDQLKMWSDRVGKLQEDGWQQSVSLSNYQRKLVDVHRDAQKLMQSLDGIQANVGSSRLEVADLLIELEKERFSKKRIEDDLEVMSRKASSLRAKARESAVLEKLRHEVKEYRGILKCGICHDRQKEVVITKCYHLFCNQCIQKSLGNRQRRCPSCSLSFGANDVKPIYI

SEQ ID NO: 25579 - protein, 389 aa, Oryza sativa
  Clone ID: TF_OsC31886_1.pep
MAAMASSPPTTPNLGSQPTWVPYEPTRDCSQGLCSMYCPQWCYFIFPPPPPAFDITGSSSDDSSGPTFSPLVIAIIGVLASAFLLVSYYTIISKYCGTFSSLRNRLLGSSAHRGSGGGADGGDNSRSQEPWSVALSDGMDETLINKITVCKYRRGDGFVDSTDCSVCLGEFREGESLRLLPKCSHAFHVPCIDTWLKSHSNCPLCRCNIAFVTVGMVSPEPEARVPREDRRDNHELVLTIDNPEHVREEPQNVVTGVAVGNGGRNHEAKDGPGRSEDANGTAEIREDGALMPPTRAPSSLSDTHREGRMSIADVLQASLEDELMVARESGLLAGSSGSSRRCHGEHSKDGGGRSGRALPDGANMKRLAPAGRSCFSSRSGRGKDSVLPM

SEQ ID NO: 25580 - protein, 181 aa, Oryza sativa; identical to SEQ ID NO: 18346
  Clone ID: TF_OsC269066_1.pep

SEQ ID NO: 25581 - protein, 253 aa, Oryza sativa; identical to SEQ ID NO: 18341
  Clone ID: TF_OsC35328_1.pep

SEQ ID NO: 25582 - protein, 424 aa, Oryza sativa
  Clone ID: TF_OsC22486_1.pep
MDLERSPPPPPPEGGGGGGGGGASCSICLDPVVAGGRSVARLQCGHEFHLDCIGSAFNAKGAMQCPNCRKIEKGRWLYASGHHPSPDIDIGGWVTGETYDITSDIPFGFQWCPFSGFTQLASVFEEGEAEQTSYHTVGDHSNAASSSLVCPYLALRGFLHPVHVPSSSSSGAENSSFHRHPTSLEGHAAHDLSNTQVFHATESRNHDNDHRYMSNLPVSGIPDHSVAPFGIGLPRYDSSSQQRTRPYAHHRPLVHRPTPRNGSNMVTPLGSVPAVMAETRGHGHGARGHMYQQSMHSLQSSPFPPTSRRVRPRALTITSFIAASSSAEIGGHHGFAPPVNRSNSSDGEAVSRPVDRPYGWGQEGFTPFPWIPADGESHWWGTFNPMQNHTHGGFTRRPTGERMPQSHPDSGYHSMHPQRMPPFL

SEQ ID NO: 25583 - protein, 436 aa, Oryza sativa; identical to SEQ ID NO: 18358
  Clone ID: TF_OsC59284_1.pep

SEQ ID NO: 25584 - protein, 207 aa, Oryza sativa; identical to SEQ ID NO: 18356
  Clone ID: TF_OsC400404_1.pep

SEQ ID NO: 25585 - protein, 334 aa, Oryza sativa; identical to SEQ ID NO: 18352
  Clone ID: TF_OsC270394_1.pep

SEQ ID NO: 25586 - protein, 335 aa, Oryza sativa
  Clone ID: TF_OsC394647_1.pep
MSNVFARISAATLRGGGEEERGGGRGRRACYGIAATAAAVLRVGGRAAAGSVWKASVLAGMVLLAFGVADYLAPASWCRRRGGTNTRAAEREAQPGASSSSTFGLEKAAVDALPTFAYASGGAGAAQGGGDLEAGNGEPCSVCLEELHAGEIVREMPACKHLFHVECIDMWLHSHRTCPMCRCDLSPPREVAAKEATAAETAAPPGDDALPPDRIAQRGIFPLDDGWINPADLPGYSRPSARASGASDEVGHVTPLTMREQRRREGGSGMQARLPASGCECGGGSGKKGGSEPEGWRRRQRKEGVAASPKARDGGNGKKGRWRARRRMNHRRRLG

SEQ ID NO: 25587 - protein, 428 aa, Oryza sativa; identical to SEQ ID NO: 18355
  Clone ID: TF_OsC181138_1.pep

SEQ ID NO: 25588 - protein, 425 aa, Oryza sativa
  Clone ID: TF_OsC37456_1.pep
MGNMGSSGGHRRRNNGHGRHHHHGQPTAPPPPPQQQQQEVAPNRYVFAAASPYPPQYPNPNLPQYYPQYGNFYPPPPPSMPGPLPAPYDHHHRGGGPAQPPPPPPPPQPIHAAGEFPPAMLQQHPHYHGWGGNFSYGPPTQPPAPAPPYVEHQKAVTIRNDVNLKKETLRVEPDDECPGRFLITFTFDATVAGSMTVYFFAKEELNCNLTATKEDLLKPVTVTFKEGLGQKFRQPSGTGIDFSLFEDAELFKEGEMDVYPLAVKAETTFSIGQFSEGEEQKSQTPNSQITQAVFERKENGDYHVRVVKQILWVNGTRYELQEIYGIGNSVEGDTEGNDPGKECVICLSEPRDTTVLPCRHMCMCSECAKVLRYQTNRCPICRQPVERLLEIKVNNKGEEQQQQQIPQPPPPPSTAPPHQQQESQA

SEQ ID NO: 25589 - protein, 163 aa, Oryza sativa
  Clone ID: TF_OsC250874_1.pep
MDDDGDWITARYLLSSILGRNPLVVDYVDEESFPVEDPPPVAGGARGGRQAVVSQPPVVRATAGVAGTVCSVCTEEIAVADAVVRLPCAHWYHAGCISPWLGIRSTCPMCRAELPASDDAAEEGGGAGREKPPRAAPAGTSAGGGVRRDASYELLAGGGVLSG

SEQ ID NO: 25590 - protein, 133 aa, Oryza sativa; identical to SEQ ID NO: 18360
  Clone ID: TF_OsC126152_1.pep

SEQ ID NO: 25591 - protein, 313 aa, Oryza sativa
  Clone ID: TF_OsC66748_1.pep
MERRPELRRTMTLSEQLSAPDQAIRDFLKIPHDGLGGGDGEGGRIPAAAGASGGGGGVGGMINWKPLRDRLRLRRAASAWMSASPKPAASNSGGGGGGGATLSSSNSGSNHSNKYNYSPGEAAAAFSRTFSRTRSLRPTPTFSRATSTRLGATAFSSGSRRAAVDGGGHANEDDDEDHTDDDDDDDEEEQGKDDAPAAQMSLMALLEQSDSQWDSEDEDDQGHGGGGGGGGNGGGGGGGGARKNGDGDDDEDDGEGREEEMVHVCCVCMVRHKGAAFIPCGHTFCRLCSRELWVSRGNCPLCNGFIQEILDIF

SEQ ID NO: 25592 - protein, 243 aa, Oryza sativa; identical to SEQ ID NO: 18369
  Clone ID: TF_OsC82464_1.pep

SEQ ID NO: 25593 - protein, 176 aa, Oryza sativa
  Clone ID: TF_OsC240119_2.pep
MGSRSGSTTTSMPPPVPQENQSVGKGTAIFSYTCVGLTGVALVAVVAFYCNRHVRRRAPVVAAEGAGGAGGREDDGLRGVADVAAKIPEFAYAGSARHGGGGECSVCLGAVQGGEAVRRLPACKHLYHVECIDMWLASHATCPLCRTEVEPPPGDGGGRPAPAADESSPTEALPPV

SEQ ID NO: 25594 - protein, 313 aa, Oryza sativa; identical to SEQ ID NO: 18366
  Clone ID: TF_OsC33248_1.pep

SEQ ID NO: 25595 - protein, 171 aa, Oryza sativa
  Clone ID: TF_OsC46309_2.pep
MASGTDEKAKMEGLTSAAAFVEGGIQDACDDACSICLEAFCESDPSTLTGCKHEFHLQCILEWCQRSSQCPMCWQPISLKDPTSQELLEAVERERNVRTNQTRNTTIFHHPALGDFEVQHHLAAAAAMGRSHHLGRREGHRGRSGSHGRPQFLVFSSHPNMPSAGSVSSSM

SEQ ID NO: 25596 - protein, 499 aa, Oryza sativa; identical to SEQ ID NO: 18374
  Clone ID: TF_OsC345789_1.pep

SEQ ID NO: 25597 - protein, 348 aa, Oryza sativa; identical to SEQ ID NO: 18378
  Clone ID: TF_OsC219076_1.pep

SEQ ID NO: 25598 - protein, 185 aa, Oryza sativa; identical to SEQ ID NO: 18380
  Clone ID: TF_OsC198988_1.pep

SEQ ID NO: 25599 - protein, 223 aa, Oryza sativa
  Clone ID: TF_LIB4309-011-Q1-K1-H9.pep
NHPRDRGGTEFGGGARNAAALDYPERAGQPICEYYMKTGTCKFGTNCKYHHPKQDGAVLPVMLNNSGFPIRLGEKECSYYMKTGQCKFGTTCKFHHPEFGGVPMTPGIYPPLQSPSIASPHPYASLANWQMGRPPVVPGSYIPGSYTPMMLSSGMIPLQGWSPYPVIDLNYMFYCGKINSIPINAKLINKLDMTANLYYEMQSESTNEARQHTCVMICEAGSL

SEQ ID NO: 25600 - protein, 243 aa, Oryza sativa
  Clone ID: TF_LIB4831-020-R1-N1-A9.pep
SLTLSIPRLVASPSASLRQPRARVSISPPTGFPSLPSSSLRAKARHGGSRRRPQEIPAGHGQRRRRRREALESTIGCPFGEGCHFSHFVPGGYQAVAKTLNLGNPAVPAPARAPMDHAAGGNSHPASSGKTRMCTKYNTAEGCKFGDKCHFAHGERELGKPAYMSHESAMAPPMGGRYGGRPEPPPPAAMGPPAGNFGASATAKISVDASLAGGIIGKGGVNTKQICRVTGVKLSKRDHESDS

SEQ ID NO: 25601 - protein, 794 aa, Oryza sativa
  unsure (1)..(794): unsure at all Xaa locations
  Clone ID: TF_OsC307477_1.pep
MEMEMEDNKAPSPPSPMESDVAGEKRKREDDASSSAVLAAANNTGGAQHPMWKTSLCSFFRRRAASSADGCSHGDSCRYAHSEEELRPRPDGTWDPTSDRAKKLRKVAADEVEEEVVTIDDKALDKCLVGLPRGWANDRLKTFLQDKARTNYSSILPPALLLGISYATAKKKKGMTVGFVTFENIEQLKNAIEVLTENQSGGKEIKIADANRRSHQKLHTEKPVSDNGVTTENGTSVDVPPGETSAPEAAISNKKSVRDAVTPLAHMSYNDQLEHKKNSVAQILKRLTRNARKACPTGIPLPDWVFKSKEIGGLPCKLEGILESPVINGYRNKCEFSVGFSLEGKKTVGFMLGNFREGVTAVEEPVDCPNVSEISCKYALMFQDFLQSSSLPVWNRVDNCGFWRQFTVREGRCQAQAVAQNAENQISEVMLIVQVCSTGVDDAVMKDEFDKLTVALQQGAATCSPPLPLTTIVVQDHKGISNAAPADCPLIPLLVPKVDQSEGTVDKTRIHDHIGNLWFSISPTAFFQVNTLAAERLYTLAGDWANLNSGTLLFDVCCGTGTIGLTLAHRVGMVVGIEMNESAVSDAERNALINGVSNCRFVCGKAEDVMGSLLTEYLGSPQQDIPVSEGAVSGTVKDEEVIDSSKNSGENLDSSMQKNDNGESQQLGDAPADSSSSAIDEIKGNSNDRVGNGLEGSHDEYNEVAGEDIHGEASLINESVDLKVSDCLEDRKTSDDGSSISNNDVTAATACQFEDIVAIVDPPRVGLHPTDQAYTLNLXVIKALRTHPRIRRLV

SEQ ID NO: 25602 - protein, 73 aa, Oryza sativa
  Clone ID: TF_LIB3432-044-P1-N1-E6.pep
DCVLSPVGLPLRPGEELCKFYSRYGICKFGANCKFDHPTMAPPMGVYAYGSASTNVPMVRRLLQSPSASAYTS

SEQ ID NO: 25603 - protein, 718 aa, Oryza sativa; identical to SEQ ID NO: 18619
  Clone ID: TF_OsC206898_1.pep

SEQ ID NO: 25604 - protein, 216 aa, Oryza sativa
  unsure (1)..(216): unsure at all Xaa locations
  Clone ID: TF_jC-osleLIB3474044d01b1.pep
MAAGAGAGGGGGEGDSNGGGTSPGGVSAAAPAIGPHHLGVAAAEEAMWQMTLGGGESMESTPYPERIGEPDCSYYMRTGLCRFGMTCKFNHPPNRKLAVAAARMNGEYPYRVGQPECQYYLKTGTCKFGATCKFHHPREKAALANRVXNEKECAYYLRTGQCKFASTCKFHHPQPFNTMVAVRNFMYSPGQSATSPGQHTYSGAVTNWTLSRSASF

SEQ ID NO: 25605 - protein, 719 aa, Oryza sativa; identical to SEQ ID NO: 18620
  Clone ID: TF_OsC208927_1.pep

SEQ ID NO: 25606 - protein, 287 aa, Oryza sativa
  Clone ID: TF_OsC2916_1.pep
MLQKKGQSAPTWRRFGDIVHLDTSGGRGGYSSSSSPLLVTGQWSPLAGEEDKLVVVVGRLAIIRQRRPMLVQPPNADAQHTDIPDGRSFLGVPRYYRHSLTVLQRAVRSWNAHNHKHPMTAAVAPSLLAVQAVVAEFDRFLDAYDFNAVGWSRDHPMAAAAGRFLDKRNPNTDKNNPSGLAGVARRFVMFNGAVCEAQLRWLDGVLRGLMWNYEGVMRVVHRWTRGPTCHRLPPTVSSSLLSPEAPPVGSFPHLPPIPVSPSLVRTSASPVFAASLVFLRRPLPPLR

SEQ ID NO: 25607 - protein, 581 aa, Oryza sativa
  unsure (1)..(581): unsure at all Xaa locations
  Clone ID: TF_OsC170_5.pep
LRSTSRPTPPRILLAGDANGRLHQLFKRVTSVNQSTGPFHALLCVGQFFSPDAGDGDGGGGGEVADYLEGRAAVPIPTYFTGDYGPAAPRLLAKAASSARGFSPGGIQICPNLFWLRGSARFTLHGSKGVFYAREPYVSDSAAHVTRFIGLANVGNKEKQQSQFLLKXTPKRPAEDADLQYWRYDVKKQRHGEAGGNRLCFKFTSSGSCPRGSKCNYRHDEEAREHYNRNRTXRVESSCWFCLSSPDVESHLVISIGEGYYCALAKGPLVPNHVLVIPVEHCSSTLKMPVEAEAELGRYKDALAKYFEKQGKIAIYFEWVSQQSRHANLQAVPVPLSKASSVKKIFHLAAQRLGFEFSVVNPDGDANRARELLRSECDSKSSLFYVELPEGSVLLHLVDSNEKFPAQFGREVLAGLLSMADRADWRNCGGGGGGVGQSQACAACKYQRRKCNADCPLARYFPADEQRRFLNAHHLFGVSKIQKTLRDTPPELHADAMQALTFEANARASDPVGGAARVVVELCRQYEMLHAELAAVQHHLKLCRQQHAAAAAAAANDPLVANVDPLADPAAEMLFAGRRRP

SEQ ID NO: 25608 - protein, 87 aa, Oryza sativa
  Clone ID: TF_LIB3598-036-Q6-N1-H9.pep
EPICTFYSRYGICKFGPNCKFDHPMGTVMYGLATSPTGDVSARRMLAPVPAHSEVSPDNVSGRSRRITHSDSQQIPSGERGTEREAS

SEQ ID NO: 25609 - protein, 678 aa, Oryza sativa; identical to SEQ ID NO: 18638
  Clone ID: TF_OsC40248_1.pep

SEQ ID NO: 25610 - protein, 444 aa, Oryza sativa
  Clone ID: TF_OsC5401_1.pep
MAAAPSAGGVGEGSSSSAAAAAAAAAATIGPHVVDEEAMWQMNLGEAMEAGPYPERIGEPDCSYYMRTGLCRFGMTCKFNHPADRKMAVAAARMKGEYPQRIGQPECQYYLKTGTCKFGATCKFHHPREKAAIATRVQLNALGYPLRPNEKECAYYLRTGQCKFGSTCKFHHPQPSNTMVAVRGSVYSPGQSVTSPSQHTYPGAVTNWPLSRSASFIASPRWPGHSSYAQVIVPPGLVQVPGWNPYAAQIGSSSSDDQQRTAGGAQYYTGSRHSETPNMGDQGMFSSYQAGSVPLGLYTVQRESIFPERPDQPECQFYMKTGDCKFGAVCKFHHPKERIIPTPNCALSSLGLPLRPGEPICTFYSRYGICKFGPNCKFDHPMGTVMYGLATSPTGDVSARRMLAPVPAHSEVSPDNVSGRSRRITHSDSQQIPSGERGTEREAS

SEQ ID NO: 25611 - protein, 473 aa, Oryza sativa
  unsure (1)..(473): unsure at all Xaa locations
  Clone ID: TF_OsC6441_1.pep
MSDPFYPHGHGGAAGGEGAAAAGYSSYEVDLIAARYGGRPLANPSSAAADLDARLAGARRSMGVLYHQPIMGSHSTVEQIEALYSSNTMTKRPRLESSLPIYPQRPGEKDCAFYMMTRTCKFGGSCKFDHPQWVPEGGIPNWKEAANVEESYPEQEGEPDCPFFMKTGKCKFGSKCKFNHPKLXDDAVPLENTSDFYVQTGXSKFLALCTSNHSNHIDIPSSHDAPVSXATPVSETDTGSAADSVSAKMQTPVAAAQEFNSKGLPMRTGKVDCPFYIXDRQXKFGSTCLYNHPDRGEVNFPLPWGHTILPSQGSMFLITSADFLQGLYFHAVHMPVGPGPVTYPQRPGATVCDFYMKTGFCKFADRCKFHHPIDRSAPDPSANWEPAEESVQLTLAGLPRREDAVVCAFYMKTGVCKFGGYRQGVEFRELRRETNILTQGRIKSMPYSFLAYELNMKPHYLGRYVVFVDLCGI

SEQ ID NO: 25612 - protein, 534 aa, Oryza sativa
  Clone ID: TF_OsC23226_6.pep
MSVMDANQAYARHHFDGGHLRGDRADVLAQQAGMDIGSMADSEDGDHVATTTTEQRYDDDGHLVPSSGGQEEEGSGGRDVVVPGGHVAEDYRSGVGVPVGRDAGGATSSPPQPVHVTPSILVGSIHAPVFQGELVGMKFGVGSGSMGAGTSATRRLPATGFGALPTSSMAEDSADHADDDHLAEEEEEEEEEHYIDDGPLVPSSGGQEEEGSGGRHVFVPGGHDGEEDHPDDLVADLDLDLLVDGVVGPVPGGHLNADAPAFVPTTRGRQDLYSALSSSAPAAGYRYRHYITSSALAEAGHVSPFLGLPYATAFDSPLDRELVGPSSAPPPCSAASRAWLVRCSSPLSDSEWTRRSILAREAAHTPASTVTGRGRFEFVPIPGAPYAPPPSFAPIAAGAGPAARPLQQLAFGLEEHKTKLCAEYYSRGLGCPRGNTCKYAHGEDDLRLVVAVSSLADAGEGSSSSDSSFAALGGEDKYKTKLCKTFTSGGLCLFAANCRFAHGEVELGKKEPCWYFFSGQTCPRGDTCGFRHSY

SEQ ID NO: 25613 - protein, 387 aa, Oryza sativa; identical to SEQ ID NO: 18636
  Clone ID: TF_OsC333015_1.pep

SEQ ID NO: 25614 - protein, 367 aa, Oryza sativa; identical to SEQ ID NO: 18635
  Clone ID: TF_OsC3834_1.pep

SEQ ID NO: 25615 - protein, 300 aa, Oryza sativa; identical to SEQ ID NO: 18640
  Clone ID: TF_OsC4710_1.pep

SEQ ID NO: 25616 - protein, 477 aa, Oryza sativa
  Clone ID: TF_OsC98105_1.pep
MEPYAAAEGGGGGGGGGSTDTGLEESMWRMGLGGGGGGGGEAVAAGRLPERPGEADCVYYLRTGACGYGENCRYNHPRDRAAAAVLNGGGKTTHSAEYPERPGQPVCEYYMKNGTCKFGSNCKYDHPREGSVQAVMLNSSGYPLRSGEKDCTYYVKTGHCKFGSTCKFHHPEIGGVSETPNMYPPVQPQPISSSHPYQHLAGWQMGRPPVLPGSFLSGSYPPMMLPSTVVPMQGWNPYISPVNQVASAGGHQTVQAGPFYGLSHQGPSAAVTYGSQYAPLSSSTMPSSSSKQEPAFPARPGQPECQYYLKTGSCKFGSACKYHHPQYLNTPKSNCMLSPLGLPLRPGSQPCAYYTQHGFCKFGPTCKFDHPMGTLSYSPSASSITDLPIAPYPLNYAVAPVAPPSSSSDLRPEYLLTKEFSANQSASPGTTCGPAGAMLKASTYPLSISSLGPPLIVNKASTDFDKGMAKVVILPPE

SEQ ID NO: 25617 - protein, 466 aa, Oryza sativa
  Clone ID: TF_OsC2916_5.pep
MEQPHAAAAAAGGGEGEGGASPDTGLEGPMWRMGLGGGGGGGGGGGGGDGDAAGRLPERPGEEDCVYYLRTGACGFGDRCRYNHPRDRGGTEFGGGARNAAALDYPERAGQPICEYYMKTGTCKFGTNCKYHHPKQDGAVLPVMLNNSGFPIRLGEKECSYYMKTGQCKFGTTCKFHHPEFGGVPMTPGIYPPLQSPSIASPHPYASLANWQMGRPPVVPGSYIPGSYTPMMLSSGMIPLQGWSPYPASVNPVVSGGAQQNVQAGPVYGMGHHGSSSTIAYGGPYVPYASSTGQSSNNQQEHGFPERPGQPDCQYYMRTGDCKFGATCKYHHPRELSAPKSGYMVNSLCLPLRPGAQPCAYYAQNGYCRYGVACKYDHPMGTLGYSPSALPLSDMPIAPYPIGFSIATLAPSSPSPDLRPEYISTKDQSVNQVTSPVAASEPVDQYCRRGPATHDAANYTHLCSQS

SEQ ID NO: 25618 - protein, 534 aa, Oryza sativa
  unsure (1)..(534): unsure at all Xaa locations
  Clone ID: TF_OsC42413_1.pep
MIRCTHMAGRGGMVEWEVGRRRDSEDVIVLXPGPPARRRPPPVKAVEPESGGFAYEPPEKLFYKTRVCETFVTSGRCMFEDGCTFAHGDEELRPSLTACAGGWRKPSPSLSAAAPPVAVAPTPPPAQVVHELLARGSGSGGGGHRAITKVCFEFRDKGICYFGETCAFPHVSAAEIRQGSRLSSMSSSSWEMPARRSVAVTVPRTFVSVPPVAPPPPPPHYRVNNSSSYNAASMAAAAPAASDANLVAQQPPPEQGGRKMTRLEMLSLKKMTGIYGDWLXGGERDADLVFFSAGEEEETGGGEEGEEDGIWDWSRAGACCSMANICAAWCSGFFAHSYNNIEDIVVSKIEDRISLWSFLPKENGESIQVLKYGVNRSGSIKEEPKSSSGAHRLATILMYLSDVKQGGETVFPRSEMKDAQAKEGAPSQCSGYAVRPAKGNAILLFNLRPDGETDKDSQYEECPVLEGEKWLAIKHINLRKFDYPKSSLASEDECTDEDDRCVSWAASGECDRNPVFMIGSSDYYGSCRKSCRVC

SEQ ID NO: 25619 - protein, 211 aa, Oryza sativa
  unsure (1)..(211): unsure at all Xaa locations
  Clone ID: TF_LIB4309-005-Q1-K1-C12.pep
MEGAGAARKRSRPDTANGGAAGGKRSRETESFQTGLSSKLKPCTKFFSTIGCPFGEGCHFSHFVPGGYQAVAKTLNLGNPAVPAPARAPMDHAAGGNSHPASSGKTRMCTKYNTAEGCKFGDKCHFAHGERELGKPAYMSHESAMAPPMGGRYGGRPEPPPPAAMGPPAGNXGASATAKISVDASLAGGIIGKGGVNTKQICRVTGVKLSI

SEQ ID NO: 25620 - protein, 454 aa, Oryza sativa
  Clone ID: TF_OsC49276_1.pep
MAAGAGAGGGGGEGDSNGGGTSPGGVSAAAPAIGPHHLGVAAAEEAMWQMTLGGGESMESTPYPERIGEPDCSYYMRTGLCRFGMTCKFNHPPNRKLAVAAARMNGEYPYRVGQPECQYYLKTGTCKFGATCKFHHPREKAALANRVQLNVLGYPMRPNEKECAYYLRTGQCKFASTCKFHHPQPSNTMVAVRNSMYSPGQSATSPGQHTYPGAVTNWTLSRSASFIASPRWPGHSGYAQVIVPQGLVQVPGWNPYAAQMGSSSPDDQQRTPVTTQYYGSRQSETGGMGDHGMYQSYQGGSVPVGVYTVQGENIFPERPDQPECQFYMKTGDCKFGAVCKFHHPKERLVPAPNCALNSLGLPLRPGEPVCTFYSRYGICKFGPNCKFDHPMGTLMYGSATSPRGDVSSMHYQLSPSPGHPGILLDGGSGRSHRVPQSDSQQIPSGDGNAEREAS

SEQ ID NO: 25621 - protein, 304 aa, Oryza sativa; identical to SEQ ID NO: 18644
  Clone ID: TF_OsC1290_1.pep

SEQ ID NO: 25622 - protein, 559 aa, Oryza sativa; identical to SEQ ID NO: 18645
  Clone ID: TF_OsC2718_1.pep

SEQ ID NO: 25623 - protein, 194 aa, Oryza sativa
  unsure (1)..(194): unsure at all Xaa locations
  Clone ID: TF_LIB4371-030-R1-K1-G10.pep
MAEHLASIFGTEKDRVNCPFYFKIGACRHGDRCSRLHNKPSVSPTLLLSNMYLRPDMITPGIDAQGNPIDPEKIQADFEDFYEDIFEELSKYGEIESLHVCDNFADHMIGNXVYVQFREXEDQAARALQALTGRYYXRPSYXLSSSRXVSDFRXEATCRQYEENSCNRGGYCNFMHVKEIGRDLRXRLFGHLHR

SEQ ID NO: 25624 - protein, 290 aa, Oryza sativa
  Clone ID: TF_OsC1291_1.pep
MAEHLASIFGTEKDRVNCPFYFKIGACRHGDRCSRLHNKPSVSPTLLLSNMYLRPDMITPGIDAQGNPIDPEKIQADFEDFYEDIFEELSKYGEIESLHVCDNFADHMIGNVYVQFREEDQAARALQALTGRYYSGRPIIVEFSPVSDFREATCRQYEENSCNRGGYCNFMHVKEIGRDLRKRLFGHLHRSRRSHSHGRSRSPSPYHYRRDYDRRSSSRSRDHDDYYRGGSHDYYRGGSRRSSERHRSSYDSDGSRRRHRSRTRSPVRDGSEERRAQIEQWNREREAAQV

SEQ ID NO: 25625 - protein, 228 aa, Oryza sativa
  Clone ID: TF_LIB4309-025-R1-N1-C2.pep
LANPSSAAADLDARLAGARRSMGVLYHQPIMGSHSTVEQIEALYSSNTMTKRPRLESSLPIYPQRPGEKDCAFYMMTRTCKFGGSCKFDHPQWVPEGGIPNWKEQAANVEESYPEQEGEPDWPFFMKTGKCKFGSKCKFNHPKEKGNALSSGNTNDKHLIADRSILPVRPSEPLCSFYAKTGKCKFRAMCKFNHPKDIEIPSSQNEPQSAVTVEGETDIGSAADSVSA

SEQ ID NO: 25626 - protein, 476 aa, Oryza sativa
  Clone ID: TF_OsC53320_1.pep
MTSISHMDFPKIVEGGLKQMLELLGDDNAPFDVVHSAGRKHIKQEGYSYPLCCRILEVLYKSRQQFHLRTFCVLGSNTTTDSYGNTRPIIGGFVVETSSGAVNPASFEMNSRCPDEIVRRIRVSVSSYDPNWQGRLLETYDTHSDAFEIAPACWMPDWAEMASSLNQLSDSEVLLQCSTSPAAEPPHFVENERRIWRYLIENPYWQDTFPKYKPRVFHRTSDGSTSGCPFGSSCHFLHNFPGGYQAAAKMTSHGGTAVAAPPGRMPLGPGAPNGPPTSSVKTRMCNKYNTAEGCKWGSKCHFAHGERELGKPMLLDNSMPHPMGSMPFEAPPMPGPDIVPPSTFGASATAKISVDASLAGGIIGKGGTNTKHISRMTGAKLAIRDNESNPNLKNIELEGTFDQIKHASAMVTELIVRISGNAPPAKNPGRGSHAGGPGSNFKTKLCENFNKGSCTFGDRCHFAHGESELRKPPAAA

SEQ ID NO: 25627 - protein, 422 aa, Oryza sativa
  Clone ID: TF_OsC121777_1.pep
MDDAGRASAPAVVTLPATAAATDEPSHDPAALYGEGMWQQMTMSGSGAMQPGPYPERSGEPDCTYYLRTGLCRMKGEYPERMGQPECQYYLKTGTCKFGPTCKFHHPREKAGIAGRVQLNTLGYPLRPSEKECAYYLKTGQCKYGNTCKFHHPELFNAMASSRGSPIYPSVHSSATAGPPYTGTMASWAFPRGSFIPSPRWQNPSNYAPMIVPQGLVQVPSWNSYTGQMMPVSSSESRLQSPGAQQTYGTSQQVDASAGNQGMLSPYRSSSYPVPQYALQRENVFPERPDQPECQYYMKTGDCKFGAVCKFHHPRVRSMPTPDCVLSPVGLPLRPGEELCKFYSRYGICKFGANCKFDHPTMAPPMGVYAYGSASTNVPMIVGIGFSGSWQQGAKDPTDSSGAPPNTHVLGEDPIPYRKIAV

SEQ ID NO: 25628 - protein, 704 aa, Oryza sativa
  unsure (1)..(704): unsure at all Xaa locations
  Clone ID: TF_OsC359_6768.pep
MSHLEGDKELDENGDGSTSKGTSTPKGASISFDYNKLTIPSHNFVSVPSLRSPQFDGTYYAAWKHKMKLXVHLISLHPSIWKVVCTCVDVPNEDMEFTTEQEKAIHLNAQAANAILSALSPEEFNKVDGLEEAMEIWDTLQLAHEGSPAVRESKIELLEGRVGRFVMDDKETPQEMYDRMMLLVNKIRGLGSEDMTNHFVKRLLRVFVPRNPILVSMIRERKDYKRLSPSDILGRIVSNEMLEEEARELKQMVKNAAMIKNQEIGLKANQEEMALIVNRFKHFLRKSGYGKGRKEDDKGKRQSKRACFKCGEYGHFIADCPKTNEAKHKVVKKKPDRAHVAEAHMAEVWYSGDEGSPKAMEKGDGDGGVATVAIKSSSTKERLFNILSDDDNDSYHHSCFMDHGRKVMPIQKPSLDDDNTSDEDSDNELDXMFKNFSKPAMKQLSKLMKALDSKERFLERQEDLLILEKKXNLALEEDLAKEGERIELLQYEISLLNDSMASLTSVNETLQEELVVLDKXHINLEVEIDTLRNSASSLNETPMTPMPSISVGCARCYNYDLSSYATNLEAMEALEKKNERLGTLVKYGCMKTYHSKDALYKTIATNPNKDGHELGFSDESPVSKRVVVNGKIFLMFVREGKAPQESEVTLPFVGQRPGASGQNVQNFLAPVRIIVLLAPGLAGPWPSAGPARAREGEGNGPAAH

SEQ ID NO: 25629 - protein, 59 aa, Oryza sativa
  unsure (1)..(59): unsure at all Xaa locations
  Clone ID: TF_LIB4506-043-R1-K1-B5.pep
ESVRMRVRHQEHPDDKCRNCNKIGHWAKDCRSKAKXAEGHIAAEDDDEPTLLMARTCFG

SEQ ID NO: 25630 - protein, 1504 aa, Oryza sativa
  Clone ID: TF_OsC1517_1379.pep
MASRPRRAARAPARFGFEDGRVEPEANHESANERSHHSNRSHRTASRNAEVEQPRRSNRSHRTASRDAEIEQSHRSHRTASHNSGEERLPSPPHVENNMQHLMAVQTQILQGLAAAVAGFQHNAHGNGHPHTNNNRSKLTDFLRSRPPEFSQTVEPVEADDWLKDVDRKLNLVQCTPVEKTLYASHQLRGPAADWWENYCNAHPEPTNIAWDEFATAFRAAHVPESTIDMKKEEFNRLKQGNSSVNEYLSMFNKLARYAPEEVDTDKKKIRKFLKGIAVGMRLQLLAHDFPTFQYMINKALLLEDARKEATEEYKKRKSNHQGNSSRGAPHPRYGQPMQYHQSVTQANRQPGYAPRPQMNRPAPQPQQRAPSGNTAPNSVTSFKSPQGPTTVQCFRCDQMGHYARQCPQNPTNTNSGHANGSTARTPTPAAAQFRPSSQASGQGSRASNNFGRGRVNHIQAETAQDAPDVVMVHSPGRNIRATQICPEVNLRIEEVDFLAKPIVLDSQSLDIILGMDWFAKHKGQIDCAKKSITLQGPGGKQVRFTSNTPTASRSILTCLQVTSLESVPIVCEYPDVFPEELTSMPPDREIEFAIELAPGTAPIAKRPYRMAANELAEVKRQIEELESKGYVRPSSSPWGAPVLLVKKKDGSERMVIDYRALNEVTIKNKYPLPWIDDLFDQLKGARVFSKIDLRSGYHQLKIRSEDIPKTAFSTRYGLYEFTVMSFGLTNAPAFFMNLMNKIFMDYLDQFVVVFIDDILIYSKNEEEHAEHLRLIMEKLRDHQLFAKFSKCEFWLDRIAFLGHVISSSGVEVDPSKVEAVLAWNPPKNVSEIRSFLGLAGYYRRFIEGFSKLARPMTELLKKEKKFQWSAACEDSFQEMKKRLTTAPVLTLPDIRKDFEIFCDASRQGLGCVLMQERKVVAYASRQLRPHEVNYPTHDLELAAVIHALKIWRHYLIGNRCEVYTDHKSLKYIFTQTELNMRQRRWLELIKDYDLGIHYHPGKANVVADALSRKAYCNVAQIRPDQDHLCRELEKLRLTVVQTGVPASLTVQPTLESQIREAQKDDEGIKELIKRIQEKKDTNFSIDDQGTVWCDSRICVPAKKELRDLILKEAHESAYSIHPGSTKMYQDIKAYFWWAGMKRDVAEYVALCDICQRVKAEHQRPAGLLQPLPIPEWKWEEIGMDFITGLPRTPSGYDSIWVIVDRLTKSAHFVPVKTTYDGRKLAELYMTHVVCRFGCPKKIVSDRGTQFTSRFWKQLHEALGTDLNFSTAYHPQTDGQTKRVNQILEDMLRACALDFEGTWDRCLPYAEFSYNNSYQASIQMSPNEAMFGRKCRTPLCWNEVGEALDRQKNYADNRRHDLEFEKGDHVYLRVSPLRGMRRFGMSGKLAPRYIGPYLITARRGEVAYQLELPEGLADVHNVFHVSQLKKCLRVPEEQVPLGNIELEKNLTYKERPIKVLEEAERQTRRKTIKFYKVQWSNHSEDEATWEREDLLRAEFPELLP

SEQ ID NO: 25631 - protein, 1204 aa, Oryza sativa; identical to SEQ ID NO: 19868
  Clone ID: TF_OsC1528_1944.pep

SEQ ID NO: 25632 - protein, 917 aa, Oryza sativa
  Clone ID: TF_OsC22400_1.pep
MARTASAATGGDEPPPEPHHQAGVQRPPKNDGDGGEEAGGGNVGVPAAAADEDPTAGAVGAAGRGSRRRRKAGRRAAAPDEEDLDTILAEIDQNMASAALDSMPEMNLAQASASTAMDVAATVNDVGAEVKDDEMEAESAAPKRRKRKKEKEKERKTTSKVAEADAKKPPRHVRVMLEVLAKRKEAEELRKREEELRKRKAEEERLQREEDERMVEEMKMQQKERDKGKTMKKRQDGKTLTGKQKEEARRLDAMRRQFLGQSRILARSDLGNDGGANERKKRPIYDSKRKKVQSKADEAANGDGGHMQELHKVNKEEEECAIMEEQPHYRVEEDGEKIKLEEIKGAESVERINFEERITKEEKNEAMKSSNEEVVSLVTGWKNRIEEWDVDVDENDKDTRKLTPKRDPAKVDKAEKYTDLRSPICCILGHVDTGKTKLLDCIRCTNVQGGEAGGITQQIGATFFPIENIRERTKELKAGAALHVPGFLVIDTPGHQSFSNLRTRGSSLCDIAILVVDIMRGIQAQTIESLNILKRHKADFIIVLNKVDRLFGWKRCPNAPIKKALKQQAEGVKMEFDARLTDCTVLEVKVTEGHCTTIDVVLANGFLREGDQIVTCGMQGPIVTHIRALLTPHPMKELRIKCPYQHHKEIKASQGIKISAPGLEHSVAGTSLFVVQPGDDQEKSVNKAMAEMVVLMNRIDKNSDALIEFLKSPAVNIPIYDFNIGPVHRKDVMKASVMLEKKKEYAAIFAFDVKVMPDAREIANESGVKIFVADVIYHLFDQFTTYIEGLREIEKDEKIVEAVFPCVLKIIPDYVFNLKDPIVLGVDVLEGVAKVGTPLCLPSNGFARIGNIASIQNSSKQVDVARKGEKVAIKNIVLGVFDRSQEALQMSKRNVSGDLTLKEWELVRTLKHIFRIP

SEQ ID NO: 25633 - protein, 1294 aa, Oryza sativa
  unsure (1)..(1294): unsure at all Xaa locations
  Clone ID: TF_OsC1713_4887.pep
MQYFFVSRGKPSEPPLSPEEEAKFEAADCLFRGALISXVLADNIVDVYMHMPLGKEMWDALEAKFRVSDPSSELYIMEQFYDXEMVDDRSVVEQAHEIQMLAKELENNRCELPYKFVAGGIIAKLPPSWSDFAISLKHKRQEFTVTDLICSLGVEEKARAKDNRGKRVEGSSSVNXASHNNKKVKPDVKLKATNTFKKKGMGKPKGDCFVCGKPGHXAKDCPKRKDRKFANMVISEGGRTSGYGKFLPTIVSVCHSPDWWVDTGANIHVCANISLFSSYQARRGSSLLMGNGSLAAVLGVGTVDLKFTSGKTVQLKNMQHVLSIKKNLVSSSLLCRDGFRLVSESNKCVVSKYETFIGKGFDSGGLFRFSLDNMCNKIVNYVSNDDESNVWHSRLCHVNFGCMTHLDNMSLIPKFTLVKGAKFHTCVQSKQPRKPHREFEARNLAPLELIHSDLCEMNGVXTKGGKKYFMTLIDDCTRFCYVYLLKTKDEALHYFKIYMAEVENQLERKIKRLRSDRGGEFXSNELTSFCEEFGIIHERMPPYSPXSNGVAKRKNCTLTELVNAMLDTAGLSKESWGEAILIACHVLNRIPTKHKEVTPFEEWERRKLNLSYLLTWGCLAKVNISIGXKLGPKTVDYVFLGYAIHSVGYRFLIVNSGVPDMRVGTITESRDATFSTSSEEPILTPEHFAPIEHIDQTPEGNPEEDNNVATRKSMRQSTAKSVCDDYIVYIVDNTPRTIEEAYSSPNANYWKEAVHSEMDSIMSNGTWEVIERPFGCKPXGCKXVLKKNLRLDGTIEKYKARLVAKGYTQKEGEXFFDIYSSVACLTTIRVLFATAASHGLLVHQMDVKIAFLNGELEEEIHMDQPNGYTLEGQEGIMCKLLKSLYTLEAVEVLKQAPKQWHEKFDKTLTSAGFVVNEADKCVFYRYGGGERVILCLYVNDMSIFGTSLNLIEEVKDFLSKSFEMKDLGVADVILNIKLLRGDEGGITLVQSHYVDKVLSRFGYSDCKAAPTPYDPSVLLRKNRRIARDQLRYSKIIGSLMYLASATRPDISFAVNKLGRFVSNPGDDHWHALERVMRYLKGIMSYEIHYVGYPKVLEGYSESNWIFDADEIKATSGYVFTLGGGAVSWKSCKQTILTRSTMEAELTALDTATVKAEWLRELLMDLPVVEKPVPAILMNCDNQTVIIKVNSSKDNMKSSRHVKRRLKCLRSSVRLRTCTGRRAIKFLGSASSATALVLRGYCCYIGAFTKMSTEIGDKKMNDINGGNTASKSSAHRDGGCQAHPGTPGGFATGGG

SEQ ID NO: 25634 - protein, 1731 aa, Oryza sativa
  unsure (1)..(1731): unsure at all Xaa locations
  Clone ID: TF_OsC359_7611.pep
VPTFPESPILEGKILKNSRASKATPGLEWYIPGLEIELCSRXGCSGWLGLCNGMPRFKPEYLFGTEGFVQELRTMSFAIGFGTAPLYAQIPHDRDEEKCRVKVTLNTNHEDIPSLMFEAGGGNYIHACQEVARIAIGELRDCYSDQLADTEYRYHPRQPQGSDRGSYLEPAGIENDATTRHLVEMLWAMDEFRAEIVLAAQDREDRNRGKICKLEDKVDRLEKELAALKGEAPPQKARVRLTTRKRALFVPRYQLAPKMVLTHSNGNGPNNNNNNNNNNGENPTLAQVLVQQAQLMNMMMQQFQNQQNQGNNHAPPQNKLAEFLRVRPPTFSSTTNPVEASDWLHAIEKKLDLLQCTNQEKVSFASHQLHGPASEWWDHFRLNRTTAEPITWLEFTAALRKTHIPSGVVSPKKKEFRTLTQGSRSVTEYLHEFNRLARYAPEDVRTDEERQEKFLEGLNDELSYPLMTGDYHDFQKLVDMAIRQEDKYNRMEQKKRRIAHFKAQQGNSQRPCLAMGPQAVSQGGSSLVARPQRQFFNNNSGNNNRNQAPRPVATLAQHQPAKREPGNKPRVCFNCGEPGHYSDKCPKPRRVKVVPAQNNSTAPVSKARVNHVAAAEAQGAPDVILGTFLVNSVPATVLFDSGATHSFLSMSFARNHGMEVEDLRRPLMVSTPSNQALSSQRSPSVRIEIQGVPFLANLILLESKDLDVILGMDWLARYKGVIDCANRKVTLTSNDGQVVTVYALPSEPLRSSLNQVSLEEIPIVQDYPDVFPDDLPGMPPKRDIEFRIDLVPRKTPIHKRPYRMAANELAEVKRQVDDLLQKGYIRPSSSPWGAPVIFVEKKDHTERMCMDYRALNDVTIKNKYPLPRIDDLFVQLKGATVFSKIDLRSGQLRIKEEDIPKTDFTTQDGLFECTVMSFGLTNAPAFFMNLMNKVFMEYLDKFVVVFIDDILIYSRTKEEHEEHLRLALEKLREHQLYAKFSKCEFWLSEVKFLGHVISAGGVAVDPSNVEXVTNXKQPKTVSEIHSFLGLAGYYRRFIENFSKIAKPMTQLLXKDVKYKWSEECEQSFQELKSRLISTPILILPDPKKGFHVYYDASKLGLGCVLMQDGKVVAYASRQLHPHEKNYPSHDLELAAVVHALKIWRHYLFGTRTEVYTNHKGLKYIFTQPDLNMRQRRWLELIKDYDMGIHYHPGKANVVADALSRKGYCNATEGRRLPWELCKEFERLNLGIVSRGFVAALEAKPTLIDQVREAQINDPDIQEIKKNMRRGKAIGYLEDEQGTVWLGERICVPENKELKNAILKEAHDTLYSIHPGSTKMYQDLKEKFWWASIKREIAEYVAVCDVCXRVKAEHQKPTGLLQPLMIPEWKWEEIWMDFITGLPRTSSGHDSIWVIVDKLTKVAHFIPVRTTYSGSRLAELYMARIVCLHGVPKKIVSDRGSQFTSKFWKKLQEEMGSKLNFSTAYHPQTDGQIERVNQILEDMLRACALDFGGSWDKNLPYAEFSYNNSYQASLQMAPYEALYGRKCRTPLLWDQTRERQVFGTDILREVEEKVKITQERLRIAQSRHKSYADNRRRDLSFEEGDHVYLRVMPLWGVHRFHTKGKLAPRFVGPYKIVSRRGEVAYQLELPQCLAGVHNVFHVSXLKKCLRVHTEEANLEQIEIQEDLTYVEKPIRILETDERRTRNRVIRFCKVQWSNHSEEEATWEREEELKSAHPHLFASSSESRGRDSV

SEQ ID NO: 25635 - protein, 971 aa, Oryza sativa
  unsure (1)..(971): unsure at all Xaa locations
  Clone ID: TF_OsC1528_2115.pep
MAKELELLKFVLPDKFVVGCIIAKLPPSWRGFGTALEHKRHEYSVKGLIASLDVEEKAREKDAASKGDGGQSSANVVHKAQNKSKGKYKAQQTTNFKKQKKNNNNPNQDERTCFVCGQPGHLARKCLQRKGMKAPAGQTSKSANVTIGNTGDGSGYGNLPTVFSVNQSTNWWVDTRANVHVCADILLFSSYQVARGFTVLMGNGSHASVHGVGTVDLKFTSGKIVQLKNVQHVPSIDRNLVSGSRLTRDGFKLVFESNKVVVSKHGYFIGKGYECGGLFRFSLFDFCNKSVNHICGSVDDEANVWHSRLCHINFGLMSRLSSMCLIPKFFIVKGSKCHSCVQSKQPRKPHKAAEERNLAPLELLHSDLCEMNGVLTKGGKRYFMTLIDDATRFCYVYLLKTKDEALDYFKIYKADVENQLDRKIKRLRSDRGGEFFSNKFDLFCEEHGIIHERTPPCSPESNGIAERKNRTLTDLVNAMLDTAGLPKAWRGEALLTSNHVLNRVPNINKDKTPYEIWIGRKPSLSYLRTWGCLAKVNVPITKKRKLGPKTVDCVFLGYAHHSIAYRFLIVKSEVPDMHVGTIMESRDATFFESFFPMKDTHSSSSQPFEVIPSSITLPEQTEHTHEHVTEEDVSEAPRRSKRQRTAKSFGDDFTVYLVDDTPKSISQAYASLDVNYWKEAIRSEMDSIIANGTWEVTERPYGCKSVGCKWVFKKKLRPDGTIEKYKARLVAKGYTQKEGEDFFDTYSPIARLTTIRVLLSLAASHGLLVHQMDVKTAFLNGELDEKIYMDQPDRFVVEGQQGKVCKLLKSLYDLKXAPKQWHEKFDRTLTSARFAVNEADKCVYYHYGGGEGVILCLYVDDILIFGTNLEVISEVKSFLSQSFHMKDLGVADXINIKLIRGENGTTLLQSHYVEKILNRFGYIDSKPSQTPYDSNLLLRKNKRIAGNQLEYSQIIGSLMYYAGALLVGIHM

SEQ ID NO: 25636 - protein, 1214 aa, Oryza sativa; identical to SEQ ID NO: 20205
  Clone ID: TF_OsC1528_1610.pep

SEQ ID NO: 25637 - protein, 174 aa, Oryza sativa; identical to SEQ ID NO: 20011
  Clone ID: TF_OsC25048_1.pep

SEQ ID NO: 25638 - protein, 142 aa, Oryza sativa
  Clone ID: TF_OsC25048_4.pep
MRVPGARAHEGKSTYESQKEWRDLTRVHVVSRDVLSFLGIPTGASCARQLGNRETGLGGGESGSCGIEGCDCGCDSCYDAFHYPDLQDQYANDIHEQSAQFHHTHSTSSQTHHVDHDLRGYLSSVRAQLSIHSCLLKEEPRI

SEQ ID NO: 25639 - protein, 1114 aa, Oryza sativa
  unsure (1)..(1114): unsure at all Xaa locations
  Clone ID: TF_OsC266287_1.pep
MSPFSGASLARSLSPDTHPRHHRLRPSPNPPLLPLPPDPPASLASPTLEFFPPVGPSRQPPTLPSLGVPASDPAFVSRRYRVPGTGCPFRSAVSSPDLQNPMLDSSSAPNPRLSSRCQGSPKGELPGFKRLYSDVVTAPPQPPAAKSSDFIAVQPPSRFSGAVAKDIRILQSGRLLDLSTQNLSASAQGTGDIQVGENPWKEVKGKRRWRNHSAFTTPNNLEQMHSRKARFLQHMEGKCFRCLSTKHKIVDCREPFRCWRCLKFGHLASSCSKKFAYKSTLPPLKTHTEAFPALAPLCFPPRSFPSPPKSPIMDDLTARPLLDSVVISATGEIERNRERFSAHSLVAWQVGAQEGRVELNTFADDVPSAFNIRRADIQFTKFHPEDFFITCSNQAAKVIGRKCSIHYVEEYSRRRNYNRTFDLWIWTDEPRAIPRGGTFAITSADEEGLATDIPLPDLEPLRNPPPSEPKKGWTYNVLVHVDTLEDLLSRKARAYKWDYDVQDDGTLYKEYPLPCRAEPDPTRGPADDDEDKDRDNHSRSRHRSRSLWDRLRRRSSSRSREPDRRDGHCQDNENRGRPRNRERSEHRSRSCRSRDPSEGSEEVLTLLESHLDPMLHEATVQHSIYSPDTSSPRAVSPVFVPSFAVQGTSQEELAATQASPVQEFIAALSTPVQPPLLPAPETQARRPGRAKVTIPALSSAQRHSERLLRKRRAGAKLESFAQEILSKNFGIMDERSSFDHNIKKIYLQRYKKPLSPASLKTIAELVEKGGCKSIRLKASKKATVAPLGLNSKAKQDSVRCILQQHGATIVCLQETKLSSISDRIILNTLGQRFLRHCVSLPATGTRGGVLLACDENYFSISDVLLGTYSVSAVLTMRGEGLQWSITVVYRPQLEPDKINFLSELEALQTSMKSAWLIIGDFNLIYKASDKNNDRHNRRMMQRFRGLIDKLQVKELYLPGRRFSWAGEGINPTQTKIDRAFVTTDWDMMFDCSNLYPLSSACSDHAPLLLVGNEKMNRFPSFRFEAFWLKIPGFLDIVTDSWTNPILSTNRLAIIRLKLRRLAQDLKRWSRNHVGDIKLQLAVATEVIFQLEXLADGERALLSNLKNRILALSVL

SEQ ID NO: 25640 - protein, 572 aa, Oryza sativa
  unsure (1)..(572): unsure at all Xaa locations
  Clone ID: TF_OsC359_7110.pep
MAAAGDHRGAGAPPPVGRAGEAAFGRAPRLPCGARPSAARALGAADAWDPRRRPAQAACARSTVDREAAAWAPLPWTRLGSGCMVLIVAPRPYKDRSSGLCCKALPYFHMSSGANEGYTSCGPVVEMSWHRAGVLLLGXSILPTCPGGSGRRXGVGSVLLFMARMGWELCHVFRPYTVVMFNREKGKNVSGYTSSNSSFQLNPPLASRELTRAHPWSIPSMLLSSQLPLVRSQDQNQYVFDRAFAPQVNELPMPEEDVPFCHDCREQGHYALNCPWVYAKEAPSFGLAVQTSLNQPPHTKSSLQPSVQSREPNGENPLNPGKCFPPSLSYHVGSRTKQAKGKKSKNQKRKAPMRTEEEVRKMTITSTEWPPAGITIPRRQRGNTFRGARQLTQHLLSHGGRVSDSEGSDQVSSDDEDESPRHLDEEEMESKACTRCGEIGHIASMCLTLCPYCEEDHPPGECPTRKVTCFLCEGTNHVPKDCQLSVLLTKTAEIQRTTLRLSHQLVSSNSNIDDIIHSTNAPPAAPDSAINHSNNTFSTNHSLHRQPQQRIVVDGRSCVSPRPPVRCRPKGD

SEQ ID NO: 25641 - protein, 599 aa, Oryza sativa
  Clone ID: TF_OsC1528_2171.pep
MSITGDNNNTGDKEKEPPVNSNRGNTTSNSSKWPFSGVLPDSIVDVYMHMPLGKDMWDALEAKFGVSDAGSDLYVMELFYDYKMVDGRSVLEQDHEIQMLAKELENNNCELSDKFVAGGIIAKLPPSWTDFATSLKHKRQEFSVTDLIGSLGVEEKARAKDNRGKKIEGGSSANLVQKKNPHASHNNNKKVKPDVKPKATTNFKKKGKRKAKGVCFVCGKPGHWAKNCPYRKDKKSANMVISEGGGTLGFLIVNSGVPDMSVGTITESRDATFFENEFSMKNAPSTSSQEPILSPEHFALIEHIDQTLEENPEEDNILATRKSKRQRTAKSFGDDYIVYLVDDTPRTIEEAYSSSDADYWKEAIRSEMDSIMSNGTWEVVERPYGCKPVGCKWVFKKKLRLDGTIEKYKARLVAKGTMSYGIHYAGYPKVLEGYSDSNWISDADEIKATSGGRLHSTGILDGSDETNLFETSSTEKDFNSGNGQPPFRAAVNPEADQPDTPADPTPSRPPSPPVPRKGSSYTSDQAVTHSRLWPTDRPRRGGGEARPPTAVTGGAGSGGDGRKAAAHGRSSGVAGRPKRKTKAATTTRREEGRTSGGDT

SEQ ID NO: 25642 - protein, 1532 aa, Oryza sativa; identical to SEQ ID NO: 20027
  Clone ID: TF_OsC359_5735.pep

SEQ ID NO: 25643 - protein, 1283 aa, Oryza sativa; identical to SEQ ID NO: 20126
  Clone ID: TF_OsC359_5774.pep

SEQ ID NO: 25644 - protein, 1775 aa, Oryza sativa
  Clone ID: TF_OsC359_5862.pep
MSYQSSAALRSSPGIAGAPSHRHPEAPAVTLLAAGRLLPPFGLSIPSFLESPFSRKKSLKSSKASKAAPGLEWYIPGLEIELCSRGGCSEWLGLYNRMPRYKPEYLFGVEGFVQELRTMSFVIGFGTAPFYAQIPHDRHEEKCRVKVTLNSNSEDVPSVMFEAGGRNYIHACQEVARIAIGELRDRYSDQLADTEYRYHPRQPQGSDRGSYLETEGIENDVTTKHLVEMLWAMDESRAGTVLAAQDREDRNRGKICKLEDKVDRLEKELAALKGEAPPQKARIRLTARKRALFVPRYQLAPKMVNTRSNGNGPNNPNNNNNGENPTLAQVLAQQTQLMNMMMQQFQNQQNQGNNHAPPQNKLAEFLRVRPPVFSSTTNPVEASDWLHAIEKKLDLLQCTDQEKVSFASHQLHGPASEWWDHFRLNRTTAEPITWLEFTAAFRKTHIPSGVVSLKKKEFRSLSQGSRSVTEYLHEFNRLARYAPEDVRNDEERQEKFLGGLNDELSYPLMVGDYPDFQKLVDKAIRQEDKYNRMEQKKRRIAQFKTQQGNNQKPRLTLGPQPMPQGGSSSVVRPQRQFFNNNAGNNIRNQAPRPVAAPTQQQPAKREQGNKPVVCFNCGDPGHYADKCPKPRRVKVVPAQSNSTVSASKARVNHVAAAEAQDAPDVILGTFLVNSVPATVLFDSGATHSFLSMSFAGNHGMEVEDLRRPLMVSTPSNQALSLQRSPSVRIEIQGVPFLANLILLESKDLDVILGMDWLARHKGVIDCANRKVTLNSYDGRVVTVHALSSEFLRSRLNQITLEEIPIVREYPDVFPDDLPGMPPKRDIEFRIDLVPGTTPIHTRPYRMAANELAEVKRQVDDLLQKGYIRPSSSPWGAPVIFVEKKDHTQRMCVDYRALNDVTIKNEYPLPRIDDLFDQLKGATVFSKIDLRSGYHQLRIKEEDIPKTAFTTRYGLFECTVMSFGLTNAPAFFMNLMNKVFMEYLDKFVVVFIDDILIYSRTKEEHEEHLRLALEKLREHQLYAKFSKCEFWLSEVKFLGHVISAGGVAVDPSNVESVTNWKQPKTVSEIRSFLGLAGYYRRFIENFSKIAKPMTRLLQKDVKYKWSEECEQSFQELKSRLISAPILILPDPKKGFQVYCDASKFGLGCVLMQEGKVVAYASRQLRPHEKNYPTHDIELAAVVHALKIWRHYLFGTRTEVYTDHKSLKYIFTQPDLNMRQRRWLELIKDYDMGIHYHPGKANVVADALSRKGYCNATEGRQLPLELCKEFERLNLGIVGRGFVAALEAKPTLIDQVREAQINDPDIQEIKKKMRRGKAIGFLEDEHGTVWLGERICVPDNKDLKDAILKEAHDTLYSIHPGSTKMYQDLKERFWWASMKREIAEYVAVCDVCQRVKAEHQKPAGLLQPLKIPEWKWEEIGMDFITGLPRTSSGHDSIWVIVDRLTKVAHFIPVKTTYSGSRLAELYMARIVCLHGVPKKIVSDRGSQFTSNFWKKLQEEMGSKLNFSTAYHPQTDGQTERVNQILEDMLRACALDFGGSWDKNLPYAEFLYNNSYQASLQMAPYEALYGRKCRTPLLWDQTGERQVFGTDILREAEEKVKIIQERLRVAQSRHKSYADNRRRDLSFEEGDYVYLRVTPLRGVHRFHTKGKLAPRFVGPYKIVSRRGEVAYQLELPQSLAGVHNVFHVSQLKKCLRVPTEEANIEQIEVQEDLTYVEKPIRILETSERRTRNRVIRFCKVQWSNHSEEESTWEREDELKSAHPYLFASSSESRGRDSV

SEQ ID NO: 25645 - protein, 1713 aa, Oryza sativa
  unsure (1)..(1713): unsure at all Xaa locations
  Clone ID: TF_OsC359_6016.pep
MICTAGYGCSEWLGLYNRMPRYKPEYLFGVEGFVQELRTMSFAIGFGTAPFYAQIPHDRHEEKCRVKVTLNSNSEDVPSVMFEARGRNYXHACQEVARIAIGELRDRYSDQLADTEYRYHPRQPQGSDRGSYLETEGIENDATTRHLVEMLWAVDETRAETVLAAQDREDRNRGKICKLEDKVDRLEKELAALKGEAPPQKARIRLTARKRALFVPRYQLAPKFSPVSLLVSCPCQMVLTHSNGNGXPNNNNNNNNNGENPTLAQVLAQQTQLMNMMMQQLQNQQNQGNNHAPPQNKLAEFLRVRPPIFSSTTNPVEAGDWLHAIEKKLDLLQCTDQEKVSFASHQLHGPASEWWDHFRLNRTIAEPITWLEFTAAFRKTHIASGVVSLKKKEFRSLTQGSRSVTEYLHEFNRLARYAPEDVRNDEERXEKFLEGLNDELSYSLMTGDYLDFQKLVDKAIRQEDKYNRMEQKKRRIAQFKTQQGNNQRPGFTLGPPSMPQGGFLSVVCPQGQFFNNNAGNNIRXNQAPRPVAASTQQQPAKKEQGSKPVVCFNCGDPGHYADKCPKPRRVKVVPAQSNSTAPAPKARVNHVAAAEAQGAPDVILGTFLVNLVPATVLFDSGATHSFLSMSFAGNHGMEVEDLRRPLMVSXPSNQALSLQRSPSVRIEIKGVPFLANLILLESKDLDVILRMDWLARHKGVIDCANRKVTLTSNDGRVVTVHALSSEFLRSRLNQIXLEEIPIVREYPDVFPDDLPGMPPKRDIEFRIDLVXPGTTPIHKRPYRMAANELAEVKRQVDDLLQKGYIRPSSSPWGAPVIFVEKKDHTQRMCVDYRALNDVTIKNKYPLPRIDDLFDQLKGATVFSKIDLRSGYHQLRIKEEDIPKTAFTTRYGLFECTVMSFGLTNAPAFFMNLMNKVFMEYLDKFVVVFIDDILIYSRTKEEHEEHLRLALEKLRGHQLYAKFSKCEFWLSEVKFLGHVISAGGVAVDPSNVESVTNWKQPKTVSEIRSFLGLTGYYRRFIENFSKIAKPMTRLLQKDVKYKWSEECEQSFQELKNRLISAPILILPDPKKGFXVYCDASKLGLGCVLMQDGKVVAYASRQLRPHEKNYPTHDLELAAVVHALKIWRHYLFGTRTEVYTDHKSLKYIFTQPDLNMRQRRWLELIKDYDMGIHYHPGKANVVADALSRKGYCKATEGXQLPLELCQEVERLNLGIVRRGFVAALEAKPTLIDQVREAQINDPDIQEIKKNMRGGKAIGFLEDEQGTVWLGERICVPDNKDLKDAILKEAHDTLYSIHPGSTKMYQDLKERFWWASMKREIAEYVAVCDVCQRVKAEHQKPAGLLQPLKIPEWKWEEIGMDFITGLPRTSTGHDSIWVIVDRFIKVAHFIPVKTTYSGSQLAELYMARIVCLHGVPKKIVSDRGSQFTSNFWKKLQEEMGSKLNFSTAYHPETDGQTERVNQILEDMLRACALDFGGSWDKNLPYAEFLYNNSYQASLQMAPYEALYGRKCRTPLLWDQTGERQVFGMDILREAEEKVKIIQEGLRVAQSRHKSYADNRRRDLSFEEGDYVYLRVTPLRGVHRFHTKGXLAPRFVGPYKIVSRSGEVAYQLELPQSLAGVHNVFHVSQLKKCLRVPTEEANLEQIEVQEDLTYVEKPIRILEIDERRTRNRVIRFCKVQWSNHSEEESTWEREDELKSAHPHLFASSSESRGRDSV

SEQ ID NO: 25646 - protein, 744 aa, Oryza sativa; identical to SEQ ID NO: 20035
  Clone ID: TF_OsC359_6046.pep

SEQ ID NO: 25647 - protein, 1534 aa, Oryza sativa; identical to SEQ ID NO: 20141
  Clone ID: TF_OsC359_6050.pep

SEQ ID NO: 25648 - protein, 1827 aa, Oryza sativa
  unsure (1)..(1827): unsure at all Xaa locations
  Clone ID: TF_OsC359_6406.pep
KDPRCLLYPSQPSPSPLVVGRALAPCALASPSPPPLQPCSAVAPAVAAAREDRRRHRQVAAVLVRPFAAVGTRRSFVAVDNPKVAAASFSSPSSSVIPSFPESPFSQKKSLKSSKASKATPGLEWYIPGLEIELCSRGGCSEWLGLYNRMPRYKPEYLFGVEGFVQELRTMSFVIGFGTAPFYAQIPHDRHEEKCRVKVTLNSNSEEVPSVMFEAGGRNYIHACQEVARIAIGELRDRYSDQLADTEYRYHPRQPQGSDRGSYLETEGIENDVTTKHLVEMLWAMDESRAETVLAAQDREDRNRGKICKLEDKVDRLEKELAALKGEAPPQKARIRLTARKRALFVPRYQLAPKMVNTRSNGNGPNNPNNNNNGENPTLAQVLAQQTQLINMMMQQFQNQQNQGNNHAPPQNKLAEFLRVRPPVFSSTTNPVEASDWLHAIEKKLDLLQCTDQEKVSFASHQLHGPASEWWDHFRLNRTTAEPITWLEFTAAFRKTHIPSGVVSLKKKEFRSLTQGSRSVTEYLHEFNRLARYAPEDVRNDEERQEKFLGGLNDELSYPLMVGDYPDFQKLVDKAIRQEDKYNRMEQKKRRIAQFKTQQGNNQKPRLTLGPQSMPQGGSSSVVRPQRQFFNNNAGNNIRNQAPRPVAAPAQQQPAKREQGNKPVVCFNCGDPGHYADKCPKPRRVKVVPAQNNSAVPASKARVNHVAAAEAQDAPDVILGTFLVNSVPATVLFDSGATHSFLSMSFAGNHGMEVEDLRRPLMVSTPSNQALSLQRSPSVRIEIQGVPFLANLILLESKDLDVILGMDWLARHKGVIDCANRKVTLNSYDGRVVTVHALSSESFRSRLNQITLEEIPIVREYPDVFPDDLPGMPPKRDIEFRIDLVPGTTPIHKRPYRMAANELAEVKRQVDDLLQKGYIRPSSSPWGAPVIFVEKKDHTQRMCVDYRALNDVTIKNKYPLPRIDDLFDQLKGATVFSKIDLRSGYHQLRIKEEDIPKTAFTTRYGLFECTVMSFGLTNAPAFFMNLMNKVFMEYLDKFVVVFIDDILIYSXTKEEHEEHLRLALEKLREHQLYAKFSKCEFWLSEVKFLGHVISAGGVAVDPSNVESVTNWKQPKTVSEIRSFLGLAGYYRRFIENFSKIAKPMTRLLQKDVKYKWSEECEQSFQELKSRLISAPILILPDPKKGFQVYCDASKLGLGCVLMQDGKVVAYASRQLRPHEKNYPTHDIELAAVVHALKIWRHYLFGTRTEVYTDHKSLKYIFTQPDLNMRQRRWLELIKDYDMGIHYHPGKANVVADALSRKGYCNATEGRQLPLELCKEFERLNLGIVGKGFVAALEAKPTLIDQVREAQINYPDIQEIKKNMRRGKAIGFLEDEHGTVWLGERICVPDNKDLKDAILKEAHDTLYSIHPGSTKMYQDLKERFWWASMKREIAEYVAVCDVCQRVKAEHQKPAGLLQPLKIPEWKWEEIGMDFITGLPRTSSGHDSIWVIVDRLTKVAHFIPVKTTYSGSRLAELYMARIVCLHGVPKKIVSDRGSQFTSNFWKKLQEEMGSKLNFSTAYHPQTDGQTERVNQILEDMLRACALDFGGSWDKNLPYAEFSYNNSYQASLQMAPYEALYGRKCRTPLLWDQTGERQVFGTDILREAEEKVKIIQERLRVAQSRHKSYADNRRRDLSFEEGDYVYLRVTPLRGVHRFHTKGKLAPRFVGPYKIVSRRGEVAYQLELPQSLAGVHNVFHVSQLKKCLRVPTEEANIEQIEVQEDLTYVEKPIRILETNERRTRNRVIRFCKVQWSNHSEEESTWEREDELKSAHPHLFASSSESRGRDSV

SEQ ID NO: 25649 - protein, 1012 aa, Oryza sativa; identical to SEQ ID NO: 20111
  Clone ID: TF_OsC359_6469.pep

SEQ ID NO: 25650 - protein, 1330 aa, Oryza sativa
  Clone ID: TF_OsC359_6565.pep
MVRCGGLCYARGIVTAPFRAPGLEWYIPGLEIGLCSRDDCSEWLGLYNRMPRYKPEYLFGVEGFVQELRTMSFAIGFGTAPFYAQIPHDRHEEKCRVKVTLNSNSEDIPSVMFEAGGRNYIHACQEVARIAIGELRDRYSDQLADTEYRYHPRQPQGSDRGSYLETEGIENDATTRHLVEMLWAMDETRAETVLAGQDREDRNRGKICKLEDKVDRLEKELAALKGEAPPQKARIHLTARKRALFVPRYQLAPKVRVVEKEVTPAPADPPVVNNKLAEFLRVRPPIFSSTTNPVEAGDWLHAIEKKLDLLQCTDQEKVSFASHQLHGPASEWWDHFRLNRTTAEPITWLEFTAAFRKTHIPSGVVSLKKKEFRSLTQGSRSVTEYLHEFNRLARYAPEDVRTDEERQEKFLEGLNNELSYPLMTGDYPDFQKLVDKAIRQEDKYNRMEQKKRRIAQFKTQQGNNQRPRLTLGPQSMPQGGSSSVVRPQCQFLNNNAVNNIRNQAPRPVVASTQQQPAKREQGSKPVVCFNCGDPGHYADKCPKPRRVKVVPAQSNSTAPASKARVNHVAAAEAQDAPDVILGTFLVNLVPATVLFDSGATHSFLSMSFAGNHGMEVENFRRPMMVSTPSNQALYLQRSPSVRIEIQGIPFLANLILLESKDLDVILGMDWLARYKGVIDCANRKVTLTSDDGRVVTVHALSSESLRSRLNQITLEEIPIVREYPDVFPDDLPGMPPKRDIEFRIDLVPGTTPIHKRPYRMAANELAEVKRQVDDLLQRGYIRPSSSPWGAPVIFVEKKDHTQRMCVDYRALNDVTIKNKYPLPRIDDLFDQLKGATVFSKMDLRSGYHQLRIKEEDIPKTAFTTRYGLFECTVMSFGLTNAPAFFMNLMNKVLMEYLDKFVVVFIDDILIYSRTREEHEEHLRFALEKLREHQLYAKFSCVLMQDGKVVAYASRQLRPHEKNYPTHDLELATVVHALKIWRHYLFGTRTEVYTDHKSLKYIFTQPDLNMRQRRWLELIKDYDMGIHYHPGKANVVADALSRKGYCNATEGRQLPLELCKEFERLNLEIVSRAFVAALEAKPTLIDQVREAQINDPDIQEIKKNMRRGKAIGFLEDEQGTVWLGERICVPDNKDLKDAILKEAHDTLYSIHPGSTKMYQDLKERFWWASMKREIAEYVAVCDVCQRVKAEHQKPAGLLQPLKIPEWKWEEIGMDFITGLPRTSSGHDSIWVIVDRLTKVAHFIPVKTTYSGSRLAELYMARIVCLHGVPKKIVSDRGSQFTSNFWKKLQEEMGSKLNFSTAYHPQTDGQTERVNQILEDMLRACALDFGGS

SEQ ID NO: 25651 - protein, 2155 aa, Oryza sativa; identical to SEQ ID NO: 20094
  Clone ID: TF_OsC359_6605.pep

SEQ ID NO: 25652 - protein, 1721 aa, Oryza sativa
  unsure (1)..(1721): unsure at all Xaa locations
  Clone ID: TF_OsC359_6632.pep
VISLTLLTIIEELCSRDGCSEWLGLCNRMPRYKPEYLFGVEGFVQELRTMSFVVGFGTAPFYAQIPHDRHEEKCRVKVTLNSNSEDIPSVMFEAGGRNYIHSCQEVARIAIGELRDRYSDQLADTEYRYHPRQPQGSDRGSYLETEGIENDATTTHLVEMLWAMDESRAETVLAAQDREDWNRGKICKLEDKVDRLEKELAALKGEAPPQKVRIRLTARKRALFVPRYQLAPKFPPVSLLVPCPCQMVNTRSNGNGPNPNNPNNNNNGENPTLAQVLAQQTQLMHMMMQQLQNQQNQGNNHAPPQNKLAEFLRVRPPIFSSTTNPVEASDWLHALEKKLDLLQCTDQEKVSFASHQLHGPASEWWDHFRLNRTTAEPITWLEFTAAFRKTHIPSGVVSLKKKEFRSLTQGSRSVTEYLHEFNRLARYAPEDVRNDEERQEKFLEGLNDELSYPLMTGDYSDFQKLVDKAIRQEDKYNRMEQKKRRIAQFKIQQGNNQKPRLILGHQSMPHGGSSSVVRPQRQFFNNNAGNNNRNQAPRLIAASTQQQPAKREQGSKLVVCFNCGDPGHYADKCPKPRRVKVVPAQSNSTAPVSKARVNHVAAAEAQDALDVILGTFPVNSVPATVLFDSGATHSFLSMSFAGNHGMEVEDLRRPLMVSTPSNQALSLQRSPSVRIEIKGVPFLANLILLESKDLDVILGMDWLARHKGVIDCANRKVTLTSNDGRVVTVHALSSESLRSRLNQITLEEIPIVREYPDVFPDDLPGMPPKRDIEFRIDLVPGTTPIHKRPYRMAANELAEVKRQVDDLLQKGYIRPSSSPWGAPVIFVEKKDHTQRMCVDYRALNDVTIKNKYPLPRIDDLFDQLKGATIFSKIDLRSGYHQLRIKEEDIPKTAFTTKYGLFECTVMSFGLTNAPAFFMNLMNKVFMEYLDKFVVVFIDDILIYSRTKEEHEEHLRLALEKLREHQLYAKFSKCEFWLFEVKFLGHVISAGGVAVDSSNVESVTNWKQPKTVSEIRSFLGLAGYYRRFIENFSKIAKPMTRLLQKDVKYKWSEECEQSFQELKNRLISAPILILPDPKKGFQVYCDASKLGLGCVLMQDGKVVTYASRQLRLHEKNYPTHDLELAAVVHALKIWRHYLFGTRPEVYTDHKSLKYIFTQPDLNMRQRRWLELIKDYDMGIHYHPGKANVVADALSRKGYCNATEGRXLPLELCKEFERLNLGIVSRGFVAALEAKPTLIDQVREAQINDPDIQEIKKNMRRGKAIGFLEDEHGTVWLGERICVPDNKDLKDAILKEAHDTLYSIHPGSTKMYQDLKERFWWASMKREIAEYVAVCDVCQRVKAEHQKPAGLLQPLKIPEWKWEEIGMDFITGLPRTSSGHDSIWVIVDRLTKVAHFIPVKTTYSGSRLAELYMARIVCLHGVPKKIVSDRGSQFTSNFWKKLQEEMGSKLNFSTAYHPQTDRQTERVNQILEDMLRACALDFGGSWDKNLPYAEFSYNNSYQASLQMAPYEALYGRKCRTPLLWDQTGERQVFGTDILREAEEKVKIIQERLRVAXSRHKSYADNRRRDLSFEEGDYVYIRVTPLRGVHRFHTKGKLAPRFVGPYKIVSRRGEVAYQLELPQSLAGVHDVFHVSQLKKCLRVPTEEAXLEQIEVQXDLTYVEKPIRILETNERRTRNRVIRFCKVQWSNHSEEESTWEREDELKSAHPYLFASSSESRGRDSV

SEQ ID NO: 25653 - protein, 815 aa, Oryza sativa
  Clone ID: TF_OsC359_6662.pep
MLNLVIICLAPGLEWYIPGLEIELCSRDGCSEWLGLYNRMPRYKPEYLFGVEGFVQELRTMSFVIGFGTAPFYAQIPHDRHEEKCRVKVTLNSNSEDIPSVMFEAGGRNYIHACQEVARIAIGELRDRYSDQLADTEYRYHPRQPQGSDRGSYLETEGIENDATTRHLVEMLWAMDESRAETVLAAQDREDRNRGKICKLEDKVDRLEKELAALKGEAPPQKARIRLTARKRALFVPRYQLAPKMVNTRSNGNGPNNPNNNNNGENPTLAQVLAQQTQLMNMMMQQFQNQQNQGNNHAPPQNKLAEFLRVRPPVFSSTTNPVEASDWLHAIEKKLDLLQCTDQEKVSFASHQLHGPASEWWDHFRLNRITAEPITWLEFTAAFRKTHIPSGVVSLEKKEFSARRSFLGGLNDELSYPLMVGDYPDFQKLVDKAIRQEDKYNCMEQRKRRIAHFKAQQGSNQKPRLTLGPQPMSQGGSSSVVRPQRQFFNNNAGNNIRNQAPRPVAAPVQQQPAKREQGSKPVVCFNCGDPGHYADKCPKPRRVKVVPAQSNSAVPASKARVNHVAAAEAQDAPDVILGTFLVNSVPATVLFDSGATHSFLSMSFAGNHGMEVEDLRRPLMVSTPSNQALSLQRSPSVRIEIKGVPFLANLILLESKDLDVILGMDWLARHKDDLPGMPPKRDIEFRIDLVPGTTPIHKRPYRMAANELAEVKRQVDDLLQKGYIRPSSSPWGAPVIFVEKKDHTQRMCVDYRALNDVTIKNKYPLPRIDDLFDQLKGATVFSKIDLRSGYHQLRIKEEDIPKTAFTTRYGLFEGL

SEQ ID NO: 25654 - protein, 1634 aa, Oryza sativa; identical to SEQ ID NO: 20155
  Clone ID: TF_OsC359_6777.pep

SEQ ID NO: 25655 - protein, 1293 aa, Oryza sativa; identical to SEQ ID NO: 20051
  Clone ID: TF_OsC359_6816.pep

SEQ ID NO: 25656 - protein, 653 aa, Oryza sativa
  Clone ID: TF_OsC359_6857.pep
NLILLESKDLDVILGMDWLTRYRGVIDCASRTIKLTNAKGEVVTFQSPVPQKPGISLNQAAGEEQEVAVEKTTKKLEDIPIVREYPEVFPDDLTTMPPKRDIEFRIDLVPRTAPIHKRPYRMRANELAEVKNQVDEQLQKGYIRPSTSPWGALVIFVEKKDKTKRMCVDYRALNEVTIKNKYPLPRIDDLFDQLKGATVFSKIDLRSGYHQLRIREEDIPKTAFIARKCDFWLKEVQFLGHIVNAQGVAVDPANVESVTKWTPPRTVTQDGKVVSYASWQLRPHEGNYPTHDLELAAVVHALKIWWHYLIGNRCEVYTDHKSLKYIFTQPDLNLRQRRWLELINDYDMGIHYHPGKANVVADALSRKSYCNVAWVEQLCCEVQCDLEHLNLGIVEHGFVAALEAQPTLVEQVRIAQASDPKIAELKKNMRVGKARGFVEDEQGTIWMGERLCVPENKELKDLIMTEAHQTQYSIHPGSTKMYQDLKEKFWWVNMRREIAEFVALCDVCQRVKAEHQRPAGLLQPLQIPEWKWEEIGMDFITGLPRTSSGHDSIWVVVDRLTKVAHCIPVHTTYSGKSGDVTDSGSGSAERTARAAHTHRQTAALGRKRRAPRCRGQHGELTGDLNGGGRPTDGDGDKEEAAGTFGSTTAKLLR

SEQ ID NO: 25657 - protein, 1749 aa, Oryza sativa
  Clone ID: TF_OsC359_6997.pep
MVNTRSNWNGPNPPDNNNRGSLVDRTQQEFLRVRPPVFSSTTNPVEASDWLHAIEKKLDLLQCTDQEKVSFASHQLHGPASEWWDHFRLNRTTDEPITWLEFTAAFRKTHIPSGVVSLKKKEFRSLTQGSRSVTEYLHEFNRLARYAPEDVCNDEERQEKFLGGLNDELSYPLMVGDYPDFQKLVDKAIRQEDKYNRMEQKKRRIAQFKTQQGNNQKPRLTLGPQPMSQGGSSSVVRPQRQFFNNNAGNNIRNQAPRPVAAPAQQQPAKREQGSKPVVCFNCGDPGHYADKCPKPRRVKVVPTQNNSAVPASKARVNHVAAAEAQDAPDVILVREYPDVFPDDLPANELAEVKRQVDDLLQKGYIRPSSSPWGAPLKGATVFSKIDLRSGYHQLRIKEEDIPKTAFTTSFLGLAGYYRRFIENFSKIAKPMTRLLQKDVKYKWSEESLEAKPTLIDQVREAQINDPDIQEIKKNMRRGKAIGFLEDEHGTPCAAVVPAVAVAREDRRRHRQVAAVLVRPFAAVGTRRSFVAVDNPKVAAASFSSPSSSVPSPPPFWSPVCSPRCPLRAGALRWCRGAAVRRRVSAARAVFFAEPPPSSVMTNVPSPGASTLAPARDECLETLILTGRGEAVLPPSRIVSERQAGLPRRFMPESATDREIVSLGEGCPAPRYPGRSVFFLPFAMAGLVPPFSSFFMDVLEFYDLQMAHLTPNAVMTLAIFAHLCEMFIGVRPSLRLFRWFFTVQPVSPPSVVGGCYFQPRGPVLNRYIPCVLRKKWDDWKSDWFYTPLADEARLRLPSQPPTQASNWRAPVDLGDGYDAVLDRLAGLRSQGLTGAMVFGDYLRRRIAPLQRRARGAWEYTGSEDCMRTHQGVRWDRAPEDFKIVVQRVLNLSSVEASLIPQGVLPLCSDPDRASILTIMQAVGASEERAPRGHDGAGGSRRGEQSTPGGGRASGPRDGGPGSGRPADARGKRKQEGTPPPSPPRGGGAARASSRRPEGATPTSQPEGERKKKRLRKMGGTEPSRGNLISPPSEIPSRPSRHSKSGQSEAEDPATTEARRRESDRREAADRLREAGEAAQVAVRARQAEEAAREEARLRQAEAATTSEAARDEAAGVSLGPTPSGDAQDKPGPGDIPESGMSIGGPSRAASSPRRLFPTPSVAPLSAEPLLQALAVANTTVLDGLSAQVEALQAERAELDAAWARVEEGRRSVEAMVEVGRKAHRRHVSELEARRKVLGEIAKEVEEERGAALIATTVMNEAQDTLRLQYGSWEAELGKKLDAARGVLDAAAARERRAAETEVASRRREEALEARAMALEERACAVERDLADREAAVAIREVTLAVHEAACAEEESALRLREDALTERERALKEAEAAAQRLADSLSLREAAQEEQARRNLESARAERAALNQRAAELEAQARELDARARSGGAATGDSDLAARLAAAEHTIADLQGALDSSTGEVEALRLAGEIGPSMLRDAVSRLDRAGRQAGLWGGRTVKYAANQGGLAQRLSEMAGTLQRLPEELEGTINSSSRDLARGAVELVLASYQARDPDFSPWTALDEFPPGTEDGARVQVRDAADHIVHSFEGSAPRLAFALNSDEEGDDGGVGDSGDEAGDPGSSPQMARVGASAWGDPHVETGQAGSVVTEGYGPPLSGGPRSALDGEDMTLVAGMDRPLLPPPVTPPCLSGGSGGGRSCHSGTGGVPCPRFLLTSHSVRELKKLRGGLGLFGSDLFEHAVVPHAPLNA

SEQ ID NO: 25658 - protein, 778 aa, Oryza sativa
  Clone ID: TF_OsC359_7193.pep
MVNTRSNGNGPNNPNNNNNGENPTLAQVLAQQTQLMNMMMQQLQNQQNQGNNHVPPQNKLAEFLHVRPPVFSSTTNPVEAGDWLHAIEKKLDLLQCTDQEKVSFASHQLHGPASEWWDHFRLNRTTAEPITWLEFTAAFRKTHIPSGVVSLKKKEFRSLTQGSRSVTEYLHEFNRLARYAPEDVRNDEERQEKFLEGLNDELSYPLMTGDYSDFQKLVDKAIRQEDKYNRMEQKKCRIAHFKAQQGNNQKPRLTLGSQSMPQGGSSSVVRPQRQFFNNNAGNNIRNQAPRPVAAPAQQQPVKREQGSKPVVCFNCGDPGHYADKCPKPRRVKVVPAQSNSTAPASKARVNHVAAAEAQDAPDVILVREYSDVFPDDLPANELAEVKRQVDDLLQKGYIRPSSSPWGAPVIFVEKKDHTQRMCVDYRALNDVTIKNKYPLPRIDDLFDQLKGATVFSKIDLRSGYHQLRIKEEDIPKTAFTTRYGLFECTVMSFGLTNAPAFFMNLMNKVFMEYLDKFVVVFIDDILIYSRTKEEHEEHLRLALEKLREHQLYAKFSKCEFWLSEVKFLGHVISAGGVAVDPSNVESVTNWKQPKTVSEIRSFLGLAGYYRRFIENFSKIAKPMTRLLQKDVKYKWSEEYVAVAREGRHRGRRRVAVLVRPFAVAGDHRSSVAVDNPKVSAASFSSPSSSVVRPPPFWSPVCSPRRPLRAGALRLRPSAAVRRRACAARAVRSAEPPPLSVTSPLTSSGSSARGSLRGTRLRSGGDKPTGVAGESMPCL

SEQ ID NO: 25659 - protein, 1848 aa, Oryza sativa
  unsure (1)..(1848): unsure at all Xaa locations
  Clone ID: TF_OsC359_7218.pep
MPRYKPEYLFGVEGFVQELRTMSFVIGFGTVPFYAQIRHDRHEEKCRVKVTLNSNSEDIPSVMFEAGGRNYIHACQEVARIAIGELRDRYSDQLADTEYRYHPRQPQGSDRGXEGIENDATTRHLVEMLWAMDESRAETVLAAQDREDRNRGKICKLEDKVDRLEKELAALKGEAPPQKARIRLTARKRALFVPRYQLAPKVRVVEKEVAPADPPVIIISSDEEEESKRNCSKIEWVATQDDEDEPNEPSIDLRCSEELDNGNGPNLNNPNNNNNGENPTLAQVLAQQTQLMNMMMQQLQNQQNQGNNHAPPQNKLAEFLRVRPPVFSSTTNPVEAGDWLHAIEKKLDLLQCTDQEKVSFASHQLHGPASEWWDHFRLNRTTAEPITWLEFTAAFRKTHIPSGVVSLKKKEFRSLTQGSRSVTEYLHEFNRLARYAPEDVRNDEERQEKFLEGLNDELSYPLMTEDYSDFQKLVDKAIHQEDKYNRMEQKKRRIAHFKAQQGNNQKPRLTLGPQSMPHGGSSSVVRPQHQFFNNNAGNNIRNQAPRPVAASTQQQPAKREQGSKPVVCFNCGDPGHYADKCPKPRHVKVVPAQSNSAVPASKARVNHVAAAEAQDAPDVILGTFLVNSVPATVLFDSGATHSFLSMSFAGNHGMEVEDLRCPLMVSTPSNQALSLQRSPSVRIEIQGVPFLANLILLESKDLDVILGMDWLARHKGVIDCANRKVTLTSNDGRVVTVHALSSEFLRSRLNQITLEEIPIVRGYPDVFPDDLPGMPPKRDIEFRKDLVPGTTPIHKRPYRMAANELAEVKRQVDDLLQKGYIRPSSSPWGAPVIFVEKKDHTQRMCVDYRALNDVTIKNKYPLPRIDDLFDQLKGATVFSKIDLRSGYHQLRIKEYGLFECTVMSFGLTNAPAFFMNLMNKVFMEYLDKFVVVFIDDILIYSKTKEEHEEHLRLALEKLREHQLYAKFSKCEFWLSEVKFLGHVISAGGVAVDPSNVESVTNWKQPKTVSEIRSFLGLAGYYRKFIENFSKIAKPMTRLFQKDVKYKWSEECEQSFQELKNRLISAPILILPDPKKGFQVYCDASKLGLGCVLMQDGKVVAYASRQLRPHEKNYPTHDLELAAVVHALKIWRHYLFGTRTEEFERLNLGIVSIGFVAALEAKPTLIDQVREAQTNDPDIQEIKKNMRRGKAIGFLEDEHGTVWLGERICVPDNKDLKDAILKEAHDTLYSIHPGSTKMYQDLKERFWWASMKREIAEYVAVCDVCQRVKAEHQKPAGLLQPLKIPEWKWEEIGMDFITGLPKTSLGHDSIWVIVDRLTKVAHFIPVKTTYSGSRLAELYMARIVCLHGVPKKIVSDRGSQFTSNFWKKLQEEMGSKLNFSTAYHPQTDGQTERVNQILEDMLRACALDFGGSWDKNLPYAEFSYNNSYQASLQMAPYEALYGRKCRTPLLWDQTGERQVFGTDILREAEEKVKIIQERLRVAQSRHKSYADNRRRDLSFEEGDYVYLRVTPLRGVHRFHTKGKLVPRFVGPYKIVSRRGEVAYQLELPQSLAEVHNVFHVSQLKKCLRVPTEEANLEQIEVQEDLTYVEKPIRILETNERRTRNRVIRFCKVQWSNHSEEESTWEREDELNEGFEFVSDSSFPNLPSSSPVAVGLRLRLRAPLKGSPWSPLPAATLAFASRRRSRPSAPCAAVVPAVAIAREGRRRVRRRVAVLVRPFAVAEDRRSVIAAVDPKSFAASSSSPSPSVDLPPPFASSRRRSPASMRRPSRPSCPSRRRRGDVIADAIKFVLHSVVSGESVFTGEEFEEFQGQQGNSWFGMVYSWFGDRTVQPGWLFRMVGPIQQDAALQA

SEQ ID NO: 25660 - protein, 1593 aa, Oryza sativa
  Clone ID: TF_OsC359_7242.pep
MARRRGAAAVGGALTSGELEAMAVESSGQGAWLAAVAVLESIKISLMIGIWKNSKRAITRMPRFKPEYLFGVEGFVQELRTMSFVIGFGTAPFYAQISHDRHEEKCRVKVTLNSNSEDIPSVMFEAGGRNYIHACQEVARIAIGELRDRYSDQLADTEYRYHPRQPQGSDRGSYLETEGIENDATTRHLVEMLWAMDETRAETVLAAQDREDRNRGKIYKLEDKVDRLEKELATLKGEAPPQKARIRLTARKRALFVPCYQLAPKVRVVEKEVAPTLADPSVIIISDDEKEESKRNHSKIEWVATQDDEDEPNEPSIDLRCSEELECHNQQNQGNNHAPPQNKLAEFLRVRPPIFSSTTNPVEAGDWLHTIEKKLDLLQCTDQEKVSFASHQLHGPASEWWDHFRLNRTTAEPITWLEFTAAFRKTHIPSGVVSLKKKEFRSLTQGSRSVTEYLHEFNRLARYAPEDVRNDEERQEKFLEGLNDELSYPLMTGDYHDFQKLVDKAIRQEDKYNRMEQKKRRIAQFKTQQGNNQKPRLTLGPQTMPHGGSSSVVRPQRQFFNNNAGNNNRNQAPRPVAAPTQQQPAKREQGSKPVVCFNCGDPGHYADKCPKPRRVKVVPAQSNSTVPASKARVNHVAAAEAQDAPDVILGTFLVNLVPAAVLFDSGATHSFLSMSFAGNHGMEVEDLRRPLMVSTPSNQALSLQRSPSVRIEIKGVLFLANLILLESKDLDVILGMDWLARHKGVIDCANRKVTLTSHDGRVVIVHALSSESLRSRLNQITLEEIPIVREYPDVFPDDLPGMPPKRDIEFGIDLVPGTTPIHKRPYRMAANELAEVKRQVDDLLQKGNIRPSSSPWGAPVIFGGKERSYPEDLKGATVFSKIDLRSGYHQLRIKEEDIPKTAFTTRYGLFECTVMSFGLTNAPAFFMNLMNKVFMEYLDKFVVVFIDDILIYSRTKEEHEEHLRLALEKLREHQLYAKFSKCEFWLSEVKFLGHKQPKTVSEICSFLGLAGYYRRFIENFSKIAKPMTRLLQKDVKYKWSEECEQSFQELKNRLISAPILILPDPKKGFQDGKVVAYASRQLRPHEKNYPTHDLELAAVVHALKIWRHYLFGTRTEVYTDHKSLKYIFTQPDLNMRQRRWLELIKDYDMGICVPDNKDLKDAILKEAHDTLYSIHPGSTKMYQDLKERFWWASMKREIAEYVAVCDVCQRVKAEHQKPAGLLQPLKIPEWKWEEIGMDFITGLPRTSSGHDSIWVIVDRLTKVAHFIPVKTTYSGSRLAELYMARIVCLHGVPKKIVSDRGSQFTSNFWKKLQEEMGSKLNFSTAYHPQTDGQTERVNQILEDMLRACALDFGGSWDKNLPYAEFSYNNSYQASLQMAPYEALYGRKCRTPLLWDRTGERQVFGTDILREAEEKVKIIQERLRVAQSHYKSYADNRRRDLSFEEGDYVYLRVTPLRGVHRFHTKGKLAPRFVGPYMIVSRRGEVAYQLELPQSLAGVHNVFHVSQLKKCLRVPTEEANLEQIEVQEDLTYVEKPIRILETNERRTRNRVIRFCKVQWSNHSEEESTWEREDELKSAHPHLFASSSESRGRDSV

SEQ ID NO: 25661 - protein, 1587 aa, Oryza sativa
  unsure (1)..(1587): unsure at all Xaa locations
  Clone ID: TF_OsC359_7268.pep
EKELAALKGEAPPQKARIRLTARKRALFVPRYQLAPKIRVVEKEVAPAQADPPVIIISSDEEEEPKRNNSKFEWVAIKDEEDEPNEPSIDLLCSEELEXLFPRFLFLSCPCQMVNTRSNGNGPNLNNPNNNNNGENPTLAQVLAQQTQLMHMMMQQLQNQQNQGNNHAPPQNKLAEFLRVRPPIFSSTTNPVEAGDWLHAIEKKLDLLQCTDQEKVSFASHQLHGPASEWWDHFRLNRTTAEPITWLEFTAAFRKTHIPSGVVSLKKKEFRSLTQGSRSVTEYLHEFNRLARYAPEDVRNDEERQEKFLEGLNDELSYPLMTGDYYDFQKLVDKAIRQEDKYNRMEQKKRRIAQFKTQQGNNQKPRLTLGPQSMPQGGSSSVVRPQRQFFNNNAGNNIRNQALRPVAVSTQQQPAKKEQGSKPVVCFNCGDPGHYADKCPKPRRVKVVPAQSNSTAPASKARVNHVAAAEAQDAPDVILGTFLVNSVPATVLFDSGATHSLLSMSFAGNHGMEVEDLRRPLMVSTPSNQALSLQRSPSVRIEIQGVSFLANLILLESKDLDVILGMDWLARHKGVIDCANRKVTLTSNDGRVVTVHALSSESLRSRLNQITLEEIPIVREYPDVFPDDLPGMPPKRDIEFRIDLVPGTTLIHKRPYRMAANELAEVKRQVDDLLQKGYIRPSSSPWGAPVIFVEKKDHTQRMCVDYRALNDVTIKNKYPLPRIDDLFDQLKGATIFSKIDLRSGYHQLRIKEEDIPKTTFTTRYGLFECTVMSFGLTNAPAFFMNLMNKVFMEYLDKFVVVFIDDILIYSRTKEEHEEHLRLALEKLREHQLYAKFSKCEFWLSEVKFLGHVISAGGVAVDPSNVESVTNWKQPKTVSEIRSFLGLAGYYRRFIENFSKIAKPMTRLLQKDVKYKWSEECEQSFQELKNRLISAPILILPYPKKGFQVYCDASKLGLGCVLMQDGKVVAYASRQLRPHEKNYPTHDLELAAVVHALKIWRHYLFGTRTEVYTDHKSLKYIFTQSDLNMRQRRWLELIKDYDMGIHYHPGKANVVADALSRKGYCNATEGRQLPLELCKEFERLNLGIVSRGFIAALEAKPTLIDQVREAQINDPDIQEIKKNMRRGKAISFLEDEQGTVWLGERICVPDNKDLKDAILKEAHDTLYSIHPGSTKMYQDLKERFWWASMKREIAEYVAVCDVCQRVKAEHQKPAGLLQPLKIPEWKWEEIGMDFITGLPRTSSGHDSIWIIVDRLTKVAHFIPVKTTYSGSRLAELYMARIVCLHGVPKKIVSDRGSQFTSNFWKKLQEEMGSKLNFSTAYHPQTDGQTERVNQILEDMLRACALDFGGSWDKNLPYAEFLYNNSYQASLQMAPYEALYGRKCRTPLLWDQTGERQVFGTDILREAEEKVKIIQERLRVAQSRHKSYADNRRRDLSFEEGDYVYLRVTPLRGVHRFHTKGKLAPRFVGPYKIISRRGEVAYQLELPQSLAGVHNVFHVSQLKKCLRVPTEEANLEQIEVQEHLTYVEKPIRILEIDERRTRNRVIHFCKVQWSNHSEEESTWEREDELKSAHPHLFASSSESRGRDSV

SEQ ID NO: 25662 - protein, 813 aa, Oryza sativa; identical to SEQ ID NO: 20136
  Clone ID: TF_OsC359_7295.pep

SEQ ID NO: 25663 - protein, 598 aa, Oryza sativa
  unsure (1)..(598): unsure at all Xaa locations
  Clone ID: TF_OsC359_7353.pep
MRVRAAEPPPPVVRQGEEKPGRTSSFVAGRRSSPLPVKPSRRRRSSRRRPSSFVVWLKGEYRWVRLVVLHVYMSSKFAADHPISGEVANPGRPLMIRAEQPSPPSPPLAATAISTTNPVEAGDWLHAIEKKLDLLQCTDQEKVSFASHQLHGPASEWWDHFRLNRTTAEPITWLEFTAAFRKTHIPSGVVSLKKKEFRSLTQGSRSVTEYLHEFNRLARYAPEDKLVDKAIRQEDKYNRIEQKKRRIAQFKTQQGNSQRPRLTLGPQSMPQGGSSSVVRPQRQFFNNNAGNNIRNQALRPVAASTQQQPAKREQGRKPVVCFNCGDPGHYADKCPKPRRVKVVPAQSNSTAPAPKARVNHVAAAEAQDAPDVILXKGYIRPSSSPWGAPVIFVEKKDHTQRXLKGATVFSKIDLRSGYHQLRIKEEDIPKTAFTTRYGLFECTVMSFGLTNAPAFFMNLMNKVFMEYLDKFVVVFIDDILMIGARIRDTDFLQGDDILWINFRGIYELYQLDALDVSIMSCWILMEIQRARRRRVFDTGFIDPRRVNVTMLDQYPQETEDNLVHLLKAQHYKTFILLPYNIEFHWVLLLFDLSACTVN

SEQ ID NO: 25664 - protein, 668 aa, Oryza sativa
  Clone ID: TF_OsC359_7374.pep
MVNTRASGSGNNNNGENPTLAQVLAQQTQLMNMMMQQLQNQQNQGNNHAPPQNKLAEFLRVRPPIFSSTTNPVEAGDWLHAIEKKLDLLQCTDQEKVSFASHQLHGPASEWWDHFRLNRTTAEPITWLEFTAAFRKTHIPSGVVSLKKKEFRSLTQGSRSVTEYLHEFNRLARYAPEDVRNDEERQEKFLEGLNDELSYPLMTGDYPDFQKLVIKAIRQEDKYNSMEQKKRRIAQFKTQQGNNQKPRLTLGPQSMPQGGSSSVVRPQRQFFNNNAGNNIRNQAPRPVAASTQQQPAKREQGSKPVVCFNCGDPGHYADKCPKPRRVKVVPAQSNSTVPASKARVNHVAAAEAQDAPDDPRCRRYPSPLSPSLLVAGSALAPCRFAPPSSPPLQPCAAVAPVIVVAREGRHRGRRHVAVLVRSFAVAVDRRSTVAAVDPIFSAASISPPVPSVDLPPLLWSPVSSPRHALRPGALRSRRRAVVRRRACAARAAAGGDVTADVIVAVCREPHGSLRSTRLRSGGDKPTGVAPVIVVAQEGRHHGRRHVAVLVRSSAVAVDRRSTVAAVDPIFSAASISPPVPSVDLPPLLWSPVSSPRHALRPGALRSRRRAVVRRRACAARAAAGGDVTADVIVAVCHSDVSGESVFAGEDFEEFQGQQGKSHRSQTTL

SEQ ID NO: 25665 - protein, 815 aa, Oryza sativa
  Clone ID: TF_OsC359_7395.pep
PGLEWYIPGLEIELCSRGGCSEWLGLYNRMPCYKPEYLFGVEGFVQELRTMSFVIGFGNAPFYAQIRHDRHEEKCRVKVTLNSNSEDIPSVMFEAGGRNYIHACQEVARIAIGELRDRYSDQLADTEYRYHPRQPQGSDRGSYLETEGIENDVTTRHLVEMLWAMDESRAETVLAAQDREDRNRGKICKLEDKVDRLEKELAALKGEAPPQKARIRLTARKRALFVPRYQLAPKVRVVEKEVAPANPPVIIISSDEEEEPKRNNSKFEWVAIKDEEDEPNEPSIDLLCSEELDTTNPVEAGDWLHAIEKKLDLLQCTNQEKVSFASHQLHGPASEWWDHFRLNRITAEPITWLEFTAAFRKTHIPSGVVSLKKKEFRSLTQGSRSVTEYLHEFNRLARYAPEDVRNDEERQEKFLGGLNDELSYPLMVGDYPDFQKLVDKAIRQEDKYNRMEQKKRRIAQFKTQQGNNQKPRLTLGPQPMPQGGSSSVVRPQRQFFNNNAGNNIRNQAPRPVAAPAQQQPAKREQGSKPVVCFNCGDPGHYADKCPKPRRVKVVPVQNNSAVPASKARVNHVAAAEAQDAPDVILVREYPDVFPDDLPERIHQTEFITMGSSGYYRRFIENFSKIAKPMTRLLQKDVKYKWSEESLEAKPTLIDQVREAQINDPDIQEIKKNRRRGKAIGFLEDEHGTPCSAVAPAVAAAREDRRRHRQVAAVLVRPFAAVGTRRSIVAVVNPKVAAASFSSPSPSVPFPPPFWSPVCSPRCPLRAGALRWCRGAAVRRRVSAARAVFFAEPPPSSVTSSLTSSGSYPVSRSWTD

SEQ ID NO: 25666 - protein, 1635 aa, Oryza sativa
  unsure (1)..(1635): unsure at all Xaa locations
  Clone ID: TF_OsC359_7429.pep
MVGSPGLEWNIPGVEIELCSRGGCSEWLGLYNRMPRYKPEYLFGVEGFVQELRSMSFVIGFGTAPFYAQIPHDRHEEKCRVKVTLNSNSEDIPLVMFEAGGRNYIHACQEVARIAIGELRDRYSDQLADTEYRYHPRQPQGSDRGSYLETEGIENDATTKHLVEMLWAMDESRAETVLAAQDREDRNRGKICKLEDKVDRLEKELAALKGEAPPQKARIRLTARKRALFVPRYQLAPKMVNTRSNGNGPNNPNNNNGENPILAQVLAQQTQLMNMMMQQFQNQENQGNNHAPPQNKLAEFLRVRPPVFSSTTNPVEASDWLHAIEKKLDLLQCTDQEKVSFASHQLHGPASEWWDHFRLNRTTAEPIIWLEFTAAFRKTHIPSGVVSLKKKEFRSLTQGSRSVTEYLHEFNRLARYAPEDVRNDEERQEKFLGGLNDELSYPLMVGDYPDFQKLVDKAIRQEDKYNRMEQKKRRIAQFKTQQGNNQKPHLTLGPQPMPQGGSSSVVRPQRQFFNNNAGNNIRNQGPRPVAAPAQQQPVKREQGSKPVVCFNCGDPGHYADKCPKPRRVKVVPAQNNSAVPASKARVNHVAAAEAQDAPDVILGTFLVNSVPATVLFDSGATHSFLSMSFVGNHGMEVEDLRRPLMVSTPSNQALSLQRSPSVRIEIQGVPFLANLILLESKDLDVILGMDWLARHKGVIDCANKKVTLTSYDGRVVTVHALSSESLRSRLNQITLEEISIVREYPDVFPDDLPGMPPKRDIEFRIDLVPGTTPIHKRPYRMAANELAEVKRQVDDLLQKGYIRPSSSPWGAPVIFVEKKDHTQRMCVDYRALNDVTIKNKYPLPRIDDLFDQLKGATVFSKIDLRSGYHQLRIKEEDIPKTAFTTRYGLFECTVMSFGFTNAPAFFMNLMNKVFMEYLDKFVVVFIDDILIYSRTKEEHEEHLRLALEKLREHQLYAKFSKCEFWLSEVKFLGHVISAGGVTVDPSNVESVTNWKQPKTVSEIRSFLGLAGYYRRFIENFSKIAKPMTRLLQKDVKYKWSEECEQSFQELKSRLISAPILILPDPKKGFQVYCDASKLGLGCVLMQDGNVVAYASRQLRPHEKNYPTHDIELAAVVHALKIWRHYLFGTRTEVYTDHKSLKYIFTQPDLNMRQRRWLELIKDYDMGIHDHPGKANVVADALSRKGYCNATEGRQLPLELCKEFERLNLGIVGRGFIAALEAKPTLIDQVREAQINDPDIQEIKKNMRRGKAIGFLEDEQGTVWLGERICVPDNKDLKDAVLKEAHDTLYSIHPGSTKMYQDLKERFWWASMKREIAEYVAVCDVCQRVKAEHQKPAGLLQPLKIPEWKWEEIGMDFITGLPRTSSGHDSIWVIVDRLTKVAHFIPVKTTYSGSRLAELYMARIVCLHGVPKKIVSDRGSQFTSNFWKKLQEEMGSKLNFSTAYHPQTDGQTERVNQILEDMLRACALDFGGSWDKNLPYAEFSYNNSYQASLQMASYEALYGRKCRTPLLWDQTGERQVFGTDILREAEEKVKIIQERLRVAQSRHKSYADNRRRDLSFEEGDYVYLRVTPLRGVHRFHTKGKLAPRFVGPYKIVSRRGEVAYQLELPQSLAGVHNVFHVSQLXKKCLSVPTEEA

SEQ ID NO: 25667 - protein, 738 aa, Oryza sativa
  unsure (1)..(738): unsure at all Xaa locations
  Clone ID: TF_OsC359_7443.pep
MVNTRSNGNGPSNNNNGENPTLAQVLAQQTQLMNMMMQQLQNQQNQGNNHVPPQNKLAEFLRVRPPVFSSTTNPVEAGDWLHAIEKKLDLLQCTDQEKVSFASHQLQGPASEWWDHFRLNRITAEPITWLEFTAAFQKTHIPSGVVSLKKKEFRSLTQGSRSVTEYLHEFNRLARYAPEDVRNGEERQEKFLEGLNDELSYPLMTGDYHDFQKLVDKAIRQEDKYNRMEQKKRRIAQFKTQQGNNQKPRLTLRPQSMPHGGSSFVVRPQRQFFNNNAGNNIRNQAPRPVAAPTQQQPAKREQGSKPVVCFNCGDPGHYADKCPKPRRVKVVPTQSNSTVPASKARVNHVAAAXEVQDAPDVILGTFLVNSVPATVLFDSGATHSFLSMSFAGNHGMEVEDLRRPLMVSTPSNQALSLHRSPSVRIEIQGVPFLANLILLESKDLDVILGMDWLARHKGVIDCANRKVTLTSNDGRVVTVYALSSESLRSRLNQITLEEIPIVREYPDVFPDDLPGMPPKRDIEFRIDLVPGTTPIHKRPYRMAANELAEVKRHVDDLLQKGYIRPSSSPWGAPVIFVEKKDHTQRMCVDYRALNDVTIKNKYPLPRIDDLFDQLKGATVFSKIDLRSGYHQLRIKEEDIPKTAFTTRYGLFECTVMSFGLTNAPAFFMNLMNKVFMEYLDKFVVVFIDDILIYSRTKEEHEEHLRLALEKLREHQLYAKFSKCEFWLSEVLFSFGIFG

SEQ ID NO: 25668 - protein, 1636 aa, Oryza sativa; identical to SEQ ID NO: 20071
  Clone ID: TF_OsC359_7488.pep

SEQ ID NO: 25669 - protein, 1756 aa, Oryza sativa; identical to SEQ ID NO: 20169
  Clone ID: TF_OsC359_7516.pep

SEQ ID NO: 25670 - protein, 1008 aa, Oryza sativa; identical to SEQ ID NO: 20120
  Clone ID: TF_OsC359_7532.pep

SEQ ID NO: 25671 - protein, 1693 aa, Oryza sativa; identical to SEQ ID NO: 20060
  Clone ID: TF_OsC359_7537.pep

SEQ ID NO: 25672 - protein, 664 aa, Oryza sativa
  Clone ID: TF_OsC359_7756.pep
PGLEWYIPGLEIELCSRDGCSKWLGLYNRMPRYKPEYLFGVEGFVQELRTMSFVIGFGTAPFYAQIAHDRHEEKCRVKVTLNSNSEDIPSVMFEAGGRNYIHACQEVARIAIGELRDRYSDQLADTEYRYHPRQPQGSDRGSYLETEGIENDVTTKHLVEMLWAMDESRAETVLAAQDREDWNRGKICKLEDKVDRLEKELAALKGEAPPQKARIRLTARKRALFVPRYQLAPKVRVVEKEVAPAQADPPVIIISSDEEEESKRNNSKIEWVATQVDKDEPSIDLRCLEELETTAEPITWLEFTAAFRKTHIPSGVVSLKKKEFRSLTQGSRSVTEYLHEFNRLARYAPEDVRNDEERQEKFLGGLNDELSYPLMVGDYPDFQKLVDKAIRQEDKYNHMEQKKRRIAHFKAQQGNNQKPRLTLGPQSMPQGGSSSVVRPQRQFFNNNAGNNIRNQAPRPVAAPAQQQPAKREQGSKPVVCFNCGDPGHYADKCPKPRRVKVVPAQNNSAVPASKARVNHVAAAEAQDAPDVIFLVNSVPATVLFDSANELAEVKRQVDDLLQKGYIRPSSSPWGAPPSPSLGKTTVVLAKSSPSSFAPSPSPEITGAASPSSTRRFPPLPPCRRRRPLVFRRRLGHRWYTSDQSKTIRIAVPAVMGGSNNVFRD

SEQ ID NO: 25673 - protein, 1592 aa, Oryza sativa
  unsure (1)..(1592): unsure at all Xaa locations
  Clone ID: TF_OsC359_7844.pep
MVVQNGWAYATGVYTHMPRYKPEYLFGVEGFVQELRTMSFVVGFGTAPFYAQIPHDRHEEKCRVKVTLNSNSEDIPSVMFEAGGRNYIHSCQEVARIAIGELRDRYSDQLADTEYRYHPRQPQGSDRGSYLETEGIENDATTTHLVEMLWAMDESRAETVLAAQDREDWNRGKICKLEDKVDRLEKELAALKGEAPPQKVRIRLTARKRALFVPRYQLAPKVRVVEKEVAPADPPVVNMVNTRSNGNGPNPNNPNNNNNGENPTLAQVLAQQTQLMHMMMQQLQNQQNQGNNHAPPQNKLAEFLRVRPPIFSSTTNPVEAADWLHAIEKKLDLLQCTDQEKVSFASHQLHGPASEWWDHFRLNRTTAEPITWLEFTAAFRKTHIPSGVVSLKKKEFRSLTQGSRTVTEYLHEFNRLARYAPENVRNDEERQEKFLEGLNDELSYPLMTGDYSDFQKLVDKAIRQEDKYNRMEQKKRQIAQFKTQQGNNQRPRLTLGPQSMPHGGSSSVVRPQRQFFNNNVGNNIRNQVPRPVAAPTQQQPAKREQGSKPVVCFNCGDPGHYADKCPKPRRVKVVPVQSNSTAPASEARVNHVAAAEAQDAPDVILGTFLVNSVPATVLFDSGATHSFLSMSFAGNHGMEVEDLRRPLMVSTPSNQALSLQRSPSVRIEIKGVPFLANLILLESKDLDVILGMDWLARHKGMIDCANRKVTLSSNDGRVVTVHALSSESLRSRLTQVTLEEIPIVREYPDVFPDDLPGMPPKRDIEFRIDLVPGTTPIHNRPYRMAANELAEVKRQVDDLLQKGYIRPSSSLWGAPVIFVEKKDHTQRMCVDYRALNDVTIKNKYPLPRIDDLFDQLKDKFVVVFIDDILIYSRTKEEHEEHLRLALEKLREHQLHAKFSKYEFWLSEVKFLGHKDVKYKWSVECEQSFQELKSRLISAPILILPDPKKGFQVYCDASKLGLGCVLMQDGKVVAYASRQLRLHEKNYPTHDLELAAVVHALKIWHHYLFGTRTEVYTDHKSLKYIFTQPDLNMRQRRWLELIKDFDMGIHYHPGKANVVADALSRKSYCNATEGRQLPLELCKEFERLNLGIVRRGFVAALEAKSTLIDQVREAQINDPDIQEIKKNMRRGKAIGFLEDEQGTVWLGERICVPDNKDLKDAILKEAHDTLYSIHPGSTKMYQDRKERFWWASMKREIAEYVALCDVCQRVKAEHQKPAGLLQPLKIPEWKWEEIGMDFITGLPRTSSGHDSIWVIVDRLTKVAHFIPVKTTYSGSRLAELYMARIVCLHGVPKKIVSDRGSQFTSNFWKKLQEEMGSKLNFSTAYHPQTDGQTERVNQILEDMLRACALDFGGSWDKNLPYAEFSYNNSYQASLQMAPYEALYGQKCRTPLLWDQTGERQVFGTDILREAEEKVKIIQERLRVAQSRHKSYADNHRRDLSCIXKGDYVYLRVTPLRGVHRFHTKGKLAPRFVGPYKIVSRRGEVAYQLELPQSLAGVHNVFHVSQLKKCLRVPTEEANLEQIEVQEDLTYVEKPIRILETNERRTRNRVIRFCKVQWSNHSEEESTWEREDELKSAHPYLFASSSESRGRDSV

SEQ ID NO: 25674 - protein, 2038 aa, Oryza sativa; identical to SEQ ID NO: 20150
  Clone ID: TF_OsC359_7902.pep

SEQ ID NO: 25675 - protein, 1431 aa, Oryza sativa
  Clone ID: TF_OsC359_7935.pep
MPRYKPEYLFGVEGFVQELRTMSFAIGFGTAPFYAQIPHDRHEEKCRVKVTLNSNSEDIPSVMFEAGGRNYIHACQEVARIAIGELRDRYSDQLADTEYRYHPRQPQGSDRGSYLETEGIENDATTKHLVEMLWAMDESRAETVLAAQDREDRNRGKICKLEDKVDRLEKELAALKGEAPPQKARIRLTARKRALFVPRYQLAPKVRVVEKEVAPAQADPPEKVSFASHQLHGPASEWWDHFRLNRITAEPITWLEFTAAFRKTHIPSGVVSLKKKEFRSLTQGSRSVTEYLHEFNRLARYAPEDVRNDEERQEKFLGGLNDELSYPLMVGDYPDFQKLVDKAIRQEDKYNRMEQKKRRIAQFKTQQGNNQKPRLTLGPQSMPHGGSSSVVRPQRQFFNNNAGNNIRNQAPRPVAAPVQQQPAKREQGSKPVVCFNCGDPGHYADKCPKPRRVKVVPAQSNSAVPASKARVNHVAAAEAQDAPDVILVREYPDVFPDDLPANELAEVKRQVDDLLQKGYIRPSSSPWGAPVIFVEKKDHTQRMCVDYRALNDVTIKNKYPLPRIDDLFDQLKGATVFSKIDLRSGYHQLRIKEEDIPKTAFTTRYGLFECTVMSFGLTNAPAFFMNLMNKVFMEYLDKFVAVFIDDILIYSRTKEEHEEHLRLALEKLREHQLYAKFSKCEFWLSEVKFLGHVISAGGVAVDPSNVESVTNWKQPKTVSEIRSFLGLAGYYRRFIENFSKIAKPMTRLLQKDVKYKWSEECEQSFQELKNRLVSAPILTLPDPKKGFQVYCDASKLGLGCVLMQDGKVVAYASRQLRPHEKNYPTHDLELAAVVHALKIWRHYLFGTRTEVYTDHKSLKYIFTQPDLNMRQRRWLELIKDYDMGIHYHPGKANVVADALSRKGYCNATKGRQLPLELCKEFERLNLGIVGRGFVAALEAKPTLIDQVREAQINDPDIQEIKKNMRRGKAIGFLEDEQGTVWLGERICVPDNKDLKDAILKEAHDTLYSIHPGSTKMYQDLKERFWWASMKREIAEYVAVCDVCQRVKAEHQKPAGLLQPLKIPEWKWEEIGMDFITGLPRTSSGHDSIWVIVDRLTKVAHFIPVKTTYSGSRLAELYMARIVCLHGVPKKIVSDRGSQFTSNFWKKLQEEMGSKLNFSTAYHPQTDGQTERVNQILEDMLRACALDFSGSWDKNLPYAEFSYNNSYQASLQMAPYEALYGRKRSACRTPLLWDQTGERQVFGTDILREAEEKVKIIQERLRVAQSRHKSYADNRRRDLSFEEGDYVYLRVTPLRGVHRFHTKGKLAPRFVGPYKIVSRRGEVAYQLELPQSLAGVHNVFHVSQLKKCLRIPTEEANIEQIEVQEDLTYVEKPIHILETNERRTRNRVIRFCKVQWSNHSEEESTWEREDELKSAHPHLFASSSESRGRDSV

SEQ ID NO: 25676 - protein, 1672 aa, Oryza sativa
  Clone ID: TF_OsC359_7977.pep
MPVGLFPVVTATKTSGAATTGSVSSRRRARRAAAVARRSAATPSSAPLTREDQRGGPDARIGIERRRNGRRATHATEGASSSGVSPQHGRGDQPSVPPVGGVGCRAFVASLRNVRWPPRFRPTIAEKYDGSVNPAEFLQVYTTGIEAAGGDDRVKKRTYTQYSEGMMSHFAHTFSGLSSPQHHTMHPCTRGDLRVQGGVRHNRMLEKIASKEPQTTAELFQLADRVARKEEAWTWNPSGSGVATSAAPGSAAQTGRRDRRRKKRSAHSDDEGHVLTVEGASRATRKGRPASDKKKEAGAPSRERPTGKWCIVHNTSLHDLADCRAVKSLAERTRKWEEERRQERREGKSPAVPSGNRRSEAKQKAPVEDIDGGDDDLGFQEPGATIATVDGGACAHVSRRSLKAMKRELLAAAPTHEATRRARWSEVALTFDQTDHPPCVARGGQIAMAPGMVLWPSQPIIGVTPGHTWPLGHIDLPVTFGGSVNFRTERVNFDVADLSLPYNAVLGRPALVKFMAAVHYAYLQMKMPGPGGPISVHGDLKVALACMEQRADHLAAASKPEGGDERLGTSVPAAPRQRMITCDEVPEDALVSFLRANADVFAWRPADMPGVPREVIEHRLAVRPGARPIRQKVRRQAPERQAFIREEVARLLEAGFIREVIHPEWLANPVVVPKANGKLRMCIDYTDLNKACPKDPYPLPRIDQIVDSTAGCDLLCFLDAYSGYHQIRMAREDEEKTTFITPIGTYCYTTMPFGLKNAGPTFQRTTRISLGSQIGRNVEAYVDDLVVKTRDQETLLSDLAETFESLRSARIKLNPDKCVFGVPAGKLLGKLRDVQCVTGCMAALSRFISRLGEKALPLFKLLKRSGPFTWTEEAERALTQLKAYLSSPPVLIAPEPDEPLLLYLAATPQVVSAALVVERDEDNPHSAHPHPVLAWPGREQGGEAPEPNGGPRPPTTGAGPLPACQTVPGAPDPQDGPGATAGRPHLSPSDPEVNPVPTRPGREQGEEAPEPNGGLRPPTTGVGPLPACPTMPGAPDPQDGTEATVGRPRLSSSDPEVVGTEDECAPRGRLDEERPRDAAPGEEDRPHRKVQRPVYFVSEALRDAKTRYPQAQKMLYAILMASRKLRHYFQAHRVTVVTSYPLGQILHNREGTGRVVCMEYRCSDPQMDAYVRQVRRMERHFDGIELRHVPRRDNTIADELSRLASSRAQTPPGAFEERLAQPSARPDPLGETDAPDRPPRPVGVQASGPEGSAPSSLRLIAWIAEIQAYLTDKTLPEDREGSERVQRISKRYVLVEGTLYRRAANGILLKCIPREQGVELLADIHEGECGAHSASRTLVGKAFRQGFYWPTALNDAVDLVRRCRACQFHAKQIHQPAQALQIIPLSWPFAVWGLDILGPFRQAPGGFEYLYVAIDKFTKWPEAYPVVKIDKHSALKFIKGITARFGVPNRIITDNGTQFTSELFGDHCEDMGIKLCFASPAHPRSNGQVERANAEILRGLKTKTFNILKKHGDSWIEELPAVLWANRTTPSRATGETPFFLVYGAEAVLPSELTLRSPRATMYCEADQDQLRRDDLDYLEERRRRAALRAARYQQSLRRYHQRRIRARSLCVNDLVLRRVQTRAGLSKLSPMWEGPYRVISVPRPGSVRLAAGDGTELPNPWNIEHLRRFYP

SEQ ID NO: 25677 - protein, 1743 aa, Oryza sativa
  unsure (1)..(1743): unsure at all Xaa locations
  Clone ID: TF_OsC359_8111.pep
MVYSWFGDRTVQPMPRYKPEYLFGVEGFVXELRTMSFVIGFGTAPFYAQIPHDRHEEKXRVKVTLNSNSEDIPSVMFEAGGRNYIHACQEVARIAIGELRDRYSDQLADTEYRHHPRQPQGSDRGSYLETEGIENDATTKHLVEMLWAMDESRAETVLAAQDREDRNRGKICKLEDKVDRLEKELAALKGEAPPQKARIRLTARKRALFVPRYQLAPKVRVVEKEVAPAQADPPVIIISSDEEEESKRNNSKIEWVATQDDEDEPSIDLRCLEELDNGNGPNNPNNNNNGENPTLAQVLAQQTQLMNMMMQQFQNQQNQGNNHAPPQNKLAEFLRVRPPVFSSTTNPVEASDWLHAIEKKLDLLQCTDQEKVSFASHQLHGPASEWWDHFRLNRTTAEPITWLEFTAAFRKTHIPSGVVSLKKKEFRSLTQGSRSVTEYLHEFNRLARYAPEDVRNDEERQEKFLGGLNDELSYPLMVGDYPDFQKLVDKAIRQEDKYNRMEQKKRRIAQFKTQQGNNQKPRLTLGPQPMPQGGSSSVVRPQRHFFNNNAGNNIRNQAPRPVAAPAQQQPAKREQGSKPVVCFNCGDPGHYADKCPKPRRVKVVPAQNNSAVPASKARVNHVAAAEAQDAPDVILGTFLVNSVPATVLFDSGATHSFLSMSFAGNHGMEVEDLRRPLMVSTPSNQALSLQRSPSVRIEIQGVPFLANLILLESKDLDVILGMDWLARHKGVIDCANKKVTLTSYDGRVVTVHALSSESLRSRLNQITLEEIPIVREYPDVFPDDLPGMPPKRDIEFTIDLVPGTTPIHKRPYRMAANELAEVKRQVDDLLQKGYIRPSSSPWGAPVIFVEKKDHTQRMCVDYRALNDVTIKNKYPLPRIDDLFDQLKGATVFSMIDLRSGYHQLRIKEEDIPKTAFTTRYGLFECTVMSFGLTNAPAFFMNLMNKVFMEYLDKFVVVFIDDILIYSRTKEEHEEHLRLALEKLREHQLYAKFSKCEFWLSEVKFLGHVISAGGVAVDPSNVESVTNWKQPKTVSEIRSFLGLAGYYRRFIENFSKIAKPMTRLLQKDVKYKWSEECEQSFQELKSRLISAPILILPDPKKGFQVYCDASKLGLGCVLMQDGKVVAYASRQLRPHEKNYPTHDIELAAVVHALKIWRHYLFGTRTEVYTDHKSLKYIFTQPDLNMRQRRWLELIKDYDMGIHYHPGKANVVADALSRKGYCNATEGRQLPLELCKEFERLNLGIVGRGFVAALEAKPTLIDQVREAQINDPDIQEIKKNMRRGKAIGFLEDEQGTVWLGERICVPDNKDLKDAVLKEAHDTLYSIHPGSTKMYQDLKERFWWASMKREIAEYVAVCDVCQRVKAEHQKPAGLLQPLKIPEWKWEEIGMDFITGLPRTSSGHDSIWVIVDRLTKVAHFIPVKTTYSGSRLAELYMARIVCLHGVPKKIVSDRGSQFTSNFWKKLQEEMGSKLNFSTAYHPQTDGQTERVNQILEDMLRACALDFGGSWDKNLPYAEFSYNNSYQASLQMAPYEALYGRKCRTPLLWDQTGERQVFGTDILREAEEKVKVIQERLRVAQSRHKSYADNRRRDLSFEEGDYVYLRVTPLRGVHRFHTKGKLAPRYVGPYKIVSRRGEVAYQLELPQSLAGVHNVFHVSQLKKCLRVPTEEANLEQIEVQEDLTYVEKPIRILETNERRTRNRVIRFCKLQWSNHSEEESTWEREDELKSAHPHLFASSSESRGRDSV

SEQ ID NO: 25678 - protein, 2293 aa, Oryza sativa
  Clone ID: TF_OsC359_8129.pep
MTRLLQKDVKYKWSEECEQSFQELKSRLISAPILILPDPKKGFQVYCDASKLGLGCVLMQDGKVVAYASRQLRPHEKNYPTHDIELAAVVHALKIWRHYLFGTRTEVYTDHKSLKYIFTQPDLNMRQRRWLELIKDYDMGIHYHPGKANVVADALSRKGYCNATEGRQLPLELCKEFERLNLGIVGRGFVAALEAKPTLIDQVREAQNNDPDIQEIKKNMRRGKAIGFLEDEHGTVWLGERICVPDNKDLKDAILKEAHDTLYSIHPGSTKMYQDLKERFWWASMKREIAEYVAVCDVCQRVKAEHQKPAGLLQPLKIPEWKWEEIGMDFITGLPRTSSGHDSIWVIVDRLTKVAHFIPTDGQTERVNQILEDMLRACALDFGGSWDKNLPYAEFSYNNSYQASLQMAPYEALYGRKCRTPLLWDQTGERQVFGTDILREAEEKVKIIQERLRVAQSRHKSYADNRRRDLSFEEGDYVYLRVTPLRGVHRFHTKGKLAPRFVGPYKIVSRRGEVAYQLELPQSLAGVHNVFHVSQLKKCLRVPTEEANIEQIEVQEDLTYVEKPIRILETTPGLEWYIPGLEIELCSRGGCSEWLGLYNRMPRYKPEYLFGVEGFVQELRTMSFVIGFGTAPFYTQIPHDRHEEKCRVKVTLNSNSEDIPSVMFEAGGRNYIHACQEVARIAIGELRDRYSDQLADTEYRYHPRQPQGSDRGSYLETEGIENYVTTRHLVEMLWAMDESRAETVLAAQDREDRNHGKICKLEDKVDRLEKELAALKGEAPPQKARIRLTARKRALFVPRYQLAPKMVNTRSNGNGPNNPNNNNGENPTLAQVLAQQTQLMNMMMQQFQNQQNQGNNHAPPQNKLAEFLRVRPPVFSSTTNPVEASDWLHAIEKKLDLLQCTDQEKVSFASHQLHGPASEWWDHFRLNRTTAEPITWLEFTAAFRKTHIPSGVVSLKKKEFRSLTQGSRSVTEYLHEFNRLARYAPEDVRNDEERQEKFLGGLNDELSYPLMVGDYPDFQKLVDKAIRQEDKYNRMEQKKRRIAQFKTQQGNNQKPRLTLGPQSMPQGGSSSVVRPQRQFFNNNAGNNIRNKAPRPVAAPVQQQPAKREQGSKPVVCFNCGDPGHYADKCPKPRRVKVVPAQSNSAVPVSKARVNHVAAAEAQDAPDVILGTFLVNSVPATVLFDSGATHSFLSMSFAGNHGMEVEDLRRPLMVSTPSNQALSLQRSPSVRIEIKGVPFLANLILLESKDLDVILGMDWLARHKGVIDCANRKVTLNSYDGRVVTVHALSSESLRSRLNQITLEEIPIVREYSDVFPDDLPGMPPKRDIEFRIDLVPGTTPIHKRPYRMAANELAEVKRQVDDLLQKGYIRPSSSPWGAPVIFVEKKDHTQRMCVDYRALNDVTIKNKYPLPRIDDLFDQLKGATVFSKIDLRSGYHQLRIKEEDIPKTAFTTRYGLFECTVMSFGLTNAPAFFMNLMNKVFMEYLDKFVVVFIDDILIYSRTKEEHEEHLRLALEKLREHQLYAKFSKCEFWLSEVKFLGHVISAGGVAVDPSNVESVTNWKQPKTVSEIRSFLGLAGYYRRFIENFSKIAKPMTRLLQKDVKYKWSEECEQSFQELKSRLISAPILILPDPKKGFQVYCDASKLGLGCVLMQDGKVVAYASRQLRPHEKNYPTHDIELAAVVHALKIWRHYLFGTRTEVYTDHKSLKYIFTQPDLNMRQRRWLELIKDYDMGIHYHPGKANVVADALSRKGYCNATEGRQLPLELCKEFERLNLGIVGRGFVAALEAKPTLIDQVREAQNNDPDIQEIKKNMRRGKAIGFLEDEHGTVWLGERICVPDNKDLKDAILKEAHDTLYSIHPGSTKMYQDLKERFWWASMKREIAEYVAVCDVCQRVKAEHQKPAGLLQPLKIPEWKWEEIGMDFITGLPRTSSGHDSIWVIVDRLTKVAHFIPVKTTYSGSRLAELYMARIVCLHGVPKKIVSDRGSQFTSNFWKKLQEEMGSKLNFSTAYHPQTDGQTERVNQILEDMLRACALDFGGSWDKNLPYAEFSYNNSYQASLQMAPYEALYGRKCRTPLLWDQTGERQVFGTDILREAEEKVKIIQERLRVAQSRHKSYADNRRRDLSFEEGDYVYLRVTPLRGVHRFHTKGKLAPRFVGPYKIVSRRGEVAYQLELPQSLAGVHNVFHVSQLKKCLRVPTEEANIERIEVQEDLTYVEKPIRILETNERRTRNRVIRFCKVQWSNHSEEESTWEREDELNFGIEFDSDRFSLSPSRRFPSPLPSPWAFAVASEPL

SEQ ID NO: 25679 - protein, 568 aa, Oryza sativa
  unsure (1)..(568): unsure at all Xaa locations
  Clone ID: TF_OsC359_8165.pep
MPQGGSSSVVRPQRQFFNNNVGNNIRNQALRPVAAPTQQQPAKREQGSKPVVCFNCGDPGHYADKCPKPRRMKVVPTQSNSTVPASKARVNHVAAAEAQDAPDVILESKDLDVILGMDWLARHKGVIDCANRKVTLTSNDGRVVTVHALSSESLRSRLNQITLEEIPIVREYPDVFPDDLPGMPPKRDIEFRIDLVPGTTPIHKRPYRMAANELAEVKRHVDDLLQKGYIRPSSSPWGAPVIFVEKKDHTQRMCVDYRALNDVTIKNKYPLPRIDDLFDQLKGALVFSKIDLRSGYHQLRIKEEDIPKTAFTTRYGLFECTVMSFGLTNAPAFFMNLMNKSAVXWKYLDKFVVVFIDDILIYSRTKEEHEEHLRLALEKLREHQLYAKFSKCEFWLSEVKFLGHVISAGGVAVDPSNVESVTNWKQPKTVSEIRSFLGLAGYYRRFIENFSKIAKPMTRLLVTTGNNPTGVPYVRALILVPGGKAQHTQRQTTNSGRLGRRPQALDGRHELDTKAFILQELLFWVWEKLSKTEYNHRTQQDTPTSATRHIFLTCDHVPHTTTVYGRKT

SEQ ID NO: 25680 - protein, 999 aa, Oryza sativa; identical to SEQ ID NO: 20074
  Clone ID: TF_OsC359_8172.pep

SEQ ID NO: 25681 - protein, 1298 aa, Oryza sativa
  Clone ID: TF_OsC359_8188.pep
LAPGLEWYIPGLEIELCSRGGCSEWLGLYNRMPCYKPEYLFGVEGFVQELRTMSFVIGFGNAPFYAQIRHDRHEEKCRVKVTLNSNSEDIPSVMFEAGGRNYIHACQEVARIAIGELRDRYSDQLVDTEYRYHPRQPQGSDRGSYLETEGIENDVTTRHLVEMLWAMDESRAETVLAAQDREDRNRGKICKLEDKVDRLEKELAALKGEAPPQKARIRLTARKRALFVPRYQLAPKVRVVEKEVAPAQADPPVIIISSDEEEESKRINSKIEWVATQDDEDEPSIDLLCSEELEKLESLVVWESSVCNNETQLRSIKVKMVNTRSNGNGPNNPNNNINGENPTLAQVLAQQTQLMNMMMQQFQNQQNQGNNHAPPQNKLAEFLRVRPPVFSSTTNPVEASDWLHAIEKKLDLLQCTDQEKVSFASHQLHGPASEWWDHFRLNRTTAEPITWLEFTAAFRKTHIPSGVVSLKKKEFRSLTQGSRSVTEYLHEFNRLARYAPEDVRNDEERQEKFLGGLNDELSYPLMVGDYPDFQKLVDKAIRQEDKYNRMEQKKRRIAQFKTQQGNNQKPRLTLGPQSMPQGGSSSVVRPQRQFFNNNAGNNIRNQAPRPVAAPAQQQPAKREQGSKPVVCFNCGDPGHYADKCPKPQRVKVVPAQSNSAVPASKARVNHIAAAEAQGAPDVILGTFLVNSVPATVLFDSGATHSFLSMSFAGNHGMEVEDLRRPLMVSTPSNQALSLQRSPSVRIEIQGVPFLANLILLESKDLDVILGMDWLARHKGVIDCANRKVTLNSYDGRVVTVHALSSESLRSRLNQITLEEIPIVREYPDVFPDDLPGMPPKRDIEFRIDLVPGTTPIHKRPYRMAANELAEVKRQVDDLLQKGYIRPSSSPWGAPVIFVEKKDHTQRMCVDYRALNDVTIKNKYPLPRIDDLFDQLKDKFVVVFIDDILIYSRTKEEHEEHLRLALEKLREHQLYAKFSKCEFWLSEVKFLGHVISAGGVAVDPSNVESVTNWKQPKTVSEIRSFLGLAGYYRRFIENFSKIAKPMTRLLQKDVKYKWSEECERSFQELKSRLISAPILILPDPKKGFQVYCDASKLGLGCVLMQDGKVVAYASRQLRPHEKNYPTHDIELAAVVHALKIWRHYLFGTRTEVYTDHKSLKYIFTQPDLNMRQRRWLELIKDYDMGIHYHPGKANVVADALSRKGYCNATEGRQLPLELCKEFERLNLGIVGRGFVAALEAKPTLIDQVREAQINDPDIQEIKKNMRRGKAIGFLEDEHGTVWLGERICVCHVLINSSQN

SEQ ID NO: 25682 - protein, 1843 aa, Oryza sativa
  Clone ID: TF_OsC359_8238.pep
RIAVCPSFAVAAAAPAVLRRRSRRRRRSGRPSSWSPSRRRPRPPLRRRRRSSELRCRRQPEGFRRFLLVAVVVRCFSAAVLVTGVFAASSSTCWCPPFASSRRRSPASVRRPSRPLRRAAAAVGDVIADVIGVVRPPGLEWYIPGLEIELCSRDGCSEWLGLYNRMPRYKPEYLFGVEGFVQELRTMSFAIGFGTAPFYAQIPHDRHEEKCRVKVTLNSNSEEVPSVMFEAGGRNYVHACQEVARIAIGELRDSYSDQLADTEYRYHPRQPQGSDRGSYLETEGIENDATTRHLVEMLWAMDESRAETVLAAQDREDRNRGKICKLEDKVDRLEKELAALKGEAPPQKARIRLTARKRALFVPRYQLAPKMVNTRSNGNGPNNPNNNNNGENPTLAQVLAQQTQLMNMMMQQLQNQQNQGNNHAPPQNKLAEFLRVRPPIFSSTTNPVEAGDWLHAIEKKLDLLQCTDQEKVSFASHQLHGSASEWWDHFRLNRTTAEPITWLEFTAAFRKTHIPSRVVSLKKKEFRSLTQGSRSVTEYLHEFNRLARYAPEDVRNDEERQEKFLGGLNDELSYPLMVGDYPDFQKLVDKAIRQEDKYNCMEQRKRRIAHFKAQQGSNQKPRFTLGPQSMPQGGSSSVVRPQRQFFNNNAGNNIRNQAPRPVAAPTQQQPAKREQGSKPVVCFNCGDPGHYADKCPKPRRVKVVPAQSNSAVPASKARVNHVAAAEAQDAPDVILGTFPVNSVPATVLFDSGATHSFLSMSFAGNHGMEVEDLRHPLMVSTPSNQALSLQRSPSVRIEIKGVPFVANLILLESKDLDVILGMDWLARHRGVIDCANRKVTLTSNDGRVVTVHALSSESLRSRLNQITLEEIPIVREYPDVFPDDLPGMPPKRDIEFRIDLVPGTTPIHKRPYRMAANELAEVKRQVDDLLQKGYIRPSSSPWGAPVIFVEKKDHTQRMCVDYRALNDVTIKNKYPLPRIDDLFDQLKGATVFSKIDLRSGYHQLRIKEEDIPKTAFTTRYGLFECTVMSFGLTNAPAFFMNLMNKVFMEYLDKFVVVFIDDILIYSRTKEEHEEHLRLALEKLREHQLYAKFSKCEFWLSEVKFLGHVISAGGVAVDPSNVESVTNWKQPKTVSEIRSFLGLAGYYRRFIENFSKIAKPMTRLLQKDVKYKWSEECEQSFQELKSRLISAPILILPDPKKGFQVYCDASKLGLGCVLMQDGKVVAYASRQLRPHEKNYPTHDLELAAVVHALKIWCHYLFGTRTEVYTDHKSLKYIFTQPDLNMRQRRWLELIKDYDMGIHYHPGKANVVADALSRKGYCNATEGRQLPLELCKEFERLNLGIVSRGFVAALEAKPTLIDQVREAQINDPDIQEIKKNMRRGKAIGFLEDEQGTVWLGERICVPDNKDLKDAILKEAHDTLYSIHPGSTKVYQDLKERFWWASMKREIAEYVAVCDVCQRVKAEHQKPAGLLQPLKIPEWKWEEIGMDFITGLPRTSSGHDSIWVIVDRLTKVAHFIPVKTTYSGSRLAELYMARIVCLHGVPKKIVSDRGSQFTSNFWKKLQEEMVSKLNFSTAYHPQTDGQTERVNQILEDMLRACALDFGGSWDKNLPYAEFSYNNSYQASLQMAPYEALYGRKCRTPLLWDQTGERQVFGTDILREAEEKVKIIQERLRVAQSRHKSYADNRRRDLSFEEGDYVYLRVTPFRGVHRFHTKGKLAPRFVGPYKIVSRRGEVAYQLELPQSLAGVHNVFHVSQLKKCLRVPTEEANLEQIEVQEDLTYVEKPIRILATSERRTRNRVIRFCKVQWSNHSEEESTWEREDELKSAHPHLFASSSESRGRDSV

SEQ ID NO: 25683 - protein, 457 aa, Oryza sativa
  unsure (1)..(457): unsure at all Xaa locations
  Clone ID: TF_OsC359_8239.pep
MSWQRVGALLLGXSVSPACPGGSGRRXGIRSVLLSMARMGWKLCHVFRLYTVVMFNREKGKNVSRHASSNSSFQLHPPLASRELTRVHPWSIPSMLLGSQLPLVGSQDQNQYVFDRAFATQVNELPMPEEDVPFCQDCREQGHYALNCPWVYTKEAPSFGLAGQASLNQPPRTKSSLQPSVQSREPNEENPLNPGNCFPPSLSYHVGSRTKHAKGKKSKNQKRKAPMRTEEEVRKMTITSTEWPPAGITIPRRQRGNTFRGARQLTQHLLSHGGRVSDSEGSDQVSSDYEYESPRRLGEEEMELKACTRCGEIGHIASMCLTLCPHCEEDHPPGECPTRKVTCFLCEGTNHVPKDCQLSVLLTKTAEIQRTTLRLSHQLVSSNSNLDDIIHSTNAPPAAPDSAINHSNNTFSTNHSLHXQPQQXIVVDGRSCFSPRREVGNLYEVDSKDMNYAKFWN

SEQ ID NO: 25684 - protein, 1488 aa, Oryza sativa
  Clone ID: TF_OsC359_8266.pep
MTRATVLRRSASETEARTRSTAMRRCRGRWRRAGRKTGATAAANRRSTATAEREEHGASTIPTARASGFHIEFYLFFCTILRMNFRVDLGRDIEASDWLHAIEKKLDLLPCTDQEKVSFASHQLHGPASEWWDHFRLNRTTAEPITWLEFTAAFRKTHIPSGVVSLKKKEFRSLTQGSRSVTEYLHEFNRLARYAPEDVRNDEERQEKFLGGLNDELSYPLMVGDYPDFQKLVDKAIRQEDKYNRMEQKKRRIAQFKTQQGNNQKSRLTLGPQSMPQGGSSSVVRPQRQFFNNNAGNNIRNQAPRPVAAPAQQQPAKREQGSKPVVCFNCGDPGHYADKCPKPRRVKVVPAQSNSAVPASKARVNHVAAAEAQDAPDVILGTFLVNSVPATVLFDSGATHSFLSMSFAGNHGMEVEDLRRPLMVSTPSNQALSLQRSPSVRIEIQGVPFLANLILLESKDLDVILGMDWLARHKGVIDCANRKVTLNSYDGRVVTVHALSSESLRSRLNQITLEEIPIVREYPDVFPDDLPGMPPKRDIEFRIDLVPGTTPIHKRPYRMAANELAEVKRQVDDLLQKGYIRPSSSPWGAPVIFVEKKDHTQRMCVDYRALNDVTIKNKYPLPRIDDLFDQLKGATVFSKIDLRSGYHQLRIKEEDIPKTAFTTRYGLFECTVMSFGLTNAPAFFMNLMNKVFMEYLDKFVVVFIDDILIYSQTKEEHEEHLRLALEKLREHQLYAKFSKCEFWLSEVKFLGHVISAGGVAVDPSNVESVTNWKQPKTVSEIRSFLGLAGYYRRFIENFSKIAKPMTRLLQKDVKYKWSEECERSFQELKSRLISAPILILPDPKKGFQVYCDASKLGLGCVLMQDGKVVAYASRQLRPHEKNYPTHDIELAAVVHALKIWRHYLFGTRTEVYTDHKSLKYIFTQPDLNMRQRRWLELIKDYDMGIHYHPGKANVVADALSRKGYCNATEGRQLPLELCKEFERLNLGIVGRGFVAALEAKPTLIDQVREAQINDPDIQEIKKNMRRGKAIGFLEDEHGTVWLGERICVPDNKDLKDAILKEAHDTLYSIHPGSTKMYQDLKERFWWASMKREIAEYVAVCDVCQRVKAEHQKPAGLLQPLKIPEWKWEEIGMDFITGLPRTSSGHDSIWVIVDRLTKVAHFIPVKTTYSGSRLAELYMARIVCLHGVPKKIVSDRGSQFTSNFWEKLQEEMGSKLNFSTAYHPQTDGQTERVNQILEDMLRACALDFGGSWDKNLPYAEFSYNNSYQASLQMAPYEALYGRKCRTPLLWDQTGERQVFGTDILREAEEKVKIIQERLRVAQSRHKSYADNRRRDLSFEEGDYVYLRVTPLRGVHRFQTKGKLAPRFVGPYKIVSRRGEVAYQLELPQSLAGVHNVFHVSQLKKCLRVPTEEANIDQIEVQEDLTYVEKPIRILETNERRTRNRVIRFCKVQWSNHSEEESTWEREDELKSAHPLLFASSSESRGRDSV

SEQ ID NO: 25685 - protein, 936 aa, Oryza sativa
  unsure (1)..(936): unsure at all Xaa locations
  Clone ID: TF_OsC359_8286.pep
MPMVNTRSNGNGPNNPNNNNGENPILAQVLAQQTQLMNMMMQQFQNQENQGNNHAPPQNKLAEFLRVRPPVFSSTTNPVEASDWLHAIEKKLDLLQCTDQEKVSFASHQLHGPASEWWDHFRLNRTTAEPIIWLEFTAAFRKTHIPSGVVSLKKKEFRSLTQGSRSVTEYLHEFNRLARYXPEDVRNDEERQEXFLGGLNDELSYPLMVGDYPDFQKLVDKAIRQEDKYNRMEQKKRRIAQFKTRQGNNQKPHLTLGPQPMPQGGSSSVVRPQRQFFNNNAGNNIRNQGPRPVAAPAQQQPVKREQGSKPVVCFNCGDPGHYADKCPKPRRVKVVPAQNNSAVPASKARVNHVAAAEAQDAPDVILGTFLVNSVPATVLFDSGATHSFLSMSFVGNHGMEVEDLRRPLMVSTPSNQALSLQRSPSVRIEIQGVPFLANLILLESKDLDVILGMDWLARHKGVIDCANKKVTLTSYDGRVVTVHALSSESLRSRLNQITLEEIPIVREYPDVFPDDLPGMPPKRDIEFRIDLVPGTTPIHKRPYRMAANELAEVKRQVDDLLQKGYIRPSSSPWGAPVIFVEKKDHTQRMCVDYRALNDVTIKNKYPLPRIDDLFDQLKGATVFSKIDLRSGYHQLRIKEEDIPKTAFTTRYGLFECTVMSFGLTNAPAFFMNLMNKVFMEYLDKFVVVFIDDILIYSRTKEEHEEHLRLALEKLREHQLYAKFSKCEFWLSEVKFLGHKDVKYKWSEECEQSFQELKSRLISAPILILPDPKKGFQVYCDASKLGLGCVLMQDGKVVAYASRQLRPHEKNYPTHDIELAAVVHALKIWRHYLFGTRTEVYTDHKSLKYIFTQPDLNMRQRRWLELIKDYDMGIHYHPGKANVVADALSRKGYCNATEGRQLPLELCKEFERLNLGIVGRGFVAVGDMGPGVLRPEA

SEQ ID NO: 25686 - protein, 1186 aa, Oryza sativa
  Clone ID: TF_OsC359_8350.pep
MPRYKPEYLFGVEGFVQELRTMSFVIGFGTAPFYAQIRHDRHEERCRVKVTLNSNSEDIPSVMFEAGGRNYIHACQEVARIAIGELRDRYSDQLADTEYRYHPRQPQGSDRSSYLETEGIENDVTTRHLVEMLWAMDESRAETVLAAQDREDWNRGKICKLEDKVDRLEKELAALKGEAPPQKARIRLTARKRALFVPRYQLAPKVRVVEKEVAPADPPVVNVSDDEEEPKHTHSKIEWVATQDDEEEPNEPSIDLRCSEELDNGNGPNNPNNNNGENPTLAQVLAQQTQLMHMMMQQLQNQQNQGNNHATPQNKLAEFLRVRPPVFSSTTNPVETGDWLHAIEKKLDLLQCTDQEKVSFASHQLHGPASEWWDHFRLNRTTAEPITWLEFTTAFRKTHIPSGVVSLKKKEFRSLTQGSRSVTEYLHEFNRLARYAPEDVHNDEERQEKFLEGLNDELSYPLMTGDYSDFQKLVDKAIHQEDKYNRMEQKKRRIAQFKTQQGNNQKPRLTLGPQSMPPGGSSSVVRPQRQFFNNNAGNNIRNQVPRPVVAPTQQQPAKREQGSKPVVCFNCGDPGHYADKCPKPRRVKVVPAQSNSTAPVSKARVNHVAAAEAQDAPDVILVREYSDVFPDDLPANELAEVKRQVDDLLQKGYIRPSSSPWGAPVIFVEKKDHTQRMCVDYRALNDVTIKNKYPLPRIDDLFDQLKGATVFSKIDLRSGYHQLRIKEEDIPKTAFTTRYGLFECTVMSFGLTNAPAFYMNLMNKVFMEYLDKFVVVFIDDILIYSRTKEEHEEHLRLALEKLREHQLYAKFSKCEFWLSEVKFLGHVISAGGVAVDPSNVESVTNWKQPKTVSEIRSFLGLAGYYRRFIENFSKIAKPMTRLLQKDVKYKWSEESVAVAREGHRRDRQVVAVLVRPFAAAEDRRSVIAVVDPKSFAVSSSSPSPSVDLPSPFWSPVSSPCRPLCLGAFHLCPRAAVRRRACAARAVRPAEPPLPSVTSPLTSSRPSARGSLRGTRLRSGGDKPTGVAGESMPCYKGVIMIQEGALQWIVLYKGYCHNSFPRYRGGIEAHGDMIHGNAELADDALERALDAVIGFSSSFRPNRTTPSRTLAPPGSPRRPLQDTPRKPIQWRSDLGDRHRVLQLHSIASIIDSILSVTPLTDRAADVIPGVVPCRHGASPSLWLCRHP

SEQ ID NO: 25687 - protein, 2003 aa, Oryza sativa
  unsure (1)..(2003): unsure at all Xaa locations
  Clone ID: TF_OsC359_8355.pep
DLHIKNSVVSEESVFAGEEFEEFQGQQGNSWFGMVHSWFGDRTVQPMPRYKPEYLFGVEGFVQELRTMSFVIGFGTAPFYAQIPHDRHEEKCRVRVTLNSNSEEVPSVMFEAGGRNYIHACQEVARIAIGELRDRYSDQLADTEYRYHPRQPQGSDRGSYLETEGIENDATTRHLVEMLWAMDESRAETVLAAQDREDRNRGKICKLEDKVDRLEKELAALKGEAPPQKARIRLTARKRALFVPRYQLAPKVRVVEKEVAPAQADPPVIIISSDEEEESKRTRSKIEWVATQDDEDEPNEPTIDLRCLEELDNGNGPNNPNNNNNGENPTLAQVLAQQTQLMNMMMQQFQNQQNQGNNHAPPQNKLAEFLRVRPPVFSSTTNPVEASDWLHAIEKKLDLLQCTDQEKVSFASHQLHGPASEWWDHFRLNRTTAEPITWLEFTAAFRKTHIPSGVVSLKKKEFRSLSQGSRSVTEYLHEFNRLARYAPEDVRNDEERQEKFLGGLNDELSYPLMVGDYPDFQKLVDKAIRQEDKYNRMEQKKRRIAQFKTQQGNNQKPRLTLGPQPMPQGGSSSVVRPQRQFFNNNAGNNIRNQAPRPVAAPAQQQPAKREQGNKPVVCFNCGDPGHYADKCPKPRRVKVVPAQNNSAVPASKARVNHVAAAEAQDAPDVILGTFLVNSVPATVLFDSGATHSFLSTSFAGNHGMEVEDLRRPLMVSTPSNQALSLQRSPSVRIEIQGVPFLANLILLKSKDLDVILGMDWLARHKGVIDCANRKVTLNSYDGRVVTVHALSSESLRSRLNQITLEEIPIVREYPDVFPDDLPGMPPKRDIEFRIDLVPGTTPIHKRPYRMAANELAEVKRQVDDLLQKGYIRPSSSPWGAPVIFVEKKDHTQRMCVDYRALNDVTIKNKYPLPRIDDLFDQLKGATVFSKIDLRSGYHQLRIKEYGLFECTVMSFGLTNAPAFFMNLMNKVFMEYLDKFVVVFIDDILIYSRTKEEHEEHLRLALEKLREHQLYAKFSKCEFWLSEVKFLGHVISAGGVAVDPSNVESVTNWKQPKTVSEIRSFLGLAGYYRRFIENFSKIAKPMTRLLQKDVKYKWSEECEQSFQELKSRLISAPILILPDPKKGFQVHCDASKLGLGCVLMQDGKVVAYASRQLRPHEKNYPTHDIELAAVVHALKIWHHYLFGTRTEEFERLNLGIVDRGFVAALEANPTLIDQVREAQINDPDIQEIKKNMRRGKAIGFLEDEHGTVWLGERICVPDNKDLKDAILKEAHDTLYSIHPGSTKMYQDLKERFWWASMKREIAEYVAVCDVCQRVKAEHQKPAGLLQPLKIPEWKWEEIGMDFITGLPRTSSGHDSIWVIVDRLTKVAHFIPVKTTYSGSRLAELYMARIVCLHGVPKKIVSDRGSQFTSNFWKKLQEEMGSKLNFSTAYHPQTDGQTERVNQILEDMLRACALDFGGSWDKNLPYAEFSYNNSYQASLQMAPYEALYGRKCRTPLLWDQTGERQVFGTDILREAEEKVKIIQERLRVAQSRHKSYADNRRRDLSFEEGDYVYLRVTPLRGVHRFHTKGKLAPRFVGPYKIVSRRGEVAYQLELPQSLAGVHNVFHVSQLKKCLRVPTEEANIEQIEVQEDLTYVEKPIRILETSERRTRNRVIRFCKVQWSNHSEEESTWEREDELNFGIEFDSDRFSLSPSREFPSPLPXAVGLRRRLRAPLKGPPVSPLPVATFAFASRRRKSPSAPCAAVVSAVAVAREDRRRARQVVAVLVRPFAVAGDHRSSFAAVDPKSFAASSSSPSPSVGLPPPFRSPCRRSPASVRRSSRLLRRAAAAVGDVTADVIGVVRHSVVSGESVFAEEEFEEFQGQQGKSPEYVALCDVCQRVKAEHQKPAGLLQPLKIPEWKWEEIGMDFITGLPRTSAGHDSIWVVVDRLTKVAHFIPVKTTYTGHKLAELYMARVTDGQTERVNQILEDMLRACVLDFGGSWDKNLPYAEFSYNNSYQASLQ

SEQ ID NO: 25688 - protein, 1708 aa, Oryza sativa
  unsure (1)..(1708): unsure at all Xaa locations
  Clone ID: TF_OsC359_8381.pep
MIQEGALQWIVLCEGYCHNSFSRYRGGIEAHGDMMWGCVLWVQWYTSDQSKTIRIAVPAVMAPGLEWYIPGLKIELCSRDGCSEWLGLCNRIPHDRHEEKCRVKVTLNSNSEDIPSVMFEAGGRNYIHACQEVARIAIGELRDRYSDQLADTEYRYHSRQPQGSDRGSYLETEGIENDATTRHLVEMLWAMDETRAETVLAAQDREDRNRGKICKLEDKVDRLEKELAALKGEAPPQKARICLTARKRALFVPRYQLAPKVRVVEKEVTPALADPPVVNMVVTRSNGNGPNNNNNNNNNGENPTLAQVLAQQAQLMNMMMQQLQNQQNQGNNHAPPQNKLAEFLRVRPPTFSSTTNPVEAGDWLHAIEKKLDLLQCTDQEKVSFASHQLHGPASEWWDHFRLNRTTAEPITWLEFTAAFRKMHIPSGVVSLKKKEFRSLTQGSRSVTEYLHEFNRLARYAPEDVRTDEEHQEKFLEGLNDELSYPLMTGDYHDFQKLVDKAIRQEDKYNRMEQKKRRIAQFKTQQGNNQRPHLTLGPQSMPQGGYSSVVRPQRQFFNNNAGNNIRNQVPRPVAASTQQQPAKREQGSKPVVCFNCGDPGHYADKCPKPRCVKVVPAQSNSTVSASKARVNHVAAAEAQGAPDVILGTFLVNSVPATVLFDSGATHSFLSMSFAGNHGMEVEDLRCPLMVSTPSNQALSLQRSPSVRIEIQGVPFLANLILLESKDLDVILGMDWLARHKGVIDCANRKVTLTSNDGRVVTVHALSSESLRSILNQITLEEIPIVREYPDVFSDDLPGMPPKRDIEFRIDLVPGTTPIHKRPYRMAANELAEVKRQVDDLLQKGIDDLFDQLKGATVFSKIDLRSGYHQLRIKEEDIPKTAFTTRYGLFECTVMSFGLTNAPAFFMNLMNKVFMEYLDKFVVVFIDDILIYSRTKEEHEEHLRLALEKLREHQLYAKFSKCEFWLSEVKFLGHVISAGGVAVDPSNVESVTNWKQPKTVSEIRSFLGLAGYYRRFIENFSKIAKPMTRLLQKDVKYKWSEECEQSFQELKNRLISAPILILPDPKKGFQVYCDASKLGLGCVLMQDGKVVAYASRQLRPHEKNYPTHDLELAAVVRALKIWRHYLFGTRTEVYTDHKSLKYIFTQPDLNMRQRRWLELIKDYDMGIHYHPGKVNVVADALRRKGYCNATEGRQLPLELCKEFERLNLGIVSRGFVAALEAKPTLIDQIREAQINDPDIQEIKKNMRRGRAIGFLEDEQGTVWLGERICVPDNKDLKDAILKEAHDTLYSIHPGSTKMYQDLKERFWWASMKREIAEYVAVCDVCQRVKAEHQKPAGLLQPLKIPEWKWEEIGMDFITGLPRTSSGHDSIWVIVDRLTKVAHFIPVKTTYSGSRLAELYMARIVCLHGVPKKIVSNRGSQFTSNFWKKLQEEMGSKLNFSTAYHPQTDGQTERVNQILEDMLRACALDFGGSWDKNLPYAEFSYNNSYQASLQMAPYEALYGRKCRTPLLWDQTGERQVFGTDILREAEEKVKIIQERLRVAQSRHKSYADNRRRDLSFDERDYVYLRVTPLRGVHRFHTKGKLAPRFVGPYKIVSRRGEVAYXLELPQSLAGVHNVFHVSQLKKCLRVPTEEANLEQIEVQEDLTYVEKPIRILEIDERRTRNRVIRFCKVQWSNHSEEESTWEREDELKSAHPHLFTSSSESRGRDSV

SEQ ID NO: 25689 - protein, 1719 aa, Oryza sativa
  unsure (1)..(1719): unsure at all Xaa locations
  Clone ID: TF_OsC1528_2087.pep
MAKNPKAAKNRRPTTRRPRAAAAAATASASADIEDLAPPSGCRAAVGLTTAAAAVRAELLRWYDANRRDLPWRRAAEPAGSGSGSGRGEEKRAYAVWVSEVMLQHTRVPVVVDYYSRWMARWPTVDSLAAATQEEVNEMWAGLGYYRRARFLLEGAKQIVEKGEFPRTASALREVRGIGDYTAGAIASIAFNEVVPVVDGNVRVISRLYAIPDNPKESSTVKRFCTRRQQDAELAAAEERRRATARTGAAAARAARLAAAELAAARAEAEAEAAEDAARAAEVEVETLRSSINGSIAGDITADRELEELARGRARERAERWVAAHLHGGGGGPRDRAPADGNPNGRERAGGSPEPARGPRRQHGSLSPDRRHGHHGVQTVVRDFGPGGGWPTLTKTNYIEWAAVMRVRLQVRHVGGSPFSLSQKRTAKEAWDAIAAARIGSDRARKSTLQALRKEWENLAFKPGEDVDDFALRLNTLLQKMVQYGDDTYDEERAVEKLFRCVPEKYRQIARSIESLLDLSTMSIEEALGRLKVVDGDEPQPLSGPITIGGKLHLTREQWEASQGDRRKGESSSPTGGRKPRKARGGVQLRGAQGVATGNHKPARDDACRNCGKLGHWAKDCQQPRRGQAHVARVEEEPALLLAHASIELPPAAPAAAAFLHLDEPKVLVSLCNGSSNDKADGWYLDTGATHHMTGRREFFTEFDSSVRGSVKFGDASGVEIKGVGSVTFTAKSGEHRLLTGVYYIPALRNSIISVGQLDENGSRVMVEDGLMRIWDRRRRLLAKVTRGTNRLYILSAQVAQPVCLAARRDDEAWQWHERFGHLHFEALKQLSAKEMVRGMPCLDHVEQLCDVCVVTKQRRLPFPQQTSFRAKKRLELVHEDLCGPVTPATPGGRRYFLLLVDDLSRYMWVMVLGSKGEAADAIRHAQAAAEAECGRKLRVLRTDNGGEFTAAEFASYCADEGIQRHYTTPYSPQQNGVVERRNQTVVGMARALLKQRGMPAIFWGEVVVTAAYILNRSPTKALDGRTPYEAWHGRKPAVSHLRVFGCLAFAKELGHIGKLDDRSTPGVFIGYAEGSKAYRILDPETQRVRTARDVVFDEGRGWVWDKAVDDGSIPTYDDFTVEYVHFEGAGGVGSSSSPSVSTLAPESPPTPTPTHPRATTSTTTSSSSTPPQPVTPHAPVPTATPPSTSTLTPARVERSPVEFATPLSHDGERIDAYNDGEQLRYRTMEDLLGDQPVPGLVPRDLEAQLHLACDDGEPRSFAEAEKHAAWRAAMQSEMDAVQENRTWELADLPRGHRAITLKWVFKLKRDEAGAIIKHKARLVARGFVQQEGIDYDDAFAPVARMESVRLLLALAAQEGWGVHHMDVKSAFLNGDLKEEVYVHQPPGFVIPGKEGKVLRLHKALYGLQQAPRAWNAKLDSTLKGMGFEQSPHEAAIYRRGNGGNALLVGVYVDDLVITGTKDAEVAAFKEEMKATFQMSDQGPLSFYLGIEVHKDNSGITLRQTAYAKRVVELAGLTDCNPALTPMEERLKLSRDSTAEEVDATQYRRLVGSLRYLTHTRPDLAFSVGYVSRFMQRPTTEHQQAVKRIIRYVAGTLDHGLYYPRCPGKAHFVGYSDSDHAGDIDTSKSTSGILFFLGKCLVSWQSVKQQVVALSSCEAEYMAASAASTQALWLARLLSDLLGRDTGTVELRVDSKSALALAKNPXFHERSKHIRAAHW

SEQ ID NO: 25690 - protein, 594 aa, Oryza sativa
  unsure (1)..(594): unsure at all Xaa locations
  Clone ID: TF_OsC359_7442.pep
MEDEPLPAALVAFSPAPVVVVVVVLSSSSSSWRSSLRQAVLVRRPRFVKCCSPVVVFVLGSASSSLVPAASRLRPRIAAEAVPSPFVSVVPVCLHRARSSLSFPRLVAWWANEGYTSCGPVVEMSWHRXGVLLLGGSILPACPGGSGRRXGVGSVLLFMARMGWELCHVFRPYTVVMFNREKGKNVRGYASSNSSFQLNPPLASRELTRAHPWSIPSMLLSSQLPLVGSQDQNQYVFDRAFATQINELPMPEEHVPFCHDCREXGHYALNCPWVYAKEAPSFGLTGQTSLNQPPRTKSSLQPSVQSREPNGENPLNPGNCFPPSLSYHVGSRTKQAKGKKSKNQKRKAPMRTEEEVRKMTITSTEWPPAGITIPRRQRGNTFRGARQLTQHLLSHGGRVSDSEGSDQVSSDVEDESPRHLGEEEMESKACTRCGEIGHIASRCLTLCPHCEEDHPPGECPTRKVTCFLCEGTNHVPKDCQLSVLLTKTAEIQRTTLRLSHQLVSSNSNLDDIIHSTNAPPAAPDSAVNHSNNTFNTNHSLHRRPQQRIVVDGRSCVSPRPTPGRAKGNQSQECDTKQKTVICFKXQSEGSFSCE

SEQ ID NO: 25691 - protein, 796 aa, Oryza sativa; identical to SEQ ID NO: 20211
  Clone ID: TF_OsC1528_1824.pep

SEQ ID NO: 25692 - protein, 1377 aa, Oryza sativa
  Clone ID: TF_OsC1528_2130.pep
MLRIFDLFMLYCVVYMYRSNDAFMLVFICNVMIYLWNRLNHYTSIISTIQKPYYRHCDFTMAGFADALRPDKFTGVHFKRWQIRVTLWLTAMKCFWVSTGKPEGVLTAEQQKQFEEATTLFVGCILSILGDRLVEVYMHMTDAKELWDALNTKFGATDASNDLYIMEQFHDYKMADNRSVVEQAHEIQTMAKELELLKCVLPDKFVAGCIIAKLPPSWRSFGTALKHKRQEYSVEGLIASLDVEEKARKKDAASKGDGGQSSANVVHKAQNKSKGKYKAQQTTNFKKQKKNNNNPNQDERTCFVCGQVGHLVRKCPQRKGMKAPAGQTSKSANVTIGNTGDGSGYGNLPTVFSVNQSTNWWVDTGANVHVCADISLFSSYQVARGSTVLMGNGSHASVHGVGTVDLKFTSGKIVQLKNVQHVPSIDRNLVSGSRLTRDGFKLVFESNKVVVSKHGYFIGKGYECEGLFRFSLSDFCNKSVNHICGSVDDEANVWHSRLCHINFGLMSRLSSMCLIPKFSIVKGSKCHSCVQSKQPRKPHKAAEERNLAPLELLHSDLCEMNGVLTKGGKRYFMTLIDDATRFCYVYLLKTKDEALDYFKIYKAEVENQLDRKIKRLRSDRGGEFFSNEFDLFCEEHGIIHERTPPYSPESNGIAERKNRTLTDLVNAMLDTAGLPKAWWGEALLTSNHVLNRVPNRNKDKTPYEIWIGRKPSLSYLRTWGCLAKVNVPITKKRKLGPKTVDCVFLGYAHHSIAYRFLIVKSEVPDMHVGTIMESRDATFFESFFPMKDTHSGSNQPSEIIPSSITPPEQTEHTHELVSEEDVSEAPRRSKRQRTAKSFGDDFTVYLVDDTPKSISEAYASPDADYWKEAVRSEMDSIIANGTWEVTERPYGCKPVGCKWVFKKKLRPDGTIEKYKARLVAKGYTQKEGEDFFDTYSPVARLTTIRVLLSLAASHGLLVHQMDVKTAFLNGELDEEIYIDQPDGFVVEGQEGKVCKLLKSLYGLKQAPKQWHEKFDKTLISAGFAVNEADKCVYYRHGGGEGVILCLYVDDILIFGTNLEVINEVKSFLSQNFDMKDLGVADVILNIKLIRGENGITLLQSHYVEKILNRFGYIDSKPSPTPYDPSLLLRKNKRIARNQLEYSQIIGSLMYLASATRPDISFAGYSDSNWISDVDEIKATSGYVFTLGGGAVSWKSCKQTILTRSTMEAELTALDTATVEAEWLRDLLMDLPVVEKPVPAILMNCDNQTTCEKTIEVCQEIKKLRSYNVGLHPNSEKPGRSLHEGTITKCDRQCIEGDGFETHWRQRGRVAAATGGAKGEGGMVEGVDQGRIYRQRPRGAMARLGASGAWWQQPRGGGGLVQILRPQRRQQRMAQGSQ

SEQ ID NO: 25693 - protein, 585 aa, Oryza sativa
  unsure (1)..(585): unsure at all Xaa locations
  Clone ID: TF_OsC359_5530.pep
MDEVGGRWTFSRANEGYTSCGPVVEMSWHRVGALLLGAQSCLPVPEVPAVGGIGSVLLCMARMGWKLCHVFRLYTVVMDNTGNKGYGNDGSDDSRTQANGNERSINETSPELIQVVVNQTNMLATAFQLLQNWNNPAGATNVQVPTVQQQCKLSEFLKTGPPTFAMAVDPMEASDWLRTIEKKLGLIQCTDQERVGFATHQLVGPASEWWDSYEASRPEGHTITWNEFSSVFKRSHVPAGMITLRKREFRYLKQGDLTVTEYLHEFYRLAHYAPEDVETDEDKQEKFLQGLKDELAVQLLLEDYENFEKLVDKAMQLESEHNRMTNCKRRIVNIPVFPCGNQGQRTEPLQITGSSVAHQEFPPQEDGHNADNNISNTNDDDVTTNNHASCPNSDHSNQACNVNIIHQDVDDSINDGTQNDNPSNWDSGKDSDGDSNYGTTDANVSKEFQPPIPTPSQNDCPQTDSSAKKTLICYNCKEPGHYSRDCLQPRQSRPPHYRQFTRSRHPNRIVVTGANAVPVSLKGSKPKDLIVPRSVRNPHXKEYHLATIQSKSARGATREKSGEEKIPSATPARAPLTGGPARHPR

SEQ ID NO: 25694 - protein, 529 aa, Oryza sativa
  unsure (1)..(529): unsure at all Xaa locations
  Clone ID: TF_OsC359_5531.pep
MDNTGNKGYGNDGSDDSRTQANGNERSINETSPELIQVVVNQTNMLATAFQLLQNWNNPAGATNVQVPTVQQQCKLSEFLKTEPPTFAIAVDPMEASDWLRTIEKKLGLIQCTDQERVGFATHQLVGPASEWWDSYEASRPEGHTITWNEFSSVFRRSHVPAGMITLRKREFRYLKQGDLTVTEYLHEFYRLAHYAPEDVETDEDKQEKFLQGLKDELAVQLLLEDYEDFEKLVDKAMQLESEHNRMTNCKRRIVNIPVIPCGNQRQRTEPLQITGSSVVHQEFLLQEDGRDADNNTSNTNDDDTTNNHGSCPISDHSNKACNVSSIHQDVNDSINVGTQNDNLSNFDTEKDSNGDSNYGTTDANVSKDFQPPIPTPSQNDRPQTDSSAKKTLICYNCKEPGHYSRDCLQPRQNRPPHYRQFTRIRHPNRIVVTGANTVPVSLKGSKPKDLIVPRSVRNPRHEVGNLYEVDSKDMNYAKXSGTESPSSSAATQSKSAKGSTRDKSGEEKIPSAPRARAPLTGGPARHSR

SEQ ID NO: 25695 - protein, 548 aa, Oryza sativa
  unsure (1)..(548): unsure at all Xaa locations
  Clone ID: TF_OsC359_5621.pep
MDNTGNKGYGNDGSDDSRTQANGNERSTNETSPELIQVVVNQTNMLATAFQLLQNWNNPAGATNVQVPTVQQQCKLSEFLKTEPPTFAIAVDPMEASDWLRTIEKKLGLIQCTDQERVGFATHQLVGPASEWWDSYEASRPEGHTITWNEFSSVFRRSHVPAGMITLRKREFRYLKQGDLTVTEYLHEFYRLARYAPEDVETDEDKQEKFLQGLKDELAVQLLLEDYEDFEKLVDKAMQLESEHNRMTNCKRRIVNIPVIPCGNQRQRTEPLQITGSSVVHQEFLPQEDGRNADNNTSNTNDDDTTNNHGSCPISDHSDKACNVSSIHQDVNDSINVGTQNDNLSNFDTEKDSNGDSNCGTGDANVSKDFQPPIPTPSRNDRPQMDSSAKKTLICYNCKEPGHYSRDCLQPRQNRPPHYRQFTRIRHPNRIVVTGANAVPVSPKGSKPKDLIVPRSVRNPHXEYHLLEVDSEDMNHEKFGNGSITELPQPSLSQPKGAPWSKSGEEKIPSATGGQAKQFRVVKFCWKFVKTQRKKSDKKRRPPNLSSC

SEQ ID NO: 25696 - protein, 449 aa, Oryza sativa; identical to SEQ ID NO: 20222
  Clone ID: TF_OsC359_5989.pep

SEQ ID NO: 25697 - protein, 503 aa, Oryza sativa
  unsure (1)..(503): unsure at all Xaa locations
  Clone ID: TF_OsC359_6507.pep
MSWQRVGALLLGXSVLPACPGGSGRRXGIGSVLLSMARMGWKLCHVFRLYTVVMNNTGNKGYGNDGSDDSRTQANGNERSINETSPELIQVVVNQTNMLATAFQLLQNWNNPARATNVQVPTVQQQCKLSEFLKTGPPTFAMAVDPMEASDWLRTVEKKLGLIQCTDQERVGFATHQLVGPASEWWDSYEASRPEGHTITWNEFSSVFKRSHVPAGMITLRKREFRYLKQGDLTVTEYLHEFYRLAHYAPEDVETDEDKQEKFLQGLKDELAVQLLLEDYEDFEKLVDKAMQLKSEHNRMTNCKRRIVNIPVFPGGSQRQRTEPLQITGSSVVHQEFLPQEDERNADNNTSNTNDDDTTNNHGSCPISDHSNKACNVSSIHQDVNDSINVGTQNDNLSNFDTEKDSNGDSNYGTTDANVSKDFQPPIPTPSQNDRPQTDSSAKKTLICYNCKEPGHYSRDCLQPRQNRPPHYRQFTRSRHPNRIVVTGANAVPVKPSASQKQP

SEQ ID NO: 25698 - protein, 538 aa, Oryza sativa; identical to SEQ ID NO: 20231
  Clone ID: TF_OsC359_6591.pep

SEQ ID NO: 25699 - protein, 691 aa, Oryza sativa
  Clone ID: TF_OsC359_7474.pep
MSSGTNEGYTSCGPVVEMSWHRAGVLLLGAQSCLPVPGVPAVRGIGSMYTSDQSKSIRIAEPSDMGKPSNVPKSVFQFLKFAQQLKCGMVGLGWLGTSWDPGSGCQFGLNHRRPWVKAGLKRLCNNMDNTGNKGYGNDGSDDSRTQANGNERSTNETSPELIQVVVNQTNMLATAFQLLQNWSSPAGATNVQVPTVQQQCKLSEFLKTEPPIFAIAVDPMEASDWLRTIEKKLGLIQCTDQERVGFATHQLVGPASEWWDSYEASRPEGHTITWNEFSSVFRRSHVPAGMITLRKREFRYLKQGDLTVTEYLHEFYRLARYAPEDVETDEDKQEKFLQGLKDELAVQLLLEDYEDFEKLVDKAMQLESEHNRMTNCKRRIVNIPVIPCGNQRQRTEPLQITGSSVVHQEFLPQEDGRNADNNTSNTNDDDTTNNHGSCPISDHSNKACNVSSIHQDVNDSINVGTQNDNLSNFDTEKDSNGDSNYGTTDANVSKDFQPPIPTPSQNDRPQTDSSAKKTLICYNCKEPGHYSRDCLQPRQNRPPHYRQFTRSRHSNCIVVTGANAVPAKSEIFNSVSDATRSEKCKHRLPGNAMTWEDDPMGKNTSSGNLSEVDSEDMNHEKFWNGSITELPQPSLSQPKGAPWSKLGEEKIPSATGGQAKQFRVVKFCWKFVKTQRKKSDKKRRPPNLSSC

SEQ ID NO: 25700 - protein, 453 aa, Oryza sativa
  unsure (1)..(453): unsure at all Xaa locations
  Clone ID: TF_OsC359_8210.pep
LKTEPPTFAIAIDPMEASDWLRTVEKKLGLIQCTDQERVGFATHQLVGPASEWWNSYEASRPEGHTITWNELFSPATFMVVSIMVSRQVXITLRKREFRYLKQGDLTVTEYLHEFYRLAHYAPEDVETDEDKQEKFLQGLKDEXAVQLLLEDYEDFEKLVDKAMQLESEHNRMTNCKRRIVNIPVFPCGNQRQRTEPLQITGSSVVHQEFPRQEDGHNADNNISNTNDDDVTTNNHASCPNSDHSNQACNVNIIHQDVDDSINDGTQNDNPSNWDSEKDSDGDSNYGTTDANVSKDFQPPIPTPSQNDRPQTDSSAKKTLICYNCKEPGHYSRDCLQPRQSRPPHYRQFTRSRHPNRIVVTGANAVPVSLKGSRLKYHIVTRSIHNSRSEEYLVDKVDAKDMNYAKFWNXAPSSGAATQSKSAKGSTRDKSGEEKIPSATGDRAKQSRVEKFC

SEQ ID NO: 25701 - protein, 264 aa, Oryza sativa; identical to SEQ ID NO: 20234
  Clone ID: TF_OsC1713_4581.pep

SEQ ID NO: 25702 - protein, 1544 aa, Oryza sativa; identical to SEQ ID NO: 20260
  Clone ID: TF_OsC1713_3911.pep

SEQ ID NO: 25703 - protein, 1426 aa, Oryza sativa; identical to SEQ ID NO: 20261
  Clone ID: TF_OsC1713_4549.pep

SEQ ID NO: 25704 - protein, 366 aa, Oryza sativa; identical to SEQ ID NO: 20256
  Clone ID: TF_OsC1713_5093.pep

SEQ ID NO: 25705 - protein, 498 aa, Oryza sativa
  unsure (1)..(498): unsure at all Xaa locations
  Clone ID: TF_OsC359_6138.pep
MEMDEVGGRWTFSRTNEGYTSCGPVVEMSWHRVGALLLGXSVLPACPGGSGRRXGIGSVLLSMARMGWKLCHSFRLYTVVMFNREKGKNVSGYDSSNSSFQLNLPLASRELTRAHPWSIPSMLLSSQLPLVGSQDQNQYVFDRAFATQVNELPMPEEQVPFCHDCREQGHYALNCPWVYVKEAPSLGLAGRTSLNQPPHTKSSLQPSVQSRELNGENPLNPGKCFPPSLSYHVGSHTKQAKGKKSKNQKRKAPMRTEEEVRKMTITSTEWPPAGITIPRRQRGNTFRGARQLTQHLLSRGGRVSDSEGSDQVSSDEEDESPRHLGEEEMESKACPRCGEIGHVASMCLTLCPHCEEDHPPGECPTRKVTCFLCEGTNHVPKDCQLSVLLTKTAEIQRTTLRLSHQLVSSNSNIDDIIHSTNAPPAAPDSAINHSDNTFSTNHSLHRQPQQRIVIDGRSCVSPRPTPGRAKGNQPPEGDTKQKTVIRLNQQPEGNFSCE

SEQ ID NO: 25706 - protein, 461 aa, Oryza sativa
  unsure (1)..(461): unsure at all Xaa locations
  Clone ID: TF_OsC359_7273.pep
WHRAGVLLLGGSILPACPGGSGHVPFVSCLFGVPRLFLGRGLIHXAFGKRISETNNTSTRRVSSFKVLSLVLMFNREKGKNVSGYASSNSSFQLNPPLASRELTRAHPWSIPSMLLSSQRPLVGSRDQNQYVFDRAFATQVNELPMPEEHVPFCHDCREQGHYALNCPWVYAKEAPSFGLAGQTSLNQPPRTKSSLQPSVQRREPIRENPLNPGKCFPPSLSYHVGSRTKQAKGKKSKNQKRKAPMRTEEEVRKMTITSTEWPPAGITIPRRQRGNTFRGARQLTQHLLSHGGRVSDSEGSDQVSSDYEDESLRHLGEEEMESKACPRCGEIGHVASMCLTLCPHCEEDHPPGGCPTRKVTCFLCEGTNHVPKDCQLSVLLTKTAEIQRTTLRLSHQLVSSNINIDDIIPSTNAPPAAPDSAVNHSNNTFNTNHSLHRRPQQRIVVDGRSCVSPRRADLDA

SEQ ID NO: 25707 - protein, 305 aa, Oryza sativa; identical to SEQ ID NO: 20269
  Clone ID: TF_OsC1713_5368.pep

SEQ ID NO: 25708 - protein, 192 aa, Oryza sativa
  Clone ID: TF_OsC81339_1.pep
AFIEFETKEACERAFFKMDNCLIDDRRIHVDFSQSVSKLWGQFRQSKRNANKDGCFKCGAPDHIAKDCDQGTEQKNKGPSYVLKDENTQRGGNNRRSYDLVFDEDGENYTDQQDPGSTGRRKIQRTDDRKSGLPPRGDHDRISRRGTHSDENGREGGKEGDRDRGIRKHEDYHRYNKSGERSSSRYDDRGYS

SEQ ID NO: 25709 - protein, 1475 aa, Oryza sativa
  unsure (1)..(1475): unsure at all Xaa locations
  Clone ID: TF_OsC11275_1.pep
MAHACELNDGPIIAPSPVSLVEPRVQVSLGATDAEDKEAWYLDTGATNHMTGRGDVFAELDRSVTGTVKFGDSSIVDIKGAGNVIFTGKNGEHKVLSGVYYIPRLKSSIISIGQLDESGTRVLVEDGIMRIWDRRRRRRLLAKIKRGRSRLYVLRLEVARPICLATRHDDVAWRWHERFGHIHFGSLEKMGRQELVRGLPRLEHVEQLCDTCVITKHRRAAFPKAAKYRAQEPLDLVHGDICGPITPATPGGRRYFLLLVDDATRYMWVALLAAKSNAPDAIKRIQMAAETHCGRKLCVFRTDNGGEFTSLEFATYCTDEGIQRHFSAPYAPQQNGVVERRNQTVVSMARALLKQRGMPAEFWGEAVSTAVFLLNRAPSKSLTGKTPYEAWHGKKPMVSFLRTFGCLAYVKELNDVRKLDDRSTPGVFIGYEEGVKAYRVLDPRTRRVRLARDVIFDESRGWDWTAASGTDARPSSDFAIEYHVEKTTGHPIPSVGGGVVTPSASPTPLQETSPATPATPAPSPSVAPTEFVSPPSHDEERIDAAHSNTPVRYRTVDNLIGENAPAPGIAKRELEEASLLLAGPGEXPCSFAEPEGDDAWRAAMREEMDAVNRNGIWELVDLPHGHRPIGLKWVYKLKKNEAGKVVKHKARLVARGFVQQPGIDFDEVFAPVARMESIRLLLAVAAQKGWHVHHMDVKSAFLNGDLAEEVYVKQPPGFVVAGEEDKVLRLRKALYGLRQAPRAWNAKLDCTLKELGFDQSKHEHAMYRRNNGGSALLVGVYVDDLVITGPSTRAIEQFKEEMKAKFQMSDLGLLSFYLGIEVKQGDDGISLNQGRYAQRIVESAGLKDCNPCATPMEERLKLSRDSTAPPVDATKYRRLVGSLRYLVHTRPDLAFAVGFVSRFMERPTEEHMVAVKRILRYVAGTMEYGLHYKREKEEQRLIGYSDSDLAGDIDTRRSTSGMLFFLGSSLVSWQSIKQRVVALSSCEAEYVAATNAATQGIWLARLLGELLGKQPKAIELKVDSKSALALAKNPVFHERSKHIDLRYHFIRSCLEEGSISASFITTMDQLADILTKALGRVRFHELVARIGVILNRQVVKSDSATIKIPELDFEIPPEAQRGSLSTVEGIIMRAVDELQALQDERKKVDPQKAEAIDKFLAKLRSLGLGEAAFTFVLDDPAGNSFIENQNAPSSDPLLSVRFYERMREQQAALGFLVEPSTEEPGDQPVNHASTVEGNSEVLQEPHGSVGAVAGRRAIAQGNPDEVAAALCRYSAPEECLVFDLWLEIPYFREVIVMATTCDMCGYRNSELKPGGEIPAKGKKITLRVQNGKDLTRDVIKSDSAGVKVPELELELASGTLGGIVTTVEGLIVKICEALQRVHGFHLGDSTLEWKKKKWEDFNDRLSKLLSLQEPWTLIIDDGLAASFVAPATDSLEDDNQLTIEEYVRSWEQNEELGLNDMDTSSADAAYNTTNP

SEQ ID NO: 25710 - protein, 1450 aa, Oryza sativa; identical to SEQ ID NO: 20275
  Clone ID: TF_OsC11275_2.pep

SEQ ID NO: 25711 - protein, 638 aa, Oryza sativa
  unsure (1)..(638): unsure at all Xaa locations
  Clone ID: TF_OsC1713_4371.pep
MSTTGDNNNTRDKEEPPVNTNGGNTVSNSSGGPFSGYNVSLLPFVLRFLQLSVAILLRSLVYVDAYSILSTLKLYTSSTVTRSTHIANVMFIVLIFWIKICRIMTKFPTIQKLDSVHADSIVDVYMHMPSGKDMWDSLEAKFGVSDADSELYVMEQFYDYNMVDDRSVVEHAHEIQMLAKELENNNCELPDKFVAGGIIAKLPPSWSDFGTSLKHKRQEFSVTDLIGSLGVEEKTRAKDNRDKKIEGGSSANLVQKKNPHASHNKNKKVKPDVKPKATINFKNKDKGKAKGDCFVCGKPRHWAKDCPECMDKKSANMVISEGGGTSGYGXRGSSLLMGNGSFAVVHGXRFCYVYLLKTKDEALHYFKIYKAEVENQLERKIKRLRSGRGGEYFSNEFTSLCEEYGIIHERTPPYSPQSNGVAEKKNRTLTEMVNAMLDTARLSKEWWGEAILTACHVLNRIPTMHKELTPFEEWERKKLNLPHLRTWGCLAKVNVSIAKKRKLGPKTVDCVFLGYAIHSVGYRFLTVNSGVPDMRVGIITESRDATFFENEFPMKNAPSTSSQEPILSPEHFVPIEHIDQMLEENSEEDNIVATQKSKRQRTAKSFGDDYVVYLVDDTPRTIEEAYSSPDTDYWKEAV

SEQ ID NO: 25712 - protein, 1082 aa, Oryza sativa; identical to SEQ ID NO: 20306
  Clone ID: TF_OsC1713_4499.pep

SEQ ID NO: 25713 - protein, 924 aa, Oryza sativa
  unsure (1)..(924): unsure at all Xaa locations
  Clone ID: TF_OsC1713_4966.pep
HKRQEFSVSDLIGSLGVEEKARAKDVRGKKVEGGSSANMVQKKNPHASHDNKKVKPDVKSKATTNFKKKDKGKAKVDCFVCDKSGHWAKDCPERKDRKSANMVISEGGGTSGYGXRGSSLLMGNGSLAAVHGVGTVDLKFTSGKTVQLKNVQHVPSIKKNLVXKCHTCVQSKQPRKPHKASEVRNLAPLELVHSDLCEMNGVLTKGGKKYFMTLIDDCTRFCYVYLLKTKDEALHFFKIYKAEVENQLERKIKRLRSDRGGEYFSNEFASFCEEFGIIHEMTPPYSPQSNGVAERKNRTLTEMVNAMLDTAGLSKEWWGEAVLTACHVLNKIPMKHKEITPFEEWERKKLNLSYLRTWGCLAKHFAPIEHNDQTPEENPEKDNIVDTRKSKRQRVAKSFGDDYIVYLVDDTPRTIEEAYSSPDADYWKEAVRSEMDSIMSNDTWEVVERPYGCKPVGCKWVFKKKLKPDGTIEKYKARLVAKGYTQKEGEDFFDTYSLVARLTTIRVLLALAASHGLLVHQMDVKTAFLNGELEEEIYMDQPDGYVLEGQEGMVCKLLKSLYGLKQAPKQWHEKFDTTLTSAGFVVNEADKCVYYRYGGGEGVILCLYVDDILIFGTSLNVIEEVKDYLSKSFEMKDLGEADVILNIKLQRGDEGGITLVQSHYVDKVLSRFGYSDCKPAPTPYDPSVLLRKNRRIARDQLRYSQIIGSLMYLASATRPDISFAVSKLSRFVSNPGDDHWQALERVMRYLKGTMSYGIHYTGYPKVLEGYSDSNWISDADEIKATSGYVFTLGGGDVSWKSCKQTILTRSTMEAELTALDTATVEAEWLRELLMDLPVVEKPVPAILMNCDNQTMIIKVNSSKDNMKSSRHIKRRLKSVRKQKNSGVIALDYVQTARNLADQFTKGLPRNVIDSASREMGLIPT

SEQ ID NO: 25714 - protein, 1052 aa, Oryza sativa
  unsure (1)..(1052): unsure at all Xaa locations
  Clone ID: TF_OsC1713_3871.pep
MRKEKIPHQAPFAIQAAQLLGRAIGAGLFAITPAGERGMCCKAIKLGNARVFPVTTFEPPVSPEEKVKFEALDCLFRGALISVLADNIVDVYMHIPSRKDMWNALEAKFGVSDAGSELYVMEQFYDYKMVDDRSVVEQAHEIQMLAKELENNKCELPDKFGAGGIIAKLPPSWSDFATSLRHKRQEFRVSDLIGSLGVEEKARAKDNRGKKVEGGSSANMVQKKNTHASHNSKKVKSDVKPKARTNFKKKGKGKAKGDCFVCGKSGHWAEDCPERKDRKSANMVISEGGGTSGYGKILPTVLSVFHSPDWWIDTGANIHVGRGSSLLMGNGSLANIHVWVVHGVGTVDLKFTSGKTVQLKNVQHVPSIKKNLVSGSLLCREGFRLVFESNKCVVSKYGTFIGKGYDSGGLFHFSLDDMRNNNNVVNHISENDESNVWHSRPCHVNFGCMTRLANMSLIPKFTLVKGSKCHTCVQSKQPRKPHKASEARDLAPLELLHSNLCEMNGVLTKGGKKYFMTLIDDCTRFCYVYLLKTKDEALHYFKTYKAKVENQLERKIKRLRSDRGGEYFSNEFTSFCEEFGIIHERTPPYSPQSNGVTERKNRTLTEMVNAMLDTARLSQEWWGEAVLTACHVLNKIPMKHKEVTPFEEWERKRLNLSYLRTWGCLAKVNVPIAKKRKLGPNTVDCVFLGYAIHSVGYRFLVVNSEVPDMRVGTIIESRDATFFENEFPMKNTPSTSNHETVIPHKHFAPIEHNDQTPEGNPEEDNIVDTRKSKRQRVAKSFGDDYIVYLVDDTPRTIEKAYSSPDADYWKEAKKLRPDGTIEKYKTRLVAXGYTQKEGEDFFXDTYLPVARLITIRVLLVRAASHGLLVHQMDVKTAFLNGELEEEIYMDQQDRYVLEGQVGMVCKLLKSLYGLKQAPKQWHEKFDTTLTSTGFVVNEADKCVYYRYGGGEGVILCLYVDDILIFGISLNVIEEVKDFLSKSFEMKDLGDADVILNIKLLRGDEGGIAQSHYVDKVLSRFGYSDYKPAPTPYDPSMLLRKNRRIARDQLRYS

SEQ ID NO: 25715 - protein, 444 aa, Oryza sativa
  unsure (1)..(444): unsure at all Xaa locations
  Clone ID: TF_OsC359_6897.pep
MSWHRAGVLLLGGSILPACPGGSGRRXGVGSVLLFMARMGWELCHVFRLYTVVMFNREKGKNVSGYASSNSSFQLNPPLASRELTRAHPWSIPSMPLSSQLPLVGSQDQNQYVFDRAFATQVNELPMPEEDVPFCHDCREQGHYALNCPWVYAKEAPSFGLAGQTSLNQPPHTKTSLQPSVQSREPNGENPWNPGNCFPPSLSYHVGSRTKQAKGKKSKNQKRKAPMRTEEEVRKMAISSTEWPSAGITIPRRQRGNTFRGARQLTQHLLSHGGRVSDSEGSDQVSSDDEDESPRHLGEEEMESKACTRCGEIGHVASMCLTLCAYCEEDHPPGECPTRKVTCFVCEGTNHVPKDCQLSVLLTKTAEIQRTTLRLSRQLVSSNSNIDDIIHNTNAPPAPPNSAINHSNNIFSTNHSLHRQPQQRIVVDGRSCVSPRRHEVDNLC

SEQ ID NO: 25716 - protein, 1434 aa, Oryza sativa
  unsure (1)..(1434): unsure at all Xaa locations
  Clone ID: TF_OsC1713_4599.pep
MSGVAAATAGGGGTPPPPTGAGSGSGSGAGAPGGAVNDNNNGGNSVSPSSGGPFSGYNLLLLLLLLALSLYYVRYVVVPVLHDASSILSRYWYVPVSDIHDAHSILLVMLRSPYTAYAMIIVSISWIKICRLMTIFPTIQKPDRSFSVVGFAAALKPHAFDGSNYKRWKARALLWLTAMQCFYVSRGKRSEPPLSPEEEAKFEASDCLFHGALISVLADNIVDVYMHMPSGKDMWDALEAKFGVSDAGSELYVMEQFYDYKMVDDRSVVEQAHEIQMLAKELENNNCELPDKFVAGGIIAKLPHSWSDFATSLKHKRQEFSVPDLIGSLVVEEKARAKDVRGKKVEGGSSANMVQKKNPHASHNNKKVKPDVKPKAATNFKKKGKGKAKGDCFVCGKSGHXAKDCPERKDRKSANMIISEGGGTSGYGKILPTVLSVFHSPDWWVDTGANIHVCADISLFSSYQVGRGSSLLMGNGSLAAVHGVGTVDLKFTSGKTVQLKNVQHVPSIKKNLVSGSLLCREGFRLVFESNKCVVSKYGTFVGKGYDSXGLFRFSLNDMCNNHNAVNHISENDESNVWHSRLCHVNFGCMTRLANMSLIPKFTLVKGSKCHTCVQSKQPRKPHKASEARNLAPLELVHSDLCEMNGVLTKGGKKYFMTLIDDCTRFCYVYLLKTKDEALHYFKIYKAEVENQLERKIKRLRSDRGGEYFSIEFASFCEEFGIFHEMTPPYSPQSNGVAERKNRTLTEMVNAMLDTAGLSKEWWGEAVLTACHVLNKIPMKHKEVTPFEEWERKKLNLSYLRTWGCLAKVNVPIAKKRKLGPKTVDCVFLGYAIHSVGYRFLIVNSGVPDMHVGTILEFRDATFFENEFPIKYTPSTSSKETVMPHEHFAPIEHSDQTPEENPEEDNIVDTRKSKKQRVAKSFGDDYIVYLVDDTPRTIEEAYSSPDADYWKEAVRSEMDSIMSNGTWEVVERPYGCKPVGCKWVFKKKLRPDGTIEKYKARLVAKGYTQKEGEDFFDTYSPVARLTTIRVLLALAASHGLLVHQMDVKTAFLNGELEEEIYMDQPDGYVLEGQEGMVCKLLKSLYGLKQAPKQWHEKFDTTLTSAGFVVNEADKCVYYRYGGGEGVILCLYVDDILIFGTSLNVIEEVKDYLSKSFEMKDLGEVDVILNIKLQRGDEGGITLVQSHYVDKVLTPTPYDPSVLLRKNRRIARDQLRYSQIIGSLMYLASVTRPDISFAVSKLSRFVSNPGDDHWQALERVMRYLKGTMSYGIHYTGYPKVLEGYSDSNWISDADEIKATSGYVFTLGGGAVSWKSCKQTILTRSTMEAELTALDTATVEAEWLRELLMDLPVVEKPMPAILMNCDNQTVIIKVNSSKDNMKSSRHIKRRLKSVRXNSGVIALDYVQTARNLADQFTRRLPRNVIDSASREMGLIPT

SEQ ID NO: 25717 - protein, 470 aa, Oryza sativa
  unsure (1)..(470): unsure at all Xaa locations
  Clone ID: TF_OsC359_7479.pep
MSWQRVGALLLGXSVLPACPGGSGRRXIGSVLLFMARMGWELCHVFRPYTVVMFNREKGKNVRGYASSNSSFQLNPPLASRELTRAHPWSIPSMPLSSQLPLVGSQDQNQYVFDRAFATQVNELPMPEEDVPFCHDCREQGHYALNCPWVYAKEAPSFGLTGQTSLNQPPRTKSSLQPSVQSREPNGENPLNPGNCFPPSPSYHVGSRTKQAKGKKSKNQKRKAPMRTEEEVRKMAISSTEWPPAGITIPRRQRGNTFRGARQLTQHLLSHGGRVSDSEGSDQVSSDDEDESPRHLGEEEMESKACIRCGEIGHIASMCLTLCAYCEEDHPPGECPTRKVTCFLCEGTNHVPKDCQLSVLLTKTAEIQRTTLRLSRQLVSSNSNIDDIIHNTNAPPAPPNSAINHSNNIFSTNHSLHRQPQQRVVVDGRSCVSPRPTPGQAKGNQPQEGDTKQKTVIRFNQQSEGSFSCE

SEQ ID NO: 25718 - protein, 240 aa, Oryza sativa
  Clone ID: TF_OsC359_8167.pep
MRTEEEVRKMTITSTEWPPAGITIPRRQRGNTFRGARQLTQHLLSHDGRVSDSEGSDQVSSDYEDESLRHLGEEEMESKACPRCGEIGHIASMCLTLCTHCEEDHPPGECLTRKVTCFLCEGTNHVPKDCQLSVLLTKTVEIQRTTLRLSHQLVSSNSNIDDIIHSTNAPPAAPDSAVNHSDNTFSTNHSLHRQPQQRIVVDGRSCVSPRPGKEVGRKVIDKRNLYEVDSKDTSYKKFWN

SEQ ID NO: 25719 - protein, 1602 aa, Oryza sativa
  unsure (1)..(1602): unsure at all Xaa locations
  Clone ID: TF_OsC359_8335.pep
MPRYKPEYLFGTEGFVQELRTMSFAIGFGTAPLYAQIPHDRDEEKCCIKVTLNSNREDIPSVMFEAGGGSYIHACQEVARITIGELRESYNDQLADTEYRYHPRQPQGNDRGSYLEPAGIENDATTRHLVEMLWAMDETRVEIVLAAQDREDRNRGKICKLEDKVDRLEKELAALKGEAPPQKARVRLTARKGALFVPRYQLAPKVRVVEKEAAPAPADPPVVNCTDQEKVSFASHHLHGPASEWWDHFRFNRTTAEPITWLEFTAAFRKTHIPSGVVSLKKEFRVLTQGSRFVTKYLDEFNRLPRYTPEDVCTDEERQEKFLEGLNDELSYPLMTGDYHDFQKLVDKAIRQEDKYNRMEKKKHRIAHFKAQQGNSQRPRLAMGPQAVSQGGSSSVVRPQRQLFNNNASNNNRSQAPRPVATPTQHQPAKREQGNKPGVCFNCGEPGHYSDKCPKPRRVKIVPAQNNSSAPASKAHVNHVAAAEAQSAPDVILGTFPVNSVPATVLFDSGATHSFLSMSFAGNHGMEVEDLRRPLMVSTPSNQALSSQRSPSVRIEIQGVPFLANLILLESKDLDVILGMDWLAKYNGVIDCTNRKVTLTSNDGQVVTVHSLPYGPLRSSLNQITLEEIPIVREYPDVFLDDLPGMPPKRDIEFRIDLVPGTTPIHKRPYRMAANELAEVKRQVDDLLQKGYIRPSSSPWGAPVIFVEKKDHTQRMCVDYRALNDVTIKNKYPLPRIDDLFDQLKDATVFSKIDLRSRYHQLRIKEEDIPKTAFTTRYGLFECTVMSVGLTNAPAFFMNLMNKVFMEYLDKFVVVFIDDILIYSRTKEEHEEHLRLALEKLREHQLYAKFSKCEFWLSEVKFLGHVISAGGVAIDPSNVESVTNWKQPKTVSEIRSFLGLAGYYRRFIENFSKIPKPMTRLLQKDVKYKWSEECEQSFQELKSRLISAPILILPDPKKGFQVYCDASKLGLGCVLMQDGKVVSYASCQLRPHENYPTHDLELAAVVHALKIWRHYLFGTRTEVYTDHKSLKYIFTQPNLNMRQRRWLELIKDYDMGIHNHHGKANVVADALSRKGYCNATEGQQLPWELCKEFERLNLGIVSRGFVATLEAKPTLIDQVREAQINDPDIQEIKKNMRRGKAIGYLEDEQGTVWLGERICVPENKELKDAILKEAHDTLYSIYPGSTKMYQDLKEKFWWASMKXKCEIAEYVAVCDVCQRVKAEHQKPAGLLQPLKIPEWKWEEIGMDFITGLPRTSSGHDSIWVIVDRLTKVAHFIPVRTTYFGSRLAELYMARIVCLHGVPKKIVSDRGSQFTSKFWKKLQEEMGSKLNFSTAYHPQIDGQTERVNQILEDMLRACALDFGGSWDKNLPYAEFSYNNSYQASLQMAPYEALYGRKCRTPLLWDQTGERQVFGTDILREAEEKVKIIQERLRIAQSRHKSYADNRRSDLSFEEGDHVYLRVTPLRGVHRFHTKGKLAPRFVGPYKIVSQRGEVAYQLELPQSLAGVHNVIHVSKLKKCLRVPIEEANLEQIEVQEDLTYVERPIRILEIDERRTRNPVIRFCKVQWSNHSEEESTWEREDELKSAHPHLFASSSESRGRDSV

SEQ ID NO: 25720 - protein, 341 aa, Oryza sativa; identical to SEQ ID NO: 20384
  Clone ID: TF_OsC359_5811.pep

SEQ ID NO: 25721 - protein, 471 aa, Oryza sativa
  unsure (1)..(471): unsure at all Xaa locations
  Clone ID: TF_OsC359_7032.pep
MSWHRAGVLLLXGSVLPTCPGGSGRRXGVGSVLLSMARMGWKLCHVFRLYTVVMYNREKGKNVSGYASSNLSFQLNPPLASRELTRAHPWSIPSMLLSSQLPLVGSQDQNQYVFDRAFATQVNELPMPEEQVPFCHDCREQGHYALNCPWVYVKEAPSLGLAGQTSLNQPPHTKSSLQPSVQSRELNGENPLNPGKCFPPSLSYHVGSHTKQAKGKKSKNQKRKAPMRTEEEVRKMTITSTEWPPAGITIPRRQRGNTFRGARQLTQHLLSHGGRVSDSEGSDQVSSDDEDESPRHLGEEEMESKACTRCGEIGHVASMCLTLCTHCEEDHPPGECPTRKVTCFLCEGTNHVPKDCQLSVLLTKTAEIQRTTLRLSHQLVSSNSNIDDIIPSTNAPPAAPDSAMNHSNNTFSTNHSLHRQPQQRIVVDGRSCVSPRPTPGRAKGNQPQEGDTKQKTVIRFNQQSEGSFSCE

SEQ ID NO: 25722 - protein, 505 aa, Oryza sativa
  Clone ID: TF_OsC359_8226.pep
MEMEDVGGRWTSVPGVPAVGGIGSVLLSMARMGWKLCHVFRPYTVVLKCGMVGLGWLGTSWDPGSGCQFGLNHRRPWVKAGLPFSSFFKFQLVLDGQMFNREKGKNVSGYASSNSSFQLNPPLASRELTRAHPWSIPSMLLGSQLPLVGSQDQNQYVFDRAFATQVDELPMPEEDVPFCHDCREQGHYALNCPWVYAKEAPSFGLAGQASLNQPPRTKSSLQPSVPSREPNGENPLNPENCFPPSLSYHVGSRTKQAKGKKSKNQKRKAPMRTEEEVRKMTITSTEWPPAGITIPRHQRGNTFRGARQLTQHLLSHGGRVSDSEGSDQVSSDDEDESPRHLGEEEMESKACTRCGEIGHVASMCLTLCPHCEEDHPPGECPTRKVTCFLCEGTNHVPKDCQLSVLLTKTAEIQRTTLRLSHQLVSSNSNIDNIIHNTNAPPAPPDSAINHSNNTFSTNHSLHRQPQQRIVVDGRSCVSPRPTPGRAKGNQSQEGDTKQKTVLCFK

SEQ ID NO: 25723 - protein, 1542 aa, Oryza sativa
  Clone ID: TF_OsC1713_5087.pep
MVTRLSRWAEAVDDFYEEALLEIDDQQRRMGELETKVTDLTAQQLQLEEEHQAWGSEIDSLKAQLQPGSSLETPIQVDSETEGTDTEPEIEPDITDPSEDATPVPRITFIGGPRTLSNARKSTRPPGKKPKPDLEATTSEPWGLRIIEKKLTLVRVREADKVIFAVNQLEGPAGDWWDTYKEAREDGAGEPTWEEFTAAFRENFVPTAVMRMKKNEFRRLRQGNTTVQEYLNKFTQLARYAIGDLADEEEKIDKFIEGLNDELRGPMIGQDHESFQSLINKVVRLENDQRTVEHNRKRRLAMSRPPQTMPQRLKGATPSGWKPPVMVTNRPAALSNFNRPVALQNRTPTPTLAAPGAKKNVDCFNCGKYGHYANNCPHPRKTPVRTGANAMTVRGTTTPAVGRGLFKTPQPNRTTTGFGRGQVNHVRAEEAQEDQGVLMGMFSLNSTPIKVLFDSGALHSFISLKASQQHNLTRVKLRQPMLVHSPGGEIAVDTACIDVPIRLRDVVFPSNLMVLIPQTLDVILGMDWLAKHRGVIDCRRREVTLTTPWGSDMRATMDQDPRLTERAGGIFTMLPLKGMPVVQRFPDVFPEDLPGMPPDRDIEFIIDLIPGTAPISKRPYRMPVNELEELKKQIRELQEKGFVRPSSSPWGAPVLFVKKKDGSMRMCVDYRSLNEVTIKNKYPLPRIDDLFDQLKGAKVFSKIDLRSGYHQLKIRTEDIPKTAFSTRYGLYEFTVMSFGLTNAPAYFMNLMNKVFMDYLDKFVVVFIDDILIYSKDEEEHAEHLRLVLQKLRKHKLYAKFSKCEFWLKEVAFLGHVISAGGVAVDPAKVEAVTEWKAPKSVTEIRSFLGLAGYYRRFIEGFSKIARPMTQLLKKEKKFAWSEQCQGSFEQLKEKLTSAPILVLPDIRKDFVVYCDASRQGLGGVLMQEGKVVAYASRQLRPHEENYPTHDLELAAVVHALKIWRHYLIGNHCDIYTDHKSLKYIFTQSDLNLRQRRWLELIKDYDLEVHYHPGKANVVADALSRKSHCNHLRTEGMVPELREEMAQLNLHIVPHGQINTLDIQPLLRTQIEEAQKDNEEVREVKERLAAGRAKEFSTDEKDVLWYKKRIYVPEQGGLRGLILKEAHESAYSLHPGSTKMYQDLKEGYWWPNMKRDVAEYVALCDVCQKVKAEHQRPAGLLQPLRIPEWKWDEIGMDFIVGLPKTATGYDSIWVIVDRLTKTARFIPVKTNYSSAKLAELYMTRIVCLHGIPKKIISDRGTQFTSHFWEKVHEALGSYLAFSTAYHPQTDGQTERTNQVLEDMLRACALDFSKDWERCLPYAEFSYNNSFQASLKMSPNEALFGRRCRTPLMWSETGERAVFGPDIIQEAEEKVRLIRDRLKVAQSRQKSYADTRRRNLEFKEGDYVYLKVSPMRGTKRFKVKGKLAPRYVGPFQIIARRGEVAYQLQLPEYIADVHPVFHVSQLKKCLRVPEEQAPLEEIHISNDLTYPEHPIRILDEAEKRTRSKVWRMYKVQWSNHTEDEATWEGEEFLRTEYPHLFGNW

SEQ ID NO: 25724 - protein, 1279 aa, Oryza sativa
  unsure (1)..(1279): unsure at all Xaa locations
  Clone ID: TF_OsC1528_1929.pep
MAGFTDALRLDKFTGVHFKRWQIRVTLWLTAMKCFWVSTGKPIGVLNADQQKEIDEATTLFVGCILSVLSDRLVEVYMHMTDAKELWDALNTKFGATDASNDLYIMEQFHDYKMADNRSVVEXAHEIQTMAKELELLKCVLSNKFVAGCIIAILPPSWRGFGTALKHKRQEYSVEGLIASLDVEEKAREKDTASKGDGGQSTTNVVHKAQNKSKGKHKTQQTTNFKKKKNNNNPNQDEKTCFVCGQPSHLARKCPQRKGMKAPAGQTSKSANVTIGNTRDGSGXNLPTVFSVNQSTNWWVDTGANVHVCADISLFSSYQAARGSTVLMGNGSHASVHGVGTVDLKFTLGKIVQLKNVQHVPSIDRNLVSGSRLTRDGFKLVXFESNKVVVSKHGYFIGKGYECGGLFRFSLSDFCNKSVNYICGSVDDEANVWHSRLCHINFGLMSRLSSMCLIPKFSIVKGSKCHSCMQTKQSRKPHKAAEERNLAPLELLHSDLCEMNGVLTKGGKRYFMTLIDDATRFCYVYLLKTKDEALDYFKIYKAEVENQLDRKIKRLRSDRGGEFFSNEFDLFCEEHGIIHERMPPYSPESNGIAERKNRTLTDLVNALLNSNHVLNRVPNRNKDKTPYEIWIGRKPSLSYLRTWGCLAKVNVPITKKRKLGPKTVDCIFLGYAHHSIAYRFLIFKSEVPDMHVGTIMESRDATFFESFFPMKDTHSSSSQPSEIIPSSITPPEQTEHTHEHVIEEDVSEAPRRSKRQRTAKSFGDDFTVYLVDDTLKSISEAYASPDADYWKEAFRSEMDSIIANGTWEVIEXPYGCKPVGCKWVFKKKLRPDGTIEKYKAWLVAKGYTQKEGEYFFDTYSPVARLTTICVLLSLAASHGLFVHQMNVKTAFLNGELDEEIYMDQPDRFVVEGQEGKVCKLLKSLYGLKQAPKQWHEKFDKTLTSPGFAVNEADKCVYYRHGGGEGVILCLFVDDILIFGTNLEVINEVKSFLSQNFDIKDLGVADVILNIKLIRGENGITLLQSHYVEKILNRSGYIDSKPSPTPGXNKRIARNQLEYSEIIGSLMYLASATRPDISFAVSKLSRFTSNPGDDHWRVLERVMRYLKGTMELGLHYSGYPAVLEGYSDYNWISDVDEIKATSGYVFTLGGGAVSWRSCKQTILMRSTMEAELTALDTATVEAEWLRDLLMDLPIVEKPVPAILMNCDNQTVIVKVNSSKNNMKSSRHVKRRLKSVRKLRNSGVITLDYIQTARNLADPFTKGLSRNVIDNASKEMGLRPM

SEQ ID NO: 25725 - protein, 415 aa, Oryza sativa; identical to SEQ ID NO: 20504
  Clone ID: TF_OsC1713_4811.pep

SEQ ID NO: 25726 - protein, 979 aa, Oryza sativa; identical to SEQ ID NO: 20512
  Clone ID: TF_OsC1713_3954.pep

SEQ ID NO: 25727 - protein, 822 aa, Oryza sativa; identical to SEQ ID NO: 20523
  Clone ID: TF_OsC91_2446.pep

SEQ ID NO: 25728 - protein, 1643 aa, Oryza sativa
  Clone ID: TF_OsC1713_5219.pep
MASRRRASISNEETQTPDLTTLAGVMATQTQLLQAIANNQGNRGRSSFGEFMRTKPPTFTTADEPMEAEDWLRIIEKKLTLVRVREADKVIFAVNQLEGPAGDRWDTYKEAREEDAGEPTWEEFTAAFQENFVPAAVMRMKKNEFRRMRQGNTTVQEYLNRFTQLARYAIGDLADEEEKIDKFIEGLNDELRGPMIGQDHESFQSLINKVVRLENDQRTVEHNHKRRLAMNRPPQGVPQRLKGATSSGWKPPIVAPNRPAAPSNFNRPVVIQNRTPTPTLAAPGAKKNVDCFNCGEYGHYANNCPHPRKTPVRTGANAMTVRGTTTPAAGRGLFKTPQTNRTATGFGRGQVNHVRAEEAQEDQGVLMGMFSINSTPVKVLFDSGASHSFISRKASQKHNLTLVGLRKPMIVHSPGGEITVSHACIDVPIRLRDVVFPSNLLVLIPQTLDVILGMDWLTKNRGVIDCRRRKVTLTTPWRSDMRATMDQDPRLIERAGGIFTMLPLKGMPIVQRFPDVFPEDLPGMPPDRDIEFIIDLIPGTAPISKRPYRMPVNELEELKKQIRELQEKGFNKYPLPRIDDLFDQLKGAKVFSKIDLRSGYHQLKIRTGDVPKTAFSTRYGLYEFTVMSFGLTNTPAYFMNLMNKVFMDYLDKFVVVFIDDILIYSKDEEEHVEHLRLVLEKLRKHKLYAKFSKCEFWLKEVAFLGHVISAGGVVVDPAKVEAVTEWKAPKSVTEIRSFLGLAGYYRRFIEGFSKITRPMTQLLKKEKKFVWSEQCQESFEQLKEKLTSAPILDWGGVLMQEGKDVAYASRQLRPHEENYPTHDLELAVVVHELKIWRHYLIGNHCDIYTDYKSLKYIFTQSDLNLRQRRWLELIKDYDLEVHYHPGKANIVADALSRKSHCNHLRMEGITPELKEEIAQLNLHLVPYGQINTLDIQPLLRTQIEEAQKDNGEIQEVKERIAAGCAKEFSIDEKETLWYKKRIYVPEQGGLRGLILREAHESAYSLHPGSTKMYQDLKEGYWWPNMKRDVAEYVALCDVCQRVKAEHQRPAGLLQPLRIPECKWDEIGMDFIVGLHKTATGYDSIWVIVDRLTKTARFIPVKTNYSGAKLAELYMTRIVCLHGVPKRIISDRGTQFTSHFWEKVHEALGSYLAFSTAYHPQTDGQTERTNQVLEDMLRACALDFSKDWEKCLPYAEFSYNNSFQASLKMSPNEALFGRRCRTPLMWSETGERTVFGPDIIQEAEEKVRLIRDRLKVAQSRQKSYADTRRRDLEFKEGDYVYLKVSPMRGTKMFKVKGKLAPRYVGPFQIIARRGEVAYQLQLPENIADVHPVFHVSQLKKCLRVPEEQAPLEEIHISNDLTYPEHPVRILDEVEKRTRAKVWHMYKVQLSNHTEDKATWESEEFLKTEYPHLFEDRPNPPPTLPRAWPPRAPRCRSIASSPAPPSRRRPSPRVIAVAVAVALSRAPCRRCRAVAVGRPIAARPSRRRLAPRAPRAARPSRRRLAPRTLPRRSPVIVASPSPSRRAPRRAARPSPSPPATPRTACRVAMRPSAPPPRPYKTRPLPFSTPHPSFPFSPFSSFSMGRRRCAPRRRLHAPRRRLEATAPRQVWYRALPPWAAAAEAGDEASEDPYAYYQEGDADDGAQ

SEQ ID NO: 25729 - protein, 1817 aa, Oryza sativa
  Clone ID: TF_OsC1713_5309.pep
MTSAMTSAPAAARERKLAGERRLDDANGGHQRVEGDAANSPMADSDSPATWELSLPQSEGYVIELHRMLRRLRYPGFPSYRVRQCGSVWEARVEIHPRVPSELDYSFQTRHHRDLPETAMQDAAREAFLRLSSIHRAELASTEFAHHPFREEGNSVCTVQDTPCCYNPMVTRLSRWAEAVDDYYEEALLEIDDHQRRVGELETEVTDLTAQQLQLEEEHQAWGSEIDSLKAQLQVHGDQFQQLSDQYNDRRGMMDTLEEQLRESQEHVSQLEEQLRAAKISTTGASTSTAVGRDRYFFLTPPYPPAFHALLGEASMLATESAPYLVDPTATQPPVPELVHTPLIPTPSPQLGSNLETPIQVDSETEGTDTEPEIEPDITDPSEDEAPVPCITFLGGPRTLSTARKSTRPPGKRPKPDPEATTSEPWGLRLFMMASRRRATTSNDETQTPDLNALAGIMATQTQLLQAIASNQGNRGGSSFGEFMRTKPPTFATADEPMEAEDWLRIIEKKLTLVRVREADKVIFAVNQLEGPAGDWWDTYKGAREDGAGEPTWEEFTAAFRENFVPAAVMRMKKNEFRRLRQGNTTVQEYLNKFTQLARYAIGDLADEEEKIDKFIEGLNDELRGPMIGQDHESFQSLINKVVRLENDQRTVEHNRKRRLAMSRPPQTVPQRLKEATPSGWKPPVMVTNRPAALSNFNRPVALQNRTPTPTLAAPGAKKNVDCFNCGEYGHYANNCPHPRKTPVRTGANAMTVRSTTTPAVGRGLFKTPQSNRTTTGFGRGQVNHVRAEEAQEDQGVLMGMFSINSTPVKVLFDSGASHSFISLKASQKHNLTLVGLRKPMIVHSPGGEITVSHACIDVPIRLRDVVFPSNLMVLIPQTLDVILGMDWLAKHRGVIDCRRREVTLTTPWGSDMRATMDQDPRLTERAGGIFTMLPLKGMPVVQRFPDVFPEDLPGMPPDRDIEFIIDLIPGTAPISKRPYRMPVNELEELKKQIKELQEKGFVRPSSSPWGAPVLFVKKKDGSMRMCVDYRSLNEVTIKNKYPLPRIDDLFDQLKGAKVFSKIDLRSGYHQLKIRTEDIPKTAFSTRYGLYEFTVMSFGLTNAPAYFMNLMNKVFMDYLDKFVVVFIDDILIYSKDEEEHAEHLRLVFQKLRKHKLYAKFSKCEFWLKEVAFLGHVISAGGVAVDPAKVEAVTEWKAPKSVTEIRSFLGLAGYYRRFIEGFSKIARPMTQLLKKEKKFVWSEQCQESFEQLKEKLTSAPILVLPDIRKDFVIYCDASRQGLGGVLMQDGKVVAYASRQLRPHEENYPTHDLELAAVVHALKIWRHYLIGNHCDIYTDHKSLKYIFTQSDLNLRQRRWLELIKDYDLEVHYHPGKANVVADALSRKSHCNHLRMEGMVPKLREEIAQLNLHIVPRGQINTLDIQPLLRTQIEEVQKDNKEVREKVKAEHQRPAGLLQPLRIPEWKWDEIGMDFIVGLPKTATGYDSIWVIVDRLTKTARFIPVKTNYSSAKLAELYMTRIVCLHGIPKRIISDRGTQFTSHFWEKVHEALGSYLAFSTAYHPQTDGQTERTNQILEDMLRACALDFSKDWERCLPYAEFSYNNSFQASLKMSPNEALFGRRCRTPLMWSETGERAVFGPDIIQEAEEKVRLIRDRLKVAQSRQKNYADTRRRDLEFKEGDYVYLKVSPMRGTKRFKVKGKLAPRYVGPFQIIARRGEVAYQLQLPENIADVHPVFHVSQLKKCLRVPEEQAPLEEIHISNDLTYPEHPIRILDEAEKRTRSKVWRMYKVQWSNHTEDEATWESEEFLRTEYPHLFENR

SEQ ID NO: 25730 - protein, 1621 aa, Oryza sativa
  Clone ID: TF_OsC1713_5419.pep
MMRCLRYSRFPTYRVRQCGFGWEAQADMRPRVPSEADYSFSTRHHHDSPETAMQDAAREAFLRLSSIHRAELASTEFAHHPFREESNSVCTAQDTPCCYNPIVTRLSRWAEAVDDFYEEALLEINDQQRRVGELETEVTDLTVQQLQLEEEHQAWGTRFEFGDSDPGRLRDRGDRHRAEIEPDITDPSEDETPVPRITFLGRPHTLSTARKSTRPPGKKPKPDPEATTSEPWGLSSHQNNSLNGIKPQELVRKLGYLLNRPTQMASRRRASTNNEETQTPDLTTLAGVMATQTQLLQAIANDQGNRGGSSFGEFMRTKPPTFAMADKPMEAEDWLRIIEKKLTLVRVREADKVIFVVNQLEGPAGDWWDTYKEAREEDAGEPTWEEFTAAFHENFVPAAVMRMKKNEFRRLQQGNTTVQEYLNRFTQLARYAIGDLANEEEKIDKFIEGLNDELRGPMIGQDHESFRSLINKVVRLENDQRTVGHNRKRRLAMNCPPQGVPQRHKGATSSGWKPPIVATNRPAAPRNFNRPVAIQNRTPTPTLAAPGAKKNVDCFNCGEYGHYANNCPHPRKTPVHTGANAMTVSGTTAPAAGRGLFKTPQTNRTATRFGRGQASQKHNLTLVGLRKPMIVHSPGGEITGCGVSLQPYGFDTPDRGCHIGYGLVNKEQREDLPGMPPDRDIEFIIDLIPGTAPISKRPYRMPVNELEELKKQIRELQEKGFVRPSSSPWGAPVLFVKKKDGSMRMCVDYRSLNEVTIKNKYPLPWIDDLFDQLKGAKVFSKIDLRSGYHQLKIRTGDIPKTAFSTRYGLYEFTVMSFGLTNAPAYFMNLMNKVFMDYLDKFVVVFIDDILIYSKDEDEHAEHLRLVLEKLRKHKLYAKFSKCEFWLKEVAFLGHVISAGGVAMDPAKVEAVTEWKAPKFVTEIRSFIGLAGYYRRFIEGFSKIARPMTQLLKKEKKFVWLEQCQESFEQLKEKLTSSPILVLPDIWKDFVIYCDASRQGLGGVLMQDGKVVAYASRQLRPHEENYPTHDLELAAVVHALNIWRHYLIGNHCDIYTDHKSLKYIFTQSDLNLRQRRWLELIKDYDLEVHYHPGKANVVADALSRKSHCNHLRTEGMAPELKEEIAQLNLHMVPHGQINNLDIQPLLRTQIEEAQKDNEEIREVKERLVAGFAKEFSTDEKDVLWYKKRIYVPEQGGLRGLILKEAHKSAYSLHPGSTKMYQDLKEGYWWPNMKRDVAEYVALCDVCQKVKAEHQRPAGLLQPLRIPEWKWDEIGMDFIVGLPKTATGYDSIWVIVDRLTKTARFIPVKTNYNSAKLTELYMTRIVCLHGVPKRIISDRGTQFTSYFWEKVHEALGSYLAFSTAYHPQTDGQTERTNQVLEDMLRVCAMDFSKDWERCLPYAEFSYNNSFQASLKMSPNEALFGRRCRTPLMWTETGERAIFGLDIIKEAEEKVRLIRDHLKVAQSRQKSYADTRRRNLELKEGDYVYLKVSPMRGTKRFKVKGKLAPRYVRPFQITARRGEVAYQLQLPENIADVHPVFHVSQLKKCLRVPEEQATLEEIHISNDLTYPEHLVRILDEAKKKTRTKVWRMYKVQWSNHTEDEATWESEEFLKTEYPHLFENL

SEQ ID NO: 25731 - protein, 1716 aa, Oryza sativa
  unsure (1)..(1716): unsure at all Xaa locations
  Clone ID: TF_OsC359_6331.pep
VTSWYQSHLDLRISQMMPPHSPRNLIKVLGFVRELRLMAFEVGYEVAPEYRRISHDPDEEKCRVRVTLASDREDLPSIKFEAGGRSYSQACQEAALVAIGELRQRFEEELDSSAFQYHPHKPHGQDYGTYTCPDGEESATLMHAVHMLSAMDAVSVERDKAAHDRENWNRGKICKLESKVYRLQKELAELKGETPPPTPKLHLIARKRTCPPPRLQLASKIRVMGEAVPDRAEPVIDIISDEEEEEDPEEREPATPEEEDPSLRSDARRTTNPVEAGDWLHAVEKKLDLIQCTEQEKVSFASHQLHGPAAEWWDHFRQGRAEGEPITWQEFTAAFKKTHIPAGVVALKKREFRALNQGSRSVTEYLHDFNRLARYAPEDVRSDEERQEKFLEGLNDELSYALMSTDFRDFQQLVDKAIRQEDKYNRMEQKKRRAAQFKAQQGSNQRPRLVTGPQAPSYPQGGSSSVVRSQRQFYNNNTGNRGNDNRNMVVRPAATPVQNQPVRKEQGSKPGVCFNCGDPGHYADKCPKPRRVKNVPAPNNSNAPAPKARVNHVAAVEAQNAPDVVLGTFPVNSIPATVLFDSGATHSFLSKSFASNHGMEVISLGRPLLVNTPGNQVFSTQYCPSVIIGIEEVLFPSSLILLESKDLDVILGMDWLSRHRGVIDCANRKVTLTSSNGETVSFFVSSPKSHGVILNQVALQEIPIVQDYPDVFPEDLPGMPPKRDIEFRIDLVPGTNPIHKRPYRMAANELAEVKRQVDDLLQKGYIRPSTSPWGAPVIFVEKKDHTQRMCVDYRALNEVTIKNKYPLPRIDDLFDQLEGATVFSKIDLRSGYHQLRIHEEDIPKTAFTTRYDLFECTVMSFGLTNAPAFFMNLMNKVFMEYLDKFVVVFIDDILIYSKTKEEHEEHLRLALEKLREHQVYAKFSKCEFWLSEVKFLGHVISSGGVAVDPSNVESVLSWKQPKTVSEIRSFLGLAGYYRRFIENFSKIARPMTRLLQKEVKYKWTEGCEQSFQELKKRLVTAPVLVLPDSRKGFQVYCDASRHGLGCVLMQEGKVVAYASRQLRPHENNYPTHDLELAAVVHALKIWRHYLFGNRTEIYTDHKSLKYIFTQPDLNMRQRRWLELIKDYDMEIHYHPGKANVVADALSRKSYCNMSEGRRLPWELCQEFEKMNLGIVSKGFVATLEAQPTLFDQVREAQVNDPDIQEXKEHQKPAGLLQPLKIPEWKWEEIGMDFITGLPRTSAETTYTGNKLAELYMARVVCLHGVPKKIVSDRGSQFTSKFWQKLQSELGTRLNFSTAYHPQTDGQTERVNQILEDMLRACVLDFGGSWDKNLPYAEFSYNHSYQASLQMSPNEALYGRKCRTPLLWDQTGERQVFGTDILREAEEKVKIIQERLRVAQSRQKSYADNRRRDLVFEEGDYVYLRVTPLRGVHRFQTKGKLAPRFVGPFKIVSRRGEVAYQLELPPSMAGIHDVFHVSQLKKCLRVPTEEADPDRIELQEDLTYVEKPVRILERRRDALQVRRRRRPSSATPPRMPRHSPRNLIEVLGFVRELRLMAFEVGYEVAPEYRQISHDPDEEKCRVRVTLASDSEDLPSFKFEAGGRSYCHACQEAALVAIGELRQHFEEELDSSAFQYHPHKPHGQDYGTYTCPDGEESATLMHAVHMLSAMDAVSVERDKAAHDRENWNRGKICKLKSKVYRLQKELAELKGETPPPTS

SEQ ID NO: 25732 - protein, 1244 aa, Oryza sativa; identical to SEQ ID NO: 20566
  Clone ID: TF_OsC359_6443.pep

SEQ ID NO: 25733 - protein, 1236 aa, Oryza sativa
  unsure (1)..(1236): unsure at all Xaa locations
  Clone ID: TF_OsC359_6551.pep
VTSWYQSHLDLRISQMMPPHSPRNLIEVLGFVRELRLMAFEVGYEVAPEYRQISHDPDEEKCRVRVTLASDREDLLSIKFEAGGRSYSHACQEVALVAIGELRQRFEEELDSSAFQYHPHKPHGQDYGTYICPDGEESATLMHAVHMLSAMDAVSVERDKAAHDRENWNRGKICKLESKVYRLQNELAELKGETPPPTPKLRVTLRKRTCPPPRLQLASKIRVMGEAVPDRAEPVIDIISDEEEEEDPEEREPATPEEEDPSLRSDARRTTNPVEAGDWLHAVEKKLDLIQCTEQEKVSFASHQLHGPAAEWWDHFRQGRAEGEPITWQEFTAAFKKTHIPAGVVALKKREFRALNQRSRSVTEYLHDFNRLARYAPEDVRTDEERQEKFLEGLNDELSYALMSTDFRDFQQLVDKAIRQEDKYNRMEQKKRRAAQFKAQQGSNQRPRLVTGPQAPSYPQVGSSSVVRPQRQFYNNNTGNRGNDNRNMVARPAATSAQNQPVRKEQGSKPVICFNCGDPGHYADKCPKPRRVKNAPAPNNSNVPVPKARVNHVAAVEAQNAPDVVLGTFPVNSIPATVLFDSGATHSFLSKSFASNHGMEVISLGRPLLVNTPGNQVFSTQYCPSVTIEIEEVPFPSSLILLESKDLDVILGMDWLSRHRGVIDCANRKVTLTSSNGETVSFFASSPKSHGVTLNQVVLQEIPIVQDYPDVFPEDLPGMPPKRDIEFRIDLVPGTNPIHKRPYRMAANELADVKRQVDDLLQKGYIRPSTSPWGAPVIFVEKKDHTXRMCVDYRALNEVTIKNKDPLPRIDDLFDQLKGATVFSKIDLRSGYHQLRIREEDIPKTAFTTRYGLFECTVMSFGLTNAPAFFMNLMNKVFMEYLDKFVVVFIDDILIYSKTKEEHEEHLRLALEKLREHQLYAKFSKCEFWLSEVKFLCHVISSGGVAVDPSNVESVLSWKQPKTVSEFRSFLGLAGYYRSFIENFSKIARPMTRLLQKEVKYKWTDDCEQSFXELKKRLVTAPVLILPDSRKGFQVYCDASRLGLGCVLMQEGKVVAYASRQLRPHENNYPTHDLELAAVVHALKIWRHYLFGNRTEMYTDHKSLKYIFTQPDLNMRQRRWLELIKDYDMEIHYHPGKANVVADALSRKSYCNMSEGRRLPWELCQEFENLNLGIVNKGFVAALQAKPTLFDQVRXTPGNSLVISELKESNREEIELGFFRDKTKRVRFGSKPPRFV

SEQ ID NO: 25734 - protein, 1633 aa, Oryza sativa
  unsure (1)..(1633): unsure at all Xaa locations
  Clone ID: TF_OsC359_7191.pep
MTSWYQSHLDLRISQMMPPHSLRNLIKVLGFVRELRLMAFEVGYEVAPEYRQISHDPDEEKCRVRVTLASDSEDLPSFKFEAGGRSYCHACQEAALVAIGELREHFEEELDSSAFQYHPHKPHGQDYGIYTCPDGEESATLMHAVHMLSAMDAVSVERDKAAHDRENWNRGKICKLESKVYRLQKELAELKGETPPPTPKLRLTPRKRICPPPRLQLASKIHVMGEAVPDRAEPVIDIISDEEEEEDPEEREPATPEEEDSSLRSDARRTTNPVEAGDWLHAVEKNLDLIQCTEQEKVSFASHQLHRPAAEWWDHFRQGRAEGEPITWQEFMAAFKKTHIPTGVVALKKREFRALNQGSRSVTEYLHDFNRLARYAPEDVRTDEERQEKFLEGLNDELSYALMSTDFRDFQQLVDKAIRQEDKYNRMEQKKHRAAQFKAQQGSNQRPRLVTGPQAPPYPQGGSSSVVCPQRQFYNNNTGNRGNDNRNTVARPAATPAQNQPVRKEQGSKPVICFNCGDPGHYADKCPKPRRVKNAPTPNNSNVPAPKARVNHVAAAEAQNAPDVVLGTFPVNSIPATVLFDSGATHSFLSKSFASNHGMEVISLGRPLLVNTPGNQVFSTQYCPSATIEIEEVPFPSSLILLESKDLDVILGMDWLSRHRGVIDCANRKVTLTSSNGETVSFFVSSPKYHGVILNQVALQEIPIVQDYPDVFPEDLPGMPPKRDIEFRIDLVPGTNPIHKRPYRMAANELAEVKRQVDDLLQKGYIRPSTSPWGAPVIFVEKKDHTQRMCVDYRALNEVTIKNKYPLPRIDDLFDQLEGATVFSKIDLRSGYHQLRIREEDIPKTAFTTRYGLFECTVMSFGLTNAPAFFMNLMNKVFMEYLDKFVVVFIDDILIYSKTKEEHEEHLRLALEKLREHXLYAKFSKCEFWLSEVKFLGHVISCGGVAVDPSNVESVLSWKQPKTVSEIRSFLGLAGYYCRFIENFSKIARPMTRLLQKEVKYKWTEDCERSFQELKKRLVTAPVLILPDSRKGFQVYCDASRLGLGCVLMQEGKVVAYASRQLRPHENNYPTHDLELAAVVHALKIWRHYLFGNRTEMYTDHKSLKYIFTQPDLNMRQRRWLELIKDYDMEIHYHPGKANVVADALSRKSYCNMSEGRHLPWELCQEFERLNLGIVSKGFVAALEAQPTLFDQVREAQVNDPDIQEIKKNMRRGKAIGFVEDEQGTVWLGERICVPENKELKDTIMKEAHETLYSIHPRSTKMYQDLKQQFWWASMRREIAEYVALCDVCQRVKAEHQKPAGLLQPLKIPEWKWEEIGMDFITGLPRTSAGHDSIWVVVDRLTKVAHFIPVKTTYTGNKLAELYMARVVCLHGVPKKIVSDRGSQFTSKFWQKLQLELGTRLNFSTAYHPQTDGQTERVNQILEDMLRACVLDFGGSWDKNLPYAEFSYNNSYQASLQMAPYEALYGRKCRTPLLWDQTGERQVFGTDILRQAEEKVKIIQXRLHVAQSRQKSYADNRRRDLAFEEGDYVYLRVTPLRGVHRFQTKGKLAPRFVGPFKIVSRRGEVAYQLELSPSMAGIHDVFHVSQLKKCLCVPTEEADPDRIELQEDLTYVEKPVRILEFPTFRRRAFPLRK

SEQ ID NO: 25735 - protein, 763 aa, Oryza sativa
  unsure (1)..(763): unsure at all Xaa locations
  Clone ID: TF_OsC359_7547.pep
KVGCEHMVLMVVLMTIKDRFASYCCETFIVPTTSQRGQRLYLLYSVIHYSAPDXEVARSPWGSLGSPCLVLKGVIMIQERSTVMGYVVRGVLSRLLSEMPPHSPRNLIEVLGFVRELRLMAFEVGYEVAPEYRQISHDPDEEKCRVRVTLASDREDLPSIKFEAGGRSYCHACQEAALVAIGELRQRFEEELDSSAFQYHPHKPHGQDYGTYICPDGEESATLMHVVHMLSAMDAVSVERDKAAHDRENWNRGKICKLESKVYRLQKELAELKGETPPPTPKLRLVARKRTCPPPRLQLASKIRVMGEAVPDRAEPVIDIISDEEEEEDPEEREPATPEEEDPSLRSDARRRAEGELITWQEFTTAFKKTHIPSGVVALKKREFRALNQGSRSVTEYLHDVNRLARYAPEDVRTDEERQEKFLEGLNDELSYALMSTDFRDFQQLVDKAIRQEDKYNRMEQKKRRAAQFKAQQGSNQRPRLVTGPQAPSYPQGGSSSVVRPQRQFYNNNTGNRGNDNRNMVARPAATPAQNQPVRKEQGSKPVICFNCGDPGHYADKCPKPRHVKNAPAPNNSNVLAPKARVNHVAAAEAQNAPDVVLGTFPVNSIPXTVLFDSGATHSFLSKSFASKHGMEVVSLGRPLLVNTPGNQVFSTXYCPSVTIEIEEVLFPSSLILLESKDLDVILGMDWLSRHRGVIDCANRKVTLTSSNWETVSFFVSSPKYHGVNLNQVALQEIPIVQDYPDVFPEDLPGMPPKRDIEFRIDL

SEQ ID NO: 25736 - protein, 1711 aa, Oryza sativa
  Clone ID: TF_OsC359_7557.pep
MMPPHSPRNLIKVLGFVRELRLMAFEVGYEVAPEYRQISHDPDEEKCRVRVTLASDSDDLPSFKFEAGGRSYSHACQEAALVAIGELRQRFEEELDSSAFQYHPHKPHGQDYGTYTCPDGEESATLMHAVHMLSAMDAVSVERDKAAHDRENWNRGKICKLESKVYRLQKELAELKGETPPPTPKHRLTQRKRTCPPPRLQLASKIRVMGEAVPDRAEPVIDIISDEEEEEDPEEREPATPEEEDPSLRSDTRRMVNTRTGSGSGSGSGATNNGGDPTLAQILAQQTQLINLLVQQAQNQQANNQNQNPPPPPQNKLADFLRVRPPTFSSTTNPVEAGDWLHAVEKKLDLIQCTEQEKVSFASHQLHGPAAEWWDHFRQGRAEGEPITWQEFTAAFRKTHIPSGVVALKKREFRALNQGSRSVTEYLHDFNRLARYAPEDVRTDEERQEKFLEGLNDELSYALMSTDFRDFQQLVDKAIRQEDKYNRMEQKKRRAAQFKAQQGSNQRPRLVTGPQVPSYPQGGSSSVVRPQRQFYNNNTSNRGNDNRNVVARPAATSAQNQPVRKEQGSKPVICFNCGDPGHYADKCPKPRRVKNAPAPNNSNVPAPKARVNHVAAAEAQNAPDVVLGTFPVNSIPATVLFDSGATHSFLSKSFTSNHGMEVISLERPLLVNTPGNQVFSTQYCPSATIEIEEVPFPSSLILLESKDLDVILGMDWLSCHRGVIDCANRKVTLTSSNGETVSFFMSSPKSHGVILNQVALQEIPIVQDYPDVFPEDLPGMPPKREIEFRIDLVPGTNPIHKRPYRMAANELVEVKRQVEDLLQKGYIRPSTSPWGAPVIFVEKKDHTQRMCVDYRALNEVTIKNKYPLPRIDDLFDQLEGATVFSKIDLRSGYHQLRIREEDIPKTAFTTRYGLFECTVMSFGLTNAPAFFMNLMNKVFMEYLDKLVVVFIDDILIYSKTKEEHEEHLRLALEKLREHQLYAKFSKCEFWLSEVKFLGHVISSGGVAVDPSNVESVLSWKQPKTVSEIRSFLGLAGYYRRFIENFSKIARPMTRLLQKEVKYKWTEDCEQSFQELKKRLATALVLILPDSRKGFQVYCDASRLGLGCVLMQEGKVVAYASRQLRPHENNYPTHDLELAAVVHALKIWRHYLFGNRTEVYTDHKSLKYIFTQPDLNMRQRRWLELIKDYDMEIYYHPGKANVVADALSRKSYCNMSEGRRLPWELCQEFEKLNLGIVSNGFVAALEAKPTLFDQVREAQVNDPDIQEIKKNMRRGKAIGYVEDEQGTVWLGERICVPENKELKDTIMKEAHETLYSIHPGSTKMYQDLKQQFWWASMRREIAEYVALCDVCQRVKAEHQKPAGLLQPLKIPEWKWEEIGMDFITGLPRTSAGHDSIWVVVDRLTKVAHFIPVKTTYTGNKLAELYMARVKLQVEMGTRLNFSTAYHPQTDGQTERVNQILEDMLRACVLDFGGSWDKNLPYAEFSYNNSYQASMQMAPYEALYGRKCRTPLLWDQTGERQVFGTDILREAEEKVKIIQERLRVAQSRQKSYADNRRRDLAFEEGDYVYLRVTPLRGVHRFQTKEKLAPRFVGPFKIVSRRGEVAYQLELPPSMAGIHDVFHVSQLKKCLRVPTEEADPDRIELQEDLTYVEKPVRILEVSERNTRNRVIRFCKVQWSNHSEEEATWEREDELKSAHPHLFASSSESRGRDSV

SEQ ID NO: 25737 - protein, 1314 aa, Oryza sativa
  unsure (1)..(1314): unsure at all Xaa locations
  Clone ID: TF_OsC6326_15.pep
RVNLQAQGLWEAVDTGDVPFHEDRQALSAILRAVPAEMLRPLAEKDNAKDAWDALKSMRVGTDRVRESCAQKLRQAFESMQFKPDESVEDFSLHLQWVVSDLRLLGDDITEEKIMCKFLRVVPRRYRQMALSIETLIDLTTLSIEDLTGRLLTVDDHPDSDSEDAGQALFGKKEEQARANKGLGQSSSRGSGTGTGSSERRQRGRGGCGRDGAGGKHKPGANQGGGRDVSKDKCRYCGELGHWAKDCRKAKRDRDKLAHAHLLGDDEPTLLMAQVCELVPTTEPELINGEVNLNKERALVSLREEGEPVDPDWILDMAASNHMTGLDTTMRGTVKFGDXLRIEGRGTMLFACKNGDYCGLIGVYFIPKLRSNMVSLGQLNKVGCKTVIEDGALTLRDPRWRLLCRVRRGRERLYVLQVELAQLVSLAARSSEDAWLXHARFGHLNFDSLRTLYAHGLAHGLPKLERVRQVCDGCLISKQRRVPFPTAATFRATSRLDLVHGNICVPISPPTHGGKKYFLLLIDDMSRYMWLFLLTSKSEAPATIKRFKAGVEVETACKLRVLRTNRGGEFTSIEFGLYCANEGVARQLTAPYSPQQNGVIKRRNQTVVSMARCMMKAKHMPRKFWGEAVRTAVFILNRSPTKAVPNKTPYKAWHGRTPAVXHYFKTFGCVVHIKEVKPHLKKLEDRSKMMVFLGYEPGTKGYRVYDPDANRVVITRDAVFDEVTSWPWGEPVEHGEASTDDSFTVYYEVASSIVAASRPPSVEAMSPTPSAQLATPPDTPSVEFVSPPSSTPDVDDDQGAPRRYRSMANILDTTAPVELDSDELYLAAAEEPANLSEAEQDEHWRQAMLDEIKSIEENSPWILTELPAGQRPIGLKRVFKLNNNETGPVIRHEARLVAKGYVQRHGIDFDEVFAPVARMESVRLLLAVAAYLGWTVHHMDIKSAFLNRELEEEVYVSQPPGFIDDKHPSQVLHLNRALYGLRQARRTWNAXLDTRLHELGFKRSATEHAVYTRGEGSKRLIIGVDLGLLSYYLRIEVRQGSDDITINXSAYAQKLLKIGGLVDCNSTCVPMEPRLKLMKNSDRPAIDATLYRSLVGSLRYLVHTWPDFAFAVGSVSRFMESPRDDHLLVVKHILRYVAGTQNFGCCLARSGETGICLLGFSDSDLGGDIDDRKSTSGALFFLGSSPIAWQSQKQKVVALSSCEAEYIAATGAACLGIWLARLLAEVLGTEPEMAILKVDNKSVISLCKNPVFHDRSKHIDTRYHXIRQCIEEKKDDVEFIPTDEQVADILTKPLVCIKFQEFRNKAGVVQIVTW

SEQ ID NO: 25738 - protein, 1633 aa, Oryza sativa; identical to SEQ ID NO: 20597
  Clone ID: TF_OsC359_5740.pep

SEQ ID NO: 25739 - protein, 663 aa, Oryza sativa
  unsure (1)..(663): unsure at all Xaa locations
  Clone ID: TF_OsC359_5990.pep
PGLEWCIPGLEIELCSRDGCSERLGLCNRMPRYKPEYLFGTEGFVQELRTMSFLIGFGIAPLYAQIPHDRDEEKCGVKVTLNSNREDIPSVMFEAGGGSYIHACQEVARIAIGELRESYNDRLADTEYRYHPRQPQGSDCGSYFEPAGIENDATTRHLVEMLWAMDETRAEIVIAAQDREDRNRGKICKLEDKVDHLEKELAALKGEAPPQKARVRXTARKRALFVPRYQLAPKVRLVEKEATPADPPVVNXTNPVEAGDWLHAIEKKLDLLQCTDQEKVSFASHQLHGPASEWWDHFRLNRTTPEPISWLEFNAAFRKTHIPSGVVSLKKKEFRSLTQGSRTVTEYLHEFNRLARYAPEEVRTDEERQERFLKGLNDELSYPLMTGDYHDFQKLVDKAIRQEDKYNRMEQKKRRIAHFKAQQGNSQRPRLTLGPQSMPQGAPRPVASPTQQQPAKREQGSKPGVCFNCGDPGHYADKCPKPRRVKVVPAQNNPSAPAAKARVNHVAAAEAQGAPDVILGTFPVNSVPATVLFDSGAMHSFLSMSFAGNQGMEVKELRRPLMVSTPSNQALSSQRSPSVRIEIQGVPFLANLILLESKDLDVILGMDWLARYKGVIDCANRKVTLTSNDGRVVTVHALSSESIRSRLNQLTLEEIPIVREYPD

SEQ ID NO: 25740 - protein, 1519 aa, Oryza sativa
  unsure (1)..(1519): unsure at all Xaa locations
  Clone ID: TF_OsC359_6290.pep
MTPPHPPESLINAVGFVRELRMMAFEVGYDVAPEYRQIPYDPNEEKCRVRVTLTSDREDLLSIKFEAGGRKYSHACQEVALVAIGELRHRFDEELESSAFQYHPHKPHGQDYGVYHCPEDEDSTTLKHAVYMLSAMDAVGVEREKTADDRENWNRGRICKLESKVYRLQKELAELKGEAPPPAPKLRLTARKRTRPPPRIQLASKTRVVGDVVPDHAEPIIHVLSNDEEEEDPEEREPATPEEEDPSLRSDARRTTNPVEAAAGEPITWREFTATFKKTHIPSGVVALKKRDFRALNQGSCSVTEYLHDFNRLAHYVPDDVRTDEERQEKFLEGLNDELSYALMAIEYRNFQQLVDKAIRQEDKYNRMEQKKRRAAYFKAQXGNSQRPRIALGPQAAPYPXGGSSSVARPQRQFYNNNTGNHSNDNRNVVTRPVAAPTQNQPVRKEQGIKPGVCFNCGDPGHYADKCPKPRRVKNAPVQNNSNAPAPKARVNHVAAAEAXNAPDVVLGTFPVNSIPATVLFDFGATHSFLSKSFASNHGMEVISLGRPLLVNTPGNQVSSTQYCPSITTEIQEIPFPSTLILLESKDLDVILGVDWLTHHRGVIDCANRKVTLTSSNGXTVSFFVSSPRSHGLTLNQVALQEIPIVQDYPDVFPEDLPGMPPKRDIEFRINLVPGTNPIHKRPYRMAAIELAEVKRQVDDLLQKGYIRPSTSPWGAPVIFVEKKDHTQRMCVDYRALNEVTIKNKYPLPRIDDLFDQLEGATVFSKKDLCSGYHQLXIREEDIPKIAFTTRYGLFESTVMSFGLTNAPAYFMNLMNNVFMEYLDKFVVVFIDDILIYSKTKEEHEEHLRLALEKLREHQLYAKFSKCEXWLPEVKFLSHVISAGGVVVDPSNVEXVLNWKQPKMVSEIRSFLGLXGYYRRFIENFSKIARPMSRLLQKDVKQLRPHENNYPTHDVELAAVVHELKIWRHYLFDNRTEMYTDHKCLKYIFTQPNLNMRQRRWLELIKDYDMEIHYHPGKANVVADALSRKSYCNMSEGRHLPWELCQELEKLNLGIVNKGFVAALEAQPTLFDQVREAQVNDLDIXEIEKNMRRGKTIGYIEDEQGTVWLGERICVPDNKELKDTIMKEAHETLYSIHPGSTKMYQDLKQQFWWASMRXEIAEYVALCDVCQRVKAEHQKPACQLQPLKILEWKWEEIGMDYITGLPRTSAGQDSIWVVVDRLTKVAHFIPVKTTYSGNKLAELYMARVVCLHGVPKKIVSDRGSQFTSMFWRKLQEEMRTRLNFSTTYHPQTDGQTKRVNQILEDMLRACVLDFGGSWDKNMPYAEFGYINSYQASLQMAPYEALYGRKCRTPLXWDQTGERQVFGTDILREAEEKVKIIQERLRIAQSRXKSYADNRRRDLTFEEGDYVYLRVTLLRGVHRFQTKGKLAPRFVGPFKIVSRRGEVAYQLELPPSMAGIHDVFHVSQLKKCLRVPTEEADPEHIELQKDLTYVEKPVRILVFPTFRRRAFTLRKAIDQY

SEQ ID NO: 25741 - protein, 1751 aa, Oryza sativa
  unsure (1)..(1751): unsure at all Xaa locations
  Clone ID: TF_OsC359_6530.pep
TPQPPPEVTFPLTSWGPSAIPTFPESPFSQEKNLNSSKASKATPGLEWYIPGLEIDLYSRXGCSGWLGLSSMMPRYKPEYLFGVEGFVQELRTMSFAIGFGTAPFYAQIPHDRHEEKCRVKVTLNSNSEDISSVMFEAGGGNYIHACQEVARIAIGELRDRYSDQLADTEYRYHPRQPQGSDRGSYLETEGIENDATTRHLVEMLWAMDKTRAETVLAAQDREDRNRGKICKLEDKVDRLEKELAALKGEAPPQKARIRLTARKRALFVPRYQLALKMVLTRSNGNGPNNNNNNNNNGENPTLAQVLAQQAQLMNMMMQQLQNQQNQGNNHAPPQNKLAEFLRVRPPTFSSTTNHVEAGDWLHAIEKKLDLLQCTDXEKVSFASHQLHGPASEWWDHFRLNRTTAEPITWLEFTAAFRKTHIPSGVVSLKKKEFRSLTQGSRSVTEYLHEFNRLARYAPEDVRTDEERXERFLEGLNDELSYPLMTGDYHDFQKLVDKAIRQEDKYNRMEQKKRRIAHFKAQQGNSQRPRLTLGPQSMPQGVSSSVVRLQRQFFNNNAGNNIRNQAPRPVAASTQQQPAKKEQGSKPGVCFNCGDPGHYADKCPKPRRVKVVPAQSNSTAPASKARVNHVAAAEAQGAPDVILGTFLVNLVPATLLFDSGAIHSFLSMSFAGNHGMEVEDLRRPLMVSTPSNQALSLQHSPSVRIEIQGVPFLANLILLESKDLDVILGMDWLARYKGVIDCANRKVILTNNDGRVVTVHALSSESLRSSLNQITLKEIPIVREYPDVFPDDLPGMPSKRDIEFRIDLVPGTTPIHKRPYRMAANELVEVKRQVDDLLQKGYIRPSSSPWRAPVIFVEKKDHTQRMCVDYRALNDVTIKNKYPLPRIDDLFDQLKGATVFSKIDLRSGYHQLRIKEEDIPKTAFTTRYGLFECTVMSFGLTNAPAFFMNLMNKVFMEYLDKFMVVFIDDILIYSRTKEEHEEHLRLALEKLREHQLYAKFSKCEFWLSEVNFLGHVISAGGVAVDPSNVESVTNWKQPKTVSEIHSFLGLAGYYRRFIENFSKIAKPMTRLLQKDVKYKWSEECEQSFQELKNRLISAPILILPDPKKGFQVYCDASKLGLGCVLMQDGKVVAYASRQLRPHEKNYPTHDLELAAVVHALKIWRHYLFGTRTEVYTDHKSLKYIFTQPDLNMRQRRWLELIKDYDMGIYYHPGKANVVADALSRKGYCNATEGRQLPLELCKEFERLNLGMVSRGFVAALEAKPTLIDEVREAQINDPDIQEIKKNMRRGKAIGFLEDEQGTVWLGERICVPDNKDLKDAILKEAHDTLYSIHPGSTKMYQDLKERFWWASMKREIAEYVAVCDVCQRVKAEHQKPAGLLQPLKIPEWKWEEIGMDFITGLPRTSSGHDSIWVIVDRLTKVAHFIPVKTTYSGSRLAELYMARIVCLHGVPKKIVSDRGSQFTSKFWKKLQEEMGSKLNFSTAYHPQTDGQTERVNQILEDMLRACALDFGGSWDKNLPYAEFSYNNSYQASLQMAPYEALYGRKCRTPLLWDQTGERQVFGTDILREAEEKVKIIQERLRVAQSRHKSYADNRRRELSFDEGDYVYLRVTPLRGVHRFHTKGKLAPHFVGPYKIVSRRGEVAYQLELPXSLAGVHNVFHVSQLKKCLRVPTEETNLEQIEVQEDLTYLEKPIRILEIDERRTRNRVIRFCKVQWSNHSEEESTWEREDELKSAHPHLFASFSESRGRDSV

SEQ ID NO: 25742 - protein, 1093 aa, Oryza sativa
  unsure (1)..(1093): unsure at all Xaa locations
  Clone ID: TF_OsC359_6754.pep
MSFLIGFGTAPLYAQIPHDCDEEKCRVKVTLNSNREDIPSVMFEAGGGSYIHACQEVARIAIGELHESYNDRLADTEYRYHPRQPQGSDRGSYLEPAEIENDATTRHLVEMLWAMDETRAEIVIAAQDCEDRNRGKICKLEDKVDRLEKELAALKGEAPPQKARVRLTARKRALFVPRYQLAPKVRVVEKEATPAPVDPPVVNVSDDDEEESKRTHSKVEWGATQDDGDMVLTRSNGNGPNPNKNNNNAENPTLAQVLAQQAQLKNLMMQQLQNQQNQGNNHAPPPNKLVEFLRVRPPTLSSTTNPIEAGDWLHAIEKKLDLLQCTDQEKVSFASHRLHGPASEWWDHFRLNRTTAEPITWLEFTAAFRKTHIPSGVVSLKKKEFRALTQGSRSVTKYLHEFNRLARYAPEDVRIDEERQEKFLEGLNDELSNPLMTGDYHDFQKLVDKAIRQEDKYNRMEQKKRRIAHFKAQQGNTPTQHQPAKREQGSKPGVCFNCGDPGHYADKCPKPHRAKVVPAQNNPSAPATKARVNHVAAAEAQGAPDVILGTFPVNSVPATVLFDSGATHSFLSLSFAGNHEMEVEDLRRPLMVSTPSNQALSSQRSPSVRIEIQGVPFLANLILLESKDLDVILGMDWLAKYKGVIDCANRKVTLTSNDGQVVTVHALPSEPLRSSLNQITLEEIPIVQEYPDVFPDDLPGMPPKRDIEFRIDLVPGTTPIHKRPYRMAANELAEVKRKVDDLLQKGYIRPSSSPWGAPVIXCGKERSYPEDLKGATVFSKIDLRSGYHQLRIKEEDIPKIAFTTTYGLFECTVMSFGLTNAPAFFMNLMNKVFMEYLDKFVVVFIDDILIYSRTKEEHEEHLRLALEKLREHQLYAKFSKCEFWLSEVKFLDHVISAGGVAVDPSYYWRFIENFSKIAKPMTRLLQKDVKYKWSEECEQCFQELKSRLISAPILILPDPKKGFQVYCDASKLGLGCVLMQDGKVVAYASRQLRPHEKNYPTHDLELAAVVHALKIWRHYLFGTRTEVYTDHKSLKYIFTQPDLNMRQRRWLELIKDYDMGIHYCNILKMCHFLILHHADSYVLNNLLNLGKYT

SEQ ID NO: 25743 - protein, 507 aa, Oryza sativa
  Clone ID: TF_OsC359_7433.pep
MAFEVGYEVAPEYCQIPYDPNEEKCRVRVTLTSDREDLPSIKFEAGGRKYSHACQEAALVAIGELRHRFDEELESSAFQYHPHKPHGQDYGTYNCPEGEGSATVMHAVYMLSAMDAVGVEREKAAHDRENWNRGRICKLESKVYRLQKELAELKGEAPPPAPKLRLTARKRTRPPPRLQLASKTGVVGDAVPDHAKPVIHVLSDEEEEEDLEEREPATPEEEDPSLHSDARRDMLLTSMVGCNYMSLVLLLVRDSLCPRRCRTDEEHQEKFLEGLNDELSYALMAMDYWDFQQLMDKAIRQEDKYNRMEQKKRRAAHFKAQQGSSQRPHIALGPQAAPYPQGGSSSVARPQRQFYNNNTGNRSNDNRNMVTRPVAAPTQNHPVRKEQGSKPGVCFNCGDPGHYADKCPKPRRVKNAPVQNNSNAPAPKARVNHVAAAEAQNTPDVVLEEECFNEVAKQPGPHVSDSAAREAEAAGEQRRPTAFVAAYWLHHMWASFCWDLGDVSGAM

SEQ ID NO: 25744 - protein, 1473 aa, Oryza sativa; identical to SEQ ID NO: 20593
  Clone ID: TF_OsC359_7456.pep

SEQ ID NO: 25745 - protein, 1578 aa, Oryza sativa
  Clone ID: TF_OsC359_7538.pep
ACAPEPPPEVTSPLTSSWPSAIPTFPESPFSQGKILKSSKASKATPGLEWYIPGLEIDLYSRMPRYKPEYLFGVEGFVQELRTMSFAIGFGTAPFYAQIPHDRHEEKCRVKVTLNSNSEDIPSVMFEAGGRNYIHTCQEVARIAIGELRDRYSDQLADTEYRYHPRQPLGSDRGSYLETKGIKNDATTRHLVKMLWAMDETRAETVLAAQDREDRNRGKICKLEDKVDRLEKELAALKGEAPPQKARIRLTARKRALFVPRYQLAPKVRVVEKEVTPALADPPVVNMVLTRNNGNDPNNNNNNSNGENPTLAQVLAQQAQLMNMMMQQLQNQQNQGNNHAPPQNKLAEFLRVRPPTFSSTTNPVEAGDWLHAIEKKLDLLQCADQEKVSFASHQLHGPASEWWDHFRLNRTTAEPITWLEFTAAFRKTHIPSGVVSLKKKEFRSLTQGSRSVTEYLHEFNRLARYAPEDVRTDEERQEKFLEGLNDELSYPLMTGDYPDFQKLVDKAIRQEDKYNHMEQKKRRIAHFKAQQGNSQRPSLTLGPQSMPQGGSSFVVRPQHQFFNNNAGNNIRNQAPRPVAASTQQQPAKKEQGSKSGVCFNCGDPGHYADKCPKPRRVKVVPAQSNSTVPASKARVNHVAAAEAQDAPDVILGTFLVNLVPTTVLFDSGATHSFLSMSFAGNHGMEVEDLRHPLMVSTPSNQALSLQRSPSVRIEIQGVPFLANLILLESKDIDVILGIDWLARYKGVIDCANRKVTLTSNDGRVVTVHALSSESLRSRLNQITLEEIPVVREYPDVFPDDLPGMPPKRDIEFRIDLVPGTTPIHKRPYRMAANELAEVKRQVDDLLQKGYIRPSSSPWGAPVIFVEKKDHTQRMCVDYRALNDVTIKNKYPLPRIDDLFDQLKGATVFSKIDLRSGYHQLRIKEEDIPKTAFTTRYGLFECTVMSFGLTNAPAFFMNLMNKVFMEYLDKFVVVFIDDILIYSRTKEEHEEHLRLALEKLREHQLYAKFSKCEFWLSEVKFLGHVISAGGVAVDPSNVESVTNWKQPKTVSEIRSFLGLAGYYRRFIENFSKIAKPMTRLLQKDVKYKWSEECEQSFQELKNRLISAPILILPDPKKGFQVYCDASKLGLGCVLMQDGKVVAYASRQLRPHEKNYPTHDLELAAVVHALKIWRHYLFGTRTEVYTDHKSLKYIFTQPDLNMRQRRWLELIKDYDMGIHYHPGKANVVADALSRKGYCNATEGRQLPLELCKEFERLNLGMVRRGFVAALEAKPTLIDQVREAQINDPDIQEIKKNMRRGKAIGFLEDEQGTVWLGERICVPDNKDLKDAILKEAHDTLYSIHPGSTKMYQDLKERFWWASMKREIAEHVAVCDVCQRVKAEHQKPAGLLQPLKIPEWKWEEIGMDFITGLPRTSSGHDSIWVIVDRLTKVAHFIPVKTTYSGSRLAELYMARITDGQTKRVNQILEDMLRACALDFGGSWDKNLPYAEFSYNNSYQASLQMAPYEVLYGRKCRTPLLWDQTGERQVFGMDILREAEEKVKIIQERLRVAQSRHKSYADNRRRDLSFDEGDYVYLRVTPL

SEQ ID NO: 25746 - protein, 1264 aa, Oryza sativa
  Clone ID: TF_OsC359_7558.pep
MAAVRMTLRWDGSYQPPLRRKQMPRYKPEYLFGVEGFVQELRTMSFAIGFGTAPFYAQIPHDRHEEKCRVKVTLNSNSEDIPSVMFEAGGRNYIHACQEVARIAIGELRDRYCDQLADTEYRYHPRQPQGSDRGSYLETEGIENDATTKHLVEMLWAMDETRAETVLAAQDREDRNRGKICKLEDKVDRLEKELAALKGEAPPQKARIRLTARKRALFVPRYQLAPKVRVVEKEVTPALADPPVVNNKLAEFLRVRPPTFSSTTNPVEAGDWLHAIEKKLDLLQCTDQEKVSFASHQLHGPASEWWDHFRLNRTTAEPITWLEFTAAFRKTHIPSGVVSLKKKEFRSLTQGSRSVTEYLHEFNRLARYAPEDVRTDEERQEKFLEGLNDELSYPLMTGDYPDFQKLVDKAIRQEDKYNRMEQKKRRIAYFKAQQGNSQRPRLTLGPQSMPQGGSSSVVRPQRQFFNNNAGNNIRNQAPRPVAAPTQQQPAKKEQGSKPGVCFNCGDPGHYADKCPKPRRVKVVPAQSNSTIPASKARVNHVAAAEAQDAPDMILGTFLVNLVPATVLFDSGATHSFLSMSFAGNHRMEVEDLRRPLMVSTPSNQALSLQRSPSIRIEIQGVPFLANLILLESKDLDVILGMDWLARYKGVIDCANRKVTLTSNDGRVVTVHALSSESLRSSLNQITLEEIPVVREYPDVFPDDLPGMPPKRDIEFRIDLVPGTTPIHKRPYRMAANELAEVKRQVDDLLQKGYIRPSSSPWGAPVIFVEKKDHTQRMCVDYRALNDVTIKNKYPLPRIDDLFDQLKGATVFSKIDLRSGYHQLRIKEEDIPKTAFTTRYGLFECTVMSFGLTNAPAFFMNLMNKVFMEYLDKFVVVFIDDILIYSRTKEEHEEHLRLALEKLREHQLYAKFSKCEFWLSEVKFLGHVISAGGVAVDPSNVESVTNWKQPKTVSEICSFLGLAGYYRRFIENFSKIAKPMTRLLQEEMGSKLNFSTAYHPQTDGQTERVNQILEDMLRACALDFGGSWDKNLPYAEFSYNNSYQASLQMAPYEALYGRKCRTPLLWDQTGERQVFGTDILREAEEKVKIIQEILRVAQSRHKSYADNRRRDLSFDEGDYVYLRVTPLRGVHRFHTKGKLAPRFVGPYKIVSRRGEVAYQLELPQSLAGVHNVFHVSQLKKCLRVPTEETNLEQIEVQEDLTYVEKPIRILEIDERRTRNRVIRFCKVQWSNHSEEESTWEREDELKSTHPHLFASSSESRGRDSV

SEQ ID NO: 25747 - protein, 1226 aa, Oryza sativa
  Clone ID: TF_OsC359_7854.pep
MVLTRSNGNGPNNNNNNNNGENPTLAQVLAQQAQLMNMMMQQLQNQQNQGNNHAPPQNKLAEFLRVRPPTFSSTTNPVEAGDWLHAIEKKLDLLQCTDQEKVSFASHQLHGPASEWWDHFRLNRTTAEPITWLEFTAAFRKTHIPSGVVSLKKKEFRSLTQGSRSVTEYLHEFNRLARYAPEDVRTDEERQEKFLEGLNDELSYPLMTGEQKKCRIAHFKAQQGNTSTPQQPAKREQGSKPGVCFNCGDPGHYADKCPKPRRVKVVPDQSNSTVPASKARVNHVVAAEAQDAPDVILEKKDHTQRMCVDYRALNDVTIKNKYPLPRIDDLFDQLKAEGRGRADRVHGSGAHAAASRSTVDRPLGAPEGGQAGAAGGRRRACAPMVAAGYHQRDGAAPERGEGKGETKRRSTAHHGSTATMETATGAEEGGGAARVDGVDGVPAVGERNGGVDEVGEDAAKPKEAASRWEVVRGDNGGGPELGSDGGERERRRELDSGGERGRRVAETVVGSSGRVYIGLGVREGGRRRGKWARETRPPLMAPASKCEFWLSEVKFLGHVISAGGVAVDPSNVESVTNWKQPKTVSEIRRFLGLAGYYRRFIENFSKIAKPMTRLLQKDVKYKCLATPSSPLLQPCSAIAPVIAVARGGRHRGRRCVAVLVRPFAVAVDRRNTAAVVKPKVAAASSLTPSPSVDLPPPFWSPVSSPRHPLRAGALRSRRRAVVRRRVCKPEPPPVVTSPLTSSSSSLVVRPWTGEDFEEFQGQQGNLLLCASADFWTRIYTHMPRFKPEYLFGTEGFVQELRTLSFAIGFGTAPLYAQIPHDHDEEKCHVKVTLNSNREDIPSVMFEAGGGSYIHACQEVARITIGELRESYNDQLADTEYRYHPRQPQGSDRGSYLEPAGIENDATTRHLVEMLWAMDETCAEIMLAAQDREGRNRGKICKLEDKVDRLEKELAALKGEAPPQKARVRLTARKRALFVPRYQLAPKVRVVEKEAASAPADPPIVNMVFTRSNGNGPNNNNTTNNNNGENPTLAQVLAQQAQVMNMMMQQLQNQQNQGNNHAPPQNKLAEFLRVRPPTFSSTTNPVEAGDWLHAIEKKLDLLQCTDQEKVSFASHQLHGPTSEWWDHFRLNRTTVEPITWLEFTAAFRKTHIPSGVVSLKKKEFRALTQGSRSVTEYLHEFNRLARYASEDVCTDEERQEKFLEGLNDELSYPLMTGDYHDFPEVGG

SEQ ID NO: 25748 - protein, 1304 aa, Oryza sativa
  Clone ID: TF_OsC359_8131.pep
MIQERCTVMPPHSPRNLIKVLGFVRELRLMAFEYHPHKPHGQDYGTYTYPDGEESATLMQAVHMLSSMYAVSVERDKAAHDRENWNRGKICKLESKVYRLQKELAELKGETPPPTPKLHLTARKRTCPPPRLQLASKLRVMGDAVPDRAEPVIHVLSDEEEEEYPEERMVNTRTGSGSGAANNGGDSTLAQILAQQTQLINLLVQQAQNQQANNQNQNQPPPPQNKLADFLRLHGPAAEWWDHFRQARAEGEPITWQEFTAAFKNTHIMTGVVALKKREFRALNQGSRSVTEYLHDFNRLARYAPKYVRTDEERQEKFLEGLNDELSYALMSTDFRDFQQLVDKAIRQEDKYNRIEQKKRRAAQFKAQQGSNQRSRLVTGPQATSYPQGGSSSVARPQRQFYNNNTGNRGNDNRNVVARPAATPAKNQPVRKEQGSKPGVCFNCGDPGHYADKCPKPRRVKNAPAPNNSNTPAPKARVNHVVAAEAQNAPDVVLGMPPKRDIEFRIDLVPGTNPIHKRPYRMAANELAEIKRQVDDLLQKGYIRPSTSPWGAPVIFVEKKDHTQRVFMEYLDKFVVVFIDDILIYSKTKEEHEEHLRLALEKLREHQLYAKFSKCEFWLSEVKFLGHVISSGGVAVDPSNVESVLNWKQPKTVSEIRSFLGLAGYYRRFIENFSKIARPMTRLLQKDVKYKWTEDCEQSFQELKKRLVTAPVLILPDSRKGFHVYCDASRLGLGCVLMQEGMVVAYASKQLRPHENNYPTHDLELAAVVHALKIWRHYLFGNRTEMYTDHKSLKWLELIKDYDMEIHYHPGKANVVADALSRKSYCNMSEGRHLPWELCQEFEKLNLGIVSKGFVAALEAQPTLFDQVREAQGNDPDIQEIKKNMRRGKAIGYVEDEQGTVWLGERIWVPDNKELKDTIVKEAHETLYSIHPRSTKMYQDLKQQFWWASMRREIAEYVALCDVCQRVKAEHQKPAGLLQPLKIPEWKWEEIELYMARVVCLHGVPKKIVSDRGSQFTSKFWQKLQVEMGTRLNFSTAYHPQTDGQTERVNQILEDMLRPCVLDFGRSWDKNLPYAEFSYNNSYQASLQMAPYEALYGRKCRTPLLWDQTGERQVFGTDILREAEEKVKIIQERLRVAQSRQKSYADNRRRDLTFEGDYVYLRVTPLRGVHRFQTKGKLAPRFVGPFKIVSRRGEVAYQLELPPSMAGIHDVFHVSQLKKCLRVPTEEADPEHIELQEDLTYVEKPVRILEVSERNTRNRVIRFCKVQWSNHSEEEATWEREDELKSAHPHLFAGSSESRGRDSV

SEQ ID NO: 25749 - protein, 985 aa, Oryza sativa
  unsure (1)..(985): unsure at all Xaa locations
  Clone ID: TF_OsC359_8471.pep
EELDSSAFQYHPHKPHGQDYGTYTCPDGEESATLMHAVHMLSAMDAVSVERAKAAHDRENWNRGKICKLESKVYRLQKELAELKGETPPPTPKLRLTARKRTCPPPRLQLASKIRVMGEAVPDRAEPVIDIISDEEEEEDPEEREPATPEEEDPSLRSDARRTTNPVEAGDWLHAVEKKLDLIQCTEQEKVSFASHQLHGPAAEWWDHFRQGRAEGEPITWQEFTAAFKKTHIPTGVVALKKREFRALNQGSRSVTEYLHDFNRLARYAPEDVRTDEERQEKFLEGLNDELSYALMSTDFRDFQQLVDKAIRQEDKYNRMEQKKRRAAQFKAQQGSNQRPRLVTGPQAPSYPQGGSSSVVRPQRQFYNNNTGNRGNDNRNMVARPAATPAQNQPVRKEQGSKPGVCFNCGDPGHYADKCPKPRRVKNAPAPNNSNAPAPKARVNHVAAAEAQNAPDVVLGTFPVNSIPASVLFDSGATHSFLSKSFASNHGMEVISLGRPLLVNTPGNQVFSTQYCPSATIEIEEVPFPSSLILLESKDLDVILGMDWLSRHRGVIDCANRKVTLTNSNGETVSFFVSSPKSHGVILNQVALQEIPIVQDYPDVFPEDLPGMPPKRDIEFRIDLVPGTNPIHKRPYRMAANELAEVKRQVDDLLQKGYIRPSTSPWGAPVIFVEKKDHTXRMCVDYRALNEVTIKNKYPLPRIDDLFDQLEGATVFSKIDLRSGYYXLRIREEDIPKTAFTTRYGLFECTVMSFGLTNAPAFFMNLMNKVFMEYLDKFVVVFIDDILIYSKTKEEHEEHLRLALEKLREHQLYAKFSKCEFWLSEVKFLGHVISSGGVAVDPSNVESVLSWKQPKTVSEIRSFLGLAGYYRRFIENFSKIARPMTRLLQKEVKYKWTEDCEQSFQELKKRLVTAPVLILPDSRKGFQVYCDASRLGLGCVLMQEGKVVAYASRQLRPHENNYPTHDLELAAVVHALKIWRNHTFA

SEQ ID NO: 25750 - protein, 1399 aa, Oryza sativa
  Clone ID: TF_OsC1528_2065.pep
MSIISTIQKPYYRHCDFTMAGFADALRPDKFTGVHFKRWQIRVTLWLTAMKCFWVSTGKPEGVLTAEQQKQFEEATTLFVGCILSVLGDRLVEVYMHMTDAKELWDALNTKFGATDASNDLYIMEQFHDYKMADNRSVVEQAHEIQTMAKELELLKCVLPDKFVAGCIIAKLPPSWRSFGTALKHKRQEYSVEGLIASLDVEEKAREKDAASKGDGGQSSANVVHKAQNKSKGKYKAQQTTNFKKQKKNNINPNQDERTCFVCGQVGHLARKCLQCKGMKAPAGQTSKSANVTIGNTGDGSGYGNLPTVFSVNQSTNWWVDTGANVHVCADISLFSSYQVARGSTVLMGNGSHASVHGVGTVDLKFTSGKIVQLKNVQHVPSIDRNLVSGSRLTRDGFKLVFESNKVVVSKHGYFIGKGYECGGLFRFSLSDFCNKSVNHICGSVDDEANVWHSRLCHINFGLMSRLSSMCLIPKFSIVKGSKCHSCVQSKQPRKPHKAAEERNLAPLELLHSDLCEMNGVLTKGGKRYFMTLIDDATRFCYVYLLKTKDEALDYFKIYKAEVENQLDRKIKRLRSDRGGEFFSNEFDLFCEEHGIIHERTPPYSPESNGIAERKNRTLTDLVNAMLDTAGLPKTWWGEALLTSNHVLNRVPNRNKDKTPYEIWIGRKPSLSYLRTWGCLAKVNVPITKKRKLGPKTVDCVFLGYAHHSIAYRFLIVKSEVPDMHVGTIMESRDATFFESFFPMKDTHSGSNQPSEIIPNSITPPEQTEHTHELVSEEDVSEAPRRSKRQRTAKSFGGDFTVYLVDDTPKSISEAYASPDADYWKEAVRSEMDSIIANGTWEVTERPYGCKPVGCKWVFKKKLRPDGTIEKYKARLVAKGYTQKEGEDFFDTYSPVARLTTIRVLLSLAASHGLLVHQMDVKTAFLNGELDEEIYMYQPDGFVVEGQEGKVCKLLKSLYGLKQAIKQWHEKFDKTLTSAGFAVNEADKCVYYRYGGGEGVILCLYVDDILIFGTNLEVINEVKSFLSQNFDMKDLGVADVILNIKLIRGENGITLLQSHYVEKILNRFGYIDSKPSPTPYDPSLLLRKNKRIARNQLEYSQIIGSLMYLASATRPDISFAVSKLSRFTSNPGDDHWRALERVMRYLKGTVELGLHYTGYPAVLEGYSDSNWISDVDEIKATSGYVFTLGGGAVSWRSCKQTILTRSTMEAELTVLDTATVEAEWLRDLLMDLPVVEKPVPAILMNCDNQTTCEKTIEVCQEIKKLRSYNVGLHPNSEKPGRSLHEGTITKCDRQCIEGDGFETHIKSLYVYNLNTLSSSSSFSGTGGPPRIDDIVAAATMTTPRDHKLKVVTKPGGGAQRVAAMETLPRETFSPRFRCGGGAAAAVASAIVGRSYLGGK

SEQ ID NO: 25751 - protein, 1588 aa, Oryza sativa
  Clone ID: TF_OsC359_7669.pep
MRLVDGRPQGVRVGRFINAAGTTGFPTGKRAMPRYKPEYLFGVEGFVQELRTMSFVKGFGTAPFYAQIPHDRHEEKCRVKVTLNSNSEDIPSVMFEAGGRSYIHTCQEVARIAIGELHDRYSDQLADTEYRYHPRQPQGSDRGSYLETEGIEIDATTRHLVEMLWAMDETRAETVLAAQDREDRNRGKICKLEDKVDRLEKELAALKGEAPPQKARIRLTARKRALFVPRYQLAPKVRVVEKEVTPAPADPPVVNMVLTHSNGNGPNNNNNNNNNGENPTLAQVLAQQAQLMNMMMQQLQNQQNQGNNHAPPQNKLAEFLRVRPPTFSSTTNPVEAGDWLHAIEKKLDLLQCTDQEKVSFASHQLHGPASEWWDHFRLNRTTAEPITWLEFTAAFRKTHIPSGVVSLKKKEFRSLTQRSRSVTEYLHEFNRLARYAPEDVRTDEERQEKFLEGLNDELSYSLMTGDYHDFQKLVDKAIRQEDKYNRMEQKKRRIAQFKAQQGNSQRPRLTLGPQSMPQGGSSSVVRPQRQFFNNNAGNNIRNQAPRHVAASTQQQPAKKEQGSKPMVCFNCGDPGHYADKCPKPRRVKVVPTQSNSTVPASKAHVNHVAAAEAQGAPDVILGTFLVNSVPATVLFDSGATHSFLSMSFAGNHGMEVEDLRRPLMVSTPSNQVLSLRRSPSVRIEIQGVPFLANLILLESKDLDVILGMDWLARYKGVINCANRKVTLTSNDGRVVTVHASSSESLRSRLNQITLEEIPVVREYRDVFPDDLPGMPPKRDIEFRIDLVPGITPIHKRPYRMAANELAEVKRQVDDLLQKGYIRPSSSPWGAPVIFVEKKDHIQRMCVDYRALNDVTIKNKYPLPRIDDLFDQLKSATVFSKIDLRSGYHQLRIKEEDIPKTAFTTRYGLFECTVMSFGLTNAPAFFMNLMNKVFMEYLDKFVVVFIDDILIYSRTKEEHEEHLRLALEKLREHQLYTKFSKCEFWLSEVKFLGHVISAGGVAVDPSNVESVTNWKQPKTVSEIRSFLGLTGYYRRFIENFSKIAKPMTRLLQKDVKYKWSEECEQSFQELKSRLISAPILILPDPKKGFQVYCDASKLGLGCVLMQDGKVVAYASHQLRPHEKNYPTHDLELAAVVHALKIWRHYLFGTRTEVYTDHKSLKYIFTQPDLNMRQRRWLELIKDYDMGIHYHPGKANVVADALSRKGYCNATEGRQLPLELCKEFERLNLGIVSRGFVAALEAKPTLIDQVREAQINDPDIQEIKKNIRRGKAIGFLEDEQGTVWLGERICVPDNKDLKDAILKEAHDTLYSIHPGSTKMYQDLKERFWWASMKREIAEYVAVCDVCQRVKAEHQKPVGLLQPLKIPEWKWEEIGMDFITGLPRTSSGHDSIWVIVDRLTKVAHFIPVKTTYSGSRLAELYMARIVCLHGVPKKIVSDRGSQFTSNFWKKLQEEMGSKLNFSTAYHLQTDGQTERVNQILEDMLRACALDFGGSWDKNLPYAEFSYNNSYQASLQMASYEALYGRKCRTPLLWDQTGERQVFGTDILREAEEKIPTFSESPFSQEKNLKSSKASKASHTDPKQPFKHVDPI

SEQ ID NO: 25752 - protein, 1691 aa, Oryza sativa
  Clone ID: TF_OsC359_7848.pep
AHDTTASERCEVQVVRRIRRRRSGRTSSWSPSRRRPRPPLRHRRRPPEHRRRRQAEELRRFLFVAGAVRCFSAVVLVVAPGLEWYIPGLEIELCSRDGCSEWLGLCNRIRHDRHEEKCRVKVTLNSNSEDIPSVMFEAGGRNYIHACQEVARIAIGELRDRYSDQLADTEYRYHPRQPQGSDRGSYLETEGIENDATTRHLVEMLWAMDESRAETVLAAQDREDRNRGKICELEDKVDRLEKELAALKGEAPPQKARIRLTARKRALFVPRYQLAPKVRVVEKEVAPADPPIIIISSDEEEESKRNHSKIEWVATQDDEDEPNEPSIDLRCSEEQDFPPVSLLVPYPCQMVNTRSNRNGPNLNNPNNNNNGENPTLAQVLAQQTQLMNMMMQQLQNQQNQGNNHAPPQNKLAEFLRVRPPVFSSTTNPVEAGDWLHAIEKKLDLLQCTDQEKVSFASHQLHGPASEWWDHFRLNRTTAEPITWLEFTAAFRKTHIPSGVVSLKKKEFRSLTQGSRSVTEYLHEFNRLARYAPEDVRNDEERQEKFLEGLNDELSYPLMTGDYHDFQKLVDKAIRQEDKYNRMEQKKRRIAHFKAQQGSSQKPRLTLGPQSMPQGASTQQQPAKREQGSKPMVCFNCGDPGHYADKCPKPRRVKVVPAQSNSAVPASKARVNHVAAAEAQDAPDVILGTFLVNSVPATVLFDSGATHSFLSMSFAGNHGMEVEDLRRPLMVSTPSNQALSLQRSPYVRIEIQGVPFLANLILLESKDLDVILGMDWLARHKGVIDCANRKVTLTSNDGRVVTVHALSSEFLRSRLNQITLEEIPIVREYPDVFPDDLPGMPPKRDIEFRIDLVPGTTPIHKRPYRMVANELAEVKRQVDDLLQKGYIRPSSSPWGAPVIFCGKERSYPEDLKGATVFSKIDLRSGYHQLRIKEEDIPKTAFTTRYRLFECTVMSFGLTNAPAFFMNLMNKVFMEYLDKFVVVFIDDILIYSKTKEEHEEHLRLALENKCEFWLSEVKFLGHVISAGGVAVDPSNVESVTNWKQPKTVSEIRSFLGLAGYYRRFIENFSKIAKPMTRLLQKDVKYKWSEECEQSFQELKSRLISAPILILPDPKKGFQVYCDASKLGLGCVLMQDGKVVAYASRQLRPHEKNYPTHDLELAAVVHALKIWRHYLFGTRTEVYIDHKSLKYIFTQSDLNMRQRRWLELIKDYDMGIHYHPGKANVVADALSRKGYCNATEGRQLPLELCKEFERLNLGIVSIGFVAALEAKPTLIDQVREAQTNDPDIQEIKKNMRRGKAIGFLEDEHGTRVKAEHQKPAGLLQPSKIPEWKWEEIGMDFITGLPRTSLGQDSIWVIVDRLTKVAHFIPVKTTYSGSRLAELYMARIVCLHGVPKKIVSDRGSQFTSNFWKKLQEEMGSKLNFSTAYHPQTDGQTERVNQILEDMLRACALDFGGSWDKNLPYAEFSYNNSYQASLQMAPYEALYGRKCRTPLLWDQTGERQVFGTDIVREAEEKVKIIQERLRVAQSRHKSYADNRRRDLSFEEGDYVYLRVTPLRGVHRFHTKGKLALRFVGPYKIVSRRGEVAYQLELPQSLAGVHNVFHVSQLKKCLRVPTEEANLEQIEVQEDLTYVEKPIRILETNERKTRNRVIRFCKVQWSNHSEEESTWEREDELKSAHPYLFASSSESRGRDSV

SEQ ID NO: 25753 - protein, 1247 aa, Oryza sativa
  unsure (1)..(1247): unsure at all Xaa locations
  Clone ID: TF_OsC1528_2390.pep
SGDRLVEVYMHMTDAKELWDVLNTKFGATDASNDLYIMEQFHDYKMTDNRSVVEQAHEIXTMAKELELLKCVLPDKFVAGYIIAKLPPSWRSFGTALKHKRQEYSVKGLIASLDVEEKAREKDVVSKGDGGQSNANVVHKAQNKSKGKYKAQQTTNFKKQKKKNNNPNQDERTCFVYGQPGHLARKCPQRKGMKAPSGQTSKSANVTIGNTGDGSGYGNLPTVFFVNQSTNWWVDTGANVHVCAGISLFSSYQVARGSTILMGNGVGTVDLKFTSGKIVQLKNVQHVPSIDRNLVSGSRLTRDGFKLVFESNKIVVSKHGYFIGKGYECGDLFRFSVSDFCNKSVNHICASVDDEANVXHSRLCHINFGLMSWLSSMCLIPKFSIVKGSKCHSCVQSKQPRKPHKVAEEINLAPVELLHSDLCEMNGVLTKGGKRYFMTLIDDATRFCYVYLLKMKDETLDYFKIYKAEVENQLDRKIKRLRSNRGGEFFSNEFDLFCEEHGIIHERTPPYSPESNGIVERKNRTLTDLVNAMLDTAGLPKAWWGEGLLISNHMLNRVPNRNRDQTPYEIWIGRKPSLSYLRTWGCLAKVNVPITKKRKLGPKTVDCVFLKYAHHNIAYRFLIVKSEVPDMHVGTIMESRDATFFESFFPMKDTHSGSSQPSEIIPSSITPPEQIEHTHEHVSEEDVSEAPRRSKRQRTAKSFGDDFTVYLVDNTPKSISEAYASPDADYWNEAVRSETGLGRLTTIRVLLSLAASYCLLVHQMDVKTAFLNGELDEEIYMDQPDGFVVEGQEGKVCKLLKSLYGLKQAPKQWHEKFDKPLTSTGFAVNEADKCVYYRHGGGEGIILCLYVDDIQIFGTNLEVINEVKSFLSQNFDMKDLGVVDLILNIKLIRGENGITLLQSHYVEKILNRFGYIDSKPSPTPYDPSLLLRKNKRIARNQLEYSQIIGSLMYLASATRPDISFAVSKLSRYPVVLEGYSDSNWIFDVDEIKATSGYVFTLGGGAVSWRSCKQTILTRSTMKAELTALDTATAEAEWLRDLLMDLPIVEKPVPAILMNYDNQTGLLAALYCAVARRLLHPACRRAPAIGRAGLQNLCLRRPAPGEGGSKVFGKRFARLLPVRPRRLAYLSARVLRAFVDAHNHDALYWWDDWKLRILVLGSNTIQLFLFIYGGVRWHRISLWFRLCIWLAYIGGDSLAIYALATLFNRHKHEAPAASELEVLWAPILLIHLSGQDMIASYSIQDNYL

SEQ ID NO: 25754 - protein, 1981 aa, Oryza sativa; identical to SEQ ID NO: 18648
  Clone ID: TF_OsC251248_2.pep

SEQ ID NO: 25755 - protein, 462 aa, Oryza sativa; identical to SEQ ID NO: 18649
  Clone ID: TF_OsC1528_1699.pep

SEQ ID NO: 25756 - protein, 421 aa, Oryza sativa
  Clone ID: TF_OsC1528_2064.pep
MAPQPTCQTCVRNYLGSKEDPALSENPNQLAEQVTNQVAKTDNTVPGPNKEPKVNPDKSKNEAAEIQGTQSVEGTDTHKEKNKEFLNVMITGMKTPLRANNCPNLQNSINKSVSRENSMIKEGSCHKRKTLPSEVDMQDVPQCQTMQSCQNLPKSPTLKSKKIRHVPGFICFICHKIGHYMRHCPQKPYMDAPLQANMSTSRMPFYPQGSPNSPNVNAVRSTFPDDKRAKASCDMCQDIQEKKEMQEYKRRKVMSLEIQAKEDLCRKTNSPAQYYQKASQHSTSSGSTSRSTMSEPGQQATMINSNSHEGSNSVPCPTPSKRRGYKAGVECFICHEMGHYSWCCPQKVKSKRVQPTTSLPNVSGPKSSKSPNSGSASLTSPPVGQGRLNHVQVETNGKVVNLEQVEGAGEEQVPQARAEPQ

SEQ ID NO: 25757 - protein, 919 aa, Oryza sativa; identical to SEQ ID NO: 18671
  Clone ID: TF_OsC1528_1627.pep

SEQ ID NO: 25758 - protein, 899 aa, Oryza sativa; identical to SEQ ID NO: 18679
  Clone ID: TF_OsC1528_1670.pep

SEQ ID NO: 25759 - protein, 1251 aa, Oryza sativa
  unsure (1)..(1251): unsure at all Xaa locations
  Clone ID: TF_OsC1528_2109.pep
MKCFWVSTGKPEGILTADQQKQFEEATTLFVGCILSVLGERLVEVYMHMTDAKELWDALNTKFVATNASNDLYIMEQFHDYRIADNRSIVEQAHEIQTIAKELELLKCVLPDKFVAGCIIAKLPPSSRSFGTALKHKRQEYSVEGLVASLNGEEKARKKTPRLRAMNKSKGKYKAQQNTNFKKQKKNNNNPNQDERTCFVCGQPGHLARKYPQRKGMKAPAGQTSKSANVTIGNTGDGSGYSNLPTVFSVNQSTNWWVDTAANVARSSTVLMGNGSHASVHGVGTVDLKFTLGKIVQLKNVQHVPSIDRNLVSGSRLTRDGFKLVFESNKVVVSKHGYFIGKGYECGGLFRFSLSDFCNKSVNHICGSVDDEANVWHSRLCHINFGLMSRLSSMCLIPKFSIVKGSKCHSCVQSKQPRKPHKAAEERNLAPLELLHSDLCEMNGVLTKGGKRYFMTLIDDATRFCYVYLLKTKDEALDYFKIYKAEVENQLDRKIKRLRSDRGGEFFSNEFDLFCEEHGIIHERTPPYSPESNGIAERKNRTLTDLVNAMLDTAGLPKAWWGEALLTSNHVLNRVPNRNKDKTPYEIWIGRKPSLSYLRTWGCLAKVNVPITKKRKLGPKTVDCVFLGYAHHSIAYRFLIVKSEVPDMHVGTIMESRDATFFESFFPMKDTHSGSNQPSEIIPSSITPPEQTEHTHELVSEEDVSEAPRRSKRQRTAKSFGDDFTVYLVDDTPKSISEAYASPDADYWKEAVRSEMDSIIANGTWEVTERPYGCKPVGCKWVFKKKLRPDGTIEKYKARLVAKGYTQKEGEDFFDTYSPVARLTTIRVLLSLAASHGLLVHQMDVKTTFLNGELDEEIYMDQPDGFVVEGQEGKVCKLLKSLYGLKQAPKQWHEKFNKTLTSAGFAVNEADKCVYYRHGGGEGVILCLYVDDILIFGTNLEXVINEVKSFLSQIFDMKDLGVADVILNIKLIRGENGITLLQSHYVEKILNRFGYIDSKPSPTPYDPSLLLRKNKRIARNQLEYSQIXGSLMYLASATRPDISFAVSKLSRFTSNPGDDHWRALERVMRYLKGTVELGLHYTGYPAVLEGYSDSNWISDVDEIKATSGYVFTLGGGAVSWRSCKQTILTRSTMEAELTALDTATVEAEWLRDLLMDLPVVEKPTCEKTIEVCQEIKKLRSYNVGLHPNSEKPGRSLHEGTITKCDRQCIEGDGFETHSILEGTHLCELDCWSQSMKILGESSRKLTKDLGV

SEQ ID NO: 25760 - protein, 1145 aa, Oryza sativa
  Clone ID: TF_OsC1528_2282.pep
MAGFADALRLDKFTGVHFKRWQIRVTLWLTAMKCFWVSNGKPEGILTADQQKQFEEATTLFVGCILSVLGDRLVEVYMHMTDAKELWDALNTKFGATDASNDLYIMEQFHDYKMADNRSVVEQAHEIQTMANELELLKCVLPDKFVAGCIIAKLPPSWRSFGTALKHKRPEYSVEGLIASLDVEEKAREKDAASQGDGGQSSANVVHKAQNKSKGKYKAQQTTNFKKQKKNNINPNQDERTCFVCGQPGHLARKYPQRKGMKAPAGQTSKSANVTIGNTGDGSGYGYECGGLFRFSLSDFCNKSVNHICGSVDDEANVWHSRLCHINFGLMSRLSSMCLIPKFSIFKGSKCHSCVQSKQPRMPHKAAEERNLAPLELLHSDLCEMNGVLTKGGKRYFMTLIDDATRFCYVYLLKTKDEALDYFKIYKAEVENQLDRKIKWLKSDRGGEFFSNEFDLFYEEHGIIHERTPPYSPESNGIAERKNRTLTDLVNAMLDTAGLPKAWWGEALLTSNHVLNRVPNRNKDKTPYEIWIGRKPSLSYLRTWGCLAKVNVPITKKRKLGPKTVDCVFLGYAHHSIAYRFLIVKSEVPDMHVGTIMESHDATFFESFFPMKDTHSGRGPNQAAPPPSSPGVADRWGPPVGSFPHLQPTPHPQPPHPQPPPRPRLRLLRATSTTFPVAPSRFFPISPTSPELPITPAPCNHPPPPFLLLRPPLAAARVAAAPRRLRRRVRKAKLHPGRPFPVEFRRRNSHPLALRAPRIPSASGRRPPVTCRRRSPSSSSAPATLAPPPFGAAFAPPSPPSVAVIGNARARAVAVAVAAWPALSRAGSPPPVRSTPRAIWAVGSVDRRWTTRVVPVHDSGSSDAPVYFEIVAEVPPAAEQGKSCLSLEHVDPIFRRIQARVGVMERGGPCDGLCRFRIHLGMRGDCPLPAGDGDYSIPLTGVHRRSGEQVSETSTFDVLHREKAAIRFLGSASRDCSLFVRDGSPSSPLACFAFSSTLATASSSCRATDLSTTLLPPPFPPELGRRRDCRRGENGGVARGAEGEAEGAVRSEGAVDGEGRQEDDDDGVVGGGVRVGKEKRRVYSWKIRSLIMVLYLTFGDFLLFLKNRAATVLATASVTKGRVQVPPSNVIYVPGATPQQSIGVY

SEQ ID NO: 25761 - protein, 977 aa, Oryza sativa
  Clone ID: TF_OsC359_7024.pep
MWELKVDKIFHIHNYSEEKKLAMASLEFEDYALIWSRDIQCFKCGGRGHVVRECPNNRAIIVIEHGEFDSASEDAENGQRNNLFQTRAKVGGKVCKVIVDGGSCHNLASKDMCDKLGLKLLRHPHPYHVQWLNDSGDIKIGHRVKVSFKIGEYEDEVLCDVVPMTVCHLLLGRPWQFDRSSRHCGRTNQFSIKWKGRNFVLKPMTPQQIMAEHMQKSSEVRIESEKEREQNKFSDIHKSVSKSHKPNMSDKKKREGENFVMLATKSEMRDEYEDVFPMETPAGLPPLRGIEHQIDLIPGAALPNRAPYRTNPQETNEIQRQVQELLDKGYVRESLSPCVVPVILVPKKDGSWRMCVDCRALNNITVRYRHPIPRIDDMLDELSGSMIFSKIDLRSGYHQIRMKIGDEWKAVFKTKFGLYEWLVMPFGLTSEPSTFMRLMNHVLRTFIGKFVVVYFDDILIYSKSLSEHASHIKQVLDVLRKEKLFANIEKCTFCTEKVVFLGFVISGQGVEVDESKVEAIKDWPTPVNVSQVRTFHGLAGFYRRFVKDFSTIAAPLNELTKKGIEFHWGESQKDAFQKLKRCLTEAPLLVWPDFTKTFEIECDANGIGIGAVLMQDKKHVAYFSEKLGGAQLNYSVSDKELYVLVRVLETWQHYLWPKEFVIHSDHEALKYLKGQAKLNRRQAKWVEFIETFPYVVKYKKDGQTEVVNRTLSTLLRMMIKKNLKEWEDCLPLVEFAYNRAERTNMDASKRAAYVKKIHEKTKEEIEKKARSNTAKVNKHRKKVVYETGDLVWVHLQFRTTPFQEGEDDVPQPLSHDDEHIPATPDVNKGDVNNGDGSHHKSHEENEDDVNHVDGLCLNKNDQAYHGPITRSRARKIQQEVNSLFAQLNPNFCENFILPKCSTFLLLRFTPEEIITTPRRMGYIEDDKGYVEDDKGYDEEEPAHPKPVAVYANKKMVYSAKDSTSKACVTQPVNFLHA

SEQ ID NO: 25762 - protein, 562 aa, Oryza sativa; identical to SEQ ID NO: 18680
  Clone ID: TF_OsC91_2124.pep

SEQ ID NO: 25763 - protein, 2112 aa, Oryza sativa
  Clone ID: TF_OsC91_2130.pep
MKMHLKSINPYIWRIVEKGYVLQNPEDPTKEDDENEHKNAQAANAILSALSGSEFNRVDGIESAKVIWDTLRNLHEGTDSVRESKGQFERFVMLDGESPSDMYDRLSKIVNEIKGLGSKDMTDEVVVKKMRPDYKTLTPHDLLGRILAYDMLVQESKDVIQYINQSSTASIKKEDLALKAKEEEEENRKSKSKAEIDDEEMALFVKKFGKFKRRSGFFKGGSSKHYSNKSSGRHSARVCYVCKEPGHFIADCPHLKDGSHIKEDKKKSEKKDEKKEKHKHSKREHYGQAHLGMIFGFNSESSSSDEEGVATFAVKPSSPPRLFDYSSDEDAPVCLMAKEPKVPSPHKSFNVDLVSDEEDEVEDEVMDDELFKSITKESLPHLSELLGRIEDQYATLKRQETLLIREKERSHKLKSELAKEREKNEALVRLYKQTKESHANLEVANAQLQERVDGLDKAYLTLEEKFETLKNSVSLPSEPSCSKIVPSNEPCVRCKDIDIEACATNSISLSTLQKQNEKLMGLLHNGLLKCHMGSKALKDYLGYQRDNFNHEGLGYIPPPKGKVDKSVMIKRPQGLSNFVKAKSILPNDYASHCSFDASYILRKNTSGRVVAKYVGPRGKNISIKRVLWVPKALVTNMRGPKQEYVSGGRSWVIDSGCTNHMTGEESMFSTLDPNGTSQDNIVFGDDGKGKVMGLGKIAISNDLSIANVLLVKSLNYNLLSVSQLCSMGYNCLFTDVGVTVYRRNDSSVVFEGVLKGKLYLVDFSSSTAKHETCIVAKSNTGWLWHRRLAHVGMRNLHKILKHDHILGLTNVQFEKDRVCSACQAGKQIGAHHPVKNVMTTTRPLELLHMDIFRPIAYLSIGGNKYGLVIVDDFSRFTWVFFLHDKSEIQAIFKKFARRAQNEFDLKIMNIRSDNGKEFKNTCIESFLDEEGIKHEFSAPYSPQQNGVAERKNRTLIKMARTMLDEYKTSDRFWAEAVNTACHAINRLYLHRLLKKIPYELFTGNKPNVSYFHVFGSKCYILNRKARSSKFAPKVDEGFLLGYGSNECAYRVFNKSSGIVEIARDVTFDETNGSQVEQVDSHVLGEEEDPSEAIKRLALGDVRPREPQQGASSSTQVEPPTSTQTDDPSISSLDQGEEGEQVPPSPIKLARPRIHQSIQRDHPTDNILETSTRVEQALNDPDWVMAMQEELNNFTRNEVWTLVERPRQNVIGTKWIFRNKQDEAGVIIRNKVRLVAQGFTQIEGLDFGETFAPVARLESIRILLAFATNLNFKLYQMDVKSAFLNGPINELVYVEEPPGFEDPKYPNHVYKLHEALYGLKQAPRAWYECLRNFLVKNGFEIGKADSTLFTKRHDNDIFVCQIYVDDIIFGSTNKSFSEEFSRMMTKRFEMFMMGELKFFLGLQIKQLKEGTFICQTKYLKDMLKKFGMENAKPIHTPMPSNSHLNLNAQGKDVDQKVYRSIIGSLLYLCASRPDIMLSVCMCARFQAAPKECHLVAVKRILRYLVHTPNLGLWYPKGARFDLIGYADADYAGCKVDRKSTSGFFGLSEKFSDISEKHQNRAQPFWILSDISENFRKYQKISESLYITPWTPFSLLSTLFPHGLTPSSLPTGDPPATTSSPATSRGSPPLQPRGSTFGALLGTYIVDLHRVLLVFFTFLRMPPRKQTSHMSRSPRDRSPTPSSHDDSDSDWTGGEDAIPQGARVARGGNLPPRRSSHGGGGDGEGSSRQPQTPPHQPNVLIGPLRLHTPERDPAVIRQVYDWRRKSEAHNDPVIDSVIANCDLMGIRSFMTLQQNWCNEIIAQFYATVYFDRYRAMHWMTQGSWFSVSYQQLAEIWGFRLRSLLNLDNLHNLQIPANTELLPLYTPNDPNVVLGKVDGLKLYFAYLNWMFRRSFVLKDGDASSINHISRTVLLRFDPPPHRFHVYHFVWEEIRMASIQYKKGLVYAPHIMRMIETVTQLQFRHDVTHSQLHLRLIKAPRSSAARDIPSSSTQPPPAPERPASVARREPSPLFRILRSLFGLCSTEAKKNRRLRNSVKKTARDVKFLKARYYEDHHIDIPPSPPGFEAEPDEPEDEEIEDPFAGLPPDFDFFGYGPGYGYPPPPPPEDPPQAPFA

SEQ ID NO: 25764 - protein, 268 aa, Oryza sativa
  unsure (1)..(268): unsure at all Xaa locations
  Clone ID: TF_OsC1713_5433.pep
GETRRRRCCQLLQVKAERQPITWEEFTEGFKKXHVPVGVVALKKREFRALKQKDRTVAEYLHEFNRLARYAPEDVRTDEERQEKFLEGPKDELSVMLISHDYEDFQELVDKAIRLEDKKNKMDNRKRKMTVSQEAQGSSQRQRIKPLQIGESFSAGQEQSQQQSQQLGISGEINSETNASNEDNDEQATQSVSFQQDQSQEDNSNGREHRVCFNCYEPGHFVKECPKPKRQQPQGQVNNIVLTGANAVPVASQGIQLSHQFQSSSSFL

SEQ ID NO: 25765 - protein, 1698 aa, Oryza sativa
  unsure (1)..(1698): unsure at all Xaa locations
  Clone ID: TF_OsC1713_5186.pep
MSNEVNHVGKAPMFNGTNYSTWKIKMSTHLKAMSFHIWSIVDVGFAITGTPLTEIDHRNLQLNAQAMNALFNSLSQEEFDRVSNLETAYEIWNKLAEIHEGTSEYKDAKLHFLKIQYETFSMLPHESVNDMYGRLNVIVNDLKGLGANYTDLEVAQKMLRALPEKYETLVTMLINSDMSRMTPASLLGKINTNDMYKLKKKEMEEASPSKKCIALQAEVEDKGKGKVNEVNENLEEEIALLARRFNDFLGRRKERGKGSNSNRRRNRRPNKTLSNLRCFECGEKGYFASKCPSKDDDGDKSSKKKSGGYKLMKKLKKEGKKIEAFIGEWDSNEESSASSGSEEEDSDNASSKKKKMAVVAIKEAPSLFAPLCLMAKGSSKVTSLSDSESDDDCDDVSYDELVSMFEELHAYSEKEIVKFKALKKDHAFLEVLYEELKTSHERLTISHEKLKEAHDNLLSTTQHGALIDVGISCDLLDDSTTCHIAHVASSSISTSCDDLVDMSSSSSSSCVSICDASLVVENNELKEQVAKLNKSLERCFKGKNTLDKILSEQRCILNKEGLGFIPKKGKKPSHRATRFVKSNGKYCSKCREVGHLVNDCPGGKPPKTCMFDSHYMLRKAHDGSIVARYVGSPILGGKKNTIWVPKALVSNLQGPKQVWIILTILGXFFLHDKSIVAELFKKFAKRAQNEFSCTLVKIRSDNGSEFKNSNIEDYCDDLGIKHELSATYSPQQNGVVERKNRTLIEMARTMLDEYGVSDSFWAEAINIACHATNRLYLYRLLKKTSYELIVGRKPNVAYFRVFGCKCYIYRKGVRLTKFESRCDEGFLLGYASNSKAYRVYNKNKGDEGLMRAMKNMSIGDVKPIEVEDKPSTSTQDEPSTSASPSQAQVEVEEEKAQDPPIPPRIHTALSKDHPIDQVLGDISKGVQTRSRVASICEHYSFVSCLEPKHVDEALCDPDWMNAMHEELNNFARNKVWTLVERPRDHNVIGTKWIFRNKQDENGLVVRNKARLVAQGFTQVEGLDFGETFAPVARLEAIRILLAFASYFDIKLFQMDVKSAFLNGEIAELVFVEQPPGFEDPENPNHVYKLSKALYGLKQAPRAWYERLRDFLLSKDFKIGKVDTTLFTKIIGDDFFVCQIYVDDIIFGSTNEVFCKEFGDMMSREFEMSMIGELSFFLGLQIKQLKDGTFVSQTKYIKDLLKRFGLEDAKPIKTPMATNGHLDLDEGGKPVDLKLYRSMIGSLLYLTASRPDIMFSVCMCARFQAAPKECHLVAYPKGAKFKLVGYSDSDYAGCKVDRKSTSGSCQMLAMPPHTRHGRREPTPDPVSKNEESSGDEYVQSDEDNMENVEGNELDVSDDGDDNGSGNSEDDEASDDGSPLDSTIQFVLNLRNAQQYTILHHHDQFRRPNDCNDPRFHTRFQKSVYEQVYANKAFAEHKWISWRHIGETPEFENLQEMFRTVGIDRIVTMKQPFDEDLIRQFYATVWVSGDCDAMKWMSGTLRCSINRREFKELLHIRFNNGDDLHDEHTHNPFPIDHFSQFYEEGGGYTYGKVAGLRALPSVINRRVRATILPRCGNNDDIRGVAWHVIDAIMDGRRFDVINLMMKEIAISKGTIGQGIYYAPYIMRLPPPRRLVEKLPGDLSEKIVEEARCQFVSGLEFTTFGVKEELPXVIKAWVVLSVGRLPPCPPLDEGGVRRLRG

SEQ ID NO: 25766 - protein, 767 aa, Oryza sativa; identical to SEQ ID NO: 18688
  Clone ID: TF_OsC783_9.pep

SEQ ID NO: 25767 - protein, 858 aa, Oryza sativa
  Clone ID: TF_OsC1528_1875.pep
MRPDYSIPLASVHRRSGEQVSGTSAFDVLHREKAAIRHCDFTMAGFADALRLDKFTGVHFKRWQIRVTLWLIAMKCFWVSTGKPEGVLTAEQQKQFEEATTLFVRCILSVLGDRLVEVYMHMTDTKELWNALNTKFGATDASNDLYIMEQFHDYKMADNRSVVEQTHEIQTMAKELELLKCVLPDKFVAGCIIAKLPTSWRSFGTALKHKRQEYSVEGLIVSLDVEEKAREKDAASKGDGGQSSANVVHKAQNKSKGKYKAQQTTNFKNQKKNNNNLNQDERTCFVCGQVSHLARKCPQRKGMKASAGQTSKSANVTIGNTRDGSGYGNLPTVARGSTVLMGNGSHASVHGVGTVDLKFTSRKIVQLKNVQHVPSIDRNLVSGSRLTRDGFKLVFESNKVVVSKHGYFIGKGYECGGLFRFSLSDFCNKSVNHICGSVDDEANVWHSHYWKEAVRSEMDSIIANGTWEVTERPYGCKPVGCKWVFKKKLRPDASHGLLVHQMDVKTAFFNGELDEEIYMDQPDGFVVEGQEGKVCKLLKFLYGLKQAPKQWHEKFDKTLTSAGFAVNEADKCVYYHHGGGEGVSLCLYVDDILIFGTNLEVINEVKSFLSQNFDMKDLGVADVILNIKLIRGENGITLLQSHYVEMILNRFGYIDSKPSPTPYDPSLLLRKNKRIARNQLEYSQIIGSLMYLASATRPDISFAGYSDSNWISDVDEIKATSGYVFTLGGGAASWSSYKQTILTRSTMKTELTALDTATVKTEWLRDLLMDLPIVEKPEPAIHMNCDNQMVVKVNSSKDNMKSSRHVKRRLKSVRKLRNSKVITLHYIQTARNLVDPFTKGLSRNVIDSASKEIGLRPM

SEQ ID NO: 25768 - protein, 991 aa, Oryza sativa
  unsure (1)..(991): unsure at all Xaa locations
  Clone ID: TF_OsC1713_5366.pep
MGQLLIPMCGPATTAGTKYCEVPATATAEVWACETSTLLEGDPPSSAPSAGKCMSLVHELTRVGLLEPLYKISFGYESKNDKSHIYIENMEIMKSRQSRNRSDRADGGLTEPWTLVWHLIILGKHPRLVTLGGCRLLDGLCRCCPVTSPRRLWWKPGAVWKDMWDALEAKFGVPDAGNELYVMEQYYDYKMVNDRSVVEQAHEIQMLAKELENNNCELPDKFVAGGIIAKLPPSWSDFGTSLKHKRQEFSVSDLIGSLGVEEKARAKDIGGIKVERGSSANMVQKKNPHASHNNKKVKPDVKAKATANFKKKGKEKANGDCFVCGKFGHWAKDCLEHKDRKFANMVISEGGGTSGYDKLLPTVLSVFHSPDWWVDTGANIHVGRGSSLLMGNESLAVVHGVGLSKEWWGEAVLTACHVLNKIPMKHKEVTPFEEWERKKLNLSYLRTWGCLAKVNVPIAKKRKLGPNTVDCVFLGYAAIHSVGYRFLIVNSRVLDMRVSTIIESRDATFFENEFPMKNTPSTSSQETVIPHKHFALIEHNDQTPEGNPEEDNIVDTHKSKKLRVVKSFVDDYIVYLVDDTPRTIEEAYSPPDTDYWKEAVRSEMDSIMSNGTWEVVERPYGCKPVGCKWVFKKKLRPDGTIEKYKASLVAKGYTQKEGEDFFDTYSPVARLTTIRVLLALAASHGLLVHQMDVKTAFLNGELEEEIYMDQPDGLNVIEEVKDFLSKSFEMKDLGEADVILNIKLLRGDEGGITLVQSHYVDKVLSRFGYSDCKPAPTPYDPSVLLRKNRRIARDQLRYSQIIGSLMYLVSATRPDISFAVSKLSRFVSNPGDDHWQALERIMRYLKGTMSYGIHYTGYPKVLERYSDSNWISDADEIKAISGYMFTLGGGAGSWKSCKQTILTRSTMEAELTALDIATVEAEWLRELLMDLPVVEKPVPAILMNCDNQTVIIKVNSSKDNMKSSRHIKRRLKSVRKQKXLRSDSIGLCPNG

SEQ ID NO: 25769 - protein, 1199 aa, Oryza sativa
  unsure (1)..(1199): unsure at all Xaa locations
  Clone ID: TF_OsC1528_2017.pep
MAGFADALRPDKFTGVHFKRWQIRVTLWLTAMKCFWVSTGKPEGVLTAEQQKQFEEATTLFVGCILSVLGDRLVEFHDYKMADNRSVVEQAHEIQTMAKELELLKCVLPDKFVAGCIIAKLPPSWRSFGTALKHKRQEYSVEGLIASLDVEEKAREKDAASKGDGGQSSANVVHKAQNKSKGKYKAQQTTNFKKQKKNNNNPNQDERTCFVCGQVGHLDRKCPQRKGMKAPAGQTSKSANVTIGNTGDGSGYGNLPTVFSVNQSTNWWVDTGANVARGSTVLMGNGSHASVHGVSTVDLKFTSGKIVQLKNVQHVPSIDRNLVSGSRLTRDGFKLVFESNKVVVSKHGYFIGKGSKCHSCVQSKQPRKPHKAVEERNLAPLELLHSDLCEMNGVLTKGGKRYFMTFIDDATRFCYVYLLKTKDEALDYFKIYKAEVENQLDRKIKRLRSDRGGEFFSNEFDLFCEEHGIIHERTPPYSPESNGIAERKNRTLTDLVNAMLDTAGLPKAWWGEALLTSNHVLNRVPNRNKDKTPYEIWIGRKPSLSYLRTWGCLAKVNVPITKKRKLGPKTVDCVFLGYAYHSIAYRFLIVKSEVPDMNVGTIMESRDAIFFESFFPMKDTHSGSNQPSEIIPSSITPPEQTEHTHELVSEEDVSEAPRRSKRQRTAKSFGDDFTVYLVDDTPKSISEAYASPDADYWKEAVRSEMDSIIANGTWEVTERPYGCKPVGCKWVFKKKLRPDGTIEKYKARLVAKGYTQKEGEDFFDTYSPVARLTIIRVLLSLAASHGLLVHQMDVKTAFLNGELDEEIYMDQPDGFVVEGQEGKVCKLLKSLYGLKQAPKQWHEKFDKTLTSAGFAVNEADKCVYYRHGGGEGVILCLYVDDILIFGTNLEVINEVKSFLSQNFDMKDLGVADVILNIKLIRGENGITLLQSHYVEKILNRFGYIDSKPSPTPYDPSLLLRKNKRIARNQLEYSQIIGSLMYLASATRPDISFAVSKLSRFTSNPGDDHWRALERVMRYLKGTVELGLHYTGYPAVLEGYSDSNWISDVDEIKATSAYVFTLGGGAVSWRSCKQTILTRSTMEAELTALDTATVXAEWLRDLLMDLPIVEKPTCEKTIEVCQEFEKLRSYNVGLHPNSXKPGISLHEGTITKCDRQCIEGDGFETHSILERTHLCELDCWSQSVEILGESSRKLTKDLGV

SEQ ID NO: 25770 - protein, 1820 aa, Oryza sativa
  unsure (1)..(1820): unsure at all Xaa locations
  Clone ID: TF_OsC359_7939.pep
MADHPPNHRGEGMDDFVAELARMTLVVGYPNAPEYSTVPPLSGELPHRVRLEVHGFVGTCLANMVVEASGGTVDHTCQEAAYLMMARLRDRHSXIFCNTAYRFHPRRASGDDVSTFRPTASENDTTFSHMCAVMRGMDTMHSDLHKASKASNDGKLVRIIALKDEIARQKKENAQLKGLPAPGGVRIRTTPRKSTTAPVRIQLAPRNPPPPAAPPAPPTVPAAPAVPAPVPASVPVSAPASALSFALASAARGPAIGNGGWLPATHSGSHDHSSSSSSGSEPGNGETYLPDSRSRSEGPGLFLQMVNTRNGSHAAGEGSNGEERTDGGYPNSASGNSPPPLPKNPTLAQVMAHQTXMMAAMMQLMQHQPXQMHQRMQQQAEQQQQQFGPPPPQSKLPEFLRVRPPTFSSTTNPMEANDWFHAIEKKLNLLQCNDQEKVAFATHQLQGPTSAWWDNHMATRPPGTEVTCAEFCRSFQKAQVLDGVVAQKKREFQALHQGNRIVTEYLHEFNCLARYAPEDVHIDTLKQEKFLAGLDDELTNQLISGDYTDFEKLVDKAIRQEDQRNKMDRKRRFRQFRSNQGSHQRPRFTPGQQGGPTTMIVRQHRPYNPSNFHPGSSGSHHGQGQHNRSAAPRPPMAPVQQTAPVPPKKDTGGKPGACFNCGESGHFADKCPKPRRAGPKFVQARVNHASAEEAQVAPEVVLGTFPVNSIPATVLFDSGATHSFISKKFVGVHGLIREELSTPMRVQTPGNSSTSIQFSPCVTIEIQRSPFLANLILLESKDLDVILGMDWLTKFKGVIDCVNRTVTLTNEKGETVVYKSPVVLKQGISLNQIEVENPMVTEEKSSRKLEDIPIVGEYPEVFPEDLTTMPPKREIEFQIDLAPGTAPIYKRPYRMAANELAEVKKQVDEQLQKGYIRPSTSPWGAPVIFVEKKDKTKRMCVDYRTLNEVTIKNKYPLPRIDDLFDQLKGAKVFSKTDLRSGYHQLRIQEEDIPKMAFTTRYGLYECTVMYFGLTNAPAFFMNLMNKVFMEFLDKFVVVFIDDILIYSKSEEEHEQHLRLVLEKLQEHQLYAKFSKCDFWLSEVKFLGHVITAQGVAVYPSNVESVTKWTPPKTVSQIRSFLGLAGYYRRFIENFSRIARPMTQLLKKDEKFRWTAECDKSFEELKKKLVPAPVLILPDQTKDFQVYCDTSRHGLGCVLKQESRVVAYASRQLRPHEGNYPTHXAVVHALKIWRHYLIGNRCEVYTDHKSLKYIFTQPDLNLRQRRWLELIKDYDMSIHYHPGKANVVANALSRKSYCNALCTEGMCKELQQELEHLNLGIVEHGFVAALKARPTLVDQVRAAQVNDPEIAELKKNMRVGKARDLLEDEHGTIWLGERLCIPDDKELKDLILTKAHQTQYSIHPGSTKMYQDLKEKFWXASMRREIAEFVALCDVCQRVKAEHQRPIGLLQPLQIPEWKWEEIGMDFITGLPTTSSGHDSIWVVVDRLTKVAHFIPVHTTYTGKRLAELYLSRIMCLHGVPKKIVSDRGSQFTSKFWQKLQEELGTRSNFSTAYHPQTDGQTERVNQILEDKLRACALDFGGAWDKSLPYAEFSYNNSYQASLQMAPFEALYGRKCRIPLFWDQIGERQLFGTEVLTEAEEKVRTVRERLRIAQSRQKSYADNRRRELTFEAGDYMYLRVTPLRGVHRFQTKGKLAPRFVGPYKILERRGEVAYQLELPSNMIGIHDVFHVSQLKKCLSLPEEQANSEHIDIQEDLTYVEKPVRILDTSERRTRNKVTRFCRVQWSHHSEEEATWEREDELKAAHPHLFTSSSESRGQDSV

SEQ ID NO: 25771 - protein, 1460 aa, Oryza sativa
  Clone ID: TF_OsC359_8456.pep
MYPNSGNGPPPLPENPTLAQVMAHQTQMMAAMIQQMQQQHQQMHQRMMQHVEQQHQQFGPPPPQSKLPEFLRVRPPTFSSTTNPMEANDWLHAIEKKLNLLQCNDQEKVAFATHQLQGPASAWWDNHMATRPPGTEVTWAEFCRSLRKAQVPDGVVAQKKREFRALHQGNRTVTQYLHEFNRLARYAPEDVRTDAEKQEKFMAGLDDELTNQLISGDYADFERLVDKAIRQEDQRNKMDRKRKAAQFRAPQGSHQRPRFAPGQQGGPTTMIVRQHRPFNPSNFPQGASGSQNHHGGQSNRGAASRPPMAPAQSGQPAQAKKETGAKPGSCFNCGKLGHFADKCPKPRRAGPRFIQARVNHASAEEAQAAPEVVLGTFPVNSIPATVLFDSGATHSFISKKFVGMHGLIREELSTPMRVHTPGNSSTSVQFSPSITIEIQRSPFLANLILLESKDLDVILGMDWLTKFKGVIDCANRTVTLTNEKGETVVYKSLVSPKKGVSLNQIEAEIPVDTVEKNSRKLEDIPIVCEYPEVFPEDLTTMPPKREIEFRIDLAPGTAPIYKRPYRMAANELAEVKKQVDKQLQKGYIRPSTSPWGAPVIFVEKKDKTKRMCVDYRALNELRIREEDIPKTAFTTRYGLYECTVMSFGLTNAPAFFMNLMNKVFMEFLDKFVVVFIDDILIYSKSEEEHEQHLRLVLEKLREHQLYAKFSKCDFWLTEVKFLGHVITAQGVAVDPSNVESVTKWTPPKTVSQIRSFLGLAGYYRRFIENFSRIARPMTQLLKKDEKFKWTAECDKSFEELKKKLVSAPVLILPDPMKDFQVYCDASRHGLGCVLMQEDRVVAYASRQLRPHEGNYPTHDLELAAVVHALKIWRHYLIGNRCEVYTDHKSLKYIFTQPDLNLRQRRWLELIKDYDMSIHYHPGKANVVADALSRKSYCTALCIEGMCEELRQEFEHLNVGIVELGFVAALEARPTLVDQVRAAQANDSEIAELKKNMRVGKARDFHEDEHGTIWLGERLCVPDDKELKDLILTEAHQTQYSIHPGSTKMYQDLKEKFWWVSMRREIAEFVALCDVCQRVKAEHQRPAGLLQPLQIPEWKWEEIGMDFITGLPRTSSGHDLIWVVVDRLTKVAHFIPVHTTYTGKRLAELYLSRIMCLHGVPKKIVSDRGSQFTSKFWQKLQEELGTRLNFSTAYHPQTDGQTERVNQILEDMLRACALDFGGAWDKSLPYAEFSYNNSYQASLQMAPFEALYGRKCRTPLFWDQTGERQLFGTEVLAEAEEKVRIIRERLRIAQSRQKSYADNRRRELTFEAGDYVYLRVTPLRGVHRFQTKGKLAPRFVGPYKILERRGEVAYQLELPSNMIGIHDVFHVSQLKKCLRVPEEQADSKHIDIQEDLTYVEKPVRILDTSERRTRNKVTRFCRVQWSHHSEEEATWEREDELKAAHPHLFTSSSESRGRDSV

SEQ ID NO: 25772 - protein, 449 aa, Oryza sativa; identical to SEQ ID NO: 18694
  Clone ID: TF_OsC1211_18.pep

SEQ ID NO: 25773 - protein, 1742 aa, Oryza sativa
  unsure (1)..(1742): unsure at all Xaa locations
  Clone ID: TF_OsC359_7638.pep
VTSWYQSHLDLRTSQMVNPHPPKNLIEVLGFVRELRMMAFEVGYEVAPEYRQIPHDPNEEKCRVRVTLTSDREDLPSIKFEAEGKKYSHVCQETALVAIGELRHRFDEELESSAFQYHPHKPHGQDYRTYNCPEGEGSATVMHAVYMLSAMDAVGVEREKAAHDRENWNRGRICKLESKVYRLQKELAELKGEAPPPAPKLRLTARKRTSLPPRLQLASKTRVVGDAVPDHAEPVIHVLSDEEEEEDPKEREPATPEEEDPSLRSDARRTTNPVEAGDWLHAVGKKLDLFQYTEQEKVSFASHQLHGPAAERCDHFLLNRAEGQPITWREFTAAFKKTHIPSSVVALKKREFRALNXGSRSVREYLHDFNRLARYAPEDVRTDEERQEMFLEGLNDELSFALMAMDYRDFQXLVDKAIRQEDKYNRMEQKKRSSQRPRIALGPQAAPYPQGGSSSVARPQRQFYNNNTSNHSNDNRNMVTRHVAAPTQNHPVRKEQGSKPGVCFNCGDPGHYADKCPMPRRVKNAPVQNNSNAPAPKARVNHVAAAEAQNAPDVVLGTFPINSIPATVFFDSGATHSFLSKSFAGNHGMEVISLGRPLLVNTLGNQVSSTQYCPSVTIEIEEIPFPSSLIFLESNDLDVILGMDWLTHHIGVIDCANRNVTLTSSNGQTVSFFVSSPKSHGLTLNQVALQEIPIVRDYPDVFPEDLPGMPPKRDIEFWIDLVPGTNPIHKRPYRMAANELAEVKRQVDDLLQEGYIRPSTSPWGAPVIFVEKKDHTQRMCVDYRALNEVTIKNKYPLPRIDDLFDQLEGATVFSKIDLRSGYHQLRIREEXIPKTAFTTRFGLLECTVMSFGLTNAPAFFMNLMNQVFMEYLDKFVVVFIDDILIYSKNKEEHEEHLRLALEKLHEHQLYAKFSKCEFWLPEVKFLGHVISTGGVAVDPSNVESVLNWKQPKTVSEIRSFLGLAGYYRRFIENFSKIARPMTRLLQKDVKYKWTEECEQSFQELKKRLAAAPVLVLPDPRKGFQVYCDASRHGLXGCVLMQDGKVIAYASRQLRPHENNYPTHDLELASVVHALKIWRHYLFGNRTEMYTDHKSLKYIFTQPDLNMRQRRWLELIKDYHPGKANVVADALSKKSYCKMLEGRHLPWELCEEFEKLNLGIVNKGFVAALEAQPTLFDQVREAQMNDPDIQEIKKNMRRGKAIGYIEDEQGTVWLGERNCVPDNKELKDTIMKEAHETLYSIHPGSTKMYQDLKQQFXWASMRREIAEYVALCDVCQRVKAEHQKPAGLLQPLKIPEWKWEEIGMDFITGLPRTSVGHDSIWVVVDRRTKVAHFIPVKTTYMGNKLAELYMARVVCLHGVPKKIVLDRGSQFTSKFWQNLQEGMGTRLNFSAAYHPQTDGQTKRVNXILEDMLRACVLDVGGSWDKNLSYAEFSYNNSYQASLQMAPYKALYGRKCRTPLLWDQTGERQVFGTDVLREAEEKVKIIQERLRVAQSRQKSYADNRRRDLTFEEGDYVYLRVTPLRGVHRFQTKEKLAPRFVGPFKIVSRRGEVAYQVELPLSMEGIHDXVSHVSQLKKCLSVPTEEADPERLEIQEDLTYVEKPVRILEFPTFRRRAFTLRKVQNRPCRAAQVRAGRAVSSFGVAASTSTPACPLIRPETTAVSPPTPPPASPESSGRPFLLAGISPVDRVAVFSGIAAARSSSASLPLHPNPSAVHRRRLRSFSSSTSRRSPGSSSRSAASVVG

SEQ ID NO: 25774 - protein, 1929 aa, Oryza sativa
  unsure (1)..(1929): unsure at all Xaa locations
  Clone ID: TF_OsC359_5825.pep
MPGVPREVIEHKLMVRPDAKPIKQKLRRFAPYRKQAIREELDKLLKADQLVDSTAGCELLSFLDAYSGYHQISMAKEDEDKTAFITPFGVFCYVKMPFGLITTGNTFQRTVQGALSDQLGNNVEAYVDDIVVKTKTSDSLIDDLRETFDNLRRYRLMLNPEKCTFGVPSGKTPRALLYPSPPSPSPLVVGEALAPCALAQPSPPSLQPCAAAVPAVTVAREGHRRDRQVAAVLVRCFAAVGDRWSTIAVVEPKSSAASSSSPPPSVGFPPSFWSPMPRYKPEYLFGVEGFVQELRTMSFVIGFGTAPFYAQIPHDRHEEKCRVKVTLNSNSEDIPSVMFEAGGRNYIHASQEVARIAIGELRDRYSDQLADTEYRYHPRQPQGSDRGSYLETEGIENDATTRHLVEMLWAMDESRAETVLAAQDREDRNRGKICKLEDKVDRLEKELAALKGEAPPQKARIRLTARKRALFVPRYQLAPKVRVVEKEVAPTLADPPVNIISDDEEEESKRNHSKIEWVATQDDEDEPKEPSIDLRCSEELDKMVNTRSNGNGPNNPNNNNNEGNPTLAQVLAQQVQLMNMMMQQLQNQQNQGNNHAPPQNRLTDFLRVRPPTFSSTTNPVEAGDWLHAIEKKLDLLQCTDQEKVSFASHQLHGPASEWWDHFRLNRTTAEPITWLEFTAAFRKTHIPSGVVSLKKKEFRSLTQGSRSVTEYLHEFNRLARYAPEDVRNDEERQEKFLEGLNDELSYSLMIGDYPDFQKLVDKAIRQENKYNCMEQKKRRIAQFKTQQGNNQKPRLTLGPQSIPHGSSSSVVRPQRQFFNNNAGNNIRNQVPRPVAAPTQQQPIKREQGSKPAVCFNCGDPGHYADKCPKPRRVKVVPAQNNSTVPVSKARVNHVAAAEAQDAPDVILVREYPDVFPDDLPEXYIRPSSSPWGAPXKFVVVFIDDILIYSRTEEEHEEHLRLALEKLREHRLYAKFSKCEFWLSEVKFLGHVISAGGVAVDPSNVESVTNWKQPKTVSEIRSFLGLAGYYRRFIENFSKIAKPMTRLLQKDVKYKWSEESLEAKPTLIDQVREAQINDPDIQEIKKNMRRGKAIGFLEDEQGTPSPPSLQPCAAAVPAVTVAREGHRRDRQVAAVLVRCFAAVGDRWSTIAVVEPKSSAASSSSPPPSVGFPPSFWSPSTRLRSGGDKPTGVAGESITSGFEGEIMIQERCTVVDCVVRERNRSKSREDHGNREHEVAYKTQGSTEANRMHGSTKQEAEEAFIAFKRYLSNPHVLVAPQPNEELFLYIAATPYSVSTIIVVEREKVQLPVYYVSEALHDVMTRYPQIQKLLYAVIMTSRKLCQYFQAHRVTVVSSFPLGEVMRNKDVVSRIAKWVVELSQFDIHFVPRTAIKSQVLADFVADWTMPDNRSDNQIDNETWTMAFDGALNSKGAGAGFILTSPSGDQFKHAIHLNFRATNNTAEYEGLLAGIRVAAALVVRKLEKRFDGIEVRHVYRKDNIEPDDLARRASRREPLEPGTFLDVLTRPSVKEASGEDSPVAPDISSGAIEAERTVADIETTDDWRTPLIKFIGSEELPEDDAEVEKISRKAKVYCMIGNDLYKKAPNGVLLKCILSDDGRHLLLDIHEEICGSHAAGRTLVGKAFQQGFFWPNALKDACDMVQQCEACQFHSKHTKLPAQALQTIPFTWPLSCWGLDILRPFPRGQGGYRFLFVAIDKFTKWIEATPTGEIKADNAIKFIKGIFCKFGLPHQQLTSREGNGIILQGIKTRVYDRLMSHDKNWVEELPSVLWAVRTTPTTSNKETPFFLVYGSEAMLPTELRHQSTRVQKYSDEDQEEQRYDDVNLLEEHRERVAVRAASYQQALRRYHEKRIRARMLSIGDYVLRRVQSQAGRNKLSPKWEGPYTITQVLRPGQRSKSLIFREEFSDDKAGG

SEQ ID NO: 25775 - protein, 897 aa, Oryza sativa
  unsure (1)..(897): unsure at all Xaa locations
  Clone ID: TF_OsC1528_1606.pep
MSDARSRRSVASSTRRQQDAELAAAEERRXATAHTAAAAARAARLAAAELAAARAEAEAAEDAARAAEVEVETLRSSINGSIAGDITADRELEELARGRARERAERWAAAHLHGGDGGPRDRAPADGNPDGRGLAGGRGLAGGSPEPARGPRRQHGSLSPDRRHGHHGVQMVVRDFGPGGGWPTLTKTNYIEWAAVMRVRLQVRHMWDAVRYGDVDYDEDRRALDALIAAVPPEMQFSLSQKRTAKEAXDAIAAARIGSDRARKSTLQALRKEWENLAFKPGEDVDDLQKMVQYGDDTYDEERAVEKLFRCVPEKYRQIARSIESLLDLSTMSIEEALGRLKVVDGDEPQPLSGPITIGGKLHLTQEQWEASQGDGRKGESSSPTGGHKPRKARGGVQLWWARRRAEGGARRGAQGVATGNHKPARDDACRNCDKLGHWAKDCRQPRRGQAHVARVEEEPALLLAHASIELPPAAPAAAAFLHLDEPKVLVSLCNGSSNDKADGWYLDTGATHHMTGRREFFTEFDSSVRGSIKFGDASGVEIKGVGFVTFTAKSGEHRLLTRVYYIPALRNSIISVGQLDENGSRVLVEDGLMRIWDRRRRLLAKVTRGTNRLYILSAQVAQPVCLAARRDDEAWQWHERFGHLHFEALKQLSAKEMVXGMLCLDHVEQLCDVCVVTKQRRLPFPQQTSFRANERLELVHGDLCGPVTPATPGGRRYFLLLVDDLSRYMWVMVLGSKGEATDAIRHEQAAAEAECGRKLCVLRTDNGGEFTAAEFASYCADEGIQRHYTTPYSPQXNGVVERRNQTVMGMARALLKQRGMPVIFWGEAVVTAAYILNRSPTKALDGRTPYEAWHGRKPAVSHLRVFGCLAFAKELGHIGNGQYRYRHSFCFAYAMK

SEQ ID NO: 25776 - protein, 496 aa, Oryza sativa
  unsure (1)..(496): unsure at all Xaa locations
  Clone ID: TF_OsC359_8244.pep
MDEVGGRWTFSRTNEGYTSCGPVVEMSWHRVGALLXGGSVLPACPGGSGRRXGIGSVLLSMARMGWKLCHVFRLYTVVMFNREKGKNVSGHASSNSSFQLNPPLASRELTRAHPWSIPSMLLSSQLPLVGSQDQNQYVFDRAFATQVNELPMPEEHVPFCHDCREQGHYALNCPWVYVKEAPSFGLAGQTSLNQPPRTKSSLQPSVQSEEPNEDNPLNPRKCFPPSLSHHVGSRTKQAKGKKSKNQKRKAPMRTEEEVRKMTITSTEWPPAGITIPRRQRGNTFRGARQLTQHLLSHGGRVSDSEGSDQVSSDVEDESPRHLGEEEMESKACTRCGEIGHVASRCLTLCPHCEEDHPPGECPTRKVTCFLCEGTNHVPKDCQLSVLLTKTAEIQRTTLRLSHQLVSSNSNLDDIIHSTNAPPAAPDSAINHSNNTFSTNHSLHRQPQQRIVIDRRSCVSPRPTPGRAKGNQPQEGDTKQKTVIRFNQQSEGSFPCE

SEQ ID NO: 25777 - protein, 480 aa, Oryza sativa; identical to SEQ ID NO: 18703
  Clone ID: TF_OsC359_7480.pep

SEQ ID NO: 25778 - protein, 1634 aa, Oryza sativa
  unsure (1)..(1634): unsure at all Xaa locations
  Clone ID: TF_OsC359_7526.pep
MHARAAAGGDVTANVIVVVPRGPVPTFLESLSLQEKILKSSKASKASHTDPKQPLSMLIPFKAIVSIQLLHLFSNMPRYKPEYLFGVEGFVQELRTMSFAIGFGTAPLYAQIPHDRHEEKCRDKVTLNSNSEDIPSVMFEAGGGNYIHACQEVARIAIGELRDRYSDQLADTEYRYHPRQPQGSDCGSYLETEGIENDATTRHLVEMLWAMDETRAEVVLAAQDREDRNRGKICRLEDKVDRLEKELAVLKGEAPPQKARVRLTARKRALFIPRYQLVPKVRVVEKEVTPALADPPVVNMVLTHSNGNGPNINNNNNNNGENPTLAQVLAQQAQLMNMMMQQLQNQQNQGNNHAPPQNKLAEFLRVRPPTFSSTTNPVEARDWLHAIEKKLDLLQCTDQEKVSFASHQLHGPASEWWDHFRLNRTTAEPITWLEFTAAFRKTHIPSGVVSLKKKEFRSLTQGSRTVTEYLHEFNRLARYAPEDVRTDEESQERFLEGLNDELSYQLMTGDYHDFQKLVDKAIRHEDKYNRMEQKKRRIAQFKAQQGNSQRPRLTLGPQSMPQGGSSSIVRLQRQFFNNNAGNNIRNQAPRPVAAPTQQQPAKREQGSKPGVCFNCGDPGHYSDKCPKPRRVKVVSAQSNSTAPASKAHVNHVAAAEDQGAPDVILGTFLVNSVPATVLFDSGATHSFLSMSFAGNHGMEVEDLRRPLMVSTPSNQALSLQRSPSVRIEIQEVPFLANLILLESKDLDVILGMDWLARYKSVIVCANRKVKSEPIASEEIPIVQEYPDVFPDDLPGMPPKRDIEFRIDLKDHTQRMCVDYRALNDVTIKNKYPLPRIGDLFDQLKGATVFSKIDLRSGYHQLRIKEEDIPKTTFTTRYGLFECTVMSFGLTNAPAFFMNLMNKFSKCEFWLSEVKFLGHVISAGGVAIDPSNVESVTNWKQPKTVSEIRSFLGLAGYYRRFIENFSKIAKPMTRLLQKDVKYKWSEECEQSFQELKNRLISAPILILPDPKKGFQVYCDASKLGLGCVLMQDGKVVAYASRQLRPHEKNYPTHDLELAAVVHALKIWRHYLFGTRTEVYTDHKSLKYIFTQPDLNMRQQRWLELIKDYDMGIHYHPGKANVVADALSRKGYCNATEGRQLPLELCKEFERLNLGIISRGFVAALEAKPTLIDQVREAQINDPDIQEIKKNMRRGKAIGFVEDGQGTVWLGERICVPDNKDLKDAILKEAHDTLYSIHPGSTKMYQDLKERFWWASMKREIAEYVAVCDVCQRVKAEHQKPAGLLQPLKIPEWKWEEIGMDFITGLPRTSSGHDSIWVIVDRLTKVAHFILVKTTYSGSRLAELYMARIVCLHGVPKKIVSDRGSQFTSKFWKKLQEEMGSKLNFSTAYHPQTDGQAERVNQILEDMLRACALDFGGSWDKNLPYAEFSYNSSYQASLQMAPYEALYNRKCRTPLLWDQTGERQVFRMDILREAEEKVKIIQERLRVAQSRHKSYADNRRRDLSFDEGDYVYLRVTPLRGVHRFHTRGKLAPRFVGPYKIVSRRGEVAYQLELPQSLAGVHNVFHVSQLKKCLRVPTEEANLEQIEVQEDLTYVEKPIRILEIDERRTRNRVIRFCKVXWSNHSEEESTWEREDEL

SEQ ID NO: 25779 - protein, 1439 aa, Oryza sativa
  unsure (1)..(1439): unsure at all Xaa locations
  Clone ID: TF_OsC359_8132.pep
MFEAGGGNYIHACQEVARIAIGELRDRYSDQLADTEYRYHPRQPQGSDRGSYLETERIENDATTRHLVEMLWAMDETRAETVLAAQDREDRNRGKICKLEDKVDRLEKELAALKGEAPPQKARIRLTARKRALFVPRYQMAPKVRVAEKEVTLALADPPVVNMVLTRSNGNSPNINNNNNNNGENPTLAQVLAQQAQLMNMMMQQLQNQQNQGNNHAPPQNKLAEFLRVRPPTFSSTTSPVEPGDWLHAIEKKLDLLQCTDQEKVSFASHQLHGPASEWWDHFRLNRTTVEPITWLEFTAAFRKMHIPSGVLSLKKKEFRSLTQGSRSVTEYLHEFNRLARYAPEDVRTDKQRQERFLEGLNDELSYPLMTGDYHDFQKLVDKAIRQEDNQRPHLTLGPQSLPQGGSSSVVRPQRQFFNNNAGNNIRNQAPRPVAAPTQQQPAKREQGSKPGVCFNCGDPGHYSDKCPKPRRVKVVPAQSNSTAPALKARVNHVAAAEAQGAPDVILESKDLDVILGMDWLARYKGVIDCANRKVTLTSNDGQVVIVHALSSESLRSSLNQMTLEEIPIVREYPDVFPDDLPGMPPKRDIEFRIDLVLGTIPIHKRPYRMAANELAEVKRQVDDLLQKGYIRPSSSPWGAPVIFVEKKDHTQRMCVDYRALNDVTIKNKYPLPRIDDLFDQLKGATVFSKIDLRSGYHQLRIKEEDIPKTAFTTRYGLFECTVISFGLTNAPAFFMNLMNKVFMEYLDKCVVVFIDDILIYSRTKEEHEEHLRLALKKLREHQLYAKFSKCEFWLSEVKFLGHVISAGGVAVDPSNVESVTNWKQPKTVSEIRSFLGLAGYYRRFIENFSKIAKPMTRLLQKDVKYKWSEEYEQSFQELKNRLILAPILILPDPKKSFQVYCDASKIGLGCVLMQDGKVVAYASRQLRPHEKNYPTHDLELTAVVHALKIWRHYLFGTRTEVYTDHKSLKYIFTQPDLNMRQRRWLELIKDYDMGIHYHPGKANVVADALSRKGYCNATEGRLPLELCKEFERLNLGIVSRGFVAALEAKPTLIDQVREAQINDPDIQEIKKNMRRGKAIGFLEDEQGTVWLGERICVPDNKDLKDAILREAHDTLYSIHPGSTKMYQDLKERFWWASMKREIAEYVAVCDVCQRVKAEHQKPAGLLQPLKIPEWKWEEIDGQTERVNKILEDMLRACALDFGGSWDKNLPYAEFSYNNSYQASLQMAPYEALYGRKCRTPLLWDQTGERQVFGMDILREAEEKVKIIQERLRVAQSRHKSYADNRRRDLSFEEGDHVYLRVTPLRGVHRFHTKGKLAPRFVGPYKIVSRRGEVAYQLELPQSLAGVHNVFHVSQLKKCLRVPTEEANLEXIEVQEDLTYVENPIRILEIDERRPRNRVIHFCKVQWSNLSEEESTWEREGELNRGFEFDSDRSLSSEP

SEQ ID NO: 25780 - protein, 588 aa, Oryza sativa; identical to SEQ ID NO: 18711
  Clone ID: TF_OsC359_8240.pep

SEQ ID NO: 25781 - protein, 440 aa, Oryza sativa; identical to SEQ ID NO: 18714
  Clone ID: TF_OsC359_6056.pep

SEQ ID NO: 25782 - protein, 2517 aa, Oryza sativa
  unsure (1)..(2517): unsure at all Xaa locations
  Clone ID: TF_OsC1517_1374.pep
MADTRSSAEDETKRPTEEETGRDGEMGSEPNLEERLKRLNMHGEEETDLDFSEELEGLIKDVRWLALFRVYTTKPFSHSALLNAMRNAWSSAQDISFKVMDSNLFMVQFQCLGDWNRMEGGPWIFRGAPVVLKEYDGFTNVFDYKLDKIPVWTRIHGVPDGLMKKRELAERVAKKVGEQPFTVIVDEGRINPVKYLRARVFLDLSPLVRFVPITIKERILYPRARANWLHGDRNTSFFQQFARRRRKIKGLIDENGCFQTDEDRMSIVYGYFQLFSAEVTQIDGSSLLDVQRKVTGDMNFGLLAPYTAEEVKNALFSIGDLKAPGPDGLHAVFYKRFWDMLESDLVKEVLDAINTMKIPDGWNDTTVVMIPKVDKPDRVTQFRPISLCNVVYKIISKMLANRLKCLLPEIISDQQSAFVPGRLITDNVLVAYECLHTMKKKKGRKVQYRVNFNGVLTEVIKPSRGLRQGDPLSPYLFLLVAEGLSSMLQGAENRGDLVGIRMVYTRNGSRATGEGSNGEERADGVHPSSDSGNGPPPLPENPTLAQVMAHQTQMMAAMMQQMQQQHQQMHQRMMQHVEQQHQQFGPPPPQSKLPEFLRVRPPTFSSTTNPMEANDWLHAIEKKLNRLQCNDQEKVAFATHQLQGPASAWWDNHMATRPPGTEVTWAEFCRSFWKAQVPDGVVAQKKREFRALHQGNRTVTEYLHEFNRLARYAPEDVRTDAEKQEKFMAGLDDELTNQLISGDYADFERLVDKAIRQEDQRNKMDRKRKAAQFRAPQGSHQRPRFAPGQQGGPTTMIVRQHRPFNPSNFPQGASGSQNHHGGQSNRGAASRPPMAPAQSGPPAQAKKETGAKPGSCFNCGELGHFADKCPKPRRAGPRFIQARVNHASAEEAQAAPEVVLGTFPVNSIPATVLFDSDLDVILGMDWLTKFKGVIDCANRTVTLINEKGEXVVYKSLVSPKKGVSLNQIEAEIPVDTVEKNSRKLEDIPIVCEYPEVFPEDLTTMPPKREIEFRIDLAPGTAPIYKRPYRMAANELAEVKKQVDEQLQKGYIRPSTSPLGAPVIFVEKKDKTKRMCVDYHALNEVTIKNKYPLPRIDDLFDQLKGAKVFSKIDLRSGYHQLRIREEDIPKTAFTTRYGLYECTVMSFGLTNAPAFFMNLMNKVFMEFLDKFVVVFIDDILIYSKSEEKHEQHFRLVLEKLREHQLYAKFSKCDFWLTEVKFLGHVITAQGYYRRFIENFSRIARPMTQLLKKDEKFKWTAECDKSFEELKKKLVSAPVLILPDPMKDFQVYCDASRHGLGCVLMQEGRVVAYASRQLRPHEGNYPTHDLELAAVVHALKIWRHYLIGNRCEVYTDHKSLKYIFTQPDLNLRQRRWLELIKDYDMSIHYHPGKANVVADALSRKSYCTALCIEGIRSGGTAYAQANDSEIAELKKNMSVGKARDFHEDEHGTIWLGERLCVPDDKELKDLILTEAHQTQYSIHPGSTKMYQDLKEKFWWVSMRREIAEFVALCDVCQRVKAEHQRPAGLLQPLQIPEWKWEEIGMDFITGLPRTSSGHESIWVVVDRLTKVNLERHGLVPVGTSSGRDSRPRIHKYRVVPSTLHQCLKFLDGSGTQQRIVGNLSPYTTQESHHADAKYYFPVDDSDQTLGRTTPAADLLIAPGRTPTPEIRRLITAGPLAGATGSSTRNRRNNARHHSFMSAQYENKPYTGAGMSGVVVPVEDTALTSPTFTPLLLKAGTSSRTPTTQTSVARVPVDLQAPSSKEILLTRNVAMVQGRKLLDISNDAPTVITIRARNNSRRSGYHYEGRCQINSFIGKGWDQRSTKQANAAATGYIYASMITEQEGELEDPFMLDELKEEKQPTIDDLVEINLGTMDDPRPTFVSAALSAEEQESYRSFLMEYRDCFAWTYKEMPGLDPRVATHKLAIDPQFRPVKQPPRRLRPEFQDQVIAEVDRLITAGFIKESIVAELFKKFAKRAQNEFSCTLVKIRSDNGSEYKNTNIKDYCDDLGIKHELSATYSPQQNGVVERKNHTLVEMASYASNSKAYRVYNKNKGIVEETVDVQFDETNGSQEGHENLDDVGDEGLMRAMKNMSIGDVKPIEVEDKPSTSTQGEPSTSAAPSQAQVEVEEEKAQDPPMPPRIHTALSKNHPIDQVLGDISKGVQTRSHVVSICEHYSFVFCFEPKHIDEALYDPDWINAMHEELSNFVRNKVWTLVERPRDHNAIGTKWVFRSKQDENGLVVRNKISLVAQGFTQVEAIRIILAFASCFDIELFQIDVKSAFLNGEIAELVFVEQPPGFEDPKNPNHDFKTGKVDTTLFTNIIGDDFFVCQIYVDDIIFGSTNEVFCKEFGGDMMSREFEMSMIGKLSFFLELHIKQLKDGTFMSQTKYIKNQLKRFGLEDAKPIKTPMATNEHRDLDEGGKPIDLKLYRSMIGSLLYLTASRSDIMFNVCKCARFQAAPKECHLVAVKRILRYLKYSSIIGLRYPKELLAWAKEKRPSIRNAWMIEEVDWGPNKDIL

SEQ ID NO: 25783 - protein, 1292 aa, Oryza sativa
  unsure (1)..(1292): unsure at all Xaa locations
  Clone ID: TF_OsC1713_5398.pep
MVAFPSLEKFIDEAERQPITWEEFTEGFKKTHIPVGVVALKKREFRAQEKFLEGLKDELSVTLISHDYVDFQQLVDKAIRLEDKKNRMDNRKRKMIVFQEAQGSSQRQRITFNPSNFPQGASGSQNHHGGQSNRGAAPRPPMAPAQSGPPAQAKKETGAKPGSCFNCGELGHFADKCPKPRRAGPRFIQARVNHASAEEAQAAPEVVLGTFSINSIPATVLFDSGATHSFISKKFVGMHGLIREELSTPMRVHTPGNSSTSVQFSPSITIEIQRSPFLANLILLESKDLDVILGMDWLTKFKGVIDCANRTVTLTNEKGETVVYKSLVSPKQGVSLNQMKLEDIPIVCEYPEVFLEDLTTMPPKREIXFRIDLAPGTAPIYKRPYRMAANELAEVKKQVDEQLQKGYIRPSTSPWGAPVIFVEKKDKTKRMCVDYRALNEVTIKNKYPLPRIDDLFDQLKGAKVFSKIDLRSGYHQLRIREEDIPKTAFTTRYGLYECTVMSFGLTNAPAFFMNLMNKVLMEFLDKFVVVFIDDILIYSTSEEEHEQHLRLVLEKLKEHQLYAKFSKCDFWLTEVKFLGHVITAQGVAVDPSNVESVTKWTPPKTVSQIRSFLGLAGYFKWTTECDKSFEELKKKLVSAPVLILPDQMKDFQVYCDASRHGLGCVLMQEGIVVAYASRQLRPHEGNYPTHDLELAAVVHALKIWRHYLIGNRCEVYTDHKSLKYIFTQPDLNLRQRRWLELIKDYDMSIHYHPGKANVVADALSRKSYCTALCIEGMCEELWQEFEHLNVGIVEHGFVAALEARPTLVDQVRAAQVNDSEIAELKKNMRVGKARDFHEDEHGTIWLGERLCVPDDKELKDLILTEAHQTQYSIHPGSTKMYQDLKEKFWWVSMRREIAEFVALCDVCQRVKAEHQRPAGLLQPLQILEWKWEEIGMDFITGLPRTSSGHDSIWVVVDRLTKVAHFIPVHTTYTGKRLAELYLSRIMCLHGVPKKIVSDRGSQFTSKFWQKLQEELGTRLNFSTAYHPQTDGQTERVNQILEDMLRACALDFGGAWDKSLPYAEFSYNNSYQASLQMAPFEALYGRKCRTPLFWDQTGERQLFGTEVLAEAEEKVRIIRERLRIAQSRQKSYADNRRRELTFEAGDYVYLRVTPLRGVHRFQTKGKLAPRFVGPYKILERRGEVAYQLELPSNMIGIHDVFHVSQLKKCLRVPEEQADSKHIDIQEDLTYVEKPIRILDTSERRTRNKVNRFCRVQWSHHSEEEATWEREDELKAAHPHLFTSSSESRGRDSV

SEQ ID NO: 25784 - protein, 1941 aa, Oryza sativa
  Clone ID: TF_OsC1713_5434.pep
MAAELVGEGDGGRRRRSGVEAAGSNGWRCGGGGCRWIGQAAVGWRRRRRLVVGGEAPDLRPPNVLRLAVVRQERRRRLAIGTRRRKWPTVRGEAAVAGSVPCKNERQQLQAGAAAAAAAGGISIEYPFCVEPGCYHPGFNLTCNHSYSPPRLFLGDGTVQVLEIAIPQATVRINSGRMVFNSTGNHAVNRSLLDQVGRPYFVAASNRIALLSCNARVDVRAAGRNNNKTSTKLLSSCTAICPTDDGGGATTILDIGPEGPCSGIGCCETSMLLAGSSTAAYSIQVQNLQEQAVVLNRTDDLVYLVDERFNYTLDMSFGYSSPEELPARLDWYINSSSACPLPASAPECRSAHSYCDSTYDNKAYICRCSEGYEGNPYVPDGCHDTDECSSGYCSYGECRNTPGSFICNCPRGYEGNPSPKDGCKARDLGLRIGLGVGGGTILLLLALSAPFISSKMKLRKMKRMKETFFRQNHGLLLGRLVSQNADIGQRMIMTLQELEKATDNFDKSREIGGGGHGVVYKGILDLQVVAIKKSRIVVKREIDDFINEVAILSQVNHRNVVKLLGCCLETEVPLLVYEFISNGSLDHHLHVDGPISLPWDDRIRIALEVARALTYLHSATTIPIFHRDIKACNILLDENLISKNCSLEKGPCIGLITVKVLCYILPRFIDKMSYKATRNRMPKPEGEIKATNLRAFNSSSVEIPSGVDFELGNTTTGTVSSSLPWDDRLRIAFEVVRALSYLHSAASMPIFHRDIKYSNILLDDSLTAKLLTRKKPIGGTFDNGDGLVSHFVSLVSKGNLYDIIDSQVREEEDGEVQEVATLAATCTKFKGEERPTMREVEMENDLQENRSAMKKCPDLKIERRFLGSARRDYSLFVNIYFTFTNMSTTGDNNNTGDKEKEPLVNTNGGNTASNSSGGPFSGYNLLTLLPFVLRFLQLFIAMSTLRSLIYVDAYSILSMLMLYTSSTITGSTQITNVMFIILLFWIKICRIMTKFPTIQKPDRSFSVVGFAATLKPHAFDGSNYKRWKARALLWLTAMQCFYVSRGKRSEPPLSPEEEAKFEASDCLFRGALISVLADNIVDVYIHMPLGKDMWDALEAKFRVSDAGSELYVMEQFYDYKMVDDRSVVEQAHEIQMLAKELENNNCELPDKFVAGGIIAKLPPSWSDFTISLKHKRQEFNVTDLIGSLGVEEKARAKDNWGKNIEGNSSANLATTNFKKKDKGKGKGDCFVCDKPGHWAKNCPDRKDKKSANMVISEGGGTSGYGNFLPTVLSVFHSPDWWVDTGANIHVGRGSSLLMGNESLAAVHGVGTVDLKFTSGKTVQLKNVQHVPSIKKNLVSGSLLCRDGFRLVFESNKCVVSKYGTFIGKGYDSEGSKCHTCVQSKQPRKPHKASEARNLAPLELVHSDLCEMNGVLTKGGKKYFMTLIDDCTRYCYVYLLKTKDEALHYFKIYKAEEWWGEAIFTACHVLNKIPVKHKEVTLFKEWERKKLNLSYLRTWGCLAKNEFPMKNTPSTSSQEPVLPHEHLAPIKHNDQTPEENPEEVNIVATRKSKRQRTAKSFGDDYIVYLVDDTPRTIEEAYSSPDADYWKEAVRSEMDSIMSNGTWEVVERPYGCKPVGCKWVFKKKLRPDGTIENLNVIEEVKDFLSKSFEIKDLEVADVILNIKLLRGDEGGITLVQSHYVDKVLSRFGYSDCKPAPTPYDSNVLLRKNGRIARDQLRYSQIIGSLMYLASATRPDISFAVSKLSRFVSNPGDDHCQALERVMRYLKGTISYGIHYTGYPKILEGYSDSNWISDADEIKATSGYVFTLGGGAVSWKSCKQTILTRSTMEAELTALDTATVKAEWLRELLMDLPVVEKPVPAILMNCDNQTVIIKVNSSKDNMKSSRHVKRRLKSVRKQKNSGVIALDYVQTAKNLADQFTKGLPRNVIDSASREMGLRPT

SEQ ID NO: 25785 - protein, 999 aa, Oryza sativa; identical to SEQ ID NO: 18829
  Clone ID: TF_OsC359_5540.pep

SEQ ID NO: 25786 - protein, 1366 aa, Oryza sativa
  Clone ID: TF_OsC359_5554.pep
MVYTRTGTRTTGEGSNGEERADGVHPSSDSGNGPPPLPENPTLAQVMAHQTQMMAAMMQQMQQQHQQMHQRMMQHAEQQHQQFGPPPPQSKLPEFLRVRPPTFSSTTNPMEANDWLHAIEKKLNLLQCNDQEKVAFATHQLQGPASAWWDNHMATRPPGTEVTWAEFCRSFRKAQVPDGVVAQKKREFRALHQGNRTVTEYLHEFNRLARYAPEDVRTDAEKQEKFMAGLDDELTNQLISGDYADFERLVDKAIRQEDQRNKMDRKRKAAQFRAPQGSHQRPRFTPGQQGGPTTMIVRQHRPFNPSNFPQGASGSQNHHGGQSNRGAAPRPPMAPAQSSPPAQAKKETGAKPGSCFNCGELGHFADKCPKPRRAGPRFIQARVNHASAEEAQAAPEVVLGTFPVNSIPATVLFDSGATHSFISKKFVGMYGLRKEELSTPMRVHTPGNSSTSVSFSPSVLIEIQRSPFLANLILLESKDLDVILGMDWLTKFKGVIDCANRTVTLTNEKGETVVYKSPDSPKQGVSLNQIEAEIPVDTVEKNLKKLEDIPIASEYPEVFPEDLTTMPPKREIEFRIDLAPGTAPIYKRPYRMAVNELAEVKKQVDEQLQKGYIRPSTSPWGAPVIFVEKRDKTKRMCVDYRALNEVTIKNKYPLPRIDDLFDQLKGAKVFSKIDMRSGYHQLRIREEDIPKTAFTTRYGLYECTVMSFGLTNAPAFFMNLMNKVFMEFLDKFVVVFIDDILIYSKSEEEHEQHLRLVLEKLKEHQLYAKFSKCDFWLTEVKFLGHVITAQGVAVDPSNVESVTKWTPPKTVSQIRSFLGLAGYYRRFIENFSRIARPMTQLLKKDEKFKWTAECDKSFEELKKKLVSAPVLILPDQMKDFQVYCDASRHGLGCVLMQEGRVVASGSYFEDLEARPTLVDQVRAAQVNDSEIAELKKNMRVGKARDFHEDEHGTIWLGERLCVPDDKELKDLILTEAHQTQYSIHPGSTKMYQDLKEKFLWVSMRREIAEFVALCDVCQRVKAEHQRPAAWDKSLPYAEFSYNNSYQASLQMAPFEALYGRKCRTPLFWDQTGERQLFGTEVLAEAEEKVRIIRERLRIAQSRQKSYADNRRRELTFEAGDYVYLRVTPLRGVHRFQTKGKLVPRFVGPYKILERRGEVAYQLELPSNMIGIHDVFHVSQLKKCLRVPEEQADSEHIDIQEDLTYVEKPAEAQPGRPAASSLGVADRWGPPVGSFPHLPPISLAPSRPQPPPRPRLRLLRATSTTPARRAVAAVGFAWPRSTPSTPPPSRAPRSSSARRRRPPVACRRRSPSSSSAPATLGEASLPSFPLPLLLVPRRRFESRAVAFGRRRLPCRRSPPSSAACRRC

SEQ ID NO: 25787 - protein, 1802 aa, Oryza sativa; identical to SEQ ID NO: 18810
  Clone ID: TF_OsC359_5601.pep

SEQ ID NO: 25788 - protein, 947 aa, Oryza sativa; identical to SEQ ID NO: 18827
  Clone ID: TF_OsC359_5641.pep

SEQ ID NO: 25789 - protein, 1486 aa, Oryza sativa; identical to SEQ ID NO: 18804
  Clone ID: TF_OsC359_5694.pep

SEQ ID NO: 25790 - protein, 1473 aa, Oryza sativa; identical to SEQ ID NO: 18725
  Clone ID: TF_OsC359_5786.pep

SEQ ID NO: 25791 - protein, 1571 aa, Oryza sativa; identical to SEQ ID NO: 18724
  Clone ID: TF_OsC359_5805.pep

SEQ ID NO: 25792 - protein, 1636 aa, Oryza sativa
  unsure (1)..(1636): unsure at all Xaa locations
  Clone ID: TF_OsC359_5936.pep
MGCKMAGHPPNHCGEGMIDFVAELARMTLVVGYPNAPEYTTVPPLSGELPHRVRLEVHGYVGTCLANMVVEASGGTADHACQEAAYLMMARLRERHNYIFHDTAYRFHPRRASGDDVSTFRPTAGENDTTFGHMCAVMRGLDRMHSDLHKATKALNDGKLMRIVALKDEIARLKRENAQLKGLPAPGGVRIRTTPRKTTTKPVRIQLAPRNPPPPAAPAVPAAPAPAPVHVLAPASALSFAPASAARGPASGNGGCLFGMVYTRNGSRATGEGSNGEERTEGVHPNSNSGNGPPPLPENPTLAQVMAHQTQMIAAMMQQMQQQHQQMHQRMLQHAEQQHQQFGPPPPQSKLPEFLRVRPPTFSSTTNPMEANDWLHAIEKKLNLLQCNDQEKVAFATHQLQGPASAWWDNHMATRPPGTEVTWEEFCRSFRKAQVPDGVVAQKKREFRALHQGNRTVTEYLHEFNGLARYAPEDVRTDAEKQEKFMAGLDDELTNQLISGDYADFERLMDRKRKAALFRAPQGSHQRPRFTPGQQGGPTTMIVRQYRPFNPSNFPQGASGSQNHHGGQPSRGAAPRPPVAPAQSGPPAQAKKETGAKPGSCFNCGELGHFADKCPKPRRAGPRFIQARVNHASAEEAQATPEVVLGTFPVNSIPATILFDSGATHSFISKKFVGMHGLRKEELSTPMRVHTPGNSSTSVSFSPSVLIEIQRSPFLANLILLESKDLDVILGMDWLTKFKGVIDCANRTVTLTNEKGETVVYKSPDSPKRGVSLNQIETKIPEDTVEKNLRKLEDIPIVCEYPEVFPEDLTTMPPKREIEFRIDLAPGTAPIYKRPYRMAANELAEVKKQVDEQLQKGYIRPSTSPWGAPIIFVEKKDKTKRMCVDYRALNEVTIKNKYPLPRIDDLFEFDQLKGAKVFSKIDLRSGYHQLRIREEDIPKTAFTTRYGLYECTVMSFGLTNAPAFFMNLMNKVFMEFLDKFVVVFIDDILIYSKSEEEHEQHLRLVLKKLKEHQLTPCSATQGVVVDLSNVESVTKWTPPKTVSQIRSFLGLAGYYRRFIENFSRIARPMTQLLKKDEKFKWTAECDKSFEELKKKLVSAPVLILPDQMKDFQVYCDASRHGLGCVLMQEGRVVAYASRQLRPHEGNYPTHDLELAAVVHVLKIWRHYLIGNRCEVYTDHKSLKYIFTQPDLNLRQRRWLELIKDYDMSIHYHPGKANVVADALSRKSYCTALCIEGMCEELRQEFEHLNVGIVEHGQSRVNDSEIAELKKNMRVGKARDFHEDEHGTIWLGERLCVPDDKELKDLILTEAHQTQYSIHPGSTKMYQDLKEKFWWVSMRREIAEFVALCDVCQRVKAEHQRPAGLLQPLQIPEWKWEEIGMDFITGLPRTSSGHDSIWVVVDRLTKVAHFIPVHTTYTGKSTAYHPQTDGQTERVNQILEDMLRACALDFGGAWDKSLPYAEFSYNNSYQASLQMAPFEALYGRKCRTPLFWDQTGERQLFGTEVLAEAEEKVRIIRERLRIAQSRQKSYADNRRRELTFEAGDYVYLRVTPLRGVHRFQNKGKLAPRFVGPYKILERRGEVAYQLELPSNMIGIHDVFHVSQLKKCLRVPEEQADSEHIDIQEXDLTYVEKPVRIL

SEQ ID NO: 25793 - protein, 1780 aa, Oryza sativa
  unsure (1)..(1780): unsure at all Xaa locations
  Clone ID: TF_OsC359_6008.pep
MAGHPPNHRGEGMIDFVAELARMTLVVGYPNAPEYTTIPPLSGELPHRVRLEVHGYVGTCLANMAVEASGGTADHACQEAAYLMMARLRERHDYIFHDTAYRYHPRRAHGDGVSSFRPTAGENDTTFGHMCAVMRGLDRMHSDLHKATKALNDGKLMRIVALKDEIARLKKENAQLKGLPAPGGVRIRTTPRKRTTAPVRIQLAPRNPPPAAAAPAVPPAPAPAPAPAPAPAPAFTLSFAPASAARGPASGTGGCPLQMVYTRTGSRATGEGSNGEERADGVHPNSESGNGPPPLPENPTLAQVMAHQTQMMAAMMQQMQQQHQQMHQRMMQHAEQQHQQFGPPPPQSKLPEFLRVRLPTFSSTTNPMEANDWLHAIEKKLNLLQCNDQEKVAFATHQLQGPASAWWDNHMATRPPGTEVTWAEFCRSFRKAQVPDGVVAQKKREFRALHQGNRTVTEYLHEFNRLARYAPEDVRTDAEKQEKFMAGLDDELTNQLISGDYVDFERLVDKAIRQEDQRNKMDRKRKAAQFRAPQGSHQRPRFTPGQQGGPTTMIVRQHRPFNPSNFHQGTSGSQNHHGSQPNRGTAPRPPMAPAQSGQPAQAKKETGAKPGSCFNCGELGHFADKCPKPRRAGPRFIQARVNHASAEEAQAAPEVVLGTFPVNSIPATVLFDSGATHSFISKKFVGMHGLIREELSTPMRVHTPGNSSTSVQFSPSITIEIQRSPFLANLILLESKDLDVILGMDWLTKFKGVIDCASRTVTLTNEKGETVVYKSLVSPKKGVSLNQIETEIPVDTVEKNLRKLEDIPIVCEYPEVFPEDLTTMPPKREIEFRIDLAPGTAPIYKRPYRMAANELAEVKKQVDEQLQKGYIRPSTSPWGAPVIFVEKKDKTKRMCVDYRALNEVTIKNKYPLPRIDDLFDQLKGAKVFSKIDLRSGYHQLRIREEDIPKTAFTTRYGLYECTVMSFGLTNAPAFFMNLMNKVFMEFLDKFVVVFIDDILIYSKSGEEHEQHLRLVLEKLKEHQLYAKFSKCDFWLTEVKFLGHVITTQGVAVDPSNVESVTKWTPPKTVSQIRSFLGLAGYYRRFIENFSRIARPMTQLLKKDEKFKWTAECDKSFEELKKKLVSAPVLILPDPTKDFQVYCDASRHGLGCVLMQEGRVVAYASRQLRPHEGNYPTHDLELAAVVHALKIWRHYLIGNRCEVYTDHKSLKYIFTQPDLNLRQRRWLELIKDYDMSIHYHPGKANVVADALSRKSYCTALCIEGMCEELRQEFEHLNVGIVEHGFVAALEARPTLVDQVRAAQVNDPEIAELKKNMRVGKARDFHEDEHGTIWMGERLCVPDDKELKDLILTEAHHTQYSIHPGSTKMYQDLKEKFWWVSMRREIAEFVALCDVCQRVKAEHQRPAGLLQPLQIPEWKWEEIGMDFITGLPRTSSGHDSIWVVVDRLTKVAHFIPVHTTYTGKRLAELYLARIMCLHGVPRKIVSDRGSQFTSKFWQKLQEELGTRLNFSTAYHPQTDGQTERVNQILEDMLRACALDFGGAWDKSLPYAEFSYNNSYQASLQMAPFEALYGRKCRXTPLFWDQTGERQLFGTEVLAEAEEKVRIIRERLRIAQSRQKSYADNRRRELIFEAGDYVYLRVTPLRGVHRFQTKGXLAPRFVGPYKILERRGEVAYQLELPSNMIGIHDVFHVSQLKKCLRVPEEQADSEHIDIQEDLTYVEKPVRILDTSERRTRNKVTRFCRVQWSHHSEEEATWEREDELKAAHPHLFTSSSESRGRDSV

SEQ ID NO: 25794 - protein, 1806 aa, Oryza sativa
  Clone ID: TF_OsC359_6289.pep
MDINMVCMLPMEFCAMDEAEVAQFSLDPKDAVFEKPDESNRHMKPLYLKGHVDGKPVSRMLVDGGAAVNLMPYSLFKKLGREDDELKKTNMILNGFNGEPTEAKGIFSAELTVGNKTVTMGWKLCHVFRPYTVVMAGHPPNHRGEGMIDFVAELARMTLVVGYPNAPEYTTIPPLSGELPHRVRLEVHGYVGTCLANMAVEASGGTADHACQEAAYLMMARLRERHNYIFHDTAYRFHPRRAHGDDVSSFRPTAGENDTTFGHMCTVMRGLDRMHSDLHKATKALNDGKLMRIVALKDEIARLKKENAQLKGLPAPGGVRIRTTPRKRTTAPVRIQLAPRNPVPTAAPAAPPVPPAAPAVPAAPAPAPAFDLSFALASAARGPASGTGGCLFGMVYTRTGNRTTGEGSNGEERVDGVHPNSDSGNGPPPLPENPTLAQVMAHQTQMMAAMMQQMQQQHQQMHQRMMQHAEQQHQQFGPPPPQSKLPEFLREKVAFATHQLQGPASAWWDNHMATRPPGTEVTWAEFCRSFRKAQVPDGVVAQKKREFRALHQGNRTVTEYLHEFNRLARYAPEDVRTDAEKQEKFMAGLDDELTNQLISGDYADFERLVDKAIRQEDQRNKMDRKRKAAQFRAPQGSHQRPRFTPGQQGGPTTMIVRQHRPFNSSNFHQGSSGSQNHHGGQPNRGAAPRPPMAPAQSGPPAQAKKETGAKPGSCFNCGELGHFADKCPKPRRAGPRFIQARVNHASAEEAQTAPEVVLVLFDSGATHSFISKKFVGRYGLRKEELSTPMRVHTPRNSSTSVSFSPSVLIEIQRSPFLANLILLESKDLDVILGMDWLTKFKGVIDCANRTVTLTNEKGETVVYKSPDSPKQGVSLNQIEAEIPVDTVEKNLRKLEDIPIVCEYPEVFPEDLTTMPPKREIEFRIDLAPGTAPIYKRPYRMAANELAEVKKQVDEQLQKGYIRPSTSPWGAPVIFVEKKDKTKRMCVDYRALNEVTIKNKYPLPRIDDLFDQLKGARVFSKIDLRSGYHQLRIREEDIPKTAFTTRYGLYECTVMSFGLTNAPAFFMNLMNKVFMEFLDKFIVVFIDDILIYSKSEEEHEQHLRLVLEKLKEHQLYAKFSKCDFWLTEVKFLGHVITAQGVAVDPSNVESVTKWTPPKTVSQIRSFLGLAGYYRRFIENFSRIARPMTQLLKKDEKFKWTAECDKSFEELKKKLVSAPVLILPDPTKDFQVYCDASRHGLGCVLMQEGRVVAYASRQLRPHEGNYPTHDLELAAVVHALKIWRHYLIGNRCEVYTDHKNYDMSIHYHPGKANVVADALSRKSYCTALCTEGMCEELRQEFEHLNVGIVEHGFVAALEARPTLVDQVRAAQVNDSEIVELKKNMRVGKARDFHEDEHGTIRMGERLCVPDDKELKDLILTEAHQTQYSIHPGSTKMYQDLKEKFWWVSMRREIAEFVALCDVCQRVKAEHQRPAGLLQPLQIPEWKWEEIGMDFITGLPRTSSGHDSIWVVVDRLTKVAHFIPVHTTYTGKRLAELYLARIMCLHGVPKKIVSNRGSQFTSKFWQILQEELGTRLNFSTAYHPQTDGQTERVNQILEDMLRACALDFGGAWDKSLPYAEFSYNNSYQASLQMAPFEALYGRKCRTPLFWDQTGERQLFGIEVLAEAEQKVRIIRERLRIAQSRQKSYADNRRRELTFEAGDYVYLRVTPLRGVHRFQTKGKLAPRFVGPYKILERRGEVAYQLELPSNMIGIHDVFHVSQLKKCLRVPEEQADSEHIDIQEDLTYVEKPVRILDTSERRTRNKVTRFC

SEQ ID NO: 25795 - protein, 1816 aa, Oryza sativa
  unsure (1)..(1816): unsure at all Xaa locations
  Clone ID: TF_OsC359_6355.pep
MAGHPPNHRGEGMIDFVAELARMTLVVGYPDAPEYTTIPPLSGELPHRVRLEVHGYVGTCLANMAVEASGGTADHACQEAAYLMMARLRERHNYIFHDTAYRYHPSRANGDGVSSFRPTAGENDTTFGHMCAVMRGLDRMHSDLHKATKALNDGKLMRIVALKDEIARLKKENAQLKGLPAPGGVRIRTTPRKTTTAPVRIQLAPRNPPPAAAPAAPPVLPAVPAAPAPAPAPAPASALSFAPASAARGPASGTGGWLSATPSGSSDLSSSSSSGSQSGSGETYLPGSRSRSEGPXVYTRTGNRTTGEGSNGEERVDGVHPNSDSGNGPPPLPENPTLAQVMAHQTQMMAAMMQQMQQQHQQMHQRMMQHVEQQHQHFGPPPPQSKLPEFLGVRPPTFSSTTNPMEANDWLHAIEKKLNLLQCNDQEKVAFATHQLQGPASAWWDNHMATRPPGTEVTWAEFCRSFRKAQVPDGVVAQKKREFRALHQGNRTVTEYLHEFNRLXRYAPXDVRTDPDKQEKFMAGLDDELTNQLISGYYADFERLVDKAIRQEDQRNKMDRKRKAAQFRAHQGSHQRPRFTPGQQGGPTTMIVRQHRPFNPSNFYQGTSDSQNHHGGQPNRGAAPRPPVASAQSGQPAQAKKETEAKPGSCFNCGELGHFADKCPKPRRAGPRFIQARVNHASAEEAQAAPEVVLGTFPVNSIPATVLFDSGATHSFISKKFVGMHGLIREELSTPMRVHTPGNSSTSVQFSPSITIEIQRSPVLANLILLESKDLDVILGMDWLTKFKGVIDCANRTVTLTNEKGETVVYKSLVSPKKGVSLNQIETEIPVDTVEKNLRKLDDIPIVCEYPEVFPEDLTTMPPKREIEFRIDLAPGTAPIYKRPYRMAANELTEVKKQVDEQLQKGYIRPSTSPWGAPVIFVEKKDKTKRMCVDYRALNEVTIKNKYPLPRIDDLFDQLKGAKVFSKIDLRSGYHQLRIREEDIPKTAFTTRYGLYECTVMSFGLTNAPAFFMNLMNKVFIEFLDKFVVVFIDDILIYSKSEEEHEQHLRLVLEKLKEHQLYAKFSKCDFWLTEVKFLGHVITAQGVAVDPSNVESVTKWTPPKTVSQIRSFLGLAGYYRRFIGNFSRIARPMTQLLKKDEKFKWTAECDKSFEELKKKLVSAPVLILPDQMKDFQVYCDASRHGLGCVLMQEGRVVAYASRQLRPHEGNYPTHDLELAAVVHALKIWRHYLIGNRCEVYTDHKSLKYIFTQPDLNFRQRRWLELIKDYDMSIHYHPGKANVVADALSRKSYCTALCIESMCEELRQEFEHLNIGIVEHGFVAALEARPTLVDQVRAAQVNDPEIAELKKNMRVGKARDFLKDEHGTIWMGERLCVPDDKELKDLILTEAHQTQYSIHPGSTKMYQDLKEKFWWVSMRREIAEFVALCDVCQRVKAEHQRPTGLLQPLQIPEWKWEEIGMDFITGLPRTSSGHDSIXVVVDRLTKVAHFIPVHTTYTGKRLAELYLSRIMCLHGVLKKIVSDRGSQFTSKFWQKLQEELGTRLNFSTAYHPQTDGQTERVNQILEDMLRACALDFGGAWDKSLPYAEFSYNNSYQASLQMAPFEALYGRKCRTPLFWDQTGERQLFGTEVLAEAEEKVRIIRERLRIAQSRQKSYADNRRRELTFEAGDHVYLRVTPLRGVHRFQTKGKLAPRFVGPYKILERRGEVAYQLELPSNMIGIHDVFHVSQLKKCLRVPEEQADSEHIDIQEDLTYVEKPVRILDTSERRTRNKVTRFCRVQWSHHSEEEATWEREDELKAAHPHLFTSSSESRGRDSV

SEQ ID NO: 25796 - protein, 1360 aa, Oryza sativa; identical to SEQ ID NO: 18763
  Clone ID: TF_OsC359_6498.pep

SEQ ID NO: 25797 - protein, 186 aa, Oryza sativa
  Clone ID: TF_OsC359_6508.pep
STKETFVWTKGFRYVFFGSKACTRCGEIGHVASMCLTLCPHCEEDHPPGECPIRKVTCFLCEGTNHVPKDCQLSVLLTKTAEIQRTTLRLSRQLVSSNNNIDDIIHSTNAPLAPPNSAINHGNNTFSTNHSLHRQPQQRIVVDGRSCVSPRPTPGQAKGNQPPEGDTKQKTVIRFNQQSEGSFSCE

SEQ ID NO: 25798 - protein, 1129 aa, Oryza sativa
  unsure (1)..(1129): unsure at all Xaa locations
  Clone ID: TF_OsC359_6569.pep
MIVRQHRPFNPSNFHQGTSGSQNHHGGQPNRGAAPRPPMAPAQSGQPAQAKKETGAKPGSCFNCGELGHFADKCPKPRRAGPRFIQARVNHASAEEAQAAPEVVLGTFPVNSIPATVLFDSGATHSFISKKFVGMHGLIREELSTPMRVHTPGNSSTSVQFSPSITIEIQRSPFLANLILLESKDLDVILGMDWLTKFKGVIDCANRTVTLTNEKGETXGTAPIYKRPYRMAAXNELAEVKKQVDEQLQKGYIRPSTSPWGAPVIFVDKKDKTKRMCVDYRALNEVTIKNKYPLPRIDDLFDQLKGAKVFYKIDLRSGYHHLRIREEDIPKTAFTTRYGLYECTVMSFGLTNAPAFFMNLMNKVFMEFLDKFVVVFIDDILIYSKSEEEHEQHLRLPQGVAVDPSNVESVTKWTPPKTVSQIRSFLGLAGYYRRFIENFSRIARPMTQLLKKDEKFKWTAECDKNFEELKRKLVSAPVLILPDQTKDFQVYCDASRHGLGCVLMQEGRVVAYASRQLRPHEGNYPTHDLELAAVVHALKIWRHYLIGNRCEVYTDHKSLKYIFTQPDLNLRQRRWLELIKDYDMSIHYHPGKANVVADALSRKSYCTALCIEDMCEELRQELEHLNMGIVEHGFVAALEARPTLVDQVRAAQVNDPEIAELKKNMRVGKARDFLEDEHGTIWMGERLCVPDDKELKDLILTEAHQTQYSIHPGSTKMYQDLKEKFWWVSMRREIAEFVALCDVCQRVKAEHQRPAGLLQPLQIPEWKWEEIGMDFITGLPRTSSGHDSIWVVVDRLTKVAHFIPVHTTYTGKRLAELYLARIMCLHGVPKKIVSDRGSQFTSKFWQKLQEELGTRLNFSTAYHPQTDGQTERVNQILEDMLRACALDFGGAWDKSLPYAEFSYNNSYQASLQMAPFEALYGRKCRTPLFWDQTGERQLFGTEVLAEAEEKVRIIRERLRIAQSRQKSYADNRRRELTFEAGDYVYLRVTPLRGVHRFQTKGKLAPRFVGPYKILERRGEVAYQLELPSNMIGIHDVFHVSQLKKCLRVPEEQADSEHIDIQEDLTYVEKPVRILDTSERRTRNKVTRFCRVQWSHHSEEEATWEREDELKAAHPHLFTSSSESRGRDSV

SEQ ID NO: 25799 - protein, 1799 aa, Oryza sativa
  unsure (1)..(1799): unsure at all Xaa locations
  Clone ID: TF_OsC359_6570.pep
MAGHPPNHHGEGMIDFVAELARMTLVVGYPNAPEYTTVPPLSGELPHRVRLEVHGYVGTCLANMVVEASGGTADHACQEAAYLMMARLRECHNYIFHDTAYRFHPRRASGDDVSTFRPIAGENDTTFDHMCAVMRGMDRMHLDLHKTSKALNDGKLMRIVVLKDEIARLKRENAQLKGLPAPGGVRIHTTPRKSTTAPVRIQLAPRNPPPPAVPAAPPVPPAAPAVPAAPAPAPAHVPVSAPASALSFAPATAVRGPASGNGGXLICQAPGVAQRDVMVYTRTGTRTTGEGSNGEERADGVHPNSDSGNGPPPLPKNPTLAQVMAHQTQMMAAMMQQMQQQHQQMHQRMLHHAEQQHQQFGPPPPQSKLPEFLRIRPPTFSSTTNPMEANDWLHAIEKKPNLLQCNDQEKVAFATHQLQGPASAWWDNHMATRPPGTEVTWAEFCRSFRKAQVPDGVVAQKKREFRALHQGNRTVTEYLHXFNRLAXYAPEDVRTDAEKQEKFLAGLDDELTNQLISGDYADFERLVDKAIRQEDQRNKMERKRKAAQFRSNQGSHQRPRFTPGQQGRPTTLIVRQHRPFNASNFHQGASGCQNHHGGQPNRSAAPCPPMALAQSATSAQAKKETGTKPGSCFNCGELGHFADKCPKPRRAGPRFVXACVNHASAEEAQAAPEVVLGTFPVNSIPAIVLFDSGATRSFISKKFVGMHGLRKEELNTPMRVHTPGNSSTSVSFSPSVLIEIQRSPFLANLILLESKDLDVILGMDWLTKFKGVIDCVNRTVTLTNEKGETVVYKSLVSPKQGVSLNQIEAEIPVVTEEKNSRKLEEIPIVCEYPEVFPEDLTTMPPKREIEFRIDLAPGTAPIYKRPYRMAANELVEVKKQVDEQLQKGYIXPSTSHWGAPVIFVEKKDKTKRMCVDYRALNEVTIKNKYPLPRIDDLFDQLKGAKVFSKIDLRSGYHQLRIREEDIPKMAFTTRYGLYECTVMSFGLTNAPAFFMNLMNKVFMEFLDKFVVVFINDILIYSKSEKEHEQHLRLVLXKLKELQLYAKFSKCDFWLTEVKFLGHVITAQGVAIDPSNVESVTKWTPPKTVSQIXSFLGLAGYYRRFIENFSRIARPMTXLLKKDEKFKWTAECDKSFEEFKKKLVSAPVLILPDQMKDFQVYCDASRHGLGCVLMQEGRVVAYASRQLRLHEGNYPTHDLELAAVVHALKIWRYYLIGNRCEVYTDHKSLKYIFTQPDLNLQQRRWLELIKDYDMSIHYHPGKANVVADALSRKSYCTALCIEGMCEELQXEFEHLNVGIVEHGFVAALEARPTLVDQVRAAQVNDPEIAELKKNMXVGKARDFLEDEHGTNWMGXERLCVPDDKELKDMILTEAHQTQCSIHPGSTKMYQDLKEKFWWASMRREIAEFVALCDVCQRVKVEHQRPAGLLQPLQIPEWKWEEIGMDCITGLPRTSSGHDSIWVVVDRLTKVAHFIPVHTTYTGKKLAELYLARIMCLHGVPKKIVSDRESQFTSKFWQKLQEELGTRLNFSTAYHPQTDGQTEXVNQILEDMLRACALDFGGAWDKSLPYAEFSYNNSYQASLQMVPFEALYCRKCRTPLFWDQTGERQLFGTEVLAEAEEKVRTIRERLRIALSRQKSYTDNRRRELTFEAGDYVYLRVTPLRGVHRFQTKGKLAPRFVGLYKILERRGEVAYQLELPSNMIGIHDVFHVSQLKKCLRVPEEQADSEHIDIQEDLTYVEKPVRILDTSERRTRNKVTRFCRVQWSHHSEEEATWEREDELKAAHPHLFASSSESQGRDSV

SEQ ID NO: 25800 - protein, 889 aa, Oryza sativa; identical to SEQ ID NO: 18820
  Clone ID: TF_OsC359_6576.pep

SEQ ID NO: 25801 - protein, 1158 aa, Oryza sativa; identical to SEQ ID NO: 18746
  Clone ID: TF_OsC359_6650.pep

SEQ ID NO: 25802 - protein, 1819 aa, Oryza sativa; identical to SEQ ID NO: 18776
  Clone ID: TF_OsC359_6654.pep

SEQ ID NO: 25803 - protein, 1855 aa, Oryza sativa
  unsure (1)..(1855): unsure at all Xaa locations
  Clone ID: TF_OsC359_6693.pep
MAGHPPNHRGEGMIDFVAELARMTLVVGYPNAPEYTTVPPLSGELPHRVRLEVHGYVGTCLANMVVEASGGTADHACQEAAYLMMARLRERHNYIFHDTAYRFHPRRASGDDVSTFRPTAGENDTTFGHMCAVMRGLDRMHSDLHKASKALNDGKLMRIVALKDEIARLKRDNAQLKGLPAPGGVRIRTTPHKTTTAPVRIQLAPKNPPPSAAPAAPPVPLAAPVVPAAPVPALAPVHVSAPASALSFAPASAARGPASGNGGWLSATPSGSCDLSSSRSSGSELGSGETYLPGSRSRSEGPGLFLQMVYTRNGSRATGEGSNGEERTEGVHPNSNSGNGPPPLPENPTLAQVMAHQTXMMAAMMQQMQQQHQQMHQRMLQHAEQQHQXFGPPPPQSKLLEFLRVRPPTFSSTTNPMEANDWLHAIEKKLNLLQCNDQEKVAFATHQLQGPASAWWDNHMATRPPGTEVTWEEFCRSFRKAQVADGVVAQKKREFRALHXGNRTVTEYLHEFNHLARYAPEDVRTDAEKQEKFLAGLDDELTNQLISGDYADFERLVDKAIRQDDQRNKMDRKRKAAQFRAPQGSHQRPRFAPGQQGGPTTMIVRQYRPFNPSNFPQGASGSQNHHGGQPNRGAAPRPPTAPAQSGPSAQAKRETGAKPGSCFNCGELGHFADKCPKPRRAGPRFIQARVNHASAEEAQAAPEVVLGTFPVNSIPATILFDSGATHSFISKKFVGMHGLRKEELSTPMRVHTSGNSSTSVSFSPSVLIEIQRSPFLANLILLESKDLDVILGMDWLTKFKGVIDCANRTVTLTNEKGETAVYKSPDSPKQGVSLNQIEAEIPVDTVKKNLRKLEDIPIVCEYPEVFPEDLTTMPPKREIEFRIDLAPGTAPIYKRPYRMAANELAEVKKQVDEQLQKGYIRPSTSPWGAPVIFVEKKDKTKRMCVDYRALNEVTIKNKYPLPRIDDLFDQLKGAKVFSKIDLRSGYHQLRIREEDIPKTAFTTRYGLYECTVMSFGLTNAPAFFMNLMNKVFMEFLDKFVVVFIDDILIYSKSEEEHEQHLRLVLEKLKEHQLYAKFSKCDFWLTEVKFLGHVITAQGVAVDPSNVESVTKWIPPKTVSQIRSFLGLAGYYRRFIENFSRIARPMTQLLKKDEKFKWTAECDKSFEELKKKLVSAPVLILPDQMKDFQVYCDASRHGLGCVLMQEGRVVAYASRQLRPHEGNYPTHDLELAAVVHALKIWRHYLIGNRCEVYTDHKSLKYIFTQPDLNLRQRRWLELIKDYDMSIHYHPGKANVVADALSRKSYCTALCIEGMCEELRQEFEHLNVGIVEHGFVAALEARPTLVDQVRAVQVNDSEIAELKKNMRVGKTRDFHEDEHGTIWLGERLCVPDDKELKDLILTEAHQTQYSIHPGSTKMYQDLKEKFWWVSMRREXAEFVALCDVCQRVKAEHQRPAGLLQPLQIPEWKWEEIGMDFIIALPRTSSGHDSIWVVVDRLTKVAHFIPVHTTYTGKRLAELYLSRIMCLHGVPKKIVSDRGSQFTSKFWQKLQEELGTRLNFSTAYHPQTDGQTERVNQILEDMLRACALDFGGAWDKNLPYAEFSYNNSYQASLQMAPFEALYGRKCRTPLFWDQTGKRQLFGTEVLAEAEEKVRIIRERLRIAQSXQKSYADNRRRELTFEAGDYVYLRVTPLRGVHRFQTKGKLAPRFVGPYKILERRGEVAYQLELPSNMIGIHDVFHVSQLKKCLRVPEEQADSEHIDIQEDLTYVEKPVRILDTSERRTRNKVTRPRPSQAAPTPSSPGVADRWGPPVGSSPNLPPPAPVTTPPYPPSPHPSSPIYPSPRHAPRAHAIVAPSLP

SEQ ID NO: 25804 - protein, 1202 aa, Oryza sativa
  Clone ID: TF_OsC359_6695.pep
MGCKMAGHPPNHRGEGMIDFVAELARMTLVVGYPNAPEYTTIPPLSGELPHRVRLEVHGYVGTCLANMVVEAAGGTADHACQEAAYLMMARLRERHNYIFHDTAYRFHPRRASNDDVSSFRPTAGENDTTFGHMCAVMRGLDRMHSDLHKATKALNDGKLMRIVALKDEITRLKRENAQLKGLPAPGGVWIRTTPRKTTTAPVRIQLAPRNPPPSAAPAAPPVPPTVPAAPAPAPASALSFAPASAARGPASGTGGCLFGMVYTRNGSRATGEGSNGEERTDGAHPHSDSGNGPPPLPENPTLAQVMAHQTQMMAAMMQQMQQQHQQMHQRMMQHVEQQHQHFGPPPPQSKLPEFLRVRPPTFSSTTNPMEANDWLHAIEKKLNLLQCNDQEKVAFATHQLQGPASAWWDNHMATRPPGTEVTWAEFCRSFRKAQVPDGVVAQKKREFRALHQGNRTVTEYLHEFNRLTRYAPEDVRTDAEKQEKFMAGLDDELTNQLISGDYADFERLVDKAIRQEDQRNKMDRKRKATQFRAPQGSHQRPRFTPGQQGGPTTMIVRQYRPFNPSNFPQGSSGSQNHHGGQSNRGAAPRPPMAPAQSGPSAQAKKETGAKPGSCFNCGELGHFADKCPKPRRAGPRFIQARVNHASAEEAQAAPEVVLGTFPVNSIPAIVLFDSGATHSFISKKFVGMHGLIREKLSTPMRVHTPGNSSTSVQFSPSITIEIQRSPFLANLILLESKDLDVILGMDWLTKFKGVIDCANRTVTLTNEKGKTVVYKSPDSPKQGVSLNQIEAEIPVDTVEKNLRKLEDIPIVSEYPEVFPEDLTTMPPKREIEFRIDLAPGTAPIYKRPYRMAANELAEVKKQVDEQLQKGYIRPSTSPWGAPVIFVEKKDKTKRMCVDYRALNEVTIKNKYPLPRIDDLFDQLKGAKVFSKIDLRSGYHQLRIREEDIPKTAFTTRYGLYECTVMSFGLTNAPAFFMNLMNKVFMEFLDKFVVVFIDDILIYSKSEEEHEQHLRLVLEKLKEHQLYAKFSKCDFWMTEVKFLGHVITAQGVAVDPSNVESVTKWTPPKTVSQIRSFLGLAGYYRRFIENFSRIARPMTQLLKKDEKFKWTAECDKSFEELKKKLVSALVLILPDQMKDFQVYCDASRHGLGCVLMQEGRVVAYASRQLRPHEGNYPTHDLELAAVVHALKIWRHYVEFSEL

SEQ ID NO: 25805 - protein, 1606 aa, Oryza sativa
  unsure (1)..(1606): unsure at all Xaa locations
  Clone ID: TF_OsC359_6707.pep
MAGHPPNHRGEGMIDFVAELARMTLVVGYPNAPEYTTIPPLSGELPHRVRLEVHGYVGTCLANMAVEASGGTADHACQEAAYLMMARLRERHDYIFHDTAYRYHPRRAHGDGVSSFRPTAGENDTTFGHMCAVMRGLDRMHSDLHKATKALNDGKLMRIVALKDEIARLKKENAQLKGLPAPGGVRIRTTPRKTTTAPVRIQLAPRNPPPPAAPAAPSVPPAVPAAPVPAPAFTLSFAPASAARGSASGTGGCLFGMVYTRTGNRTTGEGSNGEERVDGVHPNSDSGNGPPPLPENPTLAQVMAHQTQMMAAMMQQMQQQHQQMHQRMMQHAEQQHQQFGPPPPQSKLPEFLRVRPPTFSSTTNPMEANDWLHAIEKKLNLLQCNDQEKVAFATHQLQGPASAWWDNHMATRPPGTEVTWAEFCRSFRKAQVPDGVVAQKKREFRALHQGNRTVTEYLHEFNRLARYAPEDVRTDAEKQEKFMAGLDDELTNQLISGDYADFERLVDKAIRQEDQRNKMDRKRKAAQFRAPQGSHQRPRFTPGQQGGPTTMIVRQHRPFNPSNFHQGTSGSQNHHGSQPNRGTAPRPPMAPAQSGQPAQAKKETGAKPGSCFNCGELGHFADKCPKPRRAGPRFIQARVNHASAEEAQTAPEVVLGTFPVNLIPATVLFDSGATHSFISKKFVGRYGLRKEELSTPMRVHTPGNSSTSVSFSPSVLIEIQRSPFLANLILLESKDLDVILGMDWLTKFKGVIDCANRTVTLTNEKGETVVYKSLVSPKQGVSLNQVEMEVPVDTVEKNLRKLEDIPIVCEYPEVFPEDLTTMPPKREIEFRIDLAPGTAPIYKRPYRMAANELAEVKKQVDEQLQKGYIRPSTSPWGAPVIFVEKKDKTKRMCVDYRALNEVTIKNKYPLPRIDDLFDQLKGAKVFSKIDLRSGYHQLRIREEDIPKTAFTTRYGLYECTVMSFGLTNAPAFFMNLMNKVFMEFLDKFVVVFIDDILIYSKSEEEHEQHLRLVLEKLKEHQLYAKFSKCDFWLTEVKFLGHVITAQGVAVDPSNVESVTKWTPPKTVSQIRSFLGLAGYYRRFIENFSRIARPMTQLLKKDEKFKWTAECDKSFEELKKKLVSAPVLILPDQMKDFQVYCDASRHGLGCVLMQEGRVVAYASRQLRPHEGNYPTHDLELAAVVHALKIWRHYLIGNRCEVYTDHKSLKYIFTQPDLNLRQRRWLELIKDYDMSIHYHPGKANVVADALSRKSYCTALCIEGMCEELRQEFEHLNMGIVEHGFVAALEARPTLVDQVRAAQVNDSEIAELKKNMRVGKARDFHEDEHGTIWMGERLCVPDDKELKDLILTEAHQTQYSIHPGSTKMYQDLKEKFWWVSMRREIAEFVALCDVCQRVKAEHQRPAGLLQPLQIPEWKWEEIGMDFITGLPRTSSGHDSIWVVVDRLTKVAHFIPVHTTYTGKRLAELYLAKIMCLHGVPRKIVSDRGSQFTSKFWQKLQEELGTRLNFSTAYHPQTDGQTERVNQILEDMLRACALDFGGAWDKSLPYAEFSYNNSYQASLQMAPFEALYGRKCRTPLFWDQTGERQLFGTEVLAEAEEKVXIIRERL

SEQ ID NO: 25806 - protein, 1777 aa, Oryza sativa
  Clone ID: TF_OsC359_6721.pep
MAGHPPNHRGEGMIDFVAELARMTLVVGYPNAPEYTTIPPLSGELPHRVHLEVHGYVGTCLANMAVEASGGTADHACQEAAYLMMARIRERHDYIFHDTAYRYHPRRAHGDGVSSFRPTAGENDTTFGHMCAVMSGLDRMHSDLHKATKALNDGKLMRIVALKDEIARLKKENAQLKGLPAPGGVRIRTTPRKTTTAPVRIQLAPRNPPPAAAPAAPSVPPAVPAAPVPAPAFTLSFAPASAARGPASGTGGCLFGMVYTRTGNRTTGEGSNGEERVDGVHPNSDSGNGPPPLPENPTLAQVMAHQTQMMAAMMQQMQQQHQQMHQRMMQHAEQQHQQFGPPPPQSKLPEFLRVRPPTFSSTTNPMEANDWLHAIEKKLNLLQCNDQEKVAFATHQLQGPASAWWDNHMATRPPGTEVTWAEFCRSFRKAQVPDGVVAQKKREFRALHQGNRTVTEYLHEFNRLARYAPEDVRTDAEKQEKFMAGLDDELTNQLISGDYADFERLVDKAIRQEDQRNKIDRKRKAAQFRAPQGSHQRPRFTPGQQGGPTTMIVRQHRPFNPSNFHQGTSGSQNHHGGQPNRGAAPRPSVAPAQSGQPAQAKKETGAKPGSCFNCGELGHFADKCPKPRRAGPRFIQARVNHASAEEAQTAPEVVLGTFPVNSIPATVLFDSGATHSFISKKFVGRYGLRKEELSTPMRVHTPGNSSTSVSFSPSVLIEIQRSPFLANLILLESKDLDVILGMDWLTKFKGVIDCANRTVTLTNEKGETVVYKSLVSPKKGVSLNQIETEIPVDTVEKNLRKLEDIPIVCEYPEVFPEDLTTMPPKREIEFRIDLAPGTAPIYKRPYRMAANELAEVKKQVDEQLQKGYIRPSTSPWGAPVIFVEKKDKTKRMCVDYRALNEVTIKNKYPLPRIDDLFDQLKGAKVFSKIDLRSGYHQLRIREEDIPKTAFTTRYGLYECTVMSFGLTNAPAFFMNLMNKVFMEFLDKFVVVFIDDILIYSKSEEEHEQHLRLVLEKLKEHQLYAKFSKCDFWLTEVKFLGHVITAQGVAVDPSNVESVTKWTPPKTVSQIRSFLGLAGYYRRFIENFSRIARPMTQLLKKDEKFKWTAECDKSFEELKKKLVSTPVLILPDQMKDFQVYCDASRHGLGCVLMQEGRVVAYASRQLRPHEGNYPTHDLELAAVVHALKIWRHYLIGNRCEVYTDHKSLKYIFTQPDLNLRQRRWLELIKDYDMSIHYHPGKANVVADALSRKSYCTALCIEGMCEELRQEFEHLNMGIVEHGFVAALEARPTLVDQVRAAQVNDSEIAELKKNMRVGKAREFHEDEHGTIWMGERLCVPDDKELKDLILTEAHQTQYSIHPGSTKMYQDLKEKFWWVSMRREIAEFVALCDVCQRVKAEHQRPAGLLQPLQIPEWKWEEIGMDFITGLPRTSSGHDSIWVVVDRLTKVAHFIPVHTTYTGKRLAELYLSRIMCLHGVPKKIVSDRGSQFTSKFWQKLQEELGTRLNFSTAYHPQTDGQTERVNQILEDMLRACALDFGGAWDKSLPYAEFSYNNSYQASLQMAPFEALYGRKCRTPLFWDQTGERQLFGTEVLAEAEEKVRIIRERLRIAQSRQKSYVDNRRRELTFEAGDYVYLRVTPLRGVHRFQTKGKLAPRFVGPYKILERRGEVAYQLELPSNMIGIHDVFHVSQLKKCLRVPEEQADSEHIDIQEDLTYVEKPVRILDTSERRTRNKVTRFCRVQWSHHSEEEATWEREDELKAAHPHLFTSSSESRGRDSV

SEQ ID NO: 25807 - protein, 1777 aa, Oryza sativa; identical to SEQ ID NO: 18812
  Clone ID: TF_OsC359_6727.pep

SEQ ID NO: 25808 - protein, 1785 aa, Oryza sativa; identical to SEQ ID NO: 18780
  Clone ID: TF_OsC359_6746.pep

SEQ ID NO: 25809 - protein, 1039 aa, Oryza sativa
  Clone ID: TF_OsC359_6774.pep
GNRTMTEYLHEFNRLARYAPEDVRTDAEKQEKFMAGLDDELTNQLISGDYADFERLVDKAIRQEDQRNKMDRKRKAAQFRAPQGSHQRPRFASGQQGGPTTMIVRQYRPFNPSNFPQGARGSQNHHGGQPSSGAAPRPPTASAQSGPSAQAKKETGTKPGSCFNCGELGHFADKCPKPRRAGPRFIQARVNHASAEEAQAAPEVVLAEIPVDTVEKNLRELEDIPIVCEYPEVFPEDLTTMPPKREIEFRIDLAPGTAPIYKRPYRMAANELAEVKKQVDEQLQKGYIRPSTSPWGAPVIFVEKKDKTKRMCVDYRALNEVTIKNKYPLPRIDDLFDQLKGAKVFSKIDLRSGYHQLRIREEDIPKTAFTTRYGLYECTVMSFGLTNAPAFFMNLMNKVFMEFLDKFVVVFIDDILIYSKSKEEHEQHLRLVLEKLKEHQLYAKFSKCDFWLTEVKFLGHVITAQGVAVDPSNVESVTKWTPPKTVSQIRSFLGLAGYYRRFIENFSRIARPMTQLLKKDEKFKWTVECDKSFEELKKKLVSAPVLILPDQMKDFQVYCDASRHGLGCVLMQEGRVVAYASRLLRPHEGNYPTHDLELAAVVHALKIWRHYLIGNRCKVYTDHKSLKYIFTQPDLNLRQRRWLELIKDYDMSIHYHPGKANVVADALSRKSYCTALCIEGMCEELRQEFEHLNVGIVEHGFVAALEAWPTLVDQVRAAQVNDSEIAELKKNMRVGKARDFHEDEHGTIWLGERLCVPDDKELKDLILTEAHQTQYSIHPGSTKMYQDLKEKFWWVSMRREIAEFVALCDVCQRVKAEHQRPAGLLQPLQIPEWKWEEIGMDFITGLPRTSSGHDSIWVVVDRLTKVAHFIPVHTTYTGKRLAELYLSRIMCLHGVPKKIVSDRGSQFTSKFWQKLQEELGTRLNFSTAYHPQTDGQTERVNQILEDMLRACALDFGGAWDKNLPYAEFSYNNSYQASLQMAPFEALYGRKCRTPLFWDQTGERQLFGTEVLAEAEEKVRIIREGLRIAQSRQKSYADNC

SEQ ID NO: 25810 - protein, 1785 aa, Oryza sativa
  unsure (1)..(1785): unsure at all Xaa locations
  Clone ID: TF_OsC359_6786.pep
MEKPKSPLNPFSLHMFFAIGFVPGKWGSVLVVQGKNLGRSFKMAGHPPNHRGEGMIDFVAELARMTLVVGYPDAPEYTTIPPLSGELPYRVRLEVHGYVGTCLANMAVEASGGTADHACQEAAYLMMARLRERHDYIFHDTAYRYHPRRAHGDGVSSFRPTAGENDTTFGHMCAVMRGLDRMHSDLHKATKALNDGKLMRIVALKDEVARLKKENAQLKGLPAPGGVRIRTTPRKRTTAPVRIQLAPRNPPPPAAPAAAPVPPAVPAAPAPAPAFTLSFAPASAARGSASGTGGCLFGMVYTRTGSRATGEGSNGEERADGVHPNGDSGNXMHQRMMQHAEQQHQQXGPPPPQSKLPEFLRVRPPTFSSTTNPMEANDWLHAIEKKLNLLQCNDQEKVAFATHQLQGPASAWWDNHMATRPPGTEVTWAEFCRSFRKAQVPDGVVAQKKREFRALHQGNRTVTEYLHEFNRLARYAPEDVRTDAEKQEKFMAGLDDELTNQLISGDYADFERLVDKAIRQEDQRNKMDRKRKAAQFRSNQGSQHRPRFTPGQQGGPTTMIVRQHRPFNSSNFHQGTSGSQNHQGGQPNRGAAPRPPMAPAQSAQPAQAKKETGAKPGSCFNCGELGHFADKCPKPRRAGPRFIQARVNHASAEEAQAAPEVVLGTFPVNSIPATVLFDSGATHSFISKKFVGMYGLRKEELSTPMRVRTPGNSSTSVSFSPSVLIEIQRSPFLANLILLESKDLDVILGMDWLTKFKGVIDCANRTVTLTNEKGETVVYKSLVSPKKGASLNQIETEIPVDTVGKNLRKLEDIPIVCEYPEVFPENLTTMPPKREIEFRIDLAPGTAPIYKRPYRMAANELAEVKKQVDEQLQKGYIRPSTSPWGAPVIFVEKKDKTKRMCVDYRALNEVTIKNKYPLPRIDDLFDQLKGAKVFSKIDLRSGYHQLRIREEDIPKTAFTTRYGLYECTVMSFGLTNAPAFFMNLMNKVFMKFLDKFVVVFIDDILIYSKSEEEHEQHLRLVLEKLKEHQLYAKFSKCDFWLTEVKFLGHVITAQGVAVDPSNVESVTKWTPPKTVSQIRSFLGLAGYYRRFIENFSRIARPMTQLLKKDEKFKWTAECDKSFEELKKKLVSAPVLILPDPTKDFQVYCNASRHGLGCVLMQEGRVVAYASRQLRPHEGNYPTHDLELAAVVHALKIWRHYLIGNRCEVYTDHKSLKYIFTQPDLNLRQRRWLELIKDYDMSIHYHPGKANVVADALSRKSYCTALCIEGMCEELRQEFEHLNMGIVEHGFVAALEARPTLVDQVRAAQVNDPEIAELKKNMRVGKARDFLEDEHGTIWMGERLCVPDDKELKDLILTEAHQTQYSIHPGSTKMYQDLKEKFWWVSMRREIAEFVALCDVCQRVKAEHQRPAGLLQPLQIPEWKWEEIGMDFITGLPRTSSGHDSIWVVVDRLTKVAHFIPVHTTYTGKRLAELYLARIMCLHGVPKKIVSDRGSQFTSKFWQKLQEEMGTRLNFSTAYHPQTDGQTERVNQILEDMLRACALDFGGAWDKSLPYAEFSYNNSYQASLQMAPFEALYGRKCRTPLFWDQTGERQLFGTEVLAEAEEKVRIIRERLRIAQSRQKSYADNRRRELTFEAGDYVYLRVTPLRGVHRFQTKGKLAPRFVGPYKILERRGEVAYQLELPSTMIGIHDVFHVSQLKKCLRVPEEQANSEHIDIQEDLTYVEKPVRILDTSERRTRNKVTRFCRVQWSHHSEEEATWEREDELKAAHPYLFTSSTESRGRDSV

SEQ ID NO: 25811 - protein, 1597 aa, Oryza sativa
  Clone ID: TF_OsC359_6814.pep
SRLGDGDAITTEDDGGGGGSEAVHGGGGCSDAVRGGGGGSDTAHGGGGCSDAVHGGGGGGSVAAHGGGGCSDAVRGGGGGSDAAHDGGGCSDAARGGGGCSDAAQGGGGGSNAARGGGGCSDAAHGCAVAVSGGDDCAVVAYVSIGGVSLVLLLHVSHSPPRRRWRSPSPRRGRHGGRGQVVVERVVREATTSSVVYPTLTRTNYQDWALVMRVNMQAQCLWGAVEPEGDDLVDYRQDQQALAAILRAVPAEMLATLAVKETAQEAWEAIKTRRIGVQRVREANAQQLRREFGDILFKDDETVDDFSMRIGGLANNLRTLGDNITEAEVVQKLLQVVPEHLQQIAISIETLLDVNELSLEEVTGRLRSVEQRKQCKTAAASSRVDANGRLLFTEEEWLAKFRKAASLQDAAHSSSGNGDRRGRGRGKKDDGAPKEAQPKPANPGGRNPGNCKNCGKRGHWAKDCRSKPKAQQAYVAQEEDEEPALLLAKVQLDPPRPRVAAPTNVVSPPSAPRAPSPIGELAVVEAKVFAQLDDGGEHDPAMWILDTGATNHMTGSRSAFAELDTAVTGTVRFGDGSVVRIEGRVTVLFSCRFGEHRGIAGVYYIPRLTANIVSLGQLDRSGSKVLIHHGILHVWDPRGHLLVRVRRSDDCLYTIKLDIDRPVCLAARSAEPAWRWHARYGHLNFPALRKLAQQEMVRGLPLLQQVTQVCDGCLLGKQRRAAFPTQSKYRADEHLELVHGDLCGPIEPATPAGNRYFLLLVDDMSRYMWLTMIRSKDEAANAIKHFQARAEVESGRKLRALRMDRGSEFTSIEFGEYCANLGVGRQLTAPYSPQQNGVVERRNQTIVATARSMMKAKGVPGRFWGEAMSTAVFLLNRSPTKSLDNQTPYEAWYGQWPAVHFLRTFGCVGHVKITKPGLKKLDDRSAPMVLLGYEQGSKAYRLYDPVSERVHVSRDVVFDEDIAWDWGPVTPDGAPQLEPFTVEQVVTTTIGTAPASSPTPPSPPSPAPSAPTTPAPPSPPSPEAVEFVTPPTQDSILDADADDDVVPRYRLVDNLLGNASPPGHAPRVLEQLELHVVSADEPASLAEAEADPSWRGAMQDELNAIVDNDTWSLTDLPHGHRAIGLKWVYKLKRDEQGAIVRYKARLVAKGYVQRQGVDFDEVFALVARLESVRLLLAVAAHQGWQVHHMDVKSAFLNGELLEEVYVSQPPGFVDDNHKNKVYRLHKALYGLRQAPRAWNAKLDSSLLSLGFHRSSSEHGVYTRTRGGRRLMVGVYVDDLIITGDHDDEIRSFKGEMMKLFKMSDLGALRYYLGIEVTQDSDGITLGQAAYAGKILEKAGLKDCNPCQTPMEVRLKLRKGSDFPLVDATLYRSLVGSLRYLVNTRPDLAFSVGYVSRFMESPREDHLAAVRRILRYVAGTRCWGIRFGPGARCALPMLVGYSDSDLAGDPDERKSTSGQIFFINGGPVTWQSSKQKVVALSSCEAEYIAAAAATCQGVWLARLLAEVLGDEITAPLLKVDNQSTISLIKNPVHHDRSKHIDVKYHYIRECAEKKLIEMMFVGTAEQLGDIFTKSLGRTRFQELRSKIGVCSLDKSSQT

SEQ ID NO: 25812 - protein, 1827 aa, Oryza sativa; identical to SEQ ID NO: 18739
  Clone ID: TF_OsC359_6925.pep

SEQ ID NO: 25813 - protein, 1565 aa, Oryza sativa; identical to SEQ ID NO: 18794
  Clone ID: TF_OsC359_6933.pep

SEQ ID NO: 25814 - protein, 1220 aa, Oryza sativa; identical to SEQ ID NO: 18792
  Clone ID: TF_OsC359_6996.pep

SEQ ID NO: 25815 - protein, 1570 aa, Oryza sativa; identical to SEQ ID NO: 18822
  Clone ID: TF_OsC359_7059.pep

SEQ ID NO: 25816 - protein, 1154 aa, Oryza sativa
  Clone ID: TF_OsC359_7142.pep
MEANDWLHDIEKKLNLLQCNDQEKVAFATHQLQGPASAWWDNHMATRPPGTEVTWAEFCRSFRKAQVPDGVVAQKKREFRALHQGNRTVTEYLHEFNRLARYAPEDVRTDAEKQKKFMAGLDDELTNQLISGDYADFERLVDKAIRQEDQRNKMDRKRKAAQFRSNQGNHQRPRFAPGQQGGPTTMIVRQYRPFNPSNFHQGASGSQNHHGGQPNRGAAPRLPVAPAQSGPSAQAKKETGTKPGSCFNCGELGHFADKCPKPRCAGPRFVQARVSHASAEEAQAAPEVVLGTFPVNSIPATVLFDSGATHSFISKKFVGMHGLRKEELNTPMRVHTPGNSSTSVSFSPSVLIEIQRSPFLANLILLESKDLDVILGMDWLTKFKGVINCANRIVTLTNEKGETAVYKSLVSPKQGVALNQMEAEIPVVTEEKNPRKLEEIPIVCEYPEVFPEDLTTMPPKREIEFRIDLAPGTAPIYKRPYRMAANELAEVKKQVDEQLQKGYIRPSTSPWGAPVIFVEKKDKTKRMCVDYRALNEVTIKNKYPLPRIDDLFDQLKGAKVFSKIDMRSGYHQLRIREEDISKTAFTTRYGLYECTVMSFGLTNAPAFFMNLMNKVFMEFLDKFVVVFIDDILIYPKSEEEHEQHLHLVLEKLKEHQLYAKFSKCDFWLTEVKFLGHVITAQVQQTEPQTKPYPLDMWKYGSALQQRPELNPYSTRAQGVAVDPSNVESVTKWTPPKTVSQIRSFLGLVGYYRRFIENFSRIARPMTQLLKKDEKFKWTAECDKSFEELKKKLVSAPVLILPDQMKDFQVYCDASRHGLGCVLMQEGRVVAYASRQLRPHEGNYPTHDLELAAVVHALKIRRHYLIGNRCEVYMDHKSLKYIFTQPDLNLRQRRWLELIKDYDMSIHYHPEKANVVADALSRKSYCTALGIEGMCEELRQELERLNVGIVEHGFVAALEARPTLADQVRAAQVNDPEIAELKKNMRVRKARDFHEDEHGTIWLGERLCVPDDKELKDLILTEAHQTQYSIHPGSTKMYQDLKEKFWWVSMRREIAEFVALCDVCQRVKAEHQRPVGLLQPLQIPEWKWEEIGMDFITGLPRTSSGHDSISVVNVTLLPFAPFVEVRRSTFGIGTSTSVSSNIMCTKGSPLLVIAI

SEQ ID NO: 25817 - protein, 1351 aa, Oryza sativa; identical to SEQ ID NO: 18819
  Clone ID: TF_OsC359_7158.pep

SEQ ID NO: 25818 - protein, 1784 aa, Oryza sativa; identical to SEQ ID NO: 18816
  unsure (1)..(1784): unsure at all Xaa locations
  Clone ID: TF_OsC359_7225.pep

SEQ ID NO: 25819 - protein, 1718 aa, Oryza sativa
  Clone ID: TF_OsC359_7450.pep
MAGHPPNHRGEGMIDFVAELARMTLVVGYPNAPEYTTIPPLSGELPHRVRLEVHGYVGTCLANMVVEASGGTADHACQEAAYLMMARLRERHNYIFHDTAYRFHPRRANGDDVSSFRPTASENDTTFGHMCAVMRGLDRMHSDLHKATKALNDGKLMRIVALKDEIARLKRENAQLKGLPAPGGVRIRTTPRKTTTAPVRIQLAPRNPPPSAAPAAPPVPPAAPAVPAAPAPASALSFAPASAARGPASGNGGCLFGMVYTRNGSRATGEGSNGEERADGVHPSSDSGNGPPPLPENPTLAQVMAHQTQMMAAMMQQMQQQHQQMHQRMMQHVEQQHQQFGPPPPQSKLPEFLRVRPPTFSSTTNPMEANDWLHAIEKKLNRLQCNDQEKVAFATHQLQGPASAWWDNHMATRPPGTEVTWAEFCRSFWKAQVPDGVVAQKKREFRALHQGNRTVTEYLHEFNRLARYAPEDVRTDAEKQEKFMAGLDDELTNQLISGDYADFERLVDKAIRQEDQRNKMDRKRKAAQFRAPQGSHQRPRFAPGQQGGPTTMIVRQHRPFNPSNFPQGASGSQNHHGGQSNRGAASRPPMAPAQSGPPAQAKKETGAKPGSCFNCGELGHFADKCPKPRRAGPRFIQARVNHASAEEAQAAPEVVLGTFPVNSIPATVLFDSGATHSFISKKFVGMHLLIREELSTPMRVHTPGNSSTSVQFSPSITIEIQRSPFLANLILLESKDLDVILGMDWLTKFKGVIDCANRTVTLINEKGETVVYKSLVSPKKGVSLNQIEAEIPVDTVEKNSRKLEDIPIVCEYPEVFPEDLTTMPPKREIEFRIDLAPGTAPIYKRPYRMAANELAEVKKQVDEQLQKGYIRPSTSPLGAPVIFVEKKDKTKRMCVDYHALNEVTIKNKYPLPRIDDLFDQLKGAKVFSKIDLRSGYHQLRIREEDIPKTAFTTRYGLYECTVMSFGLTNAPAFFMNLMNKVFMEFLDKFVVVFIDDILIYSKSEEKHEQHFRLVLEKLREHQLYAKFSKCDFWLTEVKFLGHVITAQGYYRRFIENFSRIARPMTQLLKKDEKFKWTAECDKSFEELKKKLVSAPVLILPDPMKDFQVYCDASRHGLGCVLMQEGRVVAYASRQLRPHEGNYPTHDLELAAVVHALKIWRHYLIGNRCEVYTDHKSLKYIFTQPDLNLRQRRWLELIKDYDMSIHYHPGKANVVADALSRKSYCTALCIEGIRSGGTAYAQANDSEIAELKKNMSVGKARDFHEDEHGTIWLGERLCVPDDKELKDLILTEAHQTQYSIHPGSTKMYQDLKEKFWWVSMRREIAEFVALCDVCQRVKAEHQRPAGLLQPLQIPEWKWEEIGMDFITGLPRTSSGHESIWVVVDRLTKVAHFIPVHTTYTGKRLAELYLSRIMCLHGVPKKIVSDRGSQFTSKFWQKLQEELGTRLNFSTAYHPQTDGQTERVNQILEDMLRACALDFGGAWDKSLPYAEFSYNNSYQASLQMAPFEALYGRKCRTPLFWDQTGERQLFGTEVLAEAEEKVRIIRERLRIAQSRQKSYADNRRRELTFEAGDYVYLRVTPLRGVHWFQTKGKLAPRFVGLYKILERRGEVAYQLELPSNMIGTHDVFHVSQLKKCLRVPEEQADSEHIDIQEDLTYVEKPVRILDTSERRTRNKVTRFCRVQWSHHSEEEATWEREDELKAAHPHLFSSSSESRGRDSV

SEQ ID NO: 25820 - protein, 1825 aa, Oryza sativa; identical to SEQ ID NO: 18815
  Clone ID: TF_OsC359_7454.pep

SEQ ID NO: 25821 - protein, 1664 aa, Oryza sativa; identical to SEQ ID NO: 18769
  Clone ID: TF_OsC359_7650.pep

SEQ ID NO: 25822 - protein, 1628 aa, Oryza sativa
  unsure (1)..(1628): unsure at all Xaa locations
  Clone ID: TF_OsC359_7660.pep
MGCKMAGHPPNHRGEGMIDFVAELARMTLVVGYPNAPEYTTIPPLSGELPHRVRLEVHGYVGTCLANMAVEASGGTADHACQEAAYLMMARLRERDNYIFHDTAYRYHPRRANGDGVSSFCPTAGENDTTFGHMCAVMRGLDRMHSDLHKATKALNDGKLMRIVALKDEIARLKKENAQLKGLPAPGGVRIRTTPRKTTTAPHQPPEVQPVAPEVACLXMVYTRTGSRATGEGSNGEERANGVHPSSDSGNGPPPLPENPTLAQVMAHQTQMMAAMMQQMQQQHQQMHQRMMQHAEQQHQQFGPPPPQSKLPEFLRVRPPTFSSTTNPMEANDWLHAIEKKLNLLQCNDQEKVAFATHQLQGPASAWWDNHMATRPPGTEVTWVEFCRSFRKAQVPDGVMAQKKREFRALHQGNRTVTEYLHEFNRLARYAPEDVRTDAEKQEKFMAGLDDELTNQLISGDYADFEWLVDKAIRQEDQRNKMDRKRKAAQFRAPQGSHQRPRFTPGQQGGPTTMIVRQHRPFNSSNFHQGSSGSQNHHGGQPNRGAAPRPPMAPAQSGPPAQAKKETGAKPGSCFNCGELGHFADKCPKPRRAGPRFIQARVNHASAEEAQTAPEVVLGTFPVNSIPATVLFDSGATHSFISKKFVGMYGLRKEELSTPMRVHTPGNSSTSVSFSPSVLIEIQRLPFLANLILLESKYLDVILGMDWLTKFKGVIDCANRTVTLTNEKGETVVYKSLAPPKQGVSLNQIEMEVPVVTEEKNLKKLEDIPIVSEYPEVFPEDLTTIPPKREIEFRIDLAPGTAPIYKRPYRMAANELAEVKKQVDEQLQKGYIRPSTSPWGAPVIFVEKKDKTKRMCVDYRALNELRIREEDIPKTAFTTRYGLYECTVMSFGLTNAPAFFMNLMNKVFMEFLDKFVVVFIDDILIYSKSEEEHEQHLRLVLEKLKEHQLYAKFNKCDFWLTEVKFLGHVITAQGVAVDPSNVESVTKWTPPKTVSQIRSFLGLAGYYRRFIENFSRIARPMTQLLKKDEKFKWTAECDKSFEELKKKLVSAPVLILPDPTKDFQVYCDASRHGLGCVLMQEGRVVAYASRQLRPHEGNYPTHDLELAAVVHALKIWRHYLIGNRCEIYTDHKSLKYIFTQPDLNLRQRRWLELIKDYDMSIHYHPGKANVVADALSRKSYCTALCIEGMCEELRQEFGHLNVGIVEHRFVAALEARPTLVDQVRAAQVNDPEIAELKKNMRVGKARDFLEDEHGTIWMVERLCVPDDKELKDLILTEAHQTQYSIHPGSTKMYQDLKEKFCAYHLYGKRLAELYLARIMCLHGVPKKIVSDRGSQFTSKFWQKLQEELGTRLNFSTAYHPQTDGQTERVNLILEDMLRACALDFGGAWDKSLPYAEFSYNNSYQASLQMAPFEALYGRKLYTAICALFWDQTGERQLFGTEVLAEVEEKVRIIRERLRIAQSRQKSYADNRRRELTFEEGDYVYLRVTPLRGVHHFQTKGKLAPRFVGPYKILERRGEVAYQLELPSNMIGIHDVFHVSQLKKCLRVPEEQVDSEHIDIQEDLTYVEKPVRILDTSERRTRNKVTRFCRVQWNHHSEEEATWEREDELKAAHPHLFTSSSESRGRDSV

SEQ ID NO: 25823 - protein, 1672 aa, Oryza sativa
  unsure (1)..(1672): unsure at all Xaa locations
  Clone ID: TF_OsC359_7908.pep
MVVEASGGTADHACQEAAYLMMARLRERHNYIFHDMAYRFHPRRASGDDVSTFRPTTGQNDTTFGHMCAVMSGLDRMHSDLHKATKALNDGKLMRIVALMDEIARLKRENAQLKGLPAPGGVRIRTTPRKTTTAPVRIQLAPRNPPPSAAPAAPPVPPAVPAAPAPAPASALSFAPASAARGPASGNGGCLLGMVYTRNGSRATGEGSNGEERTDGAHPHSDSGNGPPPLPENPTLVQVMAHQTQMMAAMMQHQHQQMHQRMLQHAEQQHQQFGPPPPQSKLPEFLRVRPPTFSSTTNPMEANDWLHAIEKKLNLLQCNDQEKVAFATHQLQGPASAWWDNHMATRPPGTEVTWVEFCRSFRKAQVPDGVVAQKKREFRALHQGNRTVTEYLHEFNRLARYAPEDVRTDAEKQEKFMAGLDDELTNQLISGDYADVERLVDKAIRQEDQRNKMDRKRKAAQFRAPQGSHQRPRFAPRQQGGPTTMIVRQHRPFNPSNFPQGASGSQNHHGGQSNRGAAPRPPMAPAQSGPPAQAKKETGAKPGSCFNCGELGHFADKCPKPRRAGPRFIQARVNHASAEEAQAAPEVVLGTFSINSIPATVLFDSGATHSFISKKFVGMHGLIREELSTPMRVHTPGNSSTSVQFSPSITIEIQRSPFLANLILLESKDLDVILGMDWLTKFKGVIDCANRTVTLTNEKGETVVYKSLVSPKQGVSLNQIEAEIPVDTVEKNLRKLEDIPIVCEYPEVFLEDLTTMPPKREIXFRIDLAPGTAPIYKRPXKDKTKRMCVDYRALNEVTIKNKYPLPRIDDLFDQLKGAKVFSKIDLRSGYHQLRIREEDIPKTAFTTRYGLYECTVMSFGLTNAPAFFMNLMNKVLMEFLDKFVVVFIDDILIYSTSEEEHEQHLRLVLEKLKEHQLYAKFSKCDFWLTEVKFLGHVITAQGVAVDPSNVESVTKWTPPKTVSQIRSFLGLAGYYRRFIENFSRIARPMTQLLKKDEKFKWTTECDKSFEELKKKLVSAPVLILPDQMKDFQVYCDASRHGLGCVLMQEGIVVAYASRQLRPHEGNYPTHDLELAAVVHALKIWRHYLIGNRCEVYTDHKSLKYIFTQPDLNLRQRRWLELIKDYDMSIHYHPGKANVVADALSRKSYCTALCIEGMCEELWQEFEHLNVGIVEHGFVAALEARPTLVDQVRAAQVNDSEIAELKKNMRVGKARDFHEDEHGTIWLGERLCVPDDKELKDLILTEAHQTQYSIHPGSTKMYQDLKEKFWWVSMRREIAEFVALCDVCQRVKAEHQRPAGLLQPLQILEWKWEEIGMDFITGLPRTSSGHDSIWVVVDRLTKVAHFIPVHTTYTGKRLAELYLSRIMCLHGVPKKIVSDRGSQFTSKFWQKLQEELGTRLNFSTAYHPQTDGQTERVNQILEDMLRACALDFGGAWDKSLPYAEFSYNNSYQASLQMAPFEALYGRKCRTPLFWDQTGERQLFGTEVLAEAEEKVRIIRERLRIAQSRQKSYADNRRRELTFEAGDYVYLRVTPLRGVHRFQTKGKLAPRFVGPYKILERRGEVAYQLELPSNMIGIHDVFHVSQLKKCLRVPEEQADSKHIDIQEDLTYVEKPIRILDTSERRTRNKVNRFCRVQWSHHSEEEATWEREDELKAAHPHLFTSSSESRGRDSV

SEQ ID NO: 25824 - protein, 1777 aa, Oryza sativa; identical to SEQ ID NO: 18736
  Clone ID: TF_OsC359_7970.pep

SEQ ID NO: 25825 - protein, 1726 aa, Oryza sativa
  Clone ID: TF_OsC359_8137.pep
MAGHPPNHRGEGMIDFVAELARMTLVVGYPNAPEYTTVPPLSGELPHRVRLEVHGYVGTCLANMVVEASGGTVDHACQEAAYLMMARLRERHNYIFHDTAYRFHPCRASGDDVSTFRPTADENYTTFGHMCTVMRGLDRMHSDLHKASKALNDGKLMRIVALKDEIARLKRENAQLKGLPAPGGVRIRTTPRKTTTAPVRIQLAPRNPPPPAAPAAPPVPPAVPAAPAPAPAPVHMSAPASALSFAPASAARGPASGNGGCLFGMVYTRNGSRATGEGSNGEERTEGVHPNSNSGNVPPPLPENPTLAQVMAHQTQMMAAMMQQMQQQHQQMYQRMLQHAEQQHQQFGPPPPQSKLPEFLRVRPPTFSSTTNPMEANDWLHAIEKKLNLLQCNDQEKVAFTTHQLQGPASAWWDNHMATRPPGTEVTWAEFCRSFRKAQVPDGVVAQKKREFRALHQGNRTVTEYLHEFNRLARYAPEDVRTDAEKQERFMAGLDDELTNQLISGDYADFERLVDKAIRQEDQRNKMDRKRKAAQFRAPQGSHQRPRFAPGQQGGPTTMIVRQYRPFHPSNFPQGASGSQNHHGGQPNRGAAPRPPMAPAQSGPSAQARKETGAKPGSCFNCGELGHFADKCPKPRRAGPRFIQARVNHASAEEAQAAPEVVLGTFPVNSIPTTVLFDSGATHSFISKKFVGMHGLIREELSTPMRLTKFKGVIDCVNRTVTLTNEKGETVVYKSPNSPKQGVSLNQIEAEIPVVTMEKNLRKLEDIPIVYEYPEVFPEDLTTMPPKREIEFRINLAPGTAPIYKRPYRMAANELAEVKKQVDEQLQKGYIRPSTSPWGAPVIFVEKKDKTKRMCVDYRALNEVTIKNKYPLPRIDDLFDQLKGAKVFSKIDLRSAYHQLIIREEDIPKTAFTTRYGLYECTVMSFGLTNAPAFFMNLMNKVFMEFLDKLVVVFIDDILIYSKSEEEHEQHLRLFSKCDFWLTEVKFLGHVITAQGVAVDPSNVESVTKWTPPKTVSQIQSFLGLAGYYRRFIENFSRIARPMTQLLKKDEKFKWTAECDKSFEELKKKLVSAPVLILPDQMKDFQVYCDASRHGLGCVLMQEGRVVAYASRQLRPHEGNYPTHDLELAAVVHALKIWRHYLIGNRCEVYTDHKNLKYIFTQPDLNLRQRRWLELIKDYNMSIHYHPGKANVVADALSRKSHCTALCIEGMCEELRQDFEHLNMGIVEYGFVAALEARPTLVDKVRVAQVNDSEIAELKKNMRVGKARDFHEDEHGTIWLGERLCVPDDKELKDLILTEAHQTQYSIHPGSTKMYQDLKEKFWWVSMRREIAEFVALCDVCQRVKAEHQRPAGLLQPLQIPEWKWEEIGMDFIIGLPWTSSGHDSIWIVMDRLTKVAHFIPVHTTYTGKRLAELYLSRIMCLHRVPKKIVSNRGSQFTSKFWQKLQEELGTRLNFSTAYHPQTDGQTERVNQILEDILRACALDFGGAWDKSLPYAEFSYNNSYQASLQMAPFEALYGRKCRTPLFWDQTGERQLFGTEVLAEAEEKVRIIKERLRIAQSRQKSYADNRRRELTFEAGDYVYLRVTPLRGVHRFQTKGKLVPRFVGPYKILERRGEVAYQLELPSNMIGIHDVFHVSQLKKCLRVPEEQADSEHIDFQEDLTYVEKPVHILDTSERRTRNKVTRFCRVQWSHHSEEEATWEREDELKAAHPHLFASSSESRGQDSV

SEQ ID NO: 25826 - protein, 1806 aa, Oryza sativa
  unsure (1)..(1806): unsure at all Xaa locations
  Clone ID: TF_OsC359_8398.pep
MEMDEVGGRWTXSRTNEGYTSCGPMAGSVTRRGLHMTGFVLELRGLCVVLGYPHGVDYQARPLPEQEGEDAEPHAGWEVTAVILSGSPERTSLAVTAGGDSFPAACQNAALLAIGTLHQRYPDELQHSPYRYHPRRGAXHHATFRDASSEDDATVVHLARMVEAYDVARIDFHQMVRRGMVENNMKILELRQENLQLKKDLDALEAQLHQLKVAQGEICRPKRRRVCRSQKITARKSTSRPELVRQSLAWTCFVETPRAEPAPVVPQEGEASGVGSSEGALLLTFRPGPSQRSPSLFAGSVWSLQMVSTRRNVNTGEGNQPEGSNPNPQGNPPPPPPPDTNAILTQILAQQANMMNAFLHHLQNPPQQNAPPPPPQHSKLAEFLRIRPPTFSSSNNPVDALDWLHAVGKKLDTVQCSDEEKVIFAAHQLQGPASLWWDHFQATQPEGQPITWARFTAAFRRTHVPAGVVALKKKEFRELKQGNRSVMEYLHEFNNLARYAPEDVREDEEKQEKFLAGMDPELSVRLVSGDYPDFQRLVDKSIRLEAKHKELESHKRRLANFRNQQGANQRVRYTNPYPGGSSSQQQQQQQQQSRSAPRPQFVVRVPQPQQQQNQQGTRAPRPPTPAGQPVQGRRDASGPQRLCFNCFEPGHFADKCPKPRRQQGQAPPRSNNSGKDVLRGRVNHVTAEDVLTTPDVIVGTFLVHSIPATILFDSGASHSFISVPFVGKNQLGVERLRNPLLITTPGGVMTAKYYSPAVPIEIQGIPFPSDLILLDTKNLDVILGMNWLAQFQGVVDCTRRTVTLYRGPEQPVVFFAPPTSVRSSELHQIGPSEIPIVREFEDVFPEELPGMPPKREIEFRIDLVPGTTPLHKRPYRMAANELAEVKKQLEELKEKGYIRPSTSPWGAPVIFVEKKDKTKRMCVDYRALNEVTIKNKYPLPRIDDLFDQLKGATVFSKIDLRSGYHQLRIREEDIPKTAFTTRYGLYEFTVMSFGLTNAPAFFMNLMNKVFMEYLDKFVVVFIDDILIYSQSEEDHQHHLRLVLGKLREHQLYAKLSKCEFWLSEVKFLGHVISAKGVAVDPETVTAVTDWKQPKTVTQIRSFLGLAGYYRRFIENFSKIARPMTQLLKKEEKFVWSPQCEKAFQTLKEKLVSSPVLILPDTRKDFMVYCDASRQGLGCVLMQDGHVVAYASRQLRPHEGNYPTHDLELAAVVHALKIWRHYLIGNRCEIYTDHKSLKYIFTQSDLNLRQRRWLELIKDYDVGIHYHPGKANVVADALSRKSHCNTLNVRGIPPELNQQMEALNLSIVGRGFLAALEAKPTLLDQIREAQKNDPDMHGLLKNMKQGKAAGFTEDEHGTLWNGKRVCVPDNREPKQLILQEAHESPYSIHPGSTKMYLDLKEKYWWVSMKREIAEFVALCDVCQRVKAEHQRPAGLLQPLQVPEWKWDEIGMDFITGLPKTQGGYDSIWVIVDRLTKVARFIPVKTTYGGNKLAELYFARIVSLHGVPKKIVSDRGSQFISHFWKKLQEELGTRLNFSTAYHPQTDGQTERLNQILEDMLRACVLDFGKTWDKSLPYAEFSYNNSYQASIQMAPYEALYGRKCRTPLLWDQVGESQVFGTDILREAEAKVRIIRDNLKVAQSRQKSYADNRRRDLEFAVDDFVYLRVTPLRGVHRFQTKGKLAPRYVGPFRIIARRGEVAYQLELPASLGNVHDVFHVSQLKKCLRVPSEQADSEQIEVREDLTYVERPVKILDTMERRTRNRVIRFCKVQWSNHAEEEATWEREDELKAAHPDLFASSSESRGRDSV

SEQ ID NO: 25827 - protein, 1384 aa, Oryza sativa
  unsure (1)..(1384): unsure at all Xaa locations
  Clone ID: TF_OsC1713_4687.pep
TIAQKADFENNCKARNIILNAISRSDFDRVSHLATANEIWKAFNDFHTGSSNIKELQKDVFKKEYIKFEMNSGESLDDYLGRFNKILSDLGSVDASYNVNYSQSKVACYFMNGLDMKIWDVKVTSIQESVGMNTLTLDILYTKLKTYEMNILSKRTDSKSTALVSSSSSSIDSTPMSIFSAFNALSEDQLEGVSEEDLVLIANRASKALSNTRSRRRGGPQRCFECGQLGHIRSQCPKLRRGTKAVDQDEVKNAKNTKDDKQSKKQFKNMKMKKFYQKAIDEAYAAIQESSDVDFDSDGDDDKGKNIVGVCLMARSIDEDSGDDNEVIPPSSVEYYQDIIARLGFKISKFEKRXSPYEATIESLKAENSSIKSLVPDNDECQSCEVLCAEIKSNRDVCIKKLDVESRKTKKFESCVALSFAMNTRLVDELFLTKRALNKCQVALFASSIFNLISSKRIKQSSTKLFSTTCVANEMKLKYALGRVKHMEEIVKQDEVMSCSTCRKXKSVLDACKNCATLSQEVFYLKSSLQRFSKGKKNLNMILDQSKVNTNNRDLVVRMENVWIVDSGCMQHMTSDXSFLKKASRRDSIIFGDASTSSITTTGSVKVSDKFTLNDVTLVENLKYNLLSVSQIVDEDFDVLFKKTRSKVFNSSGDVVLNVSRYGRVFKADFENSVSSEVTCLVAKFSKDVMFXHRRLGHVGFDHLTRISGSDLVRGLPKLKKNLDLVCSPYRYAKMVASSHAPIISVMTDAPGHLLHMDTVGPTRVQFVGGKWYVLVVVDDFSRYSWVFFMATKDEPFEHFKSLYLRLSLEFAGSLRTIRSDNGISHLRVFGCKCFVLKSRNLDKFESHSTNGLMLGYSTHSRGYRVLVLETNKIVETCEVTFDEASPGTRPDVSGTLSXVQGEDIFVDESNDEEEDEMAAVQTGAXPVRPLAEDRSDRPGGSSSGASGDDGRGPPETSTSIGQGAEHEISSYATTPLHIQXRHPPQQMIGNIGEHTTRSKVTTRDHHVNSAFVANFEPKDVTHALTDESWINAMHEELENFERNKVWSLVEPPVGHNIIGTKWIXNEDGLIVRNKARLVAQGFTQMXGLDYDETFAPVARIEAIRLLLTFTASKGFKLYLMDVKSAFLNGYIQEEVYVKQPPGFENSEFPNHVFRLSKALYGLKQSPRAWHDRLENFLLAKGFIMGKVDKTLFVLKHGDDQLFVQIYVDDIIFGCSSHPLVVEFAETMRMEFEKSMMGELTYFLGLQIKQTKQGTFVHQTKYTKDLLRRFKMEDCKPMSTPIGSTPVLDPDEDGEVVDQKEYRSMIGSLLYLTASRPDIQFVVCLCACFQASPRASHRQAVKRIMRYLQXTLEFGIWYSTYSSICLSGYLDNKHRGTQTDNLIY

SEQ ID NO: 25828 - protein, 1631 aa, Oryza sativa
  Clone ID: TF_OsC359_7895.pep
MSDLGGKNGENGNEDGTSSKETPSPKGATIPFDYSKLTIPPHNFVSVPSRRAPQFDGTHYAAWKHKMKLHLIFLHPSIWKVVCIASNPILSALSPEEFNKVDGLEEAKEIWDTLQLAHEGSPAVREAKIELLEERLGRFVMDDKETPQEMYDRMMILVNKIKGLGSEDMTNHFVVKRLLHAFGPRNPTLVSMIWERKDFKRLTPSDILGRIVSHEMQEEEAREVRQMVKNATMIKNQEVALKAKQEEESSCEESEDEEMTFIVKRFKHFLRKSGYGKGRKDDDKGKRQSKRACFNCGEYGHFIADCLKSNEAKAKGGKKKPERAHVAEAHMAEVWYSGDEEDLEVKPKPKPKDKVEGEGGVATVAFKSSSSSKERLFNNLSDDDDDSYHYSCFMAQGHKVMTQKPSHTSLDVDSSDEESDNELDDVLKSFSKPAMQHLAKLMRALDSKEQSLERQEELLILEKERNLALVESLAKECAKNEQLANELNLANGSLASLRDVNETLQEKFASLDKSHKDLEVQFDTLWNSTSQPNVVSNSSNPSTSNGCARYYNIDLNSHATNVDAMQALKKENERLGTLVKYGCMKTYHSKDALYKTITAHPNKDGHGLRKFRASDRPKGLAGSSGYNARKFWPEGLYYDSYAYSSDGSSWVVDSGCTNHMTGERSMFTSLDEEGGSRENIVFGDDGKGKRVRSNNGGEFKNTQVEEFLDEEGIKHEFSAPYDPPQNGIVERKNRTLIEVARAMLDEYKTSDVFWAEAVSTACLAINRLYLHKILKKTSYELLSGKKPNVSYFHVFGSKCFILSKRSRSSKFSPKVDEGFLLGYESNAHAYRVFYKTSGIVEVTRDVTFDESNGSQGEQVVVHVVGDVDPNQAIGTNAIGDIRPVETQDDQEDRDQPPSSTSNSPTSAVSAEPEVPGPIDRNLRTSPDPEVPGSTVRNLRISGSEDVPTAQVDGIDAEGTLEHSDQAQVPPVHHPRIHHTVQRDHPVDNILGFEDPKLPNHVYKLHKALYGLKQAPRAWFEMSMMGELTFFLGLQVKQALEGTFISQTKYVKDILKKFGMEDAKPIKTPMPTNGYLDLDDNGRKFRCSWPGTSVVIMPREKRQKLSQDVPADSSPPVRGPRGRLGKEKVGVFYSGSQIPIHSRRAGSIVIRDAPRSPSPAASESDDGGNEDEPGSKSNPLRLYKTRAVDPDPKRTRVNYLKNLLQCGKDRMVSPDTLPADSQDDRFRTLVQVDWYNSMIMGRSHLVVEMKWLDWQYMSSKNNIVFNEVRKVCERKHVVDLLALQYSWNEEVIGQFYFTAFFGITKKGLDFVKWTIQGQQYRVSMAQFAAALGLDDDDLSRPHIFVEDALSPTSTTFMYEKDAPKDCLGTIRGLRPYYRVLYSIFRWSLLPKVGDATALPGRHALLLSRMRYNKPDFSIMKLIWSEIYKTMCEPKRGCIYAPYIMKMIEAKTGICYFKDNQHKLFRPHAPTTSATPTTRVTRASTSAAPSSSAAPQRSESSSPIKKALRAIFCMCAKTAKKVKKIERRQKEDWIAAGKDVSDISDDEEFVDPFAAYETARDIASGEGPSGTSRFFNEESSHSEESSDDEESNAPTENVLTDPDEAVDAAGQDIDSPHSGDTEIIPSDGDDDEA

SEQ ID NO: 25829 - protein, 244 aa, Oryza sativa
  unsure (1)..(244): unsure at all Xaa locations
  Clone ID: TF_LIB4506-006-R1-K1-A9.pep
SGFPGRPTRPETLLDISTLSLEEVTGRLKAAEDSGQSSSSSLPGGSGKLYLTEEEWLERHKKKEQEAKKGNGGGNTRGKRRGGQGCNGSGGGDNASPVRKKDKCRNCGKLGHWAKYCRSKPKQEQAHVAQEEDXPTLMLMTGGCIDVVEETGAPCATPSPPALRPRPDVIEFVEQKVIAALDDATDHDNKRXILDTDASNHMTGSXTNVTGNVRLGDGSLVHIGGRGTILFACKNVILTVETDR

SEQ ID NO: 25830 - protein, 1608 aa, Oryza sativa
  Clone ID: TF_OsC359_8211.pep
MDQYRPLVEDLKLLWKKEGVLPVWDEDKQGMLVAASVSLVDIEQPLSFDGVGTTRIEGLVEAAGSAREVDGGERGVGGGSGLGGECRRSVETPVGQVASGVGEEEATTTRKDVTGLAAPGSVEAAASGSARKAAAPGSVEGVAGDPRCLLYPPPPSLSPLVVGNALAPCALAPPSPPSLQPSFAAVPVVAVAREDRRRGRQVVAVLVRPFAVAVDRRSTVAVVKPKSAAASSSLPSPSVPLPPLFWSPRCRSPASVRRPSRRAAAAGGDVTADVIVALSRGDYDPGKVRCSGLCYARGIVTTPFRGTVVMPRYKPEYLFGVEGFVQELSTMSFVIGFGTAPFYAQIPHDRHEEKCRVKVTLNSNSEDIPSVMFEAGGRNYIHACQEVARIAIGELRDRYSDQLADTEYRYHPRQPQGSDRGSYLETEGIENDATTRHLVEMLWAMDESRAETVLAAQDREDRNRGKICKLEDKVDRLERELAALKGEAPPQKARIRLTARKRALFVPRYQLAPKVRVVEKEVAPTLADPPVIIISDDEEEESKRNHSKIEWEATQDDEDEPNEPSIDLRCSEELDNGNGPNNNNNNNNEGNPTLAQVLAQQTQLMNMMMQQLQNQQNQGNNHAPPQNKLAEFLRVRPPIFSSTSNPVEAGDWLHAIEKKLDLLQCTDQEKVSFASHQLHGPASEWWDHFRLNRTTAEPITWLEFTAAFRKTHIPSGVVSLKKKEFRSLTQGSRSVTEYLHEFNRLARYAPEDVRNDEERQEKFLEGLNDELSYPLMTGDYSDFQKLVDKAIRQEDKNNRMEQKKRRIAQFKTQQGNNQKPRLTLGPQTMPHGGSSSVVRPQRQFFNNNAGNNICNQAPRPVAAPTQQQPSKREQGSKPVVCFNCGDLGHYADKCPKPRRVKVVPTQSNSTVPASKARVNHVAAAEAQDAPDVILVREYPDVFPDDLPANELAEVKRQVDDLLQKGYIRPSLSPWGAPVIFVEKKDHTQRMCVDYRALNDVTIKNKYPLPRIDDLFDQLKGATVFSKIDLRSGYHQLRIKEEDIPKTAFTTRYGLFECTVMSFGLTNAPAFFMNLMNKVFMEYLDKFVVVFIDDILIYSRTKEEHEEHLRLALEKLREHQLYAKFSKCEFWLSEVKFLGHVISAGGVAVDPSNVESVTNWKQPKTVSEIRSFLGLAGYYRRFIENFSKIAKPMTRLLQKDVKYKWSEECEQSFQELKNRLISAPILILPDPKKGFQVYCDASKLGLSCVLMQDGKPSFAAVPVVAVAREDRRRGRQVVAVLVRPFAVTVDRRSTVAVVKPKSAAASSSLPSPSVPLPPLFWSPRCRSPASVHRPSRRAAAAGGDVTADVIVALSREPAGPPAALADGWVPPVISLLAPRRRPPVPPAIPSPVSPVFPSLSPSDSSGFIPQSSPASSMAAEISAPVSFLSGRALPLSALYICSPCFALPFPPLAARSPRRIRARAVFLSLRRRRRAPVRRRRRSALPPDSAPPPSASPRRRRPRPPLRFARRPPEHRRPRRPEPRRRVPPLRSSSPPSSCLGVSRGPSLSLPSPLRSLGRRSAAPVVAGGDHRGAVVPPPVGRAGEAAFGRALAAAKWARPSAARARGCG

SEQ ID NO: 25831 - protein, 1676 aa, Oryza sativa
  Clone ID: TF_OsC1713_5373.pep
MRLLPTASPLSEALVPSALLARAHDLRARSPSQIQRPLLPSRGDSVHNQNNSLNGIKPKGLVRKIGYIPHRPTQMASRRRASTSNEETQVPDLTTLARVMATQTQLLQAIANNQDNCGGSSFGEFMRTKPPTFATADEPMEAEDWLRIIEKKLTLVRVRETDKVIFAVNQLEGPASDWWDTYKEARENDAGEPTWEEFTAAFRENFVPAAVMRMKKNEFRWLRQGNTTVQEYLNKFTQLARYAIGDLADEEEKIDKFIEGLNDELRGPMIGQDHESFQSLINKVVRLENDQRTVEHNRKRRLAMSRLPQIVPQRLKGATSSGWKPPIVATNRPAAPSNFNRPVAIQNRTPTPTLAAPGAKMNVNCFNCGGYGHYANNCPHPRKTPVRTGTNAMTVRGTTTPVTGRGLFKTPQSNRTATGLGRGQVNHVRAEEAQEDQGILMGMFSINSTPVKVLFDSGASHSFISLKASQKHNLTLVGLRKPMIVHSPGGEITVSHACIDVPIRLRDVVFPSNLMILIPQTLDVILGMDWLTKNRGVIDCGRREVTLTTPWGSDMRATMDQDPRLTERAGGIFTMLPLKGMPVVQRFPDVFPEDLPGMPPDRDIKFIIDLIPGTAPISKRPYRMPVNELEELKKQIRELQEKGFVRPSSSPWGAPVLFVKKKDGSMRMCVDYRSLNEVTIKNKYLLPRFDDLFDQLKGAKVFSKIDIRSGYHQLKIRTKDIPKTAFSTHYGLYEFTVMSFGLTNAPAYFMNLMNKINTLDIQPLLRTQIEEAQKDNEEIRELKERLAAGRAKEFSIDEKDVLWYKKRIYVPEQGGLRGLILKEAHESAYSLHPGSTKMYQDLKEGYWWPNMKRDVAEYVALCDVCQKVKAEHQRPAGLLQPLRIPEWKWDEIGMDFIVGLPKTATGYDSIWVIVDRLTKTARFIPVKTNYSSAKLAELYMTRIVCLHGIPKRIISDRGTQFTSHFWEKVHEALGSYLAFSTAYHPQTDGQTERTNQVLEDMLRACALDFSKDWERCLPYAEFSYNNSFQASLKMSPNEALFGRRCRTPLMWSETGERAVFGPDIINEAEEKVRLIRDRLKVAQSRQKSYADTRRRNLEFKEGDYVYLKVSPMRGTKRFRVKGKLAPRYVGPFQITARRGEVAYQLQLPENIADVHPVFHVSQLKKCLRVPEEQAPLEEIHISNDLTYPEHPIRILDEAEKRTRSKVWRMNKEAVRSEIDSIMSNGTWEVVERLYGSKPVGCKWVFKKKLRPEVTIEKYKARLVAKGYTQKEGEDFFDTYSSVAHLTTIRVLLALAASHALLVHQMDVKTAFLNGELEEEIYMDQPNGYALEGREGMVCKLLKSLYGLKQAPKQWHEKFDTTLTSAGFVVNETDKCVYYRYGGGEGVILCLYVDDILIFRTSLNVIEEVKDFLSKSFEMKDLGEADVILNIKLLRGDEGGITLVQSHYVDKVLSRFGHNDCKPAPTPYDPSVLLRKNRRIARDQLRYSQIIGSLMYLASATRPDISFAVSKLSRFVSNLVDDHWQALERVMRYLKGTMSYGIHYTGYLKVLEGYSDSNWISDADEIKATSGYVFTLGGGTVSWKSCKQTILTRSTMEAELTGLDTATVEAEWLRELLMDLPVVEKPVPAILTNCDNQTVIIKVNSSKDNVKSSRHIKIRLKSVRKQKNSGVIALDYV

SEQ ID NO: 25832 - protein, 893 aa, Oryza sativa
  Clone ID: TF_OsC1713_4627.pep
MRVNLQAQGLWTAIDPCYAEYREDRAALSAILQAVPREMLRGLAKHDTAKAAWDAIKTMRVGVDRVSEAREQGFRRQFEAMRFKDGETPEEFAMRLTAIVADMRNMGGVMEDEHINKKLLRVVPKKYKPVAISLEQLLDVKTMALEELIEWLSTVDSYSDDEEASDGGKLSSGRPVSSSGSRRDLAAATRAGRALATRTVEARPAIHRRERRWPPAAMAVVKCFNCDEYGHYSKQCRMPRRQCRGEANANLVQAEEEPTLLMAHVMGVSLAGEAAVGRTPCVQEVHLTEKKVVLDHEDGRKEEKTGEWFLDTGATNHLTGARSAFAELDTGVVGTGRGTVVFQSKNGDHRSLEAVYYIPKLRKNIVSVGRLDARGYDAHIWHGVFTLRDPEGMQLAKVNRDSSYLYVLKLNLATLICMAASGSELAWRWHARFGHLNFLALRRLAKGGVVRRIPQIDHIDQLCDGYLAGKQHRTPFPEEAQYRAQTALELVHGDLCGPITPATTGGKKYFLLLVDDMSHHMWIRLLSAKHEASAAIKPAWRRIAIGSSWRCALIAGQNSVVERRNQTVVAAARSMLKAANMLAYFWGEAVVAAVYVLSKSPMKSLDGVTPYEAWYGRRPTVEHLRVFECVGYVKTAKPNLRKLDDRSTRMVFIGYEQGSKAYKINTDEEGDQDAYVEFTVENFTIPVQGSETHAQDAAATPTMLATSPTSSTGTATTLPSGVEFCSPPTDASEGTDEGPRSYRTVVNTLATLTPILDFNYSDQCLMAAEEPASFLEAEQESCWRKAMLEEMESIEGNNTWTLYDLPSSHRATGLKWVYKIKRDAKDVIVKYKARLVAKGYVHQQGVDFDEVFAPVTRMETVRLLIATAAHQGWEVHQMDVKLAFLNRELEEDA

SEQ ID NO: 25833 - protein, 302 aa, Oryza sativa
  unsure (1)..(302): unsure at all Xaa locations
  Clone ID: TF_OsC333009_5.pep
CHCSGSGSGSALGGHELVVQQVKEVGLTLCYPMLEENNYGVWAVKMKIFMRAQGVWAAVEGNTADEKMDQMALTAIVQAMPEAVVMTIFEKETAKAAXDALKLMNMGEESIKKAXVQTLKSELDGMKMGNSEKINDFALKVTTIMNEIHSLGVKVEETTVVEKLLHSVPEKSXSLISTIEQWGDVSEMMVTKTIGHLRAFEDSSQGLRRDKEGEQQLFAAYAEPRLMRAEWEAKVAKERRSGGGSGSSSGGDKRKYHGKFDKAKVHCYNCQEYGHFADECPKPKKDMAFLATVDADDEPTLV

SEQ ID NO: 25834 - protein, 1424 aa, Oryza sativa; identical to SEQ ID NO: 18868
  Clone ID: TF_OsC359_5853.pep

SEQ ID NO: 25835 - protein, 1603 aa, Oryza sativa
  unsure (1)..(1603): unsure at all Xaa locations
  Clone ID: TF_OsC359_5908.pep
CQRPYRARATDDMLRTVSLIIRLQPTAPPPPKPPPTPPVSPFPAAHSARNPKPTSPPTFPAPPASSGARKRRGGFEISPTLSLLLHMVKTRNDPRDSNDASGSEEQTDGAHVSGASGSRSSPPPENPTVTQMMTMMMQQMQQHYHQMLQQAQQNQQFGPPPSHVSKLLDFLRIQPPTFSSTTNPMEANDWLRAIEKKLNLLQCNDQEKVAFATHQLQGPASAWWDNYVATRLDATEVTWAEFCQSFRKAQIPEGIMAQXKREFRALQQGTMSVTEYLHEFNRLARYAPEDVRTDAEKQEKFLFGLDDELTNQLISGVYEDFEKLVDKAIRQEEQRNKMDRKRKAAQISFPQGNNQKPRFMTGQLGGPSTLIVCQHRPYHPSNFDNDYNGGSHNNSKQHNHNSTPPPLMAPAQSDPPAVSAQSEQPKKRAVGKPGPCFNCGKHGHFASKCPKLNRTGPRFIQAHANHVSAVEAQAAPEVVLGTFPVNSYPATVLFDSGASHSFISKRFAGTHGLSVVELKIPMQVHTPGNDMRTAHYCPSVTIEIRRSPFLSNLILLESKDLDVILGMDWLTRNKGVIDCASRTITLTNDKGEKITFRSPASQKSVASLNQAAIEGQTETVEKSPRKLEDIPIVQEYPEVFPEDLTTMPPKREIEFRIDLAPGTTPIYKRPYRMAANELAEVKKQVDEQLQKGYIRPSTSPWGAPVIFVEKKDKTKRMCVDYRALNEVTIKNKYPLPRIDDLFDQLKGAKVFSKIDLRSGYHQLRIREEDIPKTAFTTRYGLFECTVMSFGLTNAPAFFMNLMNKVFMEFLDKFVVVFIDDILIYSKSEEEHEQHLRLVLEKLKEHQLYAKFSKCDFWLSEVKFLGHVISAQGVAVDPSNVESVTKWTPPKTVSQIRSFLGLAGYYRRFIENFSKIARPMTQLLKKDKKFKWSAECNQSFEELKKKLVSAPVLILPDQTKDFQVYCDASRQGLGCVLMQEGRVVAYASRQLRPHETNYPTHDLELAAVVHALKIWRHYLIGNRCEVYTDHKSLKYIFTQPDLNLRQRRWLELIKDYDMGIHYHPGKANVVADALSRKSYCNAVCTEGMCDKLQQDLEHLNLGIVEHGYVAALEARPTLVDQVRAAQVNDPEIAELKKNMRVGKARDFHEDENGTIWLGERLCVPDDKELKDLILTEAHQTQYSIHPGSTKMYQDLKEKFWWVSMRREIAEFVALCDVCQRVKAEHQRPAGLLQPLQIPEWKWEEIGMDFITGLPRTSSGHDSIWVVVDRLTKVAHFIPVHTTYTGKRLAELYLSRIMCLHGVPKKIVSDRGSQFTSKFWQKLQEELGTRLNFSTAYHPQTDGQTERVNQILXDMLRACALDFGGAWDKSLPYAEFSYNNSYQSSLQMVPFEALYGRKCRTPLFWDQTGERQLFGTEVLTEAEEKVRTVRERLRIAQSRQKSYADNRRRELTFEAGDYVYXLRVTPLRGVHRFQTKGKLAPRFVRPYRILERRGEVAYQLELPPNMVGIHDVFHVSQLKKCLRVPEEQASSEHIDIQEDLTYVEKPVRILETSERRTRSKVIRFCKVQWSHHSEEEATWEREDELKAAHPHLFASSSESRGRDSV

SEQ ID NO: 25836 - protein, 1309 aa, Oryza sativa; identical to SEQ ID NO: 18867
  Clone ID: TF_OsC359_6656.pep

SEQ ID NO: 25837 - protein, 1408 aa, Oryza sativa; identical to SEQ ID NO: 18862
  Clone ID: TF_OsC359_7205.pep

SEQ ID NO: 25838 - protein, 309 aa, Oryza sativa; identical to SEQ ID NO: 18871
  Clone ID: TF_OsC55897_1.pep

SEQ ID NO: 25839 - protein, 1828 aa, Oryza sativa
  unsure (1)..(1828): unsure at all Xaa locations
  Clone ID: TF_OsC359_6573.pep
RGDHPTNYRGEGIDDFVAELARMTLVVGYPNASEYSTVPPLSGKLPHRVRLEVHGXVGTCLANMVVVASGGTADHACQEAAYLMMARLRERDNYIFCNTAYRFHPRRASGDGVSTFRPTAGENDTTFGHMCAMMRGMDRMHSDLHKASKALNDGKLVRIIALKDEIARLKKENAHLKGLPIPGGVRIRTMPRKSTTAPVRIXLAPRNPPPPAALAAPPVPPAVPAAPAAPPPVPAPVPVSAPASALSFAPASAARGPASGNGGWLPATPSGSRDHSSSSSSGSELGSGETYLLDSRSRSEGPGLFLQMANTRNGSRAAGEGSNGEERTDGGYPNSASGNGPPPLPENPTLAPVMAHQTQMMAAMMQQMQQRHQQMHQRMQQQAEQQXQQFGPPPPQSKLLEFLRVRPPTFSSTTNPMEANDWLHTIEKKLNLLQCNDQEKVAFATHQLQGPVSAWWDNHMATRPAGTEVTWVEFCRSFRKAXVPDGVVAQKKREFRALHQGNRTVTEYLHEFNRLAXYAPEDVRTDAEKQEKFLAGLDDELTNQLISGDYADFEKLVDKAIRQEDQRNKVDRKRKPAQFRSNQGSHQRPRFTPGQQGGPTTMIVRQHRPFNSSSFHPGASGSXNHQGGQLNCSAALRPPMAPAQSVPSAQAKKETRAKPRSCFNCGEHGHFANKCPKPRRAGPRFAQARVNHASAEEAQAAPEVVLGTFLVNSVPATVLFDSGATHSFISKKFVGMHGLRKEELSTPMRVHTPGNSSTSVSYSPLVLIEIHLSQFLANLILLESKDLDVILGLDGLTKFKGVIDCANRTVTLTNEKGETMVYKSPVSPKQRISLNQIEVENPVTTEEKSSRKLEDIPIVCEYPEVFPEDLTTMPPKREIEFRIDLAPGNAPIYKRPYRMVANELAEVKKQVDEQLQKGYIRLSTSPWGAPVIFVDKKDKTKRMCVDYRALNEVTIKNKYPLPRIDDLFDQLNGAKVFSKIDLRSGYHQLRIREXDIPKTAFTTRYGLYECTVMSFGLTNAPAFFMNLMNKMFMEFLDKFVVVFIDDILIYSKLEEEHERHLRLVLEKLEEHQLYAKFSKCDFWLSEVKFLGHVITAQGVAVDPSNVESVTKWTPPKTVSQIRSFLGLAGYYRRFIENFSRIARPMTQLLKKDEKFKWTAECDKSFEEFNKKLVSTPVLILPDQTKDFQVYCNASRHGLGCVLMQEGRVVAYASRQLRPHEGNYPTHDLELAAVVYALKIWTRYLIGNRCEVYTDHKSLKYIFTQPDVNLRQRRWLELIKDYDMSIHYHPGKANVVADALSRKSYCNTLCTEGMCKELQQELEHLNLGLVEYGYVAALEARPTLVDQVRAAQVNDPEIADMKKNMRVGKARDFHEDEHGTIWLGERLCVPDDKELKDLILTEAHQTQYSIHPGNTKMXQDLKEKFWXVSMRREIAEFVALCDVCQRVKAEHQRPAGFLQPLQIPKWKWEEIGMDFITGLPRTSSGHDSIWVVVNRLTKVAHFIPVHTTYTGKKLAELYLARIMCLHGVPKKIVSDRGSQFTSKFWQKLQKELGTRLNFSTTYHPQTDGQTERVNQILEDMLRACVLDFGGAWDKSLPYAEFSYNNSYQASLQMAPFEALYGRKCRTPLYWDQTGERQLFATEVLTKAEEKVRTVRERLRIAQSRQKSYADNRRRELTFEAGDYMYLRVTPLRGVHRFQTKGKLAPRFVGPYKILEQRGEVAYQLELPSNMIGIHVMFHVSQLKKCLRVPEEQADSEHIDIQEDLTYVEKPVRILETSERRTRNKVTRFCRVQWSHHLEEXATWERENGLKAAHPHLFTSSSESRGRDSV

SEQ ID NO: 25840 - protein, 1028 aa, Oryza sativa
  Clone ID: TF_OsC1528_1598.pep
MTDEVVVKKMVRAITPRNSTLVTIIRLNTYRGDGKTGCVKTANPAGSHDRRLPGGGGNGSGGGCCALPSARSGKRGFGGLPRPAADRRRQQRRRWPHPLHLAGLTGWHRRSDRHVKAGFAITGTPLTEIDHRNLQLNAHAMNALFNSLCQEEFDRVSSLETAYEIWNKLVEIHEGTSEYKDAKLHFLKIQYETFSMLPHESVNDMYGRLNVIVNDLKGLGANYTDLEVAQKMLRALPEKYETLVTMLINSDMSRMTPASLLGKINTNDMYKLKKKEMEEASPSKKCIAFQAEVEDKGKVKVNEANKDLEEEIALLARRFNDLLGRRKERGRGSNSNRRRNRRPNKTLSNLRCFECGEKGHFASKCPSKDDDGDKSSKKKSGGYKLMKKLKKEGKKIEAFIGEWDSNEESSVSSGSEEEGGDDASSKKKKMAVVAIKEAPSLFAPLCLMAKGSSKVTSLSDSESDDDCDDISYDELVSMFEELHAYSEKDIVKFKALKKDHASLEVLYEELKTSYERLTISHEKLKEAHDNLLSTTQHGAHIDVGISCDLLDYSATCHIAHVASSSISTSCDDLVDMPSSSSCVSICDASLVVENNELKEQVAKLNNSLEKCFKGKNTLDKILSEQWCILNKEGLGFIPKKGKKPSHRATHFVKSNGRLMMVALLLDLWVPLYLVVNYRTGGSHWVLDSGCTQHMTGFLLSYASNSKAYWVYNKNKGIVEETADVQFDETNGSQEGHENLDDVGDEGLMIAMKNMSVRDVKPIEVEHKPSTSTQGEPSTSASPSQAQVEMEEEKAQDPPMPPRIHTALSKDHPINQVLGDISKDEALCDPDWMNAMHEELNNFTRNKVWTLVERPRDHNVIGTKWVFRNKQDENELVQLKDGTFVSQTKYIKDLLKRFGLEDAKPIKTPMATNRYLDLDEGVGWGRRSDRPYRLGLTGLELAPEMTSDKQYTCLLLRSSALPVDARFILHSMASDFLATLALKPGMDLTGTDIPTPGVSTPASARDESQEALIILTGWGEACDRPPVAT

SEQ ID NO: 25841 - protein, 788 aa, Oryza sativa
  Clone ID: TF_OsC1528_2224.pep
MSDARSRRSVASSTRRQQDAELAAAEERRRATAQTAAAAARAARLAAAELAAARAEAEAEAAEDAARAAEVEVETLRSSINGSIAGDITADRELEELARGRARERAERWAAAHLHGGGGGPRDRASADGNPDGRRRAGGSPELARGPRRQHGSLSPDRRHGHHGVQTVVRDFGPGGGWPTLTKTNYIEWAAVMRVRLQVWHMWEAVRYSDVDYDEDRRALDALIAAVPPEMQFSLSQKRTAKEAWDAIAAARIGSDRARKSTLQALRKEWENLAFKPGEDVDDFALRLNTLLQKMVQYGDDTYDEERAVEKLFRCVPEKYRQIARSIESLLDLSTMSIEEALGRLKVVDGDEPQPLSGPITIGGKLHLTREQWEASQGDGRKGESSSPTGGRKPRKARGGVQLRWARRRAEGGARRGAQGIATGNHKPARDDACRNYGKLGHWAKDCRQPRRGQAHVARVEEEEPALLLAHASIELPPAAPAAAAFLHLDEPKVLVSLCNGSSNDKADGWYLDTGATHHMTGRREFFTEFDSSVRGSVKFGDASGVEIKGVGSVTFTAKSGEHRLLTGVYYIPALRNSIISVGQLDENGSRVLVEDGLMRIWDRRRHLLAKVTRGTNRLYILSAQVAQPVCLAARRDDEAWQWHERFGHLHFEALKQLSAKEMVRGMPCLDVTPRNSRIEFQAECALKSPSRTSRGTQTTMLTFRSTSERGRDRTIRITPSNQAHHTSGFTPTPRKAAGSPLSCLGESGSRIGRRRAHPNSIMPTLAWMRRLEESYTTSPAVARAGLW

SEQ ID NO: 25842 - protein, 1789 aa, Oryza sativa
  unsure (1)..(1789): unsure at all Xaa locations
  Clone ID: TF_OsC1713_3706.pep
MSNEVNHVGKAPMFNGTNYSTWKIKMSTHLKAMSFHIWSIVDVGFAITGKPLTEIDHRNLQLNAQAMNALFNSLSQEEFDRVSNLETAYEIWNKLAEIHEGTSEYKDAKLHFLKIQYETFSMLPHESVNDMYGRLNVIVNDLKGLGTNYTDLEVAQKMLRALPEKYETLVTMLINSDMSMMTPASLLGKINTNDMYKLKKKEMEEASPSKKCIALQAEVEDKGKGKVNEANEDLEEEIALLARRFNDLLGRRKERGRGSNSNRRRNRRPNKTLSNLRCFECGEKGHFASKCPSKDDDGDKSCKKKSGGYKLMKKLKKEGKKIEAFIGEWDSNEESSASSGSEEEGGDDASSKKKKMAVVAIKEALSLFAPLCLMAKGSSKVTSLSDNESDDDCDDVSYDELVSMFEELHAYSEKEIVKFKALKKDHASLEVLYEELKTSHERLTISHEKLKEAHDNLLSTTQHGALIDVGISCDLLDDSATCHIAHVASSSISISCDDLVDMSSSSSCISICDASLVVENNELKEQVAKLNKSLERCFKGKNTLDKILSEQRCILNKEGLGFIPKKGKKPSNRATRFVKSNGXAHDGSIVARYVGSPILGGELPHRWEPXVLDSGCTQHMTGDRAMFTTFEVGGNEQEKVTFGDNSKGKSIVAELFKKFAKRAQNEFSCTLVKIRSDNGSEFKNTNIEDYCDDLGIKHELSATYSPQQNGVVERKNRTLIEMARTMLDEYGVSDSFGAEAINTACHATNRLYLHILLKKTFYELIVGRKPNVAYFQVFGCKCYIYRKGVRLTKFESRCDEGFLLGYASNSKAYRVYNKNKGIVEETADVQFDETNGSQEGHENLDDVGDEGLMRTMKNMSIGDVKPIEVEDKPSTSTQDEPSTSAMPSQAQVEVEEEKVQDPPMPPRIHTALSKDHPIDQVLGDISKGVQTRSRVASICEHYSFVSCLEPKHVDEALCDPDWMNAMHEELNNFARNKVWTLVERPRDHNVIGTKWVFRNKQDENGLVVRNKARLVAQGFTKVEGLDFGETFAPVARLEAIRILLAFASCFDIKLFQMDVKSAFLNGEIAELVFVEQPPGFEDSKYPNHVYKLSKALYGLKQAPRAWYERLRYFLLSKDFKIGKVDTTLFTKIIDDDFFVCQIYVDDIIFGSTNEVFCKKFGDMMSREFEMSMIGELSFFLGLQIKQLKDGTFVSQTKYIKDLLKRFGLEDAKPIKTPMATNGHLDLDEGGKPVDLKLYRSMIGSLLYLTASRPDIMFSVCTCARFQAAPKECHLVAVKRILRYLKYSSTIGLWYPKGAKFKLAGYSDSDYAGCKVDRKSTSGSCQMLGRSLVSWSSKKQNSVALSTAEAEYVSAAMPPRTRHGRREPMPNPVNENEESSGDEYVQSDDDNMENVEGDEMEVSDDGDDNGSGNGEDDEASDDGSPLDSTIQFVFNLRNAQQYTILRHHDQFRRPNDCNDPRFHTQFQKSVYEQVYANKAFAEHKWISWRHIGETPEFEDLQEMFWTVGIDRIVTMKQSFDEDLIRQFYATVWVSGDCDAMKWMSGTLQCSINRREFKELLHIRFNNGDDLHDEHTHNPFPIDHFSQIYEDGGRHTYGKVAVRATILPRCGNNDDIRGVAWHVIDAILDGRRFDVINLMMKEIAISKGTIGQGIYYAPYIMRLIQSKLGQIGHNLKEHKEYKPRLQLSSPKAPRVRQPTFDQGASSSAAPPPPHGSDPSAFFHPQYAYFGMQPNEFFNPVLGAINTLSESIQRLSTGHEALHEDVRGLRTDVGNLNTSVGRLHTRVGVLDS

SEQ ID NO: 25843 - protein, 1540 aa, Oryza sativa
  unsure (1)..(1540): unsure at all Xaa locations
  Clone ID: TF_OsC1713_3872.pep
MSNEVNHVGKAPMFNGTNYSTWKIKMSTHLKAMSFHIWSIVDVGFAITGTPLTEIDHRNLQLNAQAMNALFNSLSQEEFDRVSNLETAYEIWNKLAKIHEGTSEYKDAKLHFLKIQYETFSMLPHESVNDMYGRLNVIVNDLKGLGANYTDLEVAKKMLRALPEKYETLVTMLINSDMSRMTPASLLGKINTNDMYKLKKKEMEEASPSKKCIALQAEVEDKGKVNDVNKNLEEEIALLARRFNDFLGRRKERGKGSNSNRRRNKRPNKTLSNLRCFECGEKGHFASKCPSKDDDGDKSSKKKSGGYKLMKKLKKEGKKIEAFIGEWDSNEESSASSGSKEEDGDDASSKKKKMAVVAIKEAPSLFAPLCLMAKGSSKVTSLSDSESDDDCDDISYDELVSMFEELHAYSEKEIVKFKALKKDHASLEVLYEELKTSHERLTISHEKLKEAHDNLLSTTQHGALIDVGISCDLLDDXSSSSSCVSICDASLVVENNELKXQVAKLNKSLERCFKGXNYHTGGSHWVLDSGCTQHMTGDRAMFTTFEVGGNEQEKVTFVDNSKRKVIGLGKIAISNDLSIDNVSFVKSLNFNLLSVAQICDLGLSCAFFPQEVIVSSLLDKSCVFKGFRYGNLYFVDFNSSEANLKTCLVAKTSLGWLWHRRLAHVGMNQLSKLSKRDLVVGLKDVKFEKDKLCSACQAGKQVACSHPTKSIMSTSRPLELLHMDLFGPTTYKSIGGNSHCLVIVDDYSRYTWVFFLHDKSIVAELFKKIAKRAQNEFSCTLVKIRSDNGSEFKNTNIEDYCDDLGIKHELSATYSPQQNGVVERKNRTLIEMARTMLDEYGVSDSFWAEAINTACHATNRFYLHRLLKNTSYELIVGRKPNVAYFRVFGCKCYIYRKGVRLTKFESRCDEGFLLGYASNSKAYRVYNKNKGTVEETADVQFDETNGSQEGHENLDDVGDEGLIRAMKNMSFGDVKPIEVEDKPSTSTQDEPSTFATPSQAQVEVEEEKAQDPPIPPRIHTTLSKDHPIDQVLGDISKGVQTLSRVASICEHYSFVSCLEPKHVDEALCDPDWMNAMHEELNNFARNKVWTLVERPRDHNVIGTKWVFRNKQDENGLVVRNKARLVAQGFTQVEGLDFGETFAPVARLEAICILLAFASWFDIKLFQMDVKSAFLNGEIAELVFVEQPPGFEDPKYPNHDFKIGKVDTTLFTKIIGDDFFVCQIYVDDIIFGSTNEVFCKEFGDMMSREFEMSMIGELSFFLGLQIKQLKDGTFVSQTKYIKDLLKRFGLEDAKPIKTPMATNGHLDLDEGGKPVDLKLYRSMIGSLLYLTASRPDIMFSVCMCAWFQAAPKECHLVAVKRILRYLKYSSTIGLWYPKGAKFKLVGYSDSDYAGCKVDRNSTSGSCQMLGRSLVSWSSKKQNSVALSTAEAEYVSAGSCCAQLLWMKQTLLDYGISFTKTPLLCDNDSAIKIANNPVQHSRTKHIDIRHHFLRDHVAKCDIVISHIRTEDQLADIFTKPLDETRFCKLRNELNVIDFSNVA

SEQ ID NO: 25844 - protein, 1376 aa, Oryza sativa
  unsure (1)..(1376): unsure at all Xaa locations
  Clone ID: TF_OsC1713_3951.pep
MRAQVSTRMPSFISSRSNMRHSPCCLMXSVNDMYGRLNVIVNDLKGLGANYTDLEVAQKMLRALPEKYETLVTMLINSDKSRMTPASLLGKINTNDMYKLKKKEMEEASPSKKCIALQAEVEDKGKGKVNEANEDLEEEIALLARRFNDLLGRRKERGRGSNSNRRRNRRPNKTLSNLRCFECGEKGHFASKCPSKDDDGDKSSKKKSGGYKLMKKLKNSASSGSEEEGGDDASSKKKKMAVVAIKEALSLFAPLCLMAKGSSKVTSLSDSESNDNCNDVSYDELVSMFEELHAYSEKKIVKFMALKKDHASLEVLYEELKTSHERLTISPEKLKEAHDNLLSTTQHEALIDVGISCDLLDDSATCHIAHVASSSISTSCDDLVDMSSSRSSSCVSICDVSLVVENNELKEQVAKLNKSLERCFKGKNTLDKILSEQWCILNKEGLGFIPKKGKKPSHCATRFVKSNGRLMMVALLLDMWVPLYSVVNYRTGGSHWVLDSGCTQHXDRAMFTTFEVGGNEQEKVTFGDNSKGKVIGLGKIAISNDLSIDNVSLVKSLNFNLLSVAQICDLGLSCAFFPQEVIVSSLLDKSCVFKGFRYGNLYLVDFNSSEANLKTCLVAKTSLGWLXHRRLAHVGMNQLSKLSKRDLVVGLKDVKFEKYKLCSACQAGKQIACSHPTKSIMSTSRLLELLHMDLFGPTTYKSIGGNSHCLVIVDDYSRYTWVFFLHVKSIVAELFKKFXKRAQNKFNCTLVKIRSDNGSEFKNTNIEDYCDDLGYASNSKVYRVYNKNKGIVEETADVQFDETNGSQEGHENLDDVGDEGLMRAMKNMSIGDVKPIEVEDKPSTSTQDEPSTSAMPSQAXVEVEEEKAQDPPMPLRIHTALSKDHPIDQVLGDISKGVQTRSRVASICELYSFVSCLEPKHVDEAPCDPDWMNAMHEELNNFARNKVWTLVERPRDHNVIGTKWVFRNKQDENGLVVRNKVRLVAQGFTQVEGLDFGETFAPVARLEDIRILLTFASCFDIKLFQIDVKSAFLNDFKIGKVDTTIFTKIIGDDFFVCQIYVDDIIFGSTNEVFCKEFGDMMSREFEMSMIRELSFFLGLQIKQLKDGTFVSQTKYIKDLLKRFSLEDAKPIKTPMATNGHFDLDEGGKPVDLKLYRSMIGSLLYLTASRPDIMFSVCMCARFQAAPKECHLVAVKRILRYLKHSCTIGLWYPKGAKFKLVGYSDSDYAGCKVDRKSTSGSCQMLGRSLVSWSSKKQNSVDLSTAEAEYVSAGSYCAQLLWMKQTLLDYGISFTKTTLLCDNDSAIKIANNPVQHSRTKHIDIRHHFLRHHVAKCDIVISHIRTEDQLADIFTKPLDETHFCKLRNELNVIDFSNVA

SEQ ID NO: 25845 - protein, 1791 aa, Oryza sativa
  unsure (1)..(1791): unsure at all Xaa locations
  Clone ID: TF_OsC1713_4363.pep
ELVWHLIDHLHAGSLLVTLGGCRLLDGLWRSCLVISPRRLWRRPGAGFAITGTPLTEIDHRNLQLNAQXMNALFNSLSQEEFDRVSNLETAYEIWNKLAEIHEGTSEYKNAKLHFLKIXYETFSMLPHESVNDMYGRLNVIVNDLKGLGANYTDFEVAQKMLRALPENYETLFTMLINSDMSRMTPASLLGKINTNDMYKLKKKEMEEASPSKKCIALQAEVEDKGKGKERGRGSNSNRRRNRRPNKTFSNLRCFECGEKGHFASKCPSKDDDGDKSSKKKSGGYKLMKKLKKEGKKIEAFIGEWDSNEESSASSGSEEEGGDDXSSKKKKMAVVAIKEAPHSLLKGSSKVTSLSDSEGDDDCDDVSYDEFVSMFEELQAYNEKEIVKFKALKKDHASLDVLYEELKTSHERLTISHEKLKEAHDNLLSTTQHGAHIDVGISCDLLDDSATCHIAHVASSSIPTSCDDLVDMPSSSSSSCVSICDASLVVENNELKEQVANXDKSLERCFKGRLMMVALLLDMWVPLYSVVNYRTGGSHWVLDSGCTQHMTGDRAMFTTFEVGGNEQEKVTFGDNSKGKVIGLVVKTSLGWLWHRRLAHVSMNQLSKLSKRDLVVGLKDVKFEKDKLCSACQAGKQVACSHPTKSIMSTSRPLELLHMDLFGPTTYKSIGVERKNRTLIEMARTMLDEYGVSDSFWAEAINTACYATNRLYLHHLLKKTSYELIVGRKPNVAYFRVFGCKCYIYRKGVRLTKFASRCDEGFLLGYASNSKAYRVYNKNKGIVEETANVHFDETNGSQEGHENLDDVGDEGLMRAMKNMSIRDVKPIKVEDKPSTFTQDEPSTSATPSQAQVEVEEEKAQDPPMPQRIHTALSKDHPIDQVLGDISKGVQTRSRVASICEYYSFVSCLEPKHVDEALCDSDWINAMHEELNNFARNKVWTLVKRPRDHNVIGRKWVFRNKQDENGLVVXNNARLVAQGFTQVEGLDFGETFAPVARLEAIRILLAFASCFDIKLFQMDVKSAFLNGEIAELVFVEQPPGFEDPKNPNHVYKLSKALYGLKQAPRAWYERLKDFLLSKDFKIGKVDTTLFTKIIGDDFFVCQIYVDDIIFGFTNEVFCKXFGDLMSRGFEMSMIGELSFFLGLQIKQLKDGTFVSQTKYIKDLLKRFGLEDAKPIKTPMATNGHLDLDEGGKPVDLKLYRSMIGSLLYLTASRPDIMFSVCMCARFQAAPKECHLVAVKRILRYLKHFSTIGLWYPKGAKFKLVGYSDSDYAGCKVDRKSTSVSCQMLGISLVSWSSKKQNSVXPLYRRGGICFGGNXILSFGQNEIYPQNEIEKEFEKIFKTKLGAWQSDRRYMRGLTGQVRRSDRPHRAGLTGRGGPMMPPRTRHGCRAPTLDPMSEPEESSGEDYAQSDEEVEANVEGASEEASGDDVSGSGEDEDEQSDEMNIDPSIQFVVNMRNPSQYTILRHHDQFLRPRDTPDPHFHTAFQKMWVAGDXSEMKWMSDTLQCSISRRQFRQLLNIRLDFGDDLHEEHTHNPLSIDYLSQFYEDGVRYTHGKVAGLRTIPSVVKRIMRATILPRLGNNDDIRGVAWHVIDAIIQGRQFDIVSLMMPEIAIFKRTFTQGIYYAPYIMRLIQXKLGAAGQNLKKHKQYKPRLQPRAPRAPRTVPSSHPGASSSPAPPPPHGYDPNXFFHPHYAYFGMQPNEYFNPVLGAINTLSESIQRLSTRHEALHEDVRGLRTDVGDLNASMGRLHTRVGALDSRVQMLESTQAFVYHRRRDTPNPSSLALPPSPPQ

SEQ ID NO: 25846 - protein, 1614 aa, Oryza sativa
  unsure (1)..(1614): unsure at all Xaa locations
  Clone ID: TF_OsC1713_4366.pep
MSNEVNHVGKAPMFNGTNYSTWKIKMSTHLKAMSFHIWSIVDVGFAITDTPLTEIDHRNLQLNAQAMNALFNSLSQEEFNRVSNLETAYEIWNKLAEIHEGTSEYKDTKLHFLKIQYETFSMLPHESVNDMYGRLNVIVNDLKGLGANYTDLEVAQKMLRALPEKYETLVTMLINCDMSRMTPASLLGKINTNDMYKLKKKEMEEASPSKKCIALQAEVEDKSKSKVNEVNEDLEEEMVLLARKFNDLLGRRMERGRDSNSNRRRNRRPNKTLSNLRCFECGEKGHFASKCPSKDDDGDKSSKKKSGGYKLMKKLKKEGKKIEAFIGEWDSNEESSTSSGSEEEGGDDASSKKKKMAVVAIKEAPSLFAPLCLMAKXSSKVTSLSDSESDDDCDDVSYDELVSIFEELHAYSEKEIVKFKALKKDHASLEVLYEELKTSHERLTISHEKLNSSSSSCISICDASLVVENNELKEQVAKLNKSLERCFKGKNTLDKILSEQRCILNKEGLGFIPNKGKKPSHRATRFVKSNGKYCSKCREVGHLVNYRTDGSHWVLDSGCTQHMTGDRAMFTTFEVGGKEQEKVTFGDNSKGKVIGLVAKTSLGWLWHRRLAHVGMNQLSKLSKRDLVVVLKDVKFEKDKLCSACQAGKQVACSHPTKSIISTSRPLELLHMILFGPPTYKSIGGNSHWLVIVDDYSRYTWEFFLHDKSIVAELFKKFAKRAQNEFSCTLVKIRSDNGSEFKNTNIEDYCDDLGIKHELSATYSPQQNGVVERKNRTLIEMARTMLNEYGYASNSKAYRVYNKNKGIVXETADVQFDETNGSXEGHENLDDVGDEGLMRAMKNMSIGDVKPIEVEDKPSTSTQDEPSTSATPSQAQVEVEEEKAQDPPMPPRIHTALSKDHPIDQVLGDISKGVQTRSRVASICEHYLFVSCLEPKHVDEALCDPDWMNAMHEELNNFARNKVWTLVDRPRDHNVIGTKWVFRIKQDENGLVVRNKARLVAQGFTQXEGLDFGETFAPVARLEAIRILLTFASCFDIKLFQMDVKSAFLNGEIAELVFVXQPPGFEDPKNPNHVYKLSKVLYGLKQAPRAWYERLRDFLLSKDFKIGKVDTTLFTKIIGDDFFLCQIYVDDIIFGSTNEVFCKEFGDMMFREFEMSMIGELSFFLGLQIKQLKNGTFVSQTKYIKDLLKRFGLEDAKPIKTPMATNGHLDLDEGGKPVDLKLYRSMIGSLLYLTASRPDIMFSVCMCAWFQAAPKECHLVAVKRILRYLKHSSTIGLWYPKGEARGVLRFAPIEGSFLXCLPALAMIVVHPLRIPXVSLRNRAEMSTLKGDSEEESGDDVSRSGEDEDEGSDDXMHIDPSIQFVVNMRNPSQYTILRHHDQFLRPRDTPDPRFHTAFQKSVYEQVYAGKAFAEHKGISWRDINXPEFEGLQDLFKTVSIDRIVTLKQDYNEDLIRQFYATFYEDGVRYTHGKVAGLRTIPSVVNRIVRATILPRLGNNDDIMGADWHVIDAIIQGRQFDIVSLMMQEIAISKGTFTXGIYYAPYIMRLIQDKLGAAGQNLKKHKQYKPRLXLGAPRAPRAAPSSHPGASSSSAPPPPPGYYPNAFILPLHLFTGS

SEQ ID NO: 25847 - protein, 1140 aa, Oryza sativa
  unsure (1)..(1140): unsure at all Xaa locations
  Clone ID: TF_OsC1713_4557.pep
MSNEVNHVGKAPMFNGTNYSTWKIKMSTHLKAMRFHIWSIVDVGFAITGTPLTEIDHRNLQLNVQAINDLFNSLSQEEFDRVSNLETAYEIWNKLAEIHEGTSEYKDAKLHFLKIQYETFSMLPHESVNDMYGRLNVIVNDLKGLGANYTDLEVAQKMLRALPEKYETLVTMLINSDMSRMTPASLLGKINTNDMYKLKKKEMEEASPSKKCIALQAEVEDKGKGKVNEANENLEEEIALLARRFNDLLGRRKERGRGCNSNRRRNRRPNKTLSNLRCFECGEKGHFASKCPSKDDDGDKSSKKKSGGYKLMKKLKKEGKKIEAFIGEWDSNEESSASSGSEEEDGDDASSKKMTVVAIKEAPSLFAPLCLMAKGSSKVTSLSDSESDDDCDDVSYDELVSMFEELHAYSEKEIVKFKALKKDHASLEVLYEELKTYHARLTISHEKLKEAHDNLLSTTQHGALIDVGISCDLLDDSATCYIAHVASSSISTSCDDLVDMSSSSSSSCVSICDASLVVENNELKEQVAKLNKSLERCFKGKNTLDKILSEQRCILNKEGLGFIPKKGKKPSHRATRFVKSNGXAHDGSIVARYVGSLILGGELPHRWEPXVLDSGCTQHMTGDRAMFTTFEVGGNEQEKVTFGDNSKGKSIVAELFKKFAKRAKNEFSCTLVKIRSDNGSEFKNTNIEDYCDDLGIKHELSATYSSQQNGVVERKNRTLIEMARTMLDEYGVSDSFWAEAINTACHATNILYLHPLLKKTSYELIVGRKPNVAYFRVFGCKCYIYQKGVRLTKFKSQCDEGFLLGYASNSKTYRVYNKNKGIVEETAVVQFDETNGSQEGHENLDDVGDEGLMRAMKNMSIGDVKPIEVEDKPSTSTQDEPSTSATPSQAQVEVEEEKAQDPPMPPRIHTALSKDHPIDQVLGDISKGVQTRSRVVSICEHYSFVSCLEPKHVDEALCDPEWMKAMHEELNNFARNKVWTLVERPRDHNVIGTKWVFRNKQDENGLVVRNKARLVAQGFTQVEGLDFGETFAPVARLEAVLILLAFASCFDIKLFQMDVKSTFLNGEIAELVFVEQPPDFEDPKNPNHVYKLSKALYGLKQAPRDWYVSVIWDREYHDQRLEADAIAHVAWHLRGRRARG

SEQ ID NO: 25848 - protein, 1865 aa, Oryza sativa
  unsure (1)..(1865): unsure at all Xaa locations
  Clone ID: TF_OsC1713_4827.pep
DLSLITETKLRHLNLHPPLNSLASEADVVATAADGGRCGVGSTAVGGGGRIRLSRRWERRGWWEWTARQLVWHXDHLHAGSSLVTLGGCRLLDGLWRSCPVTSPRRLWRRPGAGFAITGKPLTEIDHRNLQLNAQAMNALFNSLSQEEFDRVSNLETAYEIWNKLAEIHEGTSEYKDAKLHFLKIQYETFSMLPHESVNDMYGRLNVIVNDLKGLGANYTDLEIAQKMLRALPEKYETLVTMLINSDMSRMTPASLLGKINTNDMYKLKKKEMEEASPSKKCIALQTEVEDKGKGKERGRGSNSNRRRNRRPNKTLSNLRCFECGEKGHFASKCPSKDDDGDKSSKKKSGGYKLMKKLKKEGKKIEAFIGEWDSNKESSASSGSEEEGGDDASSKKKKMAVVAIKEAPSLFAPLCLMAKGSSKVTSLSDSESDDDCDDVSYDEFVSMFEELHAYSEKEIVKFKALKKNHASLKVLYEELKTSHERLTISHEKLKETHDNLLSTTQHGAHIDIGISCDLLNDSATCHIAHVASSSISTSCDDLVDMPSSSSSSCVSICDVSLVVENNELKEQVAKLNKSLERCFKGRLMIVVLLLDMWVPLYLVVNYHTDGSHWVLDSGCTQHMTGNRAMFTTFEVGGKEQEKVTFGGNSKGKVIGLVAKTSLGWLWHMRLAHVGMNQLSKLSKRDLVVGLKDVKFEKDKLCSACQAGKQVACSHPTKSIMSTSRPLELLHXMDLFGPTTYKSIGVERKNRTLIEMAMTMLDEYGVSDSFWAEAINTACYATNRLYLHRLLKKTSYVLIVGRKPNVAYFRVFGCKCYIYRKGVRLTKFESRCCDEGFLLGYASNSKAYQVYNKNKGIVEETADVQFDETNGSQEGHENLDDVDDEGLMRDMKNMSIGDVKPIEVEDKPSTSTQDEPSTSASPSQAXIEVEEEKAQDPPMPPRIHTALSKDHPIDQVLGDISKGVQTRSRVASICEHYSFVSCLEPKHVDEALCDPDWMNAMHEXLNNFARNKVWTLIERPRDHNAIGTKWVFRNNQDENRLVVRNKARLVTQGFTQVEGLDFGETFAPVARLEAIRILLGFASCFDIKLFQMDVKSAFLNGEIAELVFVEQPPGFEDPKNSNHVCKLSKGLYGLKQAPRAWYERLRDFLLSKDFKIGKVDTTLFTKIIGDDFFVCQIYVDDIIFGSTNEVFCKEFGDMMSREFEMSMIGELSFFLRLQIKQLKDGTFLSQTKYIKDLLKRFGLEDAKPIKTPMVTNGHLDLDEGGKPVDLKLYHSMIGSLLYLTASRPDIMFSVCMCARFQVAPKECHLVAVKRILRYLKHSSIIGLWYPKGAKFKLVGYSDSDYAGCKVDRKSTSGSCQMLGRSLVSWSSKKQNSVXPLYCRSGICFSGNXILSFGQNEIYPQNKIEKEFEKSFKTKLRWSDRVPAAGLTALGRRSDRHMDGGLTGCWPSAMPPRTRRGRREPTLDPVSENEESNGDEYVQSDDEVMENIEGDEVEVSGDNGSGDGEDDEASDDGSPLDPTIQFVLNLRNAXQYTILRHHDQFRRPNDCNDLRFHTRYQKSVVSGDCDAMKWMSGTLRCSINCRAFKELLHIHFNNRDDLHDEQNHNPFPIDHFSQFYEEGRRHTYGKVVSLRAIPSLINRIVRATILPRCGNNDDICGVAWHVIEAIMDGRRFGVINLMMKEIAISKGTIGQGVYYAPYIMRLIQSKLRQIGNNLKEHKDYKPHLQLSTPRAPRVRQPTFDQGASSSXSPPPPHGYDPSAFFHPQYAYFGMQPNEYFNPVLGAINTLSESIQRLSTGHXALHEDVHGLRTDVGDLNASVGRLHTRVGVLDSXVQMLESTQAFVYHRRRDAPHPSSLARPPSPPQ

SEQ ID NO: 25849 - protein, 1473 aa, Oryza sativa
  unsure (1)..(1473): unsure at all Xaa locations
  Clone ID: TF_OsC1713_4833.pep
HKHIHWVRPDQGRSDRPHSGGLTGVPCPVTSPRRLWRRPGAGFAITGTPLMEIDHRNLQLNAQAMNALFNSLSQEEFDRVSNLETAYEIWNKLAEIHEGTSEYKDAKLHFLKIQYETFSMLPHESVNDMYGRLNVIVNDLKGLGANYTDLEVAQKMLRALPEKYETLVTMLINSDMSRMTPASLLGKINTNDMYKLKKKEMEEASPSKKFNDFLGRRKERGKGSNSNRRRNRRPNKTLSNLRCFECGEKGHFASKCPSKDDDGDKSSKKKSGGYKLMKKLKKEGKKIEAFIEEWDSNEESSPHPGSSKVTSLSDSESDDDCDDVSYDELVSMFEELHAYSEKEIVKFKALKKDHASLEVLYEELKTSHERLTISHEKLKEAHDNLLSTTQHGALIDVGISCDLLDDSATFHIAYVASSSISTSCDDLVDMSSSSSSSCVSICDASLVVENNELKEQVAKLNKRLERCFKGKNTLDKILSEQRCILNKEGLGFIPKKGKKPSHRATRFVKSNGRLMMVALFLDMWVPLYSVVNYHTGGSHWVLDSGCTQHMTGDRAMFTTFEVGRNEQEKVTFGDNSKGKVIGLGKIAISNDLSIDNVSLVKSLNFNLLSVAQICDLSLSCAFFPQEVIVSSLLDKSCVFKGFRYGNLYLVDFNSSEANLKTCLVAKTSLGWLWHRRLAHVGMNQLSKFSKRDLVMGLKDVKFEKDKLCSACQAGKQVACSHPTKSIMSTSKPLELLHMDLFDPTTYKSIGGNSHCLVIVDDYSRYTWVFFLHDKSIVADLFKKFAKRAQNEFSCTLVKIRSNIGSEFKNTNIEDYCDDLGIKHELFATYSPQQNGVVERKNRTLIEMARTMLDEYGVSDSFWAEAINTACHATNRLYLHRVLKKTSYEVIVGRKPNIAYFRVFGCKCYIHRKGVRLTKFESRCDEGFLLGYASKSKAYRVYNKNKGIVEETADVQFDETNGSQEGHENLDDVGDEGLMRVMKNMSIGDVKPIEVEDKPSTSTQDEPSTSAMPSQAQVEVEEEKAQEPPMPPRIHTALSKDHPIDQVLGDISKGVQTRSRVTSICEHYSFVSCLERKHVDEALCDPDWMNAMHEELKNFARNKVWTLVERPRDHNVIGTKWVFRNKQDENGLVVRNKARLVAQGFTQVEGLDFGETFAPVARLEAICILLAFASCFDIKLFQMDVKSAFLNDTKYPNHVYKLSKALYGLRQAPRAWYERLRDFLLSKDFKIGKVDITLFTKIIGDDFFVYQIYVDDIIFGSTNEVFCKEFGDMMSREFEMSMIGELSFFLGLQIKQLKNGTFVSQTKYIKDLLKRFGLEDAKPIKTPMATNGHLDLDEGGKPVDLKLYRSMIGSLLYLTVSRPDIMFSVCMCARFQAAPKECHLVAVKRILRYLKHSSTIGLWYPKGAKFKLVGYSDPDYAGCKVDRKSTSSSCQMLGRSLVSWSSKKQNSVALLXAETEYVSAGSCCAQLLWM

SEQ ID NO: 25850 - protein, 523 aa, Oryza sativa
  unsure (1)..(523): unsure at all Xaa locations
  Clone ID: TF_OsC1713_5136.pep
WRPAPWRPGWCCSGWPIQSRRSGIRSCPVTSPRRLWRRPGAGFAITGTLLMEIDHRNLQLNAQAMNALFNSLSQEEFDRVSNLETAYEIWNKLAEIHEGISEYKDAKLHFLKIQYETFSMLPHESVNDMYGRLNVIVNDLKGLGANYTDLEVAQKMLRALPEKYETLVTMLINSDMSRMTPASLLGKINTNDMYKLKKKEMEEVSHSKKCIVLQAEVKDKGKGKERGRDSNSNRRRNRRPNKTLPNLRCFECGEKGHFASKCPSKDDDGDKSSKKKSGGYKLMKKLKKEGKNIEAFIGEWDSNEESSASSGSEEEGGDDASSKKKKMAVVAIKEAPSLFAPLCLMAKDSSKVAFLSDSESDDDCDDVSYDELVSMFKELYAYSEKEIVKFKARKKDHASLEVLYEELKTSHERLTISHEKLKEAHDNLLSTTQHGVLIDVGISCDLLDDSAICHIAHVVSSSISTSCDDLVDMPSSSSSTCVSICDASLVVENNELKEQVVKLNXSLEMCFKGKDTLDKILSE

SEQ ID NO: 25851 - protein, 885 aa, Oryza sativa
  Clone ID: TF_OsC1713_5267.pep
MELGSPQQGVGNQRVSEPRLCYLTGTPLTEIDHSNLLLNAQVMNALFNSLSQEEFDRVSNLKIAYEIWNKLAEIHEGTSEYKDAKLHFLKIQYETFSMLPHESVNDMYGRLNVIVNDLKGLGATYTDLEVAQKMLSALPEKYETLIAMLINSDMSRMTPASLLGKINTNDMYKLKKKEMEEASPSKKCIALQAEVEDKWKSKVNEANDDLEEEIALLAKRFNDLLGRRKERGRGSNSNRRRNIIPNKTLSNLRCFECGEKGHFASKCPSKANDGDKSSKKKSGGYKLMKKLKKEGKKIEAFIGQWDSNEESSTSSGSEEEGDDDASSKKKNMAVVAIKEAPSLFAPLCLMAKGSSKVTSLSDSESDDDCDDVSYGELVSMFEELHAYSEKEIVKFKALKKDHASLEVLYEELKTSHERLTISHEKLKEAHDNLLSTTQHGAHIDAGISCDLLDDSAICHNNELKEQVAKLNKSLEICFKGKNTLDKILSEQRAAATCSTPPSSPAELHPRRAAASVVAAGRRHRRKVRRGVEKPGRSLPAVAGHRSPVATADRSRAANRPRRRPSSFVVWFEGEYRWVRLVVLYVFMSSKVAADHPISGEVAILVNYRTGGSHWVLDSGCTQHMTGDRAMFTTFEEGGKEQEKVTFGDNSKGKASSPSSPPGPPLGPTRAAPSRPCRARARACAVCRALTAPRVGPTARSSSSSSPEARRSGLLVGVQYLPLLLCFAGTPSPVPASILVVADVPSAAPFILAGSSSRGAASVVGFAAARSTSSPSPCSCRRLPSSSPRRPQSSSSSSSSRRPHRRGVRPSVEPFSSVVRVRQVGRCSPVVVFVLGSASSSLVPAASRLRPRIAAEAVPSPFVSVVPVCLRRARSSLSFPRLVAWW

SEQ ID NO: 25852 - protein, 1731 aa, Oryza sativa
  unsure (1)..(1731): unsure at all Xaa locations
  Clone ID: TF_OsC359_7758.pep
IPTFPESPNLQENILRNFKASKATPGLEXYIPGLEIELCSRXGCSEWLGLCNRIRRSPGQAAYGVESFVQELRTMSFLIGFETAPLYAQIPHDRDEEKCRVKVTLNSNREDIPSVMFEAGEGSYNHACXEVARIAIGELRESYNDRLADTEYRYHPRQPQGSDRGSYLEPAGIENDATTRHLVEMLWAMDETRAKIVIAAQDREDRNRGKICKLEDKVDRLEKELAALKGEAPPQKARVRLTARKRALFVPRYQLAPKMVLTRSNGNGPNPNNNNNNAENPTLAQVLAQQAQLMNLMMQQLQNQQNQGNNHAPPPNKLAEFLRVRPPTFSSTTNPVEAGDCLHAIEKKLDLLQCTDQEKVSFASHQLHGPASEWWDHFRLNRTTAEPISWLEFTAAFRKTHIPSGVVSLKKKEFRALIQGSRSVTEYLHEFNRLARCAPEDVRTDEERQEKFFEGLNDELSYPLMTGDYHDFQKLVDKAIRQEDKYNCMEQKKRRIAHFKAQQGNSQRQRLAMGPQSMLEGGSXSVVRPQRQFFNNNAGNNNRNQAPRPVAALTXNQLAKREQGSKPGVCFNCGDLGHYADKCPKPRRAKVVPAQNNSSAPATKARVNHVAAAEAQGAPDVILGTFPVNSVPTTVLFDSGATHSFLSLSFAGNHGMEVEDLRRPLMVSTPSNQALSSQRSPSVRTEIQGVPFLANLILLESKDLDVILGMDWLARYKGVIDCANRKVTLTSNDGQVVTVHALPSELLRSSLNQITLEEIPIVREYPDVFPDDLPGMPPKRDIEFRIDLVPGTTPIHKRPYRMAANELAEVKRQVDDLLQKGYIRPSSSPWGAPVIFVEKKDHTQRMCVDYRALNDVTIKNKYPLPRIDDLFDQLKGATVFSKIDLRSGYHQLRIKEEDIPKTAFTTKYGLFECTVMSFGLTNAPAFFMNLMNKVFIEYLDKFVVVFIDDILIYSRTNEEHEEHLRLALEKLREHQLYAKFSKCEFWLSEVKFLGHIISAGGVAVDPSNVESVTNWKQPKTVSEIRSFLGLAGYYRRFIENFSKIAKPMTRLLQKDVKYKWSEECEQSFQELKSRLISAPILILHDPKKGFQVYCDASKLGLGCVLMQDGKVVAYASRXLRPHEKNYPTHDLELAAVVHALKIWRHYLFGTRTEVYTDHKSLKYIFIXSDLNMRQQRWLELIKDYDMGIHYHPGKANVVADALSRKGYCNATEGRQLPLKLCKEFERLNLEIVSRGFVAALEAKPTLIDQVREAQINDPDIHEIKKNMRRGKAIGFLEDEQGTVWLGERICVPDNKDLKDAILKEAHDTLYSIHPGSTKMYQDLKERFWWASMKREIAEYVAVCDVCXXVEAEHQKPVGLLQPLKIPEWKWEEIGMDFITGLPRTSSGHHSIWVIVDKLTKMAHFILVRTTYSGSRLAELYMARIVCLHGVPKKIVSDRSSQFTSKFWKKLXEEMGSKLNFSTAYHPQTDGQTERVNQILEDMLRACALDFGGCWDKNLLYAEFSYNNSYQASLQMAPYEALYGRKCRTPLLWDQMGERQVFGTDILREAEEKVKIIQERLRVAHSRHKSYANNRRRDLSFEEGDHVYLRVTPLQGVHRFHTKGKLAPRFVGPYKIVSRRGEVAYQLELPQSLAGVHNVFHVSQLKKCLRVPTEEANLEQIVVQEDLTYIEKPIRILETDERRTKNRVIRFYKVQWSNHSEEESTWEREDELKSAHPHLFASSSKSRGRDSV

SEQ ID NO: 25853 - protein, 1421 aa, Oryza sativa; identical to SEQ ID NO: 18923
  Clone ID: TF_OsC1713_4406.pep

SEQ ID NO: 25854 - protein, 1400 aa, Oryza sativa
  Clone ID: TF_OsC1713_4477.pep
MASRRRATTSNDETQTPDLNTLAGIMATQTQLLQAIASNQGNRGGSSFGEFMRTKPPTFATAEEPMDAEDWLRIIEKKLTLVRVREADKVIFAANQLEGPAGDWWDTYKEAREEDAGEPNWEEFTTAFRDNFVPAAVMRMKKNEFRRLRQGNTTVQEYLNRFTQLARYATRDLADEEEKIDKFIEGLNDELRGPMIGQDHDSFQSLINKVVRLENDRKVVEHNRKRRLAMNRPPQTAPQRPKGTTPSAWRPTVVTTSRPAASSNFHRPVTIQNRAPTPNQAATGSVRPGSCFNCGEYGHFANKCPHPNKTPIRTGANATAIHGTATPAAGRGLFRTPQTNRTATGFGRGVKLRQPMLIHSPGGEIAVDTACIDVPIRLRDVVFPSNLMVLIPQTLDVILGMDWLAKHRGVIDCRRREVTLTTPWGSDMRATMDQDPRLTERAGGIFTMLPLKGMPVVQRFPDVFPEDLPGMPPDRDIEFIIDLIPGTAPISKRPYRMPVNELEELKKQIRELQEKGFVRPSSSPWGAPVLFVKKKDGSMRMCVDYRSLNEVTIKNKYPLPRIDDLFDQLKGAKVFSKIDLRSGYHQLKIRTEDIPKTAFSTRYGLYEFTVMSFGLTNAPAYFMNLMSKVFMDYLDKFVVVFIDDILIYSKDEEEHAEHLRLVLQKLRKHKLYAKFSKCEFWLKEVAFLGHVISAGGVAVDPAKVEAVTEWKASKSVTEIQSFLGLAGYYRRFIEGFSKIARPMTQLFKKEKKFVWSEQCQESFEQLKEKLTSAPILVLPDIRKDFVIYCDASRQGLGGVLMQDGKVVAYASRQLRPHEENYPTHDLELAAVVHALKIWRHYLIGNHCDIYTDHKSLKYIFTQSDLNLRQRRWLELIKDYDLEVHYHPGKANVVADALSRKSHCNHLRMEGMVPELREEIAQLNLYIVPHGQINTLDIQPLLRTQIEEAQKDNEEVREVKERLAAGRAKEFSTDEKDVLWYKKRIYVPKQGGLRGLILKEAHESAYSLHPGSTKMYQDLKEGYWWPNMKRDVAEYVALCDVCQKVKAEHQRPAGLLQPLRIPEWKWDEIGMDFIVGLPKTATGYDSIWVIVDRLTKTARFIPVKTNYSSAKLAELYMTRIVCLHGIPKRIISDRGTQFTSHFWEKVHEALGSYLAFSTAYHPQTDGQTERTNQVLEDMLRACALDFSKDWERCLPYAEFSYNNSFQASLKMSPTEALFGRRCRTPLMWSETGERAVFGPDIIQEAEEKVRLIRDRLKVAQSRQKSYADTRRRNLEFKEGDYVYLKVSPMRGTKRFKVKGKLAPRYVGPFQITARRGEVAYQLQLPENIADVHPIFHVSQLKKCLRVPEEQAPLEEIHISNDLTYPEHPIRILDEAEKRTRSKVWRMYKVQWSNHTEVFISL

SEQ ID NO: 25855 - protein, 1470 aa, Oryza sativa; identical to SEQ ID NO: 18925
  Clone ID: TF_OsC1713_4736.pep

SEQ ID NO: 25856 - protein, 1454 aa, Oryza sativa
  Clone ID: TF_OsC1713_4922.pep
MASRRRATTSNDETQTPDLATLAGVMATQTQLLQAIANNQGNRGGPSFGEFMRTKPPTFATAEEPMDAEDWLRIIEKKLTLIRVREADKVIFAANQLEGPAGDWWDTYKESREEDAGEPNWEEFTTAFRDNFVPAAVMRMKKNEFRRLRQGNTTVQEYLNHFTQLARYATRDLANEEEKIDKFIEGLNDELRGPMIGQDHDSFQSLINKVVRLENDRKVVEHNRKRRLAMNRPPQTAPQRPKGTTSSAWRPTVVTTSRPAASSNFHRPVTIQNRAPAPNQAATGSVRPGSCFNCGEYGHFANKCPHPNKTPIRTGANATAIHGTATPAAGRGLFRTPQTNRTATEFGRGQVNHVRAEEAQEDQGVLMGASHSFISLKASQQHNLIRVKLRQPMLVHSPGGEIAVDTACIDVPIRLRDVVFPSNLMVLIPQTLDVILGMDWLAKHRGIIDCRRREVTLTTPWGSDMRATMDQDPRLTERAGGIFTMLPLKGMPVVQRFPDVFPEDLPGMPPDRDTEFIIDLIPGTAPISKRPYRMPVNELDELKKQIRELQEKGFVRPSSSPWGAPVLFVKKKDGSMRMCVDYRSLNEVTIKNKYPLPRIDDLFDQLKGAKVFSKIDHRSGYHQLKIRTGDIPKTAFSTRYGLYEFTVMSFGLTNAPAYFMNLMNKVFMDYLDKFVVVFIDDILIYSKDEEEHAEHLRLVLEKLRKHKLYAKFSKCEFWLKEVAFLGHVISAGGVAVDPAKVEAVTEWKAPKSVTEIRSFLGLAGYYRRFIEGFSKIARPMTQLLKKEKKFVWSEQCQESFEQLKEKLTSAPILVLPDIRKDFVIYCDASRQGLGGVLMQDGKVVAYASRQLQPHEENYPTRDLELAAVVHALKIWRHYLIGNHCDIYTDHKSLKYIFTQSDLNLRQRRWLELIKDYDLEVHYHPGKANVVADALSRKSHCNHLRMEGMIPELREEIAQLNLHIVPRGQINTLDIQPLLRTQIEEAQKDNEEVREVKERLATGRAKEFSTDEKDVLWYKKRIYVPEQGGLRGLILKEAHESAYSLHPGSTKMYQDLKEGYWWPNMKRDVAEYIALCDVCQKVKAEHQRPVGLLQPLRIPEWKWDEIGMDFIVGLPKTATGYDSIWVIVDRLTKTARFIPVKTNYSSAKLAELYMTRIVCLHGVPKKITSDRGTQFTSHFWEKVHEALGSYLAFSTAYHPQTDGQTERTNQVLEEMLRACALDFSKDWERCLPYAEFSYNNSFQASLKMSPNEALFGRRCRTPLMWSETGERAVFEPDIIKEAEEKVRLIRDRLKVAQSRQKSYADTRRRNLEFKEGDYVYLKVSLMRGTKRFKVKGKLAPRYVGPFQITARRGEVAYQLQLPENIADVHPVFHVSQLKKCLRVPEEQAPLEEIHISNDLTYPEHLVRILDEAEKRTRNKVWRMYKVQWSNHTEDEATWESKEFLRTEYPHLFENW

SEQ ID NO: 25857 - protein, 1304 aa, Oryza sativa
  unsure (1)..(1304): unsure at all Xaa locations
  Clone ID: TF_OsC1713_4988.pep
MEAEDWLCIIEKKLTLVRMREADKVIFTVNQLEGPAGDWWDTYKEAREEDAGEPTWDEFTAAFHENFVPAAVMRMKKNEFRRPRQGNTTVQEYLNRFTQLTRYAIGDLADEEEKIDKFIEGLNDELRGPMIGQDHESFQSLINKVVRLENDRKVVEHNRKRRLAMNRPPQVATQHPKGAASSGWKPTVVTTNRPTAHSNFHRPVTTQNRAPAPNQAATGVMRPGSCFNCGEYGHFANKCPHLNKTPIRTGANAMAIHGAATPAGGRGVRKPMIVHSPGGETLDVILGMDWLAKHRGVIDCRRREVTLTTPWGSDMRATMDQDPRLTERAGGIFTMLPLKGMPVVQLFPDVFPEDLPGMPPDRDIEFIIDLIPGTAPISKRPYRMLVNELEEHKKQIRELQEKGFVRPSSSPWGAPVLFVKKKDGSMRMCVDYRSLNEVTIKNKYPLPRIDDLFDQLKGAKVFSKIDLRLGYHQLKIRTGDIPKTAFSTRYGLYEFTVMSFGLTNAPAYFMNLMNKVFMDYLEKFVVVFIDDILIYSKDEEEHAEHLRLVLQKLRKHKLYKKFSKCEFWLKEVAFLGHVISAGGVAVDPAKVEAVTEWKAPKSVTEIRSFLGLAGYYRRFIEGFSKIARPMTQLLKKEKKFVWSEQCQESFEQLKEKLTSAPILVLPDIRKDFVIYCDASRQGLGGVLMQDGKVVAYASRQLRPHEENYPTHDLELAAVVHALKIWRHYLIGNHCDIYTDHKSLKYIFTQSDLNLRQRRWLELIKDYDLEVHYHPGKANVVADALSRKSHYNHLRMEGMVPELREEIAQLNLHIVPHGRINTLDIQPLLRTQIEEAQKXNEEVREVKERLAAGRAKEFSTDGKDVLWYKKRIYVPEQGGLRGLILKEAHESAYSLHPGSTKMYQDLKEGYWWPNMKRDVAEYVALCDVCQKVKAEHQRPAGLLQPLRIPEWKWDEIGMDFIVGLPKTATGYDSIWVIVDRLNKTARFIPVKTNYSSAKLAELYMTRIVCLHGIPKKIISDRGTQFTSHFWEKVHEALGSYLAFSTAYHPQTDGQTERTNQVLEDMLRACALDFSKDWERCLPYAEFSYNNSFQASLKISPNEALFGRXCRTPLMWSETGERAVFGPDIIQEAEEKVRLIRDRLKVAQSRQKSYADTRRRNLEFKEGDYVYLKVSPMRGTKRFKVKGKLAPRYVGPFQIIARRGEVAYQLQLPEYIADVHPVFHVSQLKKCLRVPEEQAPLEEIHISNDLTYPEHPIRILDEADXRTRSKVWRMYKVQWSNHTEDEATWEGEEFLRTEYPHLFGNW

SEQ ID NO: 25858 - protein, 1430 aa, Oryza sativa
  unsure (1)..(1430): unsure at all Xaa locations
  Clone ID: TF_OsC1713_5164.pep
MASRRRATTSNDETQTPDLTTLAGVMTTQTQLLQAIANNQGNRGGSSFGEFMRTKPPTFATAEEPMDAEDWLRIIEKKLTLVQVREADKVIFAANQLEGPTGDWWDTYKEAREEDAGEPNWEEFTTAFRDNFVPAAVMRMKKNEFRRLRQGNTTVQEYLNRFTQLARYATRDLADEEEKIDKFIEGLNDELRGPMIGQDHDSFQSLINKVVRLENDRKVVEHNRKRRLAMNRSPQTAPQRPKGTTPSAWRPTVVTTSRPAASSNFHKPVTIQNRAPAPNQAATGSVRPGSCFNCGEYGHFANKCPHPNKTPIRTGANATANHGTATPAAGRGLFRTPQTNRTATGFGRGQVKHVRAEEAQEDQGVLMGMFSLNSTPVKVLFDSGASHSFISLKASQQHNLIRVKLRQPMLVHSPGGEIAVDTACIDVPIRLRDVVFPSNLMVLIPQTLDVILGMDWLAKHRGVIDCRRREVTLTTPWGSDMRATMDQDPRLTEHAGGIFTMLPLKGMPVVQRFPDVFPEDLPGMPPDRDIEFIIDLIPGTAPISKRPYRMPVNELEEIKKQIRELQEKGFVRPSSSPWGAPVLFVKKKDGSMRMCVDYRSLNEVTIKNKYPLPRIDDLFDQLKGAKVFSKIDLRSGYHQLKIRTEDIPKTAFSTRYGLYEFTVMSFGLTNAPAYFMNLMNKVFMDYLDKFVVVFIDDILIYSKDEEEHTEHLRLVLQRLRKHKLYAKFSKCEFWLKEVAFLGHVISAGGVAVDPAKVEAVTEWKAPKSVTEIRSFLGLAGYYRRFIEGFSKIARPMTQLLKKEKKFVWSEQCQESFEQLKEKLTSAPILVLPDIRKDFVIYCDASRQGLGGIWRHYLIGNHCDIYTDHKSLKYIFTQSDLNLRQRRWLELIKDYDLEVHYHPGKANVVADALSRKSHCNHLRMEGMVPELREEIAQLNLHIVPHGQINTLDIQPLLRTQIEEAQKDNEEIREVKERLAAGRAKEFSTDEKDVLWYKKRIYVPEQGGLRGLILKEAHESAYSLHPGSTKMYQDLKEGYWWPNMKRDVAEYVALCDVCQKVKAEHQRPAGLLQPLRIPEWKWDEIGMDFIVGLPKIATGYDSIWVIVDRLTKTARFIPVKTNYSSAKLAELYMTRIVCLHGVPMKIISDRGTQFTSHFWEKVHEALGSYLAFSTAYHPQTDGQTERTNQVLEDMLRACALDFSKDWERCLPYAEFSYNNSFQASLKMSLNESLFGRRCRTPLMWSETGERAVLGPDIIQEAEEKVRLIRDRLKVAQSRQKSYADTRRRDLEFKEGDYVYLKVSPMRGTKMFKVKXLAPRYVGPFPIIARQGEVAYHVQLQKNIADVHPVFLCXLKKVLQVPEDQAPLEKIHIPXDLTFPNHPVRIWDEPKKRTRTKVWRMSKVHWSILPEDEPTWESKKFLETDYPHLSEIQ

SEQ ID NO: 25859 - protein, 1470 aa, Oryza sativa
  unsure (1)..(1470): unsure at all Xaa locations
  Clone ID: TF_OsC1713_5256.pep
MASQRRATTSNDETQTPDLTTLAGVMATQTQLLQAIANNQGNRGGSSFGEFMRTKPPTFAIAEEPMDAEDWLRIIEKKLTLVRVREADKVIFAANQLEGPAGDWWDTYKEAREEDAGEPNWEEFTTAFRDNFMPAAVMRMKKNEFRRLRQGNTTVQEYLNRFTQLARYATRDLANEEEKIDKFIEGLNDELRGPMIGQDHDSFQSLINKVVRLENDRKVVEHNRKRRLAMNRPPQTAPQRPKGATSSAWRPTVVTTSRPATSSNFHRPVTIQNRAPAPNQAATGSVRPGSCFNCGEYGHFANKCPHPNKTPIRTGANATAIHGTATPAAGRGLFRTPQTNRTATGFGRGQVNHVRAEEAQEDQGVLMGMFSLNFTPVKVLFDSGASHSFISLKASQQHNLTRVKLRQPMLVHSPGGEIAVDTACIDVPIRLRDVVFPSNLMVLIPQTLDVILGMDWLAKHRGVIDCRRREVTLITPWGSDMRATMDQNPRLTERAGGIFTMLPLKGMPVVQRFPDVFPEDLPGMPPDRDIEFIIDLIPATAPISKRPYRMPVNELKELKKQIRELQEKGFVRPSSSPWGAPVLFVKKKDGSMRMCVDYRSLKEVTIKNKYPLPRIDDLFDQLKGAKVFSKINLRSGYHQLKIRTEDIPKTAFSTRYGLYEFTVMSFGLTNAPAYFMNLMNKVFMDYLDKFVVVFIDDILIYSKDEEEHAEHLRLVLQKLRKHKLYAKFSKCEFRLKEVAFLGHVISASGVAVDPAKVEAVTEWKAPKSVTEIRSFLGLAGYYRTFIEGFSKIARPMTQLLKKEKKFVWSEQCQESFEQLKEKLTSAPILVLPDIRKDFVIYCDASRQGLGGVLMQDGKVVAYASRQLRPHEENYPTHDLELAAVVHALKIXRHYLIGNHCDIYTDHKSLKYIFTQSDLNLRQRRWLELIKDYDLEVHYHPGKANVVADALSRKSHCNHLRMEGMVPEHREEIAQLNLHIVPRGQINTLDIQPLLRTQIEEAQKDNEEIREVKERLAAGRAKEFSTDEKDVLWYKKRIYVPEQGGLRGLILKEAHESAYSLHPGSTKMYQDLKEGYWWPNMKRDVAEYVALCDVCQKVKAEHQRPAGLLQPLRIPEWKWDEIGMDFIVGLPKTATGYDSIWVIVDRLTKTARFIPVKTNYSSAKLAELYMTRIVCLHGISKRIISDRDTQFTSHFWEKVHEALGSYLAFSTAYHPXTDGQTERTNQVLEDMLRACALDFSKDWERCLPYDEFSYNNSFQASLKMSPNEALFGRXCCTPLMWSETGERAVFGLDIIQEAEEKVRLIRDRLKVAQSRQKSYADTRRRNLEFKEGDYVYLKVSPMRGTKRFKVKGKLAPRYVGPFQIIARRGEVAYQLQLPENIADVHPVFHVSQLKKCLRVPEEQAPLEEIHISNDLTYPEHPIRILDEAEKRTRSKVWRMYKVQWSNHTEDEATWESEEFLRTEYPHLFEDW

SEQ ID NO: 25860 - protein, 1427 aa, Oryza sativa; identical to SEQ ID NO: 18930
  Clone ID: TF_OsC1528_2280.pep

SEQ ID NO: 25861 - protein, 1549 aa, Oryza sativa; identical to SEQ ID NO: 18938
  Clone ID: TF_OsC1528_1947.pep

SEQ ID NO: 25862 - protein, 1172 aa, Oryza sativa
  unsure (1)..(1172): unsure at all Xaa locations
  Clone ID: TF_OsC1528_2035.pep
MADNRFVVEQAHEIQTIAKELELLKCVLPDKFVAGCIIAKLPPSWRSFGTAFKHKRQEYSIEGLIASLDVEEKAREKDAASKDDAQQTTNFKRQKKNNNNPNQDERICFVCGQPGHLARKYPQRKGMKAPAGQTSKSANVTIGNTGDGSGYGNLPTVFSVNQSTNWWVDTGANVARGSTFLMANGSHASVHGVGTVDVKFTSGKIVQLRNVQHVPSINRNLVSGSRLTRDGFKLVFESNKVVVSKHGYFISKGYECGGLFRFSLSDFCNKSVNNICGSVDDEANVWHSRLCHINFGLMSRLSSMCLISKFSIVKGSKCHSCVQSKQPRKPHKAAEERNLAPLELLHSDLCEMNEVLTKGGKQYFMTLIDDATRFCYVYLLKTKDEALDYFKIYKAEVENQLDRKIKRLRSDRGGEFFSNEFDLFCDEHDIIHERTPPYSPESNGIAERKNRTLTDLVNAMLDTAGQPKAWWGEALLTTNHVLNRVPNRNKNKTPYEIWIGRKPSLSYLRTWGCLAKVNVPITKKRKLGPKTVDCVFLGYAHYNIAYRFLIVKFEVPDMHVGTIMESRDATFFESFFPMXDTHSGSSQPSEIIPSSITPPXQTEHTHEHVTEEDVSEALRRSKRQRTAKSFGDDFTVYLVDDTPKSISEAXASPDADYWKEAVRSEMDSIIANWTWEVTERPYGCKPVGCKWVFKKKLRPDGTIKKYKARLVAKGYTQKEGEDFFDTYSPVARLTTIRVLLSLAASLGLLVHQMDVKTAFLNGELDEXIYMDQPDGFVVEGQEGKVCKLLKSLYGLKQDPKQWHEKFDKTLTSVGFAVNEADKCVYYRHGGGEGVILCFYVDDILIFGTNLEVINEIKSFLSQNFDMKDLGVADVILSIKLIRGDNGITLLQSHYVEKILNRFGYIDSKPSPTPYDPSLLLRKNKRIARNXLEYSQIIGSLMYLASATRPDISFAVSKLSRFTSNPGDDHWRALERVMHYLKGTMELGLHYSGYPAVLEGYSDSNWISDVDEIKATSGYVFTLGGGAVSWRSCKHTILTRSTMEAELTALDTATVEAKWLRDLLMDLPIVEKPVPAILMNCDNQTTCEKTIEVCQEIEKLRSYNVGLHPNSXKPGRTLHKGTITKCDRQCIEGDGFETHCILERTHLCKLDCWSQSMEILGESSRKLTKDLGV

SEQ ID NO: 25863 - protein, 1604 aa, Oryza sativa
  unsure (1)..(1604): unsure at all Xaa locations
  Clone ID: TF_OsC359_7926.pep
HRTSVPQYPLYPVYGYPSSTVARHVGSFGAQGSTTMTSSFVDNGVSTGPIHGVPTXTMLVWTQVGEIIFPVYTTVPISAGPSIIGNENAVAITPDDPASKDPPAVAENGTSTSYEPEKVPSVAEPCPSDKNSEPTRTTSEVKKSWYPIHKSRKHNLQACWVFLNVQAKIRACKERGIQRTSPTHDVYCPIHKTKNHDFSSYKVFLHAMKTTLPKVQQVGTSRKGTNKEQGATLTSDRFVGVIDIDPHEPSVLHLLEDYGSSSSSTPRDMFAIGGTSTSAHANAGAENQTVTPAQHLGTINAVLREAPYDPVLNDDLARWIERLWESVANLSNAFEEAATRAQQERLIAGAANGEPPEQRTSPRXATHPPRSTGDLRDHLNGRREARRTRDNENHSRHRVSSQRRENEERRHNCRDRDDREQRTPDDAGRGRQHDGDDNGDRRXDNNGGXRQNSREPKRRPRNRTPEPSEPPSSSSSSSSSSSDRHPRRTHNRRQPTAPCTGCRAFNRSLRDVRWPERFRPGAIEKYDGSTDPEEFLQVYSTVLYAAGADDNALANYLPTALKGSARSWLMHLPPYSISSWADLWXQFVANFQGTYKRHAIEDDLHXVVRRFNECRNTIPDITDASVIRAFKTGVRDRYTTQELATRRITTTRSLFEVVDRCAHADDAVRRKNDESKAGGEKKPAKDTPESSKKKSGKSGKRKAQAEVLVSEYKRPPKHPDPQGSDTKRIWCPIHKSDKHSLEECLIFKKSLAKQLALEKGKRVRVVEKATEATTQDSDSAYPDSDLHVSHIFXVPQRRYPIVVEPTIRNIKVARVFVDGGSSINLLFASTLDAMGIPRNELTPTDQPFHGITPXSSSKPLGXITLPVSFGQASNFRAEKITFDVAEFDTAYNAIIGRTALAKFMAASHYAYQVLKMPEPKGTISIQGNTKLAVQCDKQSLDMVEHTPSPPATAEPPKKMIKTTKMPKPDDAIKIVPLSSANPDKTELALITFLRDNADVFAWQLSDMPGVPREVIEYKLMVRPVAKPVKQKLRRFAPDQKQAIREELDKLLKAGFIREVLHPEWLANPVMVRKANGKWRMCVDFTDLNKACPKDHFPLPRIDQLVDSTAGCELLSFLDAYSGYHQISMAKEDEEKTTFITSFGVFCYVKMPFGLITAGNIFQRTVQGALSDQLGNNVEAYVDDIVVKTKTCDSLIDDLRETFDNLRQYRLMLNPEKCTFGVPSGKLLGFLVSGRGIEANPEKIKAIENMKSPTRLKEVLKLTGCMAALSRFVVRMGEQGQHFFALXKKQDKFVWTQEAXEAFIALKCYLSNPPVLVAPQPNEELFLYITATPYSVSTVIVVERENVQRPVYYVSKALHDAKTRYAQIQKLLYAVIMTSRKLHHHFQAHRVTVVSAFPLGEVMRNKDVIGRIAKWVVELSQFDVHFVPRTAIKSEVLADVIADWTMPNNRCLHPLALWILPSQMTRLPTHKANPLILVRIVVVLLLPLEVGGLLSFIFPLALVLGLVHNIGTGLPTIILRRGVFFPSFLLNIKRCYQPLNGVFLSLVRTEVRKLGRPSSFAADHRSSAVAVKPSCHRLPPRRRPSPFVDRRCGEYHRVRLDVFYA

SEQ ID NO: 25864 - protein, 932 aa, Oryza sativa; identical to SEQ ID NO: 18951
  Clone ID: TF_OsC1713_4658.pep

SEQ ID NO: 25865 - protein, 1318 aa, Oryza sativa
  unsure (1)..(1318): unsure at all Xaa locations
  Clone ID: TF_OsC97167_1.pep
MLGAKKLLNCIQDPTIATSAGGVNNLPTSAEKNQALHFLRHHLNTTLKNEYMTEEDPKVLWDSLKDRYGHQVKALLPKAKREWLHLRFQDYKYMEQYNSVLHRIVTFLKLCGEKITDADMIDKTLSTFHANHVNIQRQYRQAKYEKYSELVSVLMEVQGEDETLVENHTSRPNESSATPEANASSFKKGENQNNQNKGKNFWKNGGKVNKMSFKKKGNHSKSKKGSTSGEYGKQDQVCFKCGTRGHWSRICRTPKHLIELYQEKHGKKKSEHESHFTVEIQHSEEKMAAMHIDKHTGQIATIAGSNAHIVGVGRATVVLPHGTKIIINNALLYPESSRTLLSFKDIRANGYHVETKDENKLEFLLITKLDGNRKTVVEKLPSLKSGLYYTHIKPENVALKTIFKNPESYRIWHDRLGHPGLGMMRRIISTSNGHNLRTNDFPNQEDFVCTDCATGKLIVRPSNLKVNAESPVFLQRIQGDICGPINPMSGSFRFPDNRIQSIRMDNAGEFTSKVFNEYCMALGIKVEHSVPHVHTQNGLAESLIKRIKLIARPLLLHSNLPTTCWGHAVLHAAALLQIRPTAYNAVSPMQLTRGYAPNISHLRKFGCAVYAPIPPPKRTSMGPHRKLGIYVGFESPSIIKFLEPLTGDLHMGRYADCIFKEDHFPALGGGKYLQKVECREIEWETKNLLHLDPRTKESDQEVQTIIDLQRIENNLPEAFTNPKGIMKSHIPVVNAPERVEIPHDAEEPVFKLISTSTPTSRKRGRPPVAHNQTKVSRRRPMKQQIGXNTTAPENSEGAHQVDEPPAVICPDGNEPSENARAITTSTGRPEIPDLNIAGNNEDQECERIEEISTSYVDTGETYNRETTIVDIYFAEKIAKIIDLDPEPKSMAECKKRSDWVKWKEAIKAELISLNKRKVFGPVDRTPVGISPVGYKWVFVRKRDENNQVVRYKARLVAQGFTQRPGIDFDETYSPLMDGITFRFLISMAVNLNLEMQLMDVVTAYLYGSLDSEIYMKVPDGIQVPEETKCNIYSVKLQTSLYGLKQSGRMWYNRLSEFLEGKGFIKNDDCPCKTKYCLGLQLEHTHEGVLLHQSAYIQKILEKFNMKDSYPTRTPMVVRSLAVESDPFRPQENNDELLGPECPYLSAIGALMYLANGTRPDIAFAVNLLARFSSVPTKRHWNGIKQIFRYLRGTQDIDLTMAGYANAGYLSDPHKALSQTGYVFLCGGTAISWKSTKQTMVATSTNHSEIIALFEASKECMWLRRVIQHVLNRCGLNITPTPTIIYEDNSACVAQIQTGYVKTSLTKHISPKFFYMHEL

SEQ ID NO: 25866 - protein, 1409 aa, Oryza sativa
  unsure (1)..(1409): unsure at all Xaa locations
  Clone ID: TF_OsC1528_1805.pep
MALVPAGAGADPARGSSGSAFSYPQLTATNYTSWCIRVQAMMEDQGVWDAIEPAAGVAVDPRRDKKARSHLLQSQPEDLLMQVAKKRSAKEVWDCLKTRFVGADRVREARLQTLKGEFGAMVMEPGETLDQYAGRITAMSVRHSALGSTLGDSAMVKKLFDTVPEKFVSLVAGIEQFYDIDTMPFEEAVGRLKAYEERMRKKKAAAGGVTTDGQVLLTQAEWEAHFKKNGGESSPPQKNKPSGEGAGRGQGGRGRGRGRGAGGRGGTPRGDSGAGSGGGGRDKSHIKCFNCEEYGHYSNQCPHPKKKKGEAHLAQTEDAGPALLLAVTEDVPERASCGLVVREQRVWPKLLLADAGGHAGDVWFLDNGASNHMTGDRSKFRELDESITGRVKFGDASTVQIKGKGSILFSCKNDDQWLLQDVYYIPSLQCNMVSLGQLTETGHRVVMDEDVLEVFDKSPWRLVMKXDDPAWLWHARLGHVNFQAMKLLVDKEMXGGVPAIVHPNQLCQSCLVAKQARAPFPAAAHFRAEEPLELLHIDLCGPITPNTMSGNRYFFLIVDDYSRWIWVFVLKTKDQSLDAFVKFKPLAENTAGRRVKTLRSDRGGEFLSGEFAQVCEEAGIQRHLTAPYSPQQNGVVERRNRTVMAMARSLLKGMRVPGRFWGEAVRHAVHLLNRLPTKAMGDRTPFEAWTGRKPQLGHLKVFGCTAHAKNTQPHLKKLDDRSAPYVYLGVEEGSKAHRLFDPRRGRIHVSRDVVFEENVPWEWTSAAGQEPTDFAMEEEPGEQLPSPATAAGVVPPYQAPSPGRRAGKEAVVAAEEVPSPASPVAASPTLPGTPTPGSPSTNSAGVVPSPGTDDNIDTDDGPRRYRSLADVLREAPRVDLVEDECDGEALLAESEEPSSYREAAGQPAWEEAMQREMEAIEKNKTWELAMLPAGHRAIGLKWVYKLKKNTAGEIIKHKARLVAKGYVQKQGVDFEEVFAPVARLDTVRVVLAVAADRRWQVHHLDVKSAFLNGELEEEVYVAQPEGFARSGKEHLVLKLHKALYGLRQAPRAWNIRLDRSLRELGFDRCTQEQAVYTRGRGSDGIIVGVYVDDLIVTGENPSELKVFKEQMMGEFEMSDLGLLTYYLGIEVDQDESATTLKQTAYAKKLLSQFGMMECNSVSIPIDPRSQLSKDPEGHPVDATEYRRIIGSLRYLLHTRPDLSYAVGVASRFMERPTVMHFKAVKQILRYIKGTMDYGLVYAAGTGALKITGYTDSDLAGDLDDRRSTGGMAFYINQSLVAWSSQKQKTVALSSCEAEFMAATTAACQALWLRLLLAEVAGVEEKAVKLFVDNRSAIALMKNPVFHGRSKHIDTRYHFIRECVDGGQIVVEFVRTEEQRADALTKGLPAAKLVTARHLLGVRSLGSRQN

SEQ ID NO: 25867 - protein, 1433 aa, Oryza sativa; identical to SEQ ID NO: 18959
  Clone ID: TF_OsC1528_1995.pep

SEQ ID NO: 25868 - protein, 238 aa, Oryza sativa
  Clone ID: TF_OsC359_6150.pep
NRFSVFFPPKAGETRHVASSCATICVHCEEDHPPDRCPTSRITCFFCEGTDHVPKDCQFSFLLTKKMANQPASSNGEKHQGNTNPRQDYSFSLTPVPGQRNQNEKRKCRVREDICCFNCQGMGHFADKCPKPRNITASTSVHATPCNLKLAPQRIVIHASRSSPIARVATAPTPASALPQGVNAHFQPQQRIVVDGRSCVSPRPTPGQAKGNRPPEGDTKQKTVIRFNQQSEGSFSCE

SEQ ID NO: 25869 - protein, 1590 aa, Oryza sativa
  Clone ID: TF_OsC1713_5144.pep
MERWQIRIHHHWEMGVPRSEGYVIELHRLMRRLRYPRFPIYRVRWCGPVWEARVEVHTRVPLESDYSFPTRHRHDLPETAMQDAAREAFLRLSSIQRAELASTEFAHHPFQEESNSVCTVQDTPCCYNPIVTRLSRWAEAVDDFYEEALLEIDDQQRRVGELETEVTNLTVQQLQLEEEHQAWGSEIDSLKAQLQTEGTDTEPEIEPDITDPSEDETPVHRITFVGGPHTLSTARKSTRPPGKKPKPDPEMASRHRASTSNEETQVPDLTTLAGVMATQTQLLQAIANNQGNRGGSSFGEFMRTKPPTFATADEPMGAEDWLRNIKKKLTLVRMREADKVIFAVNQLEGPAGDWWDTYKEAREEDAGEPTWEEFTAAFRENFVPAAVMRMKKNEFRRLRQGNTTVQEYLNRFTQLARYAIGDLADEEEKIDKLENDQRTVEHNRKRRLAMNRPPQGVPQRLKGATSSGRKPTIVATNRPAAPSNFNRPVAVQNRTPTPTLAAPGVKKNVDCFNCGEYGHYANTCPHPRKTPVRTGANAMTVRGTATPAVGRGLFKTPQTNRTATGFGRGQVNHVRAEEAQEDKGVLMGMFSINSSPVKVLFDSGASHSFISLEASQKHNLTLVGLRKPMIVHSPGGEITVSHACINIPIRLRDVVFPSNLIVVIPQTLDVILGMDWLTKNRGVIDCRRREVTLTTPWGSDIRATMDQDPRLAERAGGIFTMLPMKGMPIVQRLPDVFPEDLPGMPPDRDIEFIIDLIPGTAPISKRPYRMPVNELEELKKQIRELQEKGFVCPSSSPWGAPVLFVKKKDGSMRMCVNYRSLNEVTIKNKYPLPRIDDLFDQLKGAKVFSKIDLRSGYHQLKIRTGDIPKTAFSTRYGLYEFTEEHAEHLRLVLEKLRKHKLYAKFSKCEFWLKEVAFLGHVISAGGVAVDPAKVEAVTEWKAPKSVTEIRSFLGLAGYYRRFIEGFSKIARPMTQLLKKEKEFVWSEQCKESFEQLKEKLTSAPILVLPDNRKDFVIYCDASRQGLGGVLMQDGKVVAYASRQLRPHEENYPTHDLELAAVVHALKIWRHYLIGNHCDIYTDHKSLKYIFTQSDLNLRQRRWLELIKDYDLEVHYHPGKANVVADALSRKSHCNHLRMEEMAPELKEEIAQLNLHIVLRGRINTLDIRPLLRTQIEEAQRENREIQEVKERLAAGFAKEFSTDEKDVLWYKKRIFVLEQGGLRGLILKEAHESAYSLHPGSTEMYQDLKEGYWWPNMKRDVAEYVALYDVCQKVKAEHQRPAGLLQPLRIPEWKWDEIGMDFIVGLPKTATGYDSIWVIVDRLTKTARFIPVKTNYSGAKLAELYMTRIVCLHGVPKRIISDRGTQFTSHFWEKVHEALRSYLAFSTAYHPQTDGQTKRTNQTVERAVFGPDIIKEAEEKVSLIRDHLKVAQSRQKSHADTRRRNLEFKEGDYVCLKVSPMRGTKRFKVKEKLAPRYVGPFQVMARRGEVAYQLQLPENIADVHPVFRVSQLKKCLRVPEEQAPLEEIHISNDLTYPEHPVRILDEAEKRTRSKVWRMYKVQWSNHTEDEATWESEEFLRTEYLHLFENW

SEQ ID NO: 25870 - protein, 1650 aa, Oryza sativa
  Clone ID: TF_OsC359_6360.pep
MMKALVSSSCLPSSACGSRPSLPLFLVCLCVCWAFAAHMAGSVSRRGLDMTGFVLELRGMCVVLGYPPGVDYQARPLPEQEGDDAEPHAAWEVTAVILTGSPERTSLAVTAGGDSFPAACQNAALLAIGTLHQRYPDELQHSPYRYHPRCGGARDFATFRDASSEDDATIVHLARMVEAYDAARIDFQQMVRRGMVENNMKILELRQENLQLKKDLHALEAQLCQLKVAQGEMVMTRRSANTGDGNQPEGSNHNNHGSPPPPPPPPPPPPPDTNAILTQILAQQANMMTAFLHHLQNPPQHNAPPPPPQHSKLAEFLRIRPPTFSSSNNPVDALDWLHAVGKKLDTVQCSDEEKVVFAAHQLQGPASLWWDHLQATQPERQPITWARFTADFRRTHVPAGVVALKKREFRELKQGNRSDVREDEEKQEKFLAGMDPELSVRLVSGDYPDFQRLVDKSIRLEAKHKELESHKRRLANFRNQQGANQRVRYTNPYPGGSSSQQQQQQQQPRSAPRPQFVVRVPQPQQQQNQQGTRAPRPPTPTVQPGQGRRDAQGPQRLCFNCYEPGHFADKCPKPRRQQGKAPPRSNNGGNDVIRGRVNHVTAENVLTTPDVIVGTFLIHSIPATILFDSGASHSFISVPFVGRNQLGVERLRNPLLITTPGVVMTAKYYSPAVPIEIQGIPFPSDLILLDTKNLDVILGMNWLAQFQGVVDCARRTVTLYRGPEQPVVFFAPPTSVSSSELHQIGLSEIPIVREFGDVFPEELLGMPPKREIEFRIDLAPGTTPLYKRPYRMAANELAEVKKQLEELKGKGYIRPSTSPRGAPVIFVEKKDKTKRMCVDYRTLNEVTIKNKYPLPRIDDLFDQLKGATVFSKIDLRSGYHQLRIREEDIPKTAFTTRYGLNCEFWLSEVKFLGHMISAKGAAVDPETVTAVTDWKQPKTVTQIRSFLGLAGYYRRFIENFSQIARPMTQLLKKEEKFVWSPQCEKAFQTLKEMLVSSPVLVLPDTRKDFMVYCDASRQGLRCVLMQEGHVVAYASRQLRPHEGNYPTHDLELAAVVHALKIWRHYLIGNRCEIYTDHKSLKYIFTQSDLNLRQRRWLELIKDYDVGIHYHPGRANVVANALSRKSHCNTLNIRGIPPELNQQMAALKLSIVSRGFLAALEAKPTLLDQIREAQKNDPDMHGLLKNMKQGKAAGFTEDEHGTLWNGNRVCVPDNRELKQLILQEAHESPYSIHPGSTKMYLDLKEKYWWVSMKREIAEFVALCDVCQRVKAEHQRPAGLLQPLQVPEWKWDEIGMDFITGLPKTQGGYDSIWVVVDRLTKVARFIPVKTTYGGNKLAELYFARIVSLHGVPKKIVSDWGSQFTSHFWKKLQEELGTRLNFSTAYHPQTDGQTECLNQILEDMLRACVLDFGKTWDKSLPYAEFSYNNSYQASIQMAPYEALYGRKCRTPLLWDQVGESQVFGTDILREAEAKVRTIRDNLKVAQSRQKSYAYNRRRDLEFAMDDFVYLRVTPLRGVHRFQTKGKLAPRFVGPFRIIARRGEVAYQLELPASLGNVHDVFHVSQLKKCLRVPSEQADSEQIEVREDLTYVERPVKILDTMERRTRNRVIRFCKVQWSNHAEEEATWEREDELKAAHPDLFASSSESRGRDSV

SEQ ID NO: 25871 - protein, 3275 aa, Oryza sativa
  unsure (1)..(3275): unsure at all Xaa locations
  Clone ID: TF_OsC359_7817.pep
MVMPMVTTRRNAATDDGNQPEGSNHNNHGSPPPPPPPPPPPPPDTNAILTQILAQQANMMTAFLHHLQNPPQHNAPPPPPQHSKLAEFLRIRPPTFSNSNNPVDALDWLHAVGKKQDTVQCSDEEKVIFAAHQLQGPASLWWDHFQATQPEGQPITWARFTAAFRRTHVPAGVVALKKREFRELKQGNHSVMEYLHEFNNLARYAPEDVREDEEKQEKFLAGMDPELSVRLVSGDYPDFQRLVDKSIRLEAKHKELESHKRRLANFRNQQGANQRVHYTNPYPGGSSSQQQQQQQQPRSAPRPQFVVRVPQPQQQQNQQGTRAPRPPTLAVQPGQGRRDAQGQQRLCFNCYEPGHFADKCPKPRRQQGQAPPRSNNGGKDVIRGRVNHVTAEDVLTTPDVIVGTFLIHSIPATILFDSGASHSFISVPFVGRNQLRVERLRNPLLITTPGGVMTAKYYSPAVPIEIQGIPFPSDLILLDTKNLDVILGMNWLAQFQGVVIGLSEIPIVREFGDVFPEELLGMLPKREIEFRIDLAPGTTPLYKRPYRMAANELAEVKKQLEELKEKGYIRPSTSPWGAPVIFVEKKDKTKRMCIDYRALNEVTIKNKYPLPRIDDLFDQLKGATVFSKIDLRSGYHQLRIREEDIPKTAFTTRYGLYEFTVMSFGLTNAPAFFMNLMNKVFMEYLDKFVVVFIDDILIYSQSEEDHQHHLRLVLGKLREHQLYAKLSKCEFWLSEVTFLGHVISAKGVAVDPETVTAVTDWKQPKTVTQVRSFLGLAGYYRRFIENFSKIARPMTQLLKKEEKFVWSPQCEKAFKTLEEKLVASPVLILPDTRKDFMVYCDASRQGLGCVLMQDGHVVAYASRQLRPHEGNYPTHDLELAAVVHALKIWRHYLIGNRCEIYTDHKSLKYIFTQSDLNLRQRRLLELIKDYDVGIHYHLGKANVVADALSRKSHCNTLNVCGIPPEPNQQMEALNLSIVSRGFLATLEAKPTLLDQIREAQKNDPDMHGLLKNMKQGKAASFTEDEHGTLWNGNREKYWWVSMKREIAEFVALCDVCQCVKAEHQRPAGLLQPLQVPEWKWDEIGMDFITGLPKTQGGHDSIWVVVDRLTKVARFIPVKTTYGGNKLAELYFARIVSLHGVPKKIVSDRGSQFTSHFWKKLQEELGTRLNFSTAYHPQTDGQTERLNQILEDMLCACVLDFGKTWDKSLPYAEFSYNNSYQASIQMAPYEALYGRKCRTPLLWDQVGESQVFGTDILREAEAKVRTIWDNLKVAQSRQKSYENNRRRDLEFAVGDFVYLRVTPLRGVHRFQTKEKLAPRYVGPFRIIARRGEVAYQLELPASLGNVHDVFHVSQLKKCLRVPSEQADSDQIEVCEDLTYVERPVKILDTMERRTRNRVIRFCKVQWSNHAEEEATWEREDELKAAHPDLFARPPPATIGARARRLPSAVSARPPSGAPRGCQVGPGRQPPAPSAPRPFKDRSSGLCCKALPYFHMSSGANEGYTSCGPVVEMSWHRAGVLLLGAQSCLPVPGVPAVGGIGSMYTSDQSIIYSNSRALGYGQAEQCTQMAGSVTRRGLSMTGFVLELRGMCVVLGYPHGVDYQARPLPEQEGDDAEPHAGWEVTAVILSGSPERTSLAVTAGGDSFPAACQNAALLAIGTLHQRYPDELQHSPYRYHPRHEGARDYATFRDASSEDDATIVHLARMVEAYDVARIDFHQMVRRGMVENNMKILELRQENLQLKKDLDAVEAQLHQLKIAQGEVCRPKRRRVCRSQKITARKSTSRPELVRQSLAWTCFMETPRAEPAPVVPQEGEASGVGSTEDALLLTFHXTTRRNAATGDGNQPEGSNHNHQGNPPPPPPPPPPPPPDTNAILTQILAQQANMMTAFLHHLQNPPQHNAPPPPPEHSKLAEFLRIRPPTFSSSNNPVDALDWLHAVGKKLDTVQCSDEEKVIFAAHQLQGPASLWWDHFQATQPEGQPITWARFTAAFRRTHVPAGVVALKKREFRELKQGNRSVMEYLHEFNNLARYAPEDVREDEEKQEKFLAGMDPELSVRLVSGDYPDFQRLVDKSIRLEAKHKELESHKRRLANFRNQHGANQRVRYTNPYPGGSSSQQQQXQQQPRSAPRPQFVVRVPQPQQQQNQQGTRAPRPPTPTVQPGQGRRDAQGQQRLCFNCFEPGHFADKCPKPRRQQGQAPPRSSNGGKDVIRGRVNHVTAEDVLTTPDVIVGTFLIHSIPATILFDSGASHSFISVPFVGRNQLGVERLRNPLLITTPGGVMTAKYYSSAVPIEIQGIPFPSDLILLDTKNLDVILGMNWLAQFQGVMDCARRTVTLYRGPEQPVVFFAPPTSVKSSELHQIGLSEIPIVREFGDVFPEELPGMPPKREIEFRIDLAPGTTPLYKRPYRMAANELAEVKKQLEELKEKGYIRPSTSLWGAPVIFVEKKDKTKRMCVDYRALNEVTLKNKYPLPRIDDLFDQLKGATVFSKIDLRSGYHQLRIREEDIPKTAFTTRYGLYEFTVMSFGLTNAPAFFMNLMNKVFMEYLDKFVVVFIDDILIYSRSEEDHQHHPRLVLGKLREHQLYAKLSKCEFWLSEVKFLGHVISAKGVAVDPETVTAVTDWKQPKTVTQVRSFLGLAGYYRRFIENFSKIARPMTQLLKKEEKFVWSPQCEKAFQTLKEKLVSSPVLILPDTRKDFMVYCDASRQGLGCVLMQDGHVVAYASRQLRPHEGNYPTHDLELAAVVHALKIWRHYLIGNRCEIYTDHKSLKYIFTQSDLNLRQRRWLELIKDYDVGIHYHPGKANVVADALSRKSHCNTLNVRGIPPELNQQMEALNLSIVGRGFLAALEAKPTLLDQIREAQKNDPDMHGLLKNMKQGKAAGFTEDEHGTLWNGKRRVKAEHQRPAGLLQPLQVPEWKWDEIGMDFITGLPKTQGGYDSIWVVVDRLTKVARFIPVKTTYGGNKLAELYFARIVSLHGVPKKIVSDRGSQFTSHFWKKLQEELGTRLNFSTAYHPQTDGQTERLNQILEDMLRACVLDFGKTWDKSLPYAEFSYNNSYQASIQMAPYEALYGRKCRTPLLWDQVGESQVFGTDILREAESKVRIIRDNLKVAQSRQKSYADNRRRDLEFAVGDFVYLRVTPLRGVHRFQTKGKLAPRYVGPFRIIARRGEVAYQLELPASLGNVHDVFHVSQLKKCLRVPSEQADSEQIEVREDLTYVERPVKILDTMERRTRNRVIRFCKVQWSNHAEEEATWEREDELKAAHPDLFVSPSESRGQDSV

SEQ ID NO: 25872 - protein, 2077 aa, Oryza sativa
  unsure (1)..(2077): unsure at all Xaa locations
  Clone ID: TF_OsC359_5747.pep
TAGPTWQPRGAPEGGLAGTADGRRRTRAPMVAAGDQRRDGAAPERGEGRGKXKQRSSAHPGTTRTAETTTGAEEGGGAVRIDEDGGAPTVGGRNGGADEVDEDAAKPMEVTPRREEVRGDDGGELKLGGDGGERGRRREHESDGESPFFPPSLLGRLGPLPSLSLLSPAAQSASSPPRAADGRARPPPSLTGGAHPHARKERPLVILAGSPERTSLTVTAGGDSFPAACQSAALLAIGTLHQRYPDELQHSPYRYHPRRGGARDYATFRDASSEDDATIMHLARMVEAYDAARIDFHQMVRHGMVENNMKILELRQENLQLKKDLDAVEAQLHQLKIAQGEVCRPKRRRVCRSQKITARKSTSRPELVRQSLAWTCFVETPRAEPAPVVPQEGEASGVGSTEDALLLTFRPGPSQQRNAATGDGNQPEGSNHNHQGSPPPPPPPPPPPPPPDTNAILTQILAQQANMMTAFLHHLQNPPQHNAPPPPPQHSKLAEFLRIRPPTFSSSNNPVDALDWLHAVGKKLDTVQCSDEEKVIFAANQLQGPASLWXDHFQATQPEGQPITWARFTAAFRRTHVPAGVVALKKREFRELKQGNRSVTEYLHEFNNLARYAPEDVREDEEKQEKFLVGMDPELSVRLVSGDYPDFQRLVDKSIRLEAKHKELESHKRRLANFRNQQGANQRVRYTNPYPGGSSSQQQQQQQQPRSAPRPQFVVRVPQPQQQQNQQGTRAPHPPTPTVQPGQGSRHAQGPQRLCFNCFEPGHFADKCPNPRRQQGQAPPRSNNGGKDVIRGRVNHVTAEDMLTTPDVIVGTFLIHSIPATILFDSGASHSFISVPFVGRNQLGVERLRNPLLITTPGGVMTAKYYSPAVPIEIQGIPFPSDLILLDTKNLDVILGMNWLAQFQGVVDCARRTVTLYRGPEQPVVFFAPPTSVSSSELHQIGLSEIPIVREFGDVFPEELPGMPPKREIEFRIDLAPGTTPLYKRPYRMAANELAEVKKQLEELKEKGYIRPSTSPWGAPVIFVEKKDKTKRMCVDYRALNEVTIKNKYPLPRIDDLFDQLKGATLFSKIDLRSGYHQLRIREEDIPKTAFTTRYGLYEFTVMSFGLTNAPAFFMNLMNKVFMEYLDKFVVVFIDDILVYSQSEEDHQHHLRLVLGKLREHQLYAKLSKCEFWLSEVKFLGHVISAKGVAVDPETVTAVTDWKQPKTVTQVRSFLGLAGYYRRFIENFSKIARPMTQLLKKEEKFVWSPQCEKAFKTLKEKLVASPVLILPDTRKDFMVYCDASRQGLGCVLMQDGHVVAYDSRQLRPQEGNYPTHDLELAAVVHALKIWRHYLIGNRCEIYTDHKSLKYIFTQSDLNLRQRRWLELIKDYDVGIHYHPGKANVVADALSRKSHCNTLNVRGIPPELSQQMEAPDTXAIVGRGFLAAWRXXXXXXXXXXXXXXXXXXXXXXXXXXXXXXXXXXEFTEXXTLCDVCQRVKAEHQRPAGLLQPLQVPEWKWDEIGMDFITGLPKTQGGYDSIWVVVDRLTKVARFIPVKTTYGGNKLAELYFARIVSLHGVPKKIVSDRGSQFTSHFWKKLQEELGTRLNFSTAYHPQTDEQTERLNQILEDMLRACVLDFGKTXDKSLPYAEFSYNNSYQASIQMAPYEALYGRKCRTPLLWDQVGESQVFGTDILREAEAKVRTIRDNLKVAQSRQKSYADNRRRNLEFAVDDFVYLRVTPLRGVHRFQTKGKLAPRYVGPFRIVARRGEVAYQLELPASLGNVHDVFHVSQLKKCLRVPSEQADSEQIEVREDLTYMERPVKILDTMERRTRNRVIRFCKVQWSNHAEEEAIWEREDELLPPRRRLLRLRRVLADLVHPSVLPADRRNAAVPVDPSHTAAFLRSGRRSRRRRRPGVSRGPPFSFPPSLPSLGRRSAVPMAAAGDHRGAGASPPVGCAGEAAFGRAPRRLPAGIELAPSPSLSTVADDLRPAFSARRDRLPPRRRLLRLRRTAVDPVHPLDELADRRNAADPVDQSRAAAFLRSGRLFCRRRRPRVSRGPPPLFPLPFPSLGRCSAVPMATAGDHRGAGAASRWLRH

SEQ ID NO: 25873 - protein, 1351 aa, Oryza sativa
  Clone ID: TF_OsC1713_4419.pep
MSNEVNHVGKAPMFNGTNYSTWKIKMSTHLKAMSFHIWSIVDVGFAITGTPLTEIDHRYLQLNAQAMNALFNSLSQEEFDRVSNLETAYEIWNKLAEIHEVTSEYKDAKLHFLKIQYETFSMLPHESVNDMYGRLNVIVNDLKGLGVNYTDLEVAQKILGALPEKYETLVTMLINSDISRMTPASLLGKINTNDMYKLKKKEMEEASSPSKKCIALQAEVEDKGKGKVNEANEDLEEEIALLARRFNDLLGRRKERGRGSNSNRRRNSRPNKTLSNFRCFECGEKGHFASKCPSKDDDGDKSSKKKSGGYKLLKKLKKEGKKIEAFIGEWDSNEESSASSGSEEEGGDDASSKKKKMTVVAIKEAPSLFAPLCLMAKGSSKVTSLSDSESNNDCDDVSYDELVSMFEELHAYSEKEIVKFKTLKKDHASLEVLYKELKTSHERLTISHEKLKEAHDNLLFTTQHGAHIDVGISCDLLDDSTTCHIAHVASSSISTSCDDLVDMPSSSSCVSICDTSLVVENNELKEQVAKLNKSLERCFKGRLMMVALLLDMWVPLYSVVNYRTGGSHWVLDSGCTQHMTGDRAMFTTFEVGGKEQEKVTFGDNSKGKVIELVAKTSLGWLWHRRLAHVGMNQLSKLSKRDLVVGLKDVKFEKDKLCSACQAEAINTACHATNRLYLHRLLKKTFYELIVGRKPNVAYFRIFGCKCYIYRKGVRLTKFESRCDEGFLLGNASNSKAYRVYNKNKGIVEETADVQFDETNGSQEGHENLDDVGDEGLMRAMKNMSIGDVKPIEVEDKPSTSTQDEPSTSATPSQAQVEVEEEKAQDPPMPPSIHTALSMDHPIDQVLGDISKGVQTRSRVASICEHYSFVSCLEPKHIDEALFDPDWMNAMHEELNSFARNKVWTLVERPRDHNVIGTKWVFRNKQDENGLVVRNKARLVAQLKDGTFVSQTKYIKDLLKRFGLEDAKPIKTPMATNGHLDLDEGVMPPRTRHSRRAPTPDPMSEPEESSGEDYAQSDEEVEANVEGASEEASRDDVSDSGEDEDEQSDEMKIDPSIQFVVNMRNPSQYTILRHHDQFLRPRVTPDPRFHTVFQKTVYEQVYVGKAFAEYKWISWRDINETPEFKSLQDLFKTVGIDRIVTLKQDYNEDLIRQFYATVWVAGDYSDMKWMSDTLQCSISRRQFRRLLNIRLDFGHDLHEAHTHNPLSIDYLSQFYEDGARYTHGKVAGLRTIPSVVNRIVRATILPRLGNNDDIWGVAWHVIDAIIQGRQFDIVSFMMQEIAISKGTFTQGIYYAPYIMRLIKDKLGAAGQNLKKHKQYKPRLQLGAPRVRPDQGRSDRRALAGLTGHKTAV

SEQ ID NO: 25874 - protein, 639 aa, Oryza sativa; identical to SEQ ID NO: 18996
  Clone ID: TF_OsC1713_4729.pep

SEQ ID NO: 25875 - protein, 1959 aa, Oryza sativa
  unsure (1)..(1959): unsure at all Xaa locations
  Clone ID: TF_OsC1528_2012.pep
MAGFSLISCAVGIIFFSVCYLPAAPAAALSFNYSTFSSDNQEDFTFEGNASIHDGCIDFVANGTWGRGYRPYSTGRVSYKLPVRLWDAATGEVASFTTTFSFNITPMNISDKGDGMAFFLVSYPSRMPLTADGDTLGLVSNKPENAPAGGDQFVAVEFDTYPNPGLDPNATGDHIGIDINSVRSLTTEPLTNSSLIGNMTAIVHYDSSSSILSVKLWINDTTKPPYNLSYEIVDLKKKLPENVTIGFSAATGASDELHQLTSWYFNSSSSFEHKHGRAGVVAGATVGATLFVVLLFTAAAILIRRRRIKNRKEAEDEQDISSDSEDNDGEPIVEIEMGTAPRRLPYYELVEATKNFAVEEKLGQGGFGSVYRGYLREQGLAVAIKRFAKDSSKQGRKEYKSEIKVISRLRHRNLVQLVGWCHGRNELLLVYELVPNRSLDVHLHGNGTFLTWPMRIKIVLGLGSALLYLHQEWEQCVVHRDIKPSNVMLDESFSAKLGDFGLARLIDHTIGIKTMTAMSGTPGYLDPECVITGRASAESYVYSFGIVLLEVACGRRPMSLLDSQNNGVFRLVEWAWDLYGKGDVLMAADKRLDGDYDSAEMERVIALGLWCVHPDPSVRPSIRDAMAILQSSGGQLPVLSAKMPVPMYAPPMASFDGLAVCVIYRDVVVLRCDAVVVHIDDERPCYSHLVFLDYSIPIVSVHRQSGEQVSGTSAFDVLHREKAAIRRCDFTMAGFADALRPDKFTGVHFKRWQIRVALWLTAMKCFWVSTGKPEGILAADQHKQFEKATTLFVGCILSVLGNRLVEVYMHMTNAKELWDALNTKFGATDASNDLYIMEQFHDYRMADNRSVVEQAHEEYSVEGLIVSLDVEEKAREKDAASKGDGGQSSANVVHKAQNKSKGKYKAQQTTNFKKQKKNNNNPNQDERTCFVCSQPSHLARKCPQRKGMKAPAGQTSKSANVTIGNTGDGSGYGXRGSTVLMGNGSHASVHGVGTVDLKFTSGKIVQLKNVQHVSSIDRNLVSGSRLTRDGFKLFFESNKVVVSKHGYFIGKGYECGGLFRFXLSDFCNKSVNHICGSVDDEANVXHSRLCHINFGLMSRLSSMCLIPKFSIVKGSKCHSCVQSKXPRKPHKAAEERNLAPLELLHSDLCEMNGVLTKGGKRYFMTLIDDATRFCYVYLLKTKDDALDYFKIYKAEVENQLDRKIKRLRSDRGGEFFSNEFDLFCEEHGIIHERMPPYSPESNGIAERKNRTLTDLVNAMLDTAGLPKAWWGEALLTLNHVLNRVPNRNKDKTPYEIWIGRKPSLSYLRTWXCLAKVNVPITKKRKLGPKTMDCVILGYAYHSIAYRFLIVKSEEPDMHVGTIMESRDATFFESFFPMKDTHSSSSQSSEIIPSSITPPEQTEHTHEHVTEEDDSAAPRRSKRQRTAKSFGKDFTLYLVDDTPKSISEAYASPDADYWKETVRSEMDSIIANGTWEVTERPYGCKPMGCKWVFKKKLRPDGTIEKYKARLIAKGYTQKEGGDFFDTYSPVARLTTIRVLLSLAASHGLLVHQMDVKTTFLNGELDEEIYMDQPDGFVVEGQEGKVCKLLKSLYGLKQASKQWHEKFDKTLTSAGFAVNEADKCVYYRHGGGEGVILCLYVDDILIFETNLEVINEVKSFLSQNFDMKDLGVADIILNIKLIRGENGITLLQSHYVEKILNRFGYIDSKPSPTPDDPSLLLRKNKRIARNQLEYSQIIISLMYLASATRPDISFAVSKLNRFTSNPGDDHWRVLERVMRYLKGTVELGLHYTGYPAVLEGYSDSNWISDVDEIKATSGYVFTLGGGAVXWRSCKQTILTRSTMEAELMALDTATVEAEWLHDLLMDLPIVEKSTCEKTIEVCQEIKKLXSYNVGLHPNSXKPGRSFHEGTITKCDRQCIEGDGFETHSILQRTHLCELDCWSQSMEILGESSRKLTIDLGV

SEQ ID NO: 25876 - protein, 1786 aa, Oryza sativa; identical to SEQ ID NO: 19005
  Clone ID: TF_OsC1528_1880.pep

SEQ ID NO: 25877 - protein, 1499 aa, Oryza sativa
  unsure (1)..(1499): unsure at all Xaa locations
  Clone ID: TF_OsC91_2308.pep
MSGQAGDGNDGDKGVKIPYDYPPTSTSYVSTYSGKAPYFNGTDYAAWKHKMKMHLKSINPSIWRIVEKVYVLQNPEDPTKEDDENEHKNAQAANAILSALSGSEFNRVDGIESAKMIWDTLRNLHEGTDSVRESKVEILKGQFERFVMLDGLGSKDMTDGVVVKKMVRAITPRNSTLVTIIRERPDYKTLTPHDLLGRILAHDMLMQESNDVIQYINQSSTTSIKKEDLALKAKEEEEENRKSKSKAEIDDEEMALLVKKFGKFMRRSGFFKGGSSKHYSNKSSGKHSARVCYVCKEPGHFIADCSHLKDGSHIKEDKKKGEKKEKHKHSKQEHYGQAHLGMIFGSESESSSSDEGVATFAVKPSSPPRLFDYSSDEDAPICLMAKKPKVPSPPKSFNVDLVSDEEDEVMDDELFKSITKESLPHLSELLGRIEDQYATLERQEVLLIREKERSHELKSELAKEREKNEALQNEKLMRLLHNGLLKCHMGSKALKKYLGYQRDNFNHEGLGKNDSGRVVAKYVGPRGENISIKRVLWVPKALVTNMRGPKQEYVSGGRSWVIDSGCTNHMTGEESMFSTLDPNGTSQDNIVFRDDGKGKASPCWYEESSQASKARXHILGLTNVQFEKDRVCSACQAGKQIGAHHPVKNVMTTSRPLELLHMDLFRPIAYLSIGGNKYGLVIVDDFSRFTWVFFLHDKSETQAIFKKFARRAQNEFDLKIKNIRSDNGKEFKNTCIESFLDEEGIKHEFSAPYSPQQNGVAERKNRTLIEMARTMLDEYKTSDRFWVEAVNTACHAINRLYLHRLLKKTLYELLTGNKPNVSYFRVFGSKCYILNKKARSSKFAPKVDEGFLLGYGSNECAYHVFNKTSGIVEIACDVTFDETNGSQVEQVDSHVLGEEDPSEAIKRLALGDVRPREPQQGASSSTQVEPPTSTQADDPSTSSLDQGEEGEQVPPSPINLACPRIHQSIQRDHPTDNILGDINKGVSTRSRIANFCEHYSFVSSLEPLRVEEALNDPDWVMAMQEELNNFTRNEWIFRNKQDEAEVVIRNKARLVAQGFTQIEGLDFGETFAPVARLESIRILLAFATNLNFKLYQMDVKSAFLNGPINELVYVEQPPGFKDPKYPNHVYKLHKALYGLKQAPRAWYECLRNFLVKNGFEIGKADSTLFTKRHDNDIFVCQIYVDDIIFGSTNKSFSEEFSRMMTKRFEMSMMGELKFFLGLQIKQLKEGTFICQTKYLKDMLKKFGMKNAKPIHTPMPSNGHLDLNEQGKDVDQKVYRSIIGSLLYLCASRPDIMLSVCMCARFQATPKECHLVAVKRILRYLVHTPNLGFWYPKGARFDLIGYADADYAGCKVDRKSTSGTCQFLGRSLVSWSSKKQNSVALSTAEAEYVSAGSCCAQLLWMKQTLRDYGLNVSKIPLLCDNESTIKIANNPVQHSQTKHIDIRHHFLRDHSTKGDIDIQHVRTDKQLADIFTKPLDETRFCELRSELNILDSRNVA

SEQ ID NO: 25878 - protein, 469 aa, Oryza sativa
  Clone ID: TF_OsC1528_1619.pep
MAENDRKTGPGVAEGDWRDLRGSAMDGAPDARAEERAEPKQQSGSDFWAARQDIGQTWYKGLNRLAVQRLVTKCARMGRPSQADEIMRSRGTSRVEDWSHRIIANTTRVKDLLAQQGGSKALKGVKPAKMEDDDWEEMQLQAAATIRLCLSDQKLYGLKMQEGADLTAHVNVFNQLVTDLVKMDVEVDDEDKAIVLLCSLPKSYEHVVTTLTYGKETIKTKDITSALLARDQMRKNKEGETSQAEGLLVKEDHAGHKVKKNKKKKMVQCFRCDEWGHISRECPTLKGKAKANTVTSSNDSDSDGCDFLTMSSAQSKDAEAWILDSASLFHMTPRKEWFSSYKSGEFGFVYLGDDTSYPAMGVGEVKIKLEDGGEHVLQGVRHVPGLKRNLISLGTLHEEGLIFRGNRNRKTIEIMNGKMAVMTGEKVESHLYKLRGCTVAGGVQEEAVAGIAIAFGGGGSGADSSGGLQ

SEQ ID NO: 25879 - protein, 1112 aa, Oryza sativa
  unsure (1)..(1112): unsure at all Xaa locations
  Clone ID: TF_OsC359_5822.pep
MIVRQHRPFNSSSFHQGASGSQNHQGGQPNCSAAPRPPTAPAQSAPSAEAKKETGTKPGSCFNCGEHGHFADKCPKPRRAGPRFVQAHVNHASAEEAQPAPEVVLGTFPINSVPATVLFDSGATHSFISKKFVGIHGLRKEELSTPMRVHTPGNSSTLVSYSPSVLIEIHRSRFLANLILLESKDLDVILGMDWMTKFKGVIDCANRTVTLTNEKGETVVYKSPVSRKQGISLNQIEVENPVAIEEKSSRKLEDISIVCEYPEVFPEDLTTMPPKREIEFRIDLAPGTAPIYKRPYRMVANELAEVKKQVDEQLQKGYIRPSTSPWGAPVIFVQKKDKTKRMCVDYRALNEVTIKNKYPLPRIDDLFEQLKGAKVFSKIDLRSGYHQLRIREEDISKTAFTTRFGLYECTVMSFGLTNAPAFFMNLMNKVFMEFLDKFVVVFIDDILIYSKSEEEHEQHLRLVLEELKEQQLYAKFSKCDFWLSEDKFLGHVITAQGIAVDPANVESVTKWTPPKTVSQIRSFLGLAGYYRRFIEIFSRIARPMTQLLKKDEKFKWTAECDKSFEELKKKLVSAPVLILPDQTKDFQVYCDASRHGLGCVLMQEGRVVAFASRNRCEVYTDHKSLKYIFTQPDLNLRQRRWLELIKDYDMSIHYHPGKANVVADALSRKSYCNALCTEGMCKELQQELERLNMGIVEHGFVAALEARPTLVDQVRAAQVNDPEIAELKKNMRVRKARDILEDEHGMIWMGERLCVPDDKELNDLILTEAHQTQYSIHPGSTKMYQDLKEKFWWASMKREIAEFVALCDVCQRVKAEHQRPAGLLQPLQIPEWKWEEIGMDFITGLPRTSSGHDSIWVVVDRLTKVAHFIPVHTTYTGKXFSYNNSYQASLHMAPFKALYGWKCXRSIVRPLFWDQTGERQLFGTEVLTEAEEKVRTVRERLRIAQSRQKSYADNLRRELTFEAGDYVYLRVTPLRGVHRFQTKGKLAPRFVGPYRILERRGEVAYQLELPSNMIGIHDVFHVSQLKKCLRVPEEQADSEHINIQEDLTYVEKPVRILETSERRTRNKVTRFCRVQWSHHSDEEATLEREDELKAAHPHLFTSSSESRGRDSV

SEQ ID NO: 25880 - protein, 1764 aa, Oryza sativa
  unsure (1)..(1764): unsure at all Xaa locations
  Clone ID: TF_OsC359_6222.pep
MADHPPNHRGEGMDDFVAELARMTLVVGYPNAPEYSTVPPLNGELPHRVRLEVHGYVGTCLANMVVEASGGTADHACXEAAYLMMARLRERHNYIFCNTAYHFHPRRASGDDVNTFRPTAGENDTTFGHMCAVMRGMDRMHSDLHKASKALNDRKLVRIIALKDEIARLKKENAXLKGLSALGGVRIRTTPRKSTTAPVRIQLAPRNPPPPAAPPAAPPAVPVAPVSAPASALSFAPASAARGLASGSHDRSSSMVNTRNGSRAAGEDSNSEERTDGGHPNSASGNGPPLLPENPTLAQVMTHQTQMMAAMMQQQHQQMHQRMQQQTEQQQQXQFGPPLPQFKLPEFLRVRLPTFSSTTNPMEANDXLHAIEKKLNLLQCNDQEKVAFATHQLQGPTSAWWDNHMATRSLGTEVTWAEFCRSFRKAQVPDGVVVQKKREFRALHQGNRTVTEYLYEFNRLARYAPEDVRTDAEKQEKFLAGLDDELTNQLISGDYADFEKLVDKAIHQEDQRNKMDRKRKAAQFRSNQGSHQRPRFFPGQQGGPTTMIVRQHRPFNSSSFHQGANGSQNHQGGQPNRSAAPRPPMAPAXSAPSAQAKKETGTKPGSCFNCGEHGHFADKCPKPRRAGPRFVQARVNNATVLFDSAPEVVLGTFPVNSIPATVLFDSGATHSFISKKFVGIHGLIREELSTPMRVHTPGNSSTSVQFSPSIRIEIQRSPFLANLILLESKDLDVILGMDWLTKFKGVIDCANRTVTLTSEKGETLVYKSPVSPKQGASLNQIEVEIPAVTEEKSSRKLEDIPIVCEYPEVFPEDLTTMPPKREIEFRIDLTPRTAPIXKRPYRMAANELAEVKKQVDEQLQKGYIRPSTSPWGAPVIFVEEKDKTKRMCVDYRALNEVTIKNKYLLPRIDDLFDQLKGAKVFSKIDLRSGYHQLRIQEENIPKTAFTTRYGLYECTVMSFGLTNAPAFFMNLMNKVFMEFLDKFVVVFIDDILIYSKSEEEHEKLKEHQLYAKFSKCDFXLSEVKFLGHVITAQGVAVNPLNVESVTKWTPPKTVSQIRSFLGLAGYYCRFIENFSRIARPMTQLLKKDEKFKWTAECDKSFEELKERLVSAPVLILPDQTKDFQVYCNTSRHGPGCVLMQEGRVVVYASWQLCPHEGNYPTHDLELAAVVHDLKIWRRYLIGNRCEVYTDHKSLKYIFTQPDLNLRQRRWLELIKDYDMSIHYHPGKANVVADALSRTSYCNALCTEGMCKELQQELEHFNLELVEHGYVAALEARPTLVDQVRAAQVNDPEIAELKKNTRVGKARDFLEDEHGTIWMGERLCVPDDKELKDLILTEAHQTQYSIHPGSTKMYQDLKEKFXXASMRREIAEFVALCDVCQLVKAEHQRLVGLLQPLQIPEWKWEEIGMDFITGLPRTSSGHNSIWVVVDRLTKVAHFIPVHTTYTGKRLAELYLSRIMCLHGVPKKIXSDRGSQFTSNFWQKLQEELGTRLNFSTTYHPQTDGQTERVNQILEDMLKACALDFGGAWDKNLPYVEFSYNNSYQASLQMAPFEALYGRKCRTPLFWDQTGERQLFGTEVLTEAEEKVRTVRERLRIAQSRXKSYTENRRRELTFEAGDYVYLRVTPLRGVHRFQSKGKLAPRFVGPYKILERRGEVAYQLELPSNMIGIHDVFHVSQLKKCLRVPEEQADSEHIDIQEDLTYVEKPVRILETSERRTRNKVTRFCRVQWSHHSEEETTWEREDELKAAHPHLFASSSESRGRDSV

SEQ ID NO: 25881 - protein, 965 aa, Oryza sativa
  unsure (1)..(965): unsure at all Xaa locations
  Clone ID: TF_OsC359_7153.pep
MAAAQPVRAAMAKSTPTVDIPTAPLAMGNRAVTEYLHEFNRQARYAPEDVRTDAEKQEKFLAGLDDELTNQLISRDYADFEKLVDKAIRQEDQRNKMDRKRKAAQFRSNQGSHQRPRFTPGQQGGPTTMIVHQYRPFNSSSFHQVASGSQNHPGGQPNRSAAPRPPMATAQAAPSVQAKKETGVKPGSCFNCGEHGHFADKCPKLRRAGPRFAQARVNHASAEEAQAALEVVLEIQISPFLANLVLLESKDLDVILGMDWLTKFKGIIDCANRTVTLTNERGETVVYKSPVALKQGISLNQIEVENSVVTAEKSSRKLEDIPIVCEYSEVFPEDLTTMPPKREIEFRIDLAPGTAPIYKRPYRMAANELAEVKKQVDEQLQKGYIRPSTSPWGAPVIFVEKKDKTKRMCVDYRALNEVTIKNKYPLPRIDDLFDQLKGAKVFSKIDLRSGYHQLRIREEDIPKTAFTTRYGLYECTVMSFGLTNAPAFFMNLMSKVFMEFLDKFVMVFIDDILIYSKSEEEHEQHLRLVLEKLKEHQLYAKFSKCDFWLSEVKFLGHVITAQGVAVDPSNVESVTKWTPPKTVSQIRSFLGRAGYYRRFIENFSRIARPMTQLLKKDEKFKWTAECDKGFEELKKKLVSALVLNLPDQTKDFQVYCDASRHGLGCILMXGRVVAYASRQLRLHEGNYPTHDLELAARHGLRSWIKSEQLMXYPEIAELKKNMRVGKARDFHEDEHGTIWLGERLCVPDDKELKDLILTEAHQTQYSIHPGSTKMYQDLKEKFWWASMRREIAEFVALCDVCQRVKAEHKRPAGLLQPLQIPEWKWEEIGMDFITDGQTESVNQILEDMLRACALDFGGAWDKSLPYAEFSYNNNYQASLQMAPFEALYGRKCRTPLFWDQTGKRQLFGTEVLTEAEEKVRTIRERLRIAQSRQKSYADNRRRELTFEAGDYVYLRVTPLRGVHRF

SEQ ID NO: 25882 - protein, 167 aa, Oryza sativa
  Clone ID: TF_LIB4371-025-R1-K1-B10.pep
GDECVFVHLPPPTGGCSLRRPPSRKSPAAAPSSSWADVVRAPRAGPPTLSQRDIEAGWCVVKRRSKSSSAGPTTAISPPASARPIPRWLQGRCFCCLGLGHLKAACKEPRRCYRCWYPGHLERDCKEGSSPKRAAGTAAATLAKAAQIATAKKGGAPLTARLAKKGG

SEQ ID NO: 25883 - protein, 2007 aa, Oryza sativa
  Clone ID: TF_OsC359_5505.pep
MEPEISAADSFPSGRPLSLPTLFKRSPCLSPPFPPLAALSPRRIRARAVVLSLRRRRRAPVRRRRRPVPPPASASPPSASPRSRRPRPLLRFARQPPEHRRPRRPEPRRRLSPLWSPFPSSPSTRGEPRTAISFPPSLPSLGRRSACLWPPPATIGARARRLPSAVPARPPSGAPRGCQVGPGRQPPAPAGTADAWDPRRQPASAACARSTVDPPRPYKDRSSGLCCKALPYFHMSSGANEGYTSCGPVVEMSWHRAGVLLLGAQSCLHVPGVPAVGGIGSVLLSMARMGWKLCHVFRLYTVVMAGSVTRRGLDMTGFVLELRGMCVVLGYPHGVDYQGRPLPEQEGDDGEPHAAWEVTAVILAGSPERTSLAVTAGGDSFPAASQSAALLAIGTLHQRYPDELQHSPYRYHPRRGGARDYATFRDASSEDDATIVHLARMVEAYDAARIDFHQMVRRGMVENNLKILELRQENLQLKKDLDAVEAQLHQLKIAQGEVCRPKRRRVCRSQKITARKSTSRPELVRQSLAWTCFVETPRAEPAPVVPQEGEASGVGSTEDALLLTFRPGPSQRRSANTGDGNQPEGSNHHHQGSPPPPPPPPPPPPPDTNAILTQILAQQANMMTAFLHHLQNPPQHNAPPPPPQHSKLAEFLRIRPPTFSSSNNPVDALDWLHAVGKKLDTVQCSDEEKVIFAAHQLQGPASLWWDHFQATQPEGQPITWARFTAAFRRTHVPAGVVALKKREFRELKQGNRSVMEYLHEFNNLARYAPEDVREDEEKQEKFLAGMDPELSVRLVSGDYPDFQRLVDKSIRLEAKHKELESHKRRLANFRNQQGANQRIRYTNPYPGGSSSQQQQQQQQPRFAPRPQFVVRVPQPQQQQNQQGTRAPRPPTPTVQPGQGRRDAQGPQRLCFNCFEPGHFADKCPKLRRQQGQAPSRSNNGEKDVIWGRVNHVTAEDVLTTPDVIVGTFLIHSIPATILFDSGASHSFISVPFVGRNQLGVERLRNPLLITTPGGVMTAKYYSPAVPIEIQGIPFPSDLILLDTKNLDVILGMNWLAQFQGVVDCARRTVTLYRGPEQPVVFFAPPTSVSSSELHQIELLEIPIVREFGDVFPEELPGMPPKREIEFRIDLAPGTTPLYKRPYRTAANELAEVKKQLEELKEKGYIRPSTSPWGAPVIFVEKKDKTKRMCVDYRALNELKGATVFSKIDLRSGYHQLRIREEDIPKTAFTTRYGLYEFTVMSFGLTNAPAFFMNLMNKVFMEYLDKFVVVFIDDILVYSQSEEDHQHHLRLVLGKLREHQLYAKLSKCEFWLSEVKFLGHVISAKGVAVDPETVTAVTDWKQPKTVTQVRSFLGLAGYYRRFIENFSKIARPMTQLLKKEEKFVWSPQCEKAFKTLKEKLVSSPVLILPDTRKDFMDGHVVAYASRQLRPHEGNYPTHDLELAAVVHALKIWRHYLIGNRCEIYTDHKSLKYIFTQSDLNLRQRRWLELIKDYDVGIHYHPGKANVVADALSRESHCNTLNVRGIPPELSQQMEALNLSIVGRGFLAALEAKPTLLDQIREAQKNDPDMHGLLKNMKQGKAAGFTEDEHGTLWNGNRVCVPDNRELKQLILQEAHESPYSIHPGSTKMYLDLKEKYWWVSMKREIAEFVALCDVCQRVKAEHQRPAGLLQPLQVPEWKWDEIGMDFITGLPKTQGGYDSIWVVVDRLTKVARFIPVKTTYGGNKLAELYFARIVSLHGVPKKIVSDRGSQFTSHFWKKLQEELGTRLNFSTAYHPQTDGQTERLNQILEDMLRACVLDFGKTWDKSLPYAEFSYNNSYQASIQMAPYEALYGRKCRTPLLWDQVGESQVFGTDILREAEAKVRTIRDNLKVAQSRFRTKGKLAPRYVGPFRIVARRGEVAYQLELPASLGNVHDVFHVSQLKKCLRVPSEQTDPEQIEVREDLTYVERPVKILDTMERRTRNRVIRFCKVQWSNHAEEEATWEREDELKAAHPDLFASSSESRGRDSV

SEQ ID NO: 25884 - protein, 1787 aa, Oryza sativa
  unsure (1)..(1787): unsure at all Xaa locations
  Clone ID: TF_OsC359_5520.pep
MSWHRAGVLLLGXSVLPACPGSSGRRXGIGSVLLSMARMGWKLCHVFRLYTVVMAGSVTRRGLDMTGFVLELRGMCVVLGYPHGVDYQGRPLPEQEGDDAEPHAAWEVTAVILAGSPERTSLTVTAGGDSFPAACQSAALLAIGTLHQRYPDELQHSPYRYHPRRGGARDYATFRDASSEDDATIMHLARMVEAYDAARIDFHQMVRRGMVENNMKILELRQENLQLKKDLDAVEAQLHQLKIAQGEVCRPKRRRVCRSQKITARKSTSRPELVRQSLAWTCFVETPRAEPAPVVPQEGEASGVGSTEDALLLTFRPGPSQRRSAATGDSNQPEGSNHHHQGSPPPPPPPPPPPPDTNAILTQILAQQADMMAAFLHHIQNPPQHNAPPPPSQHSKLAEFLRIRPLTFSSSNNPVDALDWLHAVGKKLDTVQCSDEEKVIFAAHQLQGPASLWWDHFQATQPEGQPITWARFTAAFRRTHVPAGVVALKKREFRELKQGNRSVTEYLHEFNNLARYAPEDVREDEEKQEKFLAGMDPELSVRLVSGNYPDFQRLVDKSIRLEAKHKELESHKRRLANFRNQQGANQRVRYTNPYPGGSSSQQQQQQQQPRSAPRPQFVVRVPQPQQQQNQQGTRAPRPPTPTVQPGQGRRDAQGPQRLCFNCFEPGHFADKCPKPRRQQGQAPPRSNNGGKDVIRGRVNHVTAEDVLTTPDVIVGTFLIHSIPATILFDSGASHSFISVPFVGRNQLGVERLRNPLLITTPGGVMTAKYYSPAVPIEIQGIPFPSDLILLDTKNMDVILGMNCSSELHQIGLSEIPIVREFGDVFPDELPGMPPKREIEFRIDLAPGTTPLYKRPYRMAANELAEVKKQLEELKEKGYIRPSTSPWGAPVIFVEKKDKTKRMCVDYRALNEVTIKNKYPLPRIDDLFDQLKGATVFSKIDLRSGYHQLRIRDEDIPKTAFTTRYGLYEFTVMSFGLTNAPAFFMNLMNKVFMEYLDKFVVVFIDDILVYSQSEEDHQHHLCLVLGKLREHQLYAKLSKCEFWLSEVKFLGHVISAKGVAVDPETVTAVTDWKQPKTVTQVRSFLGLAGYYRRFIENFSKIAQPMTQLLKKEEKFVWSPQCEKAFKTLKEKLVASPVLILPDTRKDFMVYCDASRQGLGCVLMQDGHVVAYASRQLRPHEGNYPTHDLELAAVVHALKIWRHYLIGNRCEIYTDHKSLKYIFTQSDLNLRQRRWLELIKDYDVGIHYHPGKANVVADALSRKSHCNTLNVRGIPPKLSQQMEALNLSIVGRGFLAALEAKPTLLDQIREAQKNDPDMHGLLKNMKQGKAAGFTEDEHGTLWNGNRVCVPDNRELKQLILQEAHESPYSIHPGSTKMYLDLKEKYWWVSMKREIAEFVALCDVCQRVKAEHQRPAGLLQPLQVPEWKWDEIGMDFITGLPKTQGGYDSIWVVVDRLTKVARFIPVKTTYGGNKLAELYFARIVSLHGVPKKIVSDRGSQFTSHFWKKLQEELGTRLNFSTAYHPQTDGQTERLNQILEDMLRACVLDFGKTWDKSLPYAEFSYNNSYQASIQMAPYEALYGRKCRTPLLWDQVGESQVFGTDILREAEAKVRTIRDNLKVAQSRQKSYADNRRRNLEFAVDDFVYLRVTPLRGVHRFQTKGKLAPRYVGPFRIVARHGEVAYQLELPASLGNVHDVFHVSQLKKCLRVPSEQADSEQIEVREDLTYVERPVKILDTMERRTRNRVIRFCKVQWSNHAEEEATWEHEDELKAAHPDLFASSSESRGRDSV

SEQ ID NO: 25885 - protein, 838 aa, Oryza sativa
  unsure (1)..(838): unsure at all Xaa locations
  Clone ID: TF_OsC359_5522.pep
MSWHRAGVLLLGAQSCLPVPGVPAMAGSVTRRGLDMTGFVLELRGMCVVLGYPHGVDYQGRPLPEQEGDDGEPHAAWEVTAVILAGSPERTSLAVTAGGDSFPAASQSAALLAIGTLHQRYPDELQHSPYRYHPRRGGARDYATFRDASSEDDATIVHLARMVEAYDAARIDFHQMVRRGMVENNLKILELRQENLQLKKDLDAVEAQLHQLKIAQGEVCRPKRRRVCRSQKITARKSTSRPELVRQSLAWTCFVETPRAEPAPVVPQEGEASGVGSTEDALLLTFRPGPSQRRSANTGDGNQPEGSNHHHQGSPPPPPPPPPPPPPDTNAILTQILAQQANMMTAFLHHLQNPPQHNAPPPPPQHSKLAEFLRIRPPTFSSSNNPVDALDWLHAVGKKLDTVQCSDEEKVIFAAHQLQGPASLWWDHFQATQPEGQPITWARFTAAFRRTHVPAGVVALKKREFRELKQGNRSVMEYLHEFNNLARYAPEDVREDEEKQEKFLAGMDPELSVRLVSGDYPDFQRLVDKSIRLEAKHKELESHKRRLANFRNQQGANQRIRYTNPYPGGSSSQQQQQQQQPRFAPRPQFVVRVPQPQQQQNQQGTRAPRPPTPTVQPGQGRRDAQGPQRLCFNCFEPGHFADKCPKLRRQQGQAPSRSNNGEKDVIWGRVNHVTAEDVLTTPDVIXREFGDVFPEELPGMPPKREIEFRIDLAQETTPLYKRPYRMAANELAEVKKQLEELKEKGYIRPSTSPWGAPVIFVEKKDKTKRMCIDYRALNEVTIKTKYPLPRIDDLFDQLKGATVFSKIDLRSGYHQLRIREEDIPKTAFTTRYGLYEFT

SEQ ID NO: 25886 - protein, 540 aa, Oryza sativa
  unsure (1)..(540): unsure at all Xaa locations
  Clone ID: TF_OsC359_5526.pep
MKILELRQENLQLKKDLDAVEAQLHQLKIAQGEVCRPKRRRVCRSQKITARKSTSRPELVRQSLAWTCFVETPRAEPAPVVPQEGEASGVGSNHNHQGNPPPPSXPPPPPPPDTNAILTQILAQQANMMTTFLHHLQNPPQQNAPPPPPQHSKLAEFLRIRPPTFSSSNNPVDALDWLHAVGKKLDTVQCSDEEKVIFAAHQLQGPASLWWDHFQATQPEGQPITWARFTAAFRRTHVLAGVVALKKREFRELKQGNRSVMEYLHEFNNLARYAPEDVREDEEKQEKFLAGMDPELSVRLVSGDYPDFQRLVDKSIRLEAKHKELESHKRRLANFRNQQGANQRVRYTNPYPGGSSSQQQQQQQQPRSAPRPQFVVRVPQPQQQQNQQGTRAPRPPTPAVQPGQGHRDAQGQQRLCFNCFEPGHFADKCPKPRRQQGQAPPRSNNGGKDVIRGRVNHVTAEDVLTTPDVIVEKKDKTKRMCVDYRALNEVTIKNNVSRQSTNDRPDSSNHSKYPNGNGMKLGWISSPDFQRPKVDMILYG

SEQ ID NO: 25887 - protein, 710 aa, Oryza sativa; identical to SEQ ID NO: 19196
  Clone ID: TF_OsC359_5535.pep

SEQ ID NO: 25888 - protein, 1319 aa, Oryza sativa; identical to SEQ ID NO: 19056
  Clone ID: TF_OsC359_5541.pep

SEQ ID NO: 25889 - protein, 833 aa, Oryza sativa
  unsure (1)..(833): unsure at all Xaa locations
  Clone ID: TF_OsC359_5556.pep
MSSGANEGYTSCGPVVEMSWHRAGVLLLGAQSCLPVPEVPAVGGIGSMYTSDQSIIYSNSRALGYGQAEQCTQMAGSVTRRGLDMTGFVLELRGMCVVLGYPHGVDYQARPLPEQEGDDAEPHAGWEVTAVILAGSPERTSLAVTAGGDSFPAACXNAAFLAIGTLHQRYPDELQHSPYRYHPRRGGARDYATFRDASSEDDATIMHLARMVEAYDAARIDFHQMVRRGMVENNMKILELRQENLQLKKDLDAVEAQLHQLKIAQGEVCRPKRRRVCRSQKITARKSTSRPELVRQSLAWTCFVETPRAEPAPVVPQEGEASGVGSTEDALLLTFRPGPSQRRSAATGDGNQPEGSNHHQGSPPPPPPPPPPPPPDTNAILTQILAQQANMMTAFLHHLQNPPQHNAPPPPPQHSKLAEFLRIRPPTFSSSNNPVDALDWLHAVGKKLDTVQCSDEEKVIFAAHQLQGPASLWWDHFQATQPEGQPITWARFTAAFRRTHVPAGVVALKKREFRELKQGNRSVMEYLHEFNNLARYAPEDVREDEEKQEKFLAGMDPELSVRLVSGDYLDFQRLVDKSIRLEAKHKELESHKRRLANFRNQQGANQRVRYTNPYPGGSSSQQQQQQQQPRSAPRPQFVVRVPQPQQQQNQQGTRAPRPPTPTVQPGQGRRDAQGPQRLCFNCFEPGHFADKCPKPRRQQGQAPPRSNNGGKDVIRGRVNHVTAEDVLTTPDVIVGTFLIHSIPATILFDSGASHSFMSVPFVGRNQLGVERLRNPLLITTPGGVMTANVSRQSTNDRPDFSNLSKYQNGNGMKLGWISSPDFQKPKVDMILYG

SEQ ID NO: 25890 - protein, 1779 aa, Oryza sativa
  unsure (1)..(1779): unsure at all Xaa locations
  Clone ID: TF_OsC359_5558.pep
MSSGANEGYTSCGPVVEMSWHRAGVLLLGAQSCLPVPGVPAVGGVGSMYTSDQSIIYSNSRALGYGQAEQCTQMAGSVSRRGLDLTSFVLELRGMCVALGYPHGVDYQGRPLPEQEGDDAEPHAAWEVTAVILTGSPERTSLAVTAGGDSFSAACQNAALLAIGTLHQRYLDELQHSPYRYHPRRGGARDYATFRDASSEDDATIMHLARMVXAYDAARIDFHQMVRPGMVENNMKILELRQENLQLKKDLDVVEAQLHQLKIAQGEVCRPKRCRVCRSQKITARKSTSRPELVRQSLAWTCFVETPRAEPAPVVPQEGEASGVGSTEDALLLTFHXTTRRSAATGDGNQPEGSNHNNHGSPPPPPPPPPPDTNAILTQILAQQANMMAVFLHHIQNPPHHNAPPPPPQHSKLAEFLRIRPPTFSSSNNPVDALDWLHAVGKNLDTVQCSDEEKVVFAAHQLQGPASLWWDHFQATQPEGQPITWARFTAAFRRTHVPAGVMALKKREFRELKQGNRSVMEYLHEFNNLARYAPEDVREDEEKQEKFLAGMDPELSVRLVSGDYPDFQRLVDKSIRLEAKHKELESHKRRLANFRNQQGANQRIRYTNPYPGGSSSQQQQQXQQPRSAPRPQFVVRVPQPQQQQSQQGTHAPRPPTPAAQSGQGRRDVQGPQRLCFNCFEPGHFADKCPKSRRQQGQAPPRSNNGGKDVIRGRVNHVTAEDVLTTPDVIVGTFLIHSIPATILFDSGASHSFISVPFVGRNQLGVERLRNPLLITTPGGVMTAKYYSPAVPIEIQGIPFPSDLILLDTKNLDVILGMNWLAQFQGVVDCARRTVTLYRGPEQPVVFFAPPTSVSSSELHQIGLSEIPIVREFGDVFPEELPGMPPKREIEFRIDLATGTTPLYKRPYRMAANELAEVKKQLEELKEKGYIRPSTSPWGAPVIFVEKKDKTKRMCVDYRALNEVTIKNKYPLPRIDDLFDQLKGATVFSKIDLRSGYHQLRIREEDIPKTAFTTRYGLYEFTVMSFGLTNAPAFFMNLMNKVFMEYLDKFVVVFIDDILVYSQSEEDHQHHLRLVLGKLREHQLYAKLSKCEFWLSEVKFLGHVISAKGVAVDPETVTAVTDWKQPKTVTQIRSFLGLAGYYRRFIENFSKIARPMTQLLKKEEKFVWSPQCEKAFQTLKEKLVSSPVLIMPDTRKDFTVYCDASRQGLGCVLMQDGHVVAYASRQLRPHEGNYPTHDLELAAVVHALKIWRHYLIGNRCEIYTDHKSLKYIFTQSDLNLRQRRWLELIKDYDVGIHYHPGKANMVADALSRKSHCNTLNVRGIPPELNQQMEALNLSIVGRGFLAALEAKPTLLDQIREAQKNDPDMRGLLKNMKQGKAAGFTEDEHGTLWNGNRRVKAEHQRPAGLLQPLQVPEWKWDEIGMDFITGLSKTQGGYDSIWVVVDRLTKVARFIPVKTTYGGNKLAELYFARIVSLHGVPKKIVSDRGSQFTSHFWKKLQEELGTRLNFSTTYHPQTDGQTERLNQILEDMLRACVLDFGKTWDKSLPYAEFSYNNSYQASIQMAPYEALYGCKCRTLLLWDQVGESQVFGTDILREAKAKVRTIRDNLKVAQSRQKSYADNRRRDLEFAVDDFVYLRVTPLRGVHRFQTKGKLAPRFVGPFRIIARCGEVAYQLELPASLGNVHDVFHVSQLKKCLRVPSEQADSEQIEVREDLAYVERPVKILDTMERRTRNRVIRFCKVQWSNHAEEEATWEREDELKAAHPDLFASSSESRGRDSV

SEQ ID NO: 25891 - protein, 1050 aa, Oryza sativa
  unsure (1)..(1050): unsure at all Xaa locations
  Clone ID: TF_OsC359_5560.pep
MEPRSPRPIPPSPAALSPSRRYIFAPRAFLLRFRRSPLALAVGFVLATSTSLSAVAADLRYAADVAPGSLPTRRHLHPLRRVVVHPVRPFASPADRRSSVALVIPNRAAVFLRFGRRCRRRRRPGVSRRPSLRFPLLSSLSGAAPPRRWSPAVTIGARVRRLPSAVPARPPSGAPRGCQVGPGRQPPAPAGAADAWDPRRRPPPAACSRSTVDPPRPFKDRSSGLCCKALPYFHMSSGANEGYTSCGPVVEMSWQRVGALLLGAQSCLPVPGVPAVGGIGSMYTSNQSIIYSNSRALGYGQAEQCTQMAGSVTRRGLDMTGFVLELRGMCVVLGYPHGVDYQARPLPEQEGEDAEPHAGWEVTAVILSGSPGRTSLAVTAGGDSFPAACQNAALLAIGTLHQRYPDELQHSPYRYHPRRGGARDFATFRDASSEDDATIVHLARMVEAYDAARIDFHQMVRRGMVENNMKILELRQENLQLKKDLDAVEAQLHQLKIAQGEDCRPKRRRVCRSQKITARKSTSRPELVRQSLAWTCFVETPRVEPVPVVPQEGEASGVGSTEDAPLLTFXVTTRRNVNTGDGNQPEGSNHNHQGNPPPPPPPPPPPPPDTNAILTQILAQQANMMTAFLHHLQNPSQQNAPPPPPQHSKLAEFLRIRPPTFSSSNNPVDALDWLHAVGKKLDTVQCSDEEKVIFAAHQLQGPASLWWDHFQATQPEGQPITWARFTAAFRRTHVPAGVVALKKREFRELKQGNRSVMEYLHEFNNLARYAPEDVREDEEKQEKFLAGMDPELSVRLVSGDYPDFQRLVDKSIRLEAKHKELESHKRRLASFRNQQGANQRVRYTNPYPGGSSSQQQQQQQQPRSAPRPQFVVRVPQPQQQQNQQGTRAPRPPTPAVQPVQGRRDAQGPQRLCFNCFEPGHFADKCPKPRRQQGQAPPRPNNGGKDVIRGRVNHVTAEDVLTTPNVIVGTFLIHSIPATILFDSGASHSFISVPFVGKNQLGVERLRXNPLLITTPGGVMTAKYYSPAVPIEIQGIPFPSDLILLNTNNLD

SEQ ID NO: 25892 - protein, 1763 aa, Oryza sativa
  unsure (1)..(1763): unsure at all Xaa locations
  Clone ID: TF_OsC359_5596.pep
MSSGANEGYTSCGPVVEMSWHRAGVLLLGAQSCLPVPGVPAVGGIGSMYTSDQSIIYSNSRALGYGQAEQCTQMAGSVTRRGLDMTGFVLELRGMCVVLGYPHGVDYQARPLPKQEGDDAEPHAAWEVTAVILAGSPERTSLAVTAGGDSFPAACQNAALLAIGTLHQRYPDELQHSPYRYHPHRGGARDYATFRDASSEDDATIVHLARMVEAYDAARIDFHQMVRRGMVENNLKILELRQENLQLKKDLDAVEAQLHQLKIAQGEVCRPKRRRVCRSQKITARKSTSRPELVRQSLAWTCFVETPRAEPAPVVPQEGEASGVGSTEDALLLTFHXTTRRSANAGDGNQPEGSNRNHHGSPPPPPPPPPPPPPDTNAILTQILAQQANMMTAFLHHLQNPPQQNAPPPPPQHSKLAEFLRIRPPTFSSSNNPVDALDWLHAVGKKLDTVQCSDEEKVIFAAHQLQGPASLWWDHFQATQPEGQPITWARFTAAFRRTHVPAGVVALKKREFXELKQGNRSVMEYLHEFNNLARYAPEDVREDEEKQEKFLAGMDPELSVRLVSGDYPDFQRLVDKSIRLEAKHKELESHKRRLANFRNQQGANQRVRYTNPYPGGSSSQQQQQQQQPRSVPRPQYVVRVPQPQQQQSQQGTRAPRPPTPAVQSGQGCRDAQGQQRLCFNCFEPGHFADKCPKPRRQQGQAPPRSNNGGKDVIQGRVNHVTAEDVLTTPDVIVGTFLIHSIPATILFDSGASHSFISVPFVGRNQLGVERLRNPLLITTPGGVMTAKYYSPAVPIEIQGIPFPSDLILLDTKNLDVILGMNWLAQFQGVVDCARRTVTLYRGPEQPVVFFAPPTSVSSSELHQIGLSEIPIVREFGDVFPEELPGMPPKREIEFRIDLAPGTTPLYKRPYRMAANELAEVKKQLEELKEKGYIRPSTSPWGAPVIFVEKKDKTKRRCVDYRALNEVTIKNKYPLPRIDDLFDQLKGATVFSKIDLRSGYHQLRIREEDIPKTAFTTRYGLYEFTVMSFGLTNAPAFFMNLMNKVFMEYLDKFVVVFIDDILIYSQSEEDHQHHLRLVLGKLREHQLYAKLSKCEFWLSEVKFLGHVISAKGVAVDPETVTAVTDWKQPKTVTQVRSFLGLAGYYRRFIENFSKIARPMTQLLKKEEKFVWSPQCEKAFQTLKEKLVSSPVLVLPDTRKDFMVYCDASRQGLGCVLMQDGHVVAYASRQLRPHEGNYPTHDLELAAVVHALKIWRHYLIGNRCEIYTDHKSLKYIFTQSDLNLRQRRWLELIKDYDVGIHYHPGKANVVADALSRKSHCNTLNVRGIPPELNQQMEALNLGIVSRGFLAALEAKPTLLDQIREAQKNDPDMHGLLKNMKQGKAAGFTEDEHGTLWNGNRRVKAEHQRPAGLLQPLQVPEWKWDEIGMDFITGLPKTQGGYDSIWVVVDRLTKVARFIPVKTTYGGNKLAELYFARIVSLHGVPKKIVSDRGSQFTSHFWKKLQEELGXNQILEDMLRACVLDFGKTWDKSLPYAEFSYNNSYQASIQMAPYEALYGRKCRTPLLWDQVGESQVFGTDILREAEAKVRTIRDNLKVAQSRQKSYADNRRRDLEFAVGDFVYLRVTPLRGVHRFQTKGKLAPRYVGPFRIIARRGEVAYQLELPASLGNVHDVFHVSQLKKCLRVPSEQADSAQIEVREDLTYVERPVKILDTMERRTRNRVIRFCKVQWSNHAEEEATWEREDELKAAHPDLFASSSESRGRDSV

SEQ ID NO: 25893 - protein, 1778 aa, Oryza sativa; identical to SEQ ID NO: 19229
  Clone ID: TF_OsC359_5714.pep

SEQ ID NO: 25894 - protein, 673 aa, Oryza sativa
  unsure (1)..(673): unsure at all Xaa locations
  Clone ID: TF_OsC359_5748.pep
QILAQQANMMAAFLHHIQNLPQNNAPPPPPPPQHSKLAEFLRIRPPTFSSSHNPIDALDWLHAVGKKLDTVQCNDEEKVIFAAHQLQGPASLWWDHFQATQPEGQPITWARFTAAFRRTHVPAGVMALKKREFRELKQGNRSVMEYLHEFNNLARYAPEDVREDEEKQEKFLAGMNPELSVRLVSGDYPDFQRLVDKSIRLEAKQKELESHKRRLANFRNQXGANQRIRYTNPYPRGSSSQQQQQQPRSAPLPQFVPGQGHRDAQGQQRLCFNCFEPGHFADKCPKPRRQQGQAPPRPNNGGKDVIRGRVNHVTAEDVLTTPDVIVGTFLIHSIPATILFDSRASHSFISVPFVGRNQLGVERLMNPLLITTPGGVMTTKYYSPAVPIEIQGIPFPSDLILLDTKNXDVILGMNWLAQFQGVVDCARRTVTLYRGPDQPVVFFAPPTSAGSSVLHXLGLPEIPIVNEFGDVFPEELPGMPPKREIEFRIDLAPGTTPLYKRPYRMAANKLAEVKKQLEELKEKGYIRPSTSPWGAPVIFVEKKDKTKRMCVDYRALNEVTIKNKYPLPRIDDLFDQLKGATVFSKIDLRSGYHQLRIREKDIPKTAFTTLYGLYEFTVMSFGLTNASAFFMNLMNKVFMEYLDKFVVVFIDDILVYSQSEEDHQHGCRVGPGR

SEQ ID NO: 25895 - protein, 1703 aa, Oryza sativa
  unsure (1)..(1703): unsure at all Xaa locations
  Clone ID: TF_OsC359_5749.pep
MDISRANEGYTSCGPVVEMSWHRAGVLLLGXSVLPTCPGDSGRRXGIGSVLLSMARMGWKLCHVFRLYTVVMAGSINRRGLDLTGFVLELRGMCVVLGYPHGVDYQGRQLPEQEGDDAEPHAAWEVTAVILTGSPERTSLAVTAGGDSFSAACQNAALLAIGTLHQRYPDELQHSPYRYHPRRGGARDHATFRDASSEDDATIMHLARMVEAYDAARIDFHQMVRRGMVENSMKILELRQENLQLKKDLDAVEAQLHQLKIAQGEVCRPKRRRVCRSQKITARKSTSRPELVRQSLAWTCFVETPRAEPAPVVPQEGEASGVGSTEDALLLTFRPGPSQRRSANTGDGNQPEGSNHNNHGSPPPPPPPPPPPPLDTNAILTQILAQQANMMAAFLHHIQNPPQHNAPPPPPQHSKLAEFLRIRPPTFSSSNNPVDALDWLHAVGKKLDTVQCSDEEKVVFAAHQLQGPASLWWDHFQATQPEGQPITWARFTAAFRRTHVPAGVMALKKREFRELKQGNRSVMEYLHEFNNLARYAPEDVREDEEKQEKFLAGMDPELSVRLVSGGSSSQQQQQQQPRSAPRPQFVVRIPQPQQQQSQQGTRAPRPPTTAAQSGQGRRDVQGPQRLCFNCFEPGHFADKCPKPRRQQGQAPPRSNNGGKDVIRGRVNHVTAEDVLTTPDVIVGTFLIHSIPATILFDSGASHSFISVPFVGRNQLGVERLRNPPLITTPGGVMTAKYYSPAVPIEIQGIPFPSDLILLDTKNLDVILGMNWLAQFQGVVDCARRTVTLYRGPEQPVVFFAPPTSVSSLELHQIGLSEIPIVKEFGDVFPEELPGMPPKREIEFRIDLAPGTTPLYKRPYRMAANELAEVKKQLEELKEKGYIRPSTSPWGAPVIFVEKKDKTKRMCVDYRALNEVTIKNKYPLPRIDDLFNQLKGATVFSKIDLRSGYHQLRIREEDIPKTAFTTRYGLYEFTVMSFGLTNAPAFFMNLMNKVFMEYLDKFVVVFIDDIMVYSQSEEDHQHHLRLVLGKLREHQLYAKLSKCEFWLSEVKFLGHVISAKGVAVDPETVTAVTDWKQPKTVTQIRSFLGLAGYYRRFIENFSKIARPMTQLLKKEEKFVWSPQCEKAFQTLKEKLEGHVVAYASRQLRPHEGNYPTHDLELAAVVHALKIWRHYLIGNRCEIYTDHKSLKYIFTQSDLNLRQRRWLELIKDYDVGIHYHPGKANVVADALSRKSHCNTLVVRGIPPELNQQMEALNLSIVSRGFLATLEAKPSLLDQIREAQKNDPDMRGLLKNMKQGKAAGFTEDEHGTLWNGNRVCVPDVRELKQLILQEAHESPYSIHPGSTKMYLDLKEKYWWVSMKREIAEFVALCDVCQRVKAEHQRPAGLLQPLQVPEWKWDEIGMDFITGLPKTQGGYDSIWVVVDRLTKVARFIPVKTTYGGNKLAELYFARIVSLHGVPKKIVSDRGSQFTSHFWKKLQEELGTRLNFSTAYHPQTDGQTERLNQILEDMLRACVLDFGKTWDKSLTYAEFSYNNSYQASIQMAPYEALYGRKCRTPLLWDQVGESQVFGTDILREAEAKVRTIRDNLKVAQSRQKSYADNRRRDLEFAVDDFVYLRVTPLRGVHRFQTKGKLAPRFVGPFRIIARRGEVAYQLELPASLGNVHDVFHVSQLKKCLRVPSEQADSESNGATTPRKKLPGSVKTS

SEQ ID NO: 25896 - protein, 1664 aa, Oryza sativa
  unsure (1)..(1664): unsure at all Xaa locations
  Clone ID: TF_OsC359_5759.pep
MDISRANEGYTSCGPMAGSINRRGLDLTGFVLELRGMCVVLGYPHGVDYQGRQLPEQEGDDAEPHAAWEVTAVILTGSPERTSLAVTAGGDSFSAACQNAALLAIGTLHQRYPDELQHSPYRYHPRRGGARDHATFRDASSEDDATIMHLARMVEAYDAARIDFHQMVRRGMVENSMKILELRQENLQLKKDLDAVEAQLHQLKIAQGEMVTTRRSANTGDGNQPEGSNHNNHGSPPPPPPPPPPPPLDTNAILTQILAQQANMMAAFLHHIQNPPQHNAPPPPPQHSKLAEFLRIRPPTFSSSNNPVDALDWLHAVGKKLDTVQCSDEEKVVFAAHQLQGPASLWWDHFQATQPEGQPITWARFTAAFRRTHVPAGVMALKKREFRELKQGNRSVMEYLHEFNNLARYAPEDVREDEEKQEKFLAGMDPELSVRLVSGDYPDFQRLVDKSIRLEAKHKELESHKRRLANFRNQQGANQRIRYTNPYPGGSSSQQQQQQQPRSAPRPQFVVRVPQPQQQQSQQGTRAPRPPTPAAQSGQGRRDVQGPQRLCFNCFEPGHFADKCPKPRRQQGQAPPRSNNGGKDVIRGRVNHVTAEDVLTTPDVIVGTFLIHSIPATILFDSGASHSFISVPFVGRNQLGVERFRNPLLITTPGGVMTAKYYSPAVPIEIQGIPFPSDLILLDTKNLDVILGMNWLAQFQGVVDCARRTVTLYRGPEQPVVFFAPPTSVSSSELHQIGLSEIPIVREFGDVFPEELPDMPPKREIEFRIDLAPGTTPLYKRPYRMAANELAEVKKQLEELKEKGYIRPSTFPWGAPMIFVEKKDKTKRMCVDYRALNKVTIKNKYPLPRIDDLFDQLKGATVFSKIDLRSGYHQLRIREEDIPKTAFTTRYGLHGHIILVYSQSEEDHQHHLRLVLGKLREHQLYAKLSKCEFWLSEVKFLGHVISAKGVAVDPETVTXPDWKQPKTVTQIRSFLGLAGYYRXLLKKKYKFVWSPQCEKAFKTLKEKLVSSPVLILPDTRKDFMVYCDASRQGLGCVLMQEGHVVAYASRQLRPHEGNYPTHDLELAAVVHALKIWRHYLIGNRCEIYTDHKSLKYIFTQSDLNLRQRRWLELIKDYDVGIHYHPGKANVVVDALSQKSHCNTLNVRGIPPELNQQMEALNLSIVGRGFLAALEAKPTLLDQIREAQKNDPDMRGLLKNMKQGKAAGFTEDEYGTLWNGNRVCVPDNRELKQLILQEAHESPYSIHPGSTKMYLDLKEKYWWVSMKREIAEFVALCDVCQRVKAEHQRPAGLLQPLQVPEWKWDEIGMDFITGLPKTQGGYDSIWVVVDRLTKVARFIPVKTTYGGNKLAELYFARIVSLHGVPKKIVSDRGSQFTSHFWKKLQEELGTRLNFSTAYHPQTDGQTERLNQILEDMLRACVLDFGKTWDKSLPYAEFSYNNSYQASIQMAPYEALYGRKCRTSLLWDQVGESQVFGTDILREAEAKVRTIRDNLKVAQSWQKSYADNRRRNLEFAVDDFVYLRVTPLRGVHRFQTKGKLAPRYVGPFRIVARRGEVAYQLELPASLGNVHDVFHVSQLKKCLRVPSEQADSEQIEVREDLTYVERPVKILDTMERRTRNRVIRFCKVQWSNHAEEEATWEREDELKAAHPDLFASSSESRGRDSV

SEQ ID NO: 25897 - protein, 2355 aa, Oryza sativa
  Clone ID: TF_OsC359_5812.pep
MDEVGGRWTFSRANEGYTSCGPMAGSVTRRGLDMTGFVLELRGMCVVLEYPHGVDYQARPLPEQEGEDAEPHAGWEVTAVILSGSPERTSLAVTAGGDSFPAACQNAALLAIGTLHQRYPDELQHSSYRYHPRRGGARDFATFRDASSEDDATVVHLARMVEAYDAARIDFHQMVRRGMVENNMKILELRQENLQLKKDLDALEAQLHQLKIAQGEISRPKRRRVCRSQKITARKSTSRPELVRQSLAWTCFVETPRAEPAPVVPQEGEASGVGSSEGALLLTFRPGPSQRRNVNTGEGNQPEGSNPNPQGNPPPPPPPDTNAILTQILAQQANMMNAFLHHLQNPPQQNAPPPPPQHSKLAEFLRIRPPTFSSSNNPVDALDWLHAVGKKLDTVQCSDEEKVIFAAHQLQGPASIWWDHFQATQPAGQPITWARFTSAFRRTHYLHEFNNLARYAPEDVREDEEKQEKFLAGMDPELSVRLVSGDYPDFQRLVDKSIRLEAKHKELESHKRRLANFRNQQGANQRVRYTNPYPGGSSSQQQQQQQQPRSAPRPQFVVRVPQPQQQQNQQGTRAPRPPTPAVQPVQGRRDAQGQQRLCFNCFEPGHFADKCPKPRRQQGQAPPRSNNGGKDVIRGRVNHVTAEDVLTTPDVIVGTFLVQSIPATILFDSGASHSFISVPFVGRNQLGVERLRNPLLITTPGGVMTAKYYSPAVPIEIQGIPFPSDLILLDTKNLDVILGMNWLAQFQGVVDCARRTVTLYRGPEQPVVFFAPPTSVRSSELHQIELSEIPIVREFGDVFPEELPGMPPKREIEFRIDLAPGTTPLYKRPYRMAANELAEVKKQLEELKEKGYIRPSTSPWGAPVIFVEKKDKTKRMCVDYRALNEVTIKNKYPLPRIDDLFDQLKGATVFSKIDLRSGYHQLRIREEDIPKTAFTTRYGLYEFTVMSFGLTNAPAFFMNLMNKVFMEYLDKFVVVFIDDILIYSQSEEDHQHHLRLVLGKLREHQLYAKLSKCEFWLSEVKFLGHVISAKGVAVDPETVTAVTDWKQPKTVTQIRSFLGLAGYYRRFIENFSKIARPMTQLLKKEEKFVWSPQCEKAFQTLKEKLVSSPVLILPDTRKDFMVYCDASRQGLGCVLMQDGHVVAYASRQLRPHEGNYPTHDLELAAVVHALKIWRHYLIGNRCEIYTDHKSLKYIFTQSDLNLRQRRWLELIKDYDVGIHYHPGKANVVADALSRKSHCNTLNVRGIPPELSQQMEALNLSIVGRGFLAALEAKPTLLDQIREAQKNDPDMHGLLKNMKQGKAAGFTEDEHGTLWNGKRVCVPDSRELKQLILQEAHESPYSIHPGSTKMYLDLKEKYWWVSMKREIAEFVALCDVCQRVKAEHQRPAGLLQPLQVPEWKWDEIGMDFITGLPKTQGGYDSIWVIVDRLTKVARFIPVKTTYGGNKLAELYFARIVSLHGVPKKIVSDRGSQFTSHFWKKLQEELGTRLNFSTAYHPQTDGQTERLNQILEDMLRACVLDFGKTWDKSLPYAEFSYNNSYQASIQMAPYEALYGRKCRTPLLWDQVGESQVFGTDILREAEAKVRIIRDNLKVAQSRQKSYADNRRRDLEFAVDDFVYLRVTPLRGVHRFQTKGKLAPRYVGPFRIIARRGEVAYQLELPASLGNVHDVFHVSQLKKCLRVPSEQADSEQIEVREDLTYVEKPVKILDTMERRTRNRVIRFCKVQWSNHAEEEATWEREDELKAAHPDLVEVEAVDWENEQGKTHHLDHIESQTSWDPGSGCQFGLNHHRPWVKAAARAEEAAKEEAARARQAEATAAAGASTGPTPSGNPQATASGEARDVAAGTSPGPTSPGDAQDQTGPGDIPEPSTSSGGPSRIAFSPRRLFSSSSVAPLSAEPILQALAAANTAVLDGFSAQVEALRAERAELEAAWARVEEGRRSVDAMVEVGRKAHRRHISELEARKAALAEIAREVEEEREAALIATTAMIEAQDTLRLQHASWEAELKKKLDAAQGVLDSAAARERRVTETEAASRRREEALEARAMALEEHAGAVERGLTDREAAAVLREATLAAHEAACAEEECALRLREDALAERERALEEAEATTKRLADSLSLREAAQEEQARRNLECVRAERAALEQRAADLEAREKELDARARVGGAAAGESDLAARLAAAEHTVADMQRALDSSIGEAEALRLAGEMGPDMLWDSVSRMDRAGRQAGLWKGQTRMRPANLEGLAPHLNRMAWVLEQLPEELEKTIKSSSRDLARGAVELVLASYQARDPNFSPWMALEEFPPGTEDDARARVRDAADHIVNGFEGSAPRLAFAPSSDEEGDASGEDDGGDEAGDPGASE

SEQ ID NO: 25898 - protein, 1295 aa, Oryza sativa
  Clone ID: TF_OsC359_6001.pep
MVTPMVTTRRNVNTGEGNQPEGSNPNPQGNPPPPPPPDTNAILTQILAQQANMMNAFLHHLQNPPQQNAPPPPPQHSKLAEFLRIRPPTFSSSNNPVDALDWLHAVGKKLDTVQCSDEEKVVFAAHQLQGPASLWWDHFQATQPEGQPITWTRFTAAFRKTHVPAGVVALKKREFRELKQGSRSVMEYLHEFNNLARYAPEDVREDEEKQEKFLAGMDPELSVRLVSGDYPDFQRLVDKSIRLEAKHKELESHKRRLANFRNQQGANQRVRYTNPYPGGSSSQQQQQQQQQPRSAPRPQFVVRIPQPQQQQNQQGTRAPRPPTPTVQPVQGRRDAQGPQRLCFNCFEPGHFADKCPKPRRQQGQVPPRSNNGGKDVIRGRVNHVTAEDVLTTPDVIVELHQIGLSEIPIVREFGDVFPEELPGMPPKREIEFRIYLAPGTTPLYKRPYRMAANELAEVKKQLEELKEKGYIRPSTSPWGAPVIFVEKKDKTKRMCVDYRALNEVTIKNKYPLPRIDDLFDQLKGATVFSKIDLRSGYHQLRIREEDIPKTTFTTRYGLYEFTVMSFGLTNAPAFFMNLMNKVFMEYLDKFVMVFIDDILVYSQSEEDHQHHLRLVLGKLHEHQLYAKLSKCEFWLSEVKFLGHVISAKGVAVDPETVTAVTDWKQPKTVTQIRSFLGLAGYYRRFIENFSKIARPMTQLLKKEEKFVWSPQCEKAFQTLKEKLVSSPVLILPDTRKDFMVYCDASRQGLGCVLMQDGHVVAYASRQLRPHEGNYPTHDLELAAVVHALKIWRHYLIGNRCEIYTDHKSLKYIFTQSDLNLQQRRWLELIKDYDVGIHYHPGKANVVADALSRKSHCNTLNVRGIPPELNQQMEALNLSIVGRGFLAALEAKPTLLDQIREAQKNDPDMHGLLKNMKQGKAAGFTEDEHGTLWNGNREKYWWVSMKREIAEFVALCVVCQRVKAEHQRPAGLLQPLQVPEWKWDEIGMDFITGLPKTQGGYDSIWVVVDRLTKVARFIPVKTTYGGNKLAELYFARIVNLHGVPKKIVSDRGSQFTSHFWKKLQEELGTRLNFSTAYHPQTDGQTERLNQILEDMLRACVLDFGKTWDKSLPYAEFSYNNSYQASIQMAPYEALYGRKCRTPLLWDQVGESQVFGTDILREAEAKTKGKLAPRFVGPFRIIARRGEVAYQLELPASLGNVHDVFHVSQLKKCLRVPSEQADSEQIEVREDLTYVERPVKILDTMERRTRNWVIRFCKVQWSNHAEEEATWEREDELKAAHPDLFASSSESRGRDSV

SEQ ID NO: 25899 - protein, 1769 aa, Oryza sativa
  unsure (1)..(1769): unsure at all Xaa locations
  Clone ID: TF_OsC359_6007.pep
MSWHRAGVLLLGAQSCLPVPGVPAVDGIGSMYTSDQSKIYSNSRALGYGQAEQCTQMAGSVSRRGLDMTGFVLELRGMCVVLGYPHGVDYQARPFPEQEGDDAEPHAAWEVTAVILAGSPERTSLTVTAGGDSFPAACQSAALLAIGTLHQRYPDELQHSPYRYHPRRGGARDYATFRDASSEDDATIVHLARMVEAYDAARIDFHQMVRRGMVENNMKILELRQENLQLKKDLDAVEAQLHQLKIAQGEVCRPKRRRVCRSQKITARKSTSRPELVRQSLAWTCFVETPRAEPAPVVPQEGEASGVGSTEDALLLTFRPGPSQQXDEQLVGLRVCSTRRNAGTSDGNQPEGSNHNNHGSPPSPXXXPSPPPPDTNAILTQILAQQANMMTAFLHHLQNPPQHNAPPPPPQHSKLAEFLRICPPTFSSSNNPVDALDWLHAVGKKLDTVQCSDEEKVIFAAHQLQGPASLWWDHFQATQPEGQPITWARFTPAFRRTHVPAGVVALKKREFRELKQGNRSVMEYLHEFNNLARYAPEDVREDEEKQEKFLAGMDPELSVCLVSGDYPDFQRLVDKSIRLEAKHKELESHKRRLANFHNQQGANQRVRYTNPYPGGSSSQQQQQQQQPRSAPRPQFVVRVPQPQQEQNQQGTRAPRPPPPTVQPGQGRRDAQGPQRLCFNCFEPGHFADKCPKPRRQQGQAPPRPNNGGKDVIRGRVNHVTAEDVLTTPDVIVGTFLIHSIPATILFDSGASHSFISVPFVGRNQLGVERLRNPLLITTPGGVMTAKYYSPAVPIEIQGIPFPSDLILLGTKNLDVILGMNWLAQFQGVVDCARRTVTLYRGPGQPVVFFAPPTSVSSSELHQIGLSEIPIVREFGDVFPEELPGMPPKREIEFQIDLAPGTTPLCKRPYRMAANELAEVKKQLEELKEKGYIRPSTSPWGAPVIFVEKKDKTKRMCVDYRALNEVTIKNKYPLPRIDDLFDQLKGATVFSKIDLRSGYHQLRIRDEDIPKTAFTTRYGLYEFTVMSFGLTNAPAFFMNLMNKVFMEYLDKFVVVFIDDILIYSQSEEDHQHHLRLVLGKLREHQLYAKLSKCEFWLSEVKFLGHVISAKGVAVDPETVIAVTDWKQPKTVTQVRSFLGLAGYYRRFIENFSKIARPMTQLLKKEEKFVWSPQCEKAFRTLKEKLVASPVLILPDTRKDFIVYCDASRQGLGCVLMQDGHVVAYASRQLRPHEGNYPTHDLELAAVVHALKIWRHYLIGNRCEIYTDHKSLKYIFTQSDLNLRQRRWLELIKDYDVGIHYHPGKANVVADALSRKSHCNTLNVRGIPPELNQQMEALNLSIVSRGFLAALEAKPTLLDQIREAQKNDPDMHGLLKNMKQGKAAGFTEDEHGTLWNGNRVCVPDIRELKQLILQEAHESPYSIHPGSTKMYLDLKEKYWWVSMKREIAEFVALCDVCQRVKAEHQRPAGLLQPLQVPEWKWDEIGMDFITGLPKTQGGYDSIWVVVDRLTKVARFIPVKTTYGGNKLAELYFARIVSLHGVPKKIVSDRGSQFTSHFWKKLQEELGTRLNFSTAYHPQTDGQTERLNQILEDMLRACVLDFGKTWDKSLPYAEFSYNNSYQASIQMAPYEALYGRKCRTPLLWDQVGESQVFGTDILRQAEAKVRTIRDNLKMAQSRQKSYADNRRRDLEFAADDFVYVRVTPLRGVHRFRTKGKLAPRYVGPFRITARRGEVVTTGNNPTGIPYVRALILVPGGKAQHTQRLTRDSGRLG

SEQ ID NO: 25900 - protein, 1804 aa, Oryza sativa; identical to SEQ ID NO: 19116
  Clone ID: TF_OsC359_6023.pep

SEQ ID NO: 25901 - protein, 1805 aa, Oryza sativa; identical to SEQ ID NO: 19140
  Clone ID: TF_OsC359_6034.pep

SEQ ID NO: 25902 - protein, 1828 aa, Oryza sativa
  Clone ID: TF_OsC359_6104.pep
MSWHRAGVLLLGAQSCLPVPVVPAVGGVGSVLLSKARMGWKLCHVFRLYTVVMAGSVTRRGLHMTGFVLELRGMCVVLGYPHGVDYQARPLPEQEGEDAEPHAGWEVTAVILSGSPERTSLAVTAGGDSFPAACQNAALLAIGTLHQRYPDELQHSPYRYHPRRGGARDYATFRDASSEDDATVVHLARMVEAYDAARIDFHQMVRRGMVENNMKILELRQENLQLKKDLDALEAQLHQLKIAQGEDSRPKRRRVCRSQKITARKSTSRPELVRQSLAWTCFVETPRAEPAPVVPQEGEASGVGSSEVLIVSSPSLFAGSVRGFQMVTTRRNVNTGEGNQPEGSNPNHQGNPPPPPPPPPPPDTNAILTQILAQQANLMNAFLHHLQNPPQHNAPPPPPQHSKLAEFLRIRPPTFSSSNNPVDALDWLHAVGKKLDTVQCSDEEKVIFAAHQLQGPASLWWDHFQATQPEGQPITWTRFTAAFRRTHVPAGVVALKKREFRELKQGNRSVMEYLHEFHNLARYAPEDVREDEEKQEKFLAGMDPELSVRLVSWDYPDFQRLVDKSIRLEAKHKELESHKRRLANFRNQQGANQRVRYTNPYPGGSSSQQQQQQQPRSAPRPQFVVRVPQQQQQQNQQGTRAPRPPTPTVQPVQGRRDAQGQQRLCFNCFEPGHFADKCPKPRRQQGQAPPRSNNGGKDVLRGRVNHVTAEDVLTTPDVIVGTFLVHSIPATILFDSGASHSFISVPFVGKSQLGVERLRNPLLITTPGGVMTAKYYSPAVPIEIQGIPFPSDLILLDTKNLDVILGMNWLAQFQGVVDCARRTVTLYRGPEQPVVFFAPPTSVRSSELHQIGLSEIPIVREFGDVFPEELPGMPPKREIEFRIDLAPGTTPLHKRPYRMAANELAEVKTQLEELKEEGYIRPSTSPWGAPVIFVEKKDKTKRMCVDYRALNEVTIKNKYPLPRIDDLFDQLKGATVFSKIDLRSGYHQLRIREEDIPKTAFTTRYGLYEFTVMSFGLTNAPAFFMNLMNKVFMEYLDKFVVVFIDDILIYSQSEEDHQHHLRLVLGKLREHQLYAKLSKCEFWLSEVKFLGHVISAKGVAVDPETVTAVTDWKQPKTVTQIRSFLGLAGYYRRFIENFSKIARPMTQLLKKEEKFVWSPQCEKAFQTLKEKLVSSPVLILPDTRKDFMVYCDASRQGLGCVLMQDGHVVAYASRQLRPHEGNYPTHDLELAAVVHALKIWRHYLIGNRCEIYTDHKSLKYIFTQSDLNLRQRRWLELIKDYDVGIHYHPGKANVVADALSRKSHCNTLNVRGIPPELNQQMEALNLNIVGRGFLAALEAQPTLLDQIREAQKNDPDMHGLLKNMKQGKAAGFTEDEHGTLWNGKRVCVPDSRELKQLILQEAHESPYSIHPGSTKMYLDLKEKYWWVSMKREIAEFVALCDVCQRVKAEHQRPAGLLQPLQVPEWKWDEIGMDFITGLPKTQGGYDSIWVIVDRLTKVARFIPVKTTYGGNKLAELYFARIVSLHGVPKKIVSDRGSQFTSHFWKKLQEELGTRLNFSTAYHPQTDGQTERLNQILEDMLRACVLDFGKTWDKSLPYAEFSYNNSYQASIQRAPYEALYGRKCRTPLLWDQVGESQVFGTDILREAEAKVRIIRDNLKVAQSRQKSYADNRRRDLEFAVYDFVYLRVTPLRGVHRFQTKGKLAPRYVGPIRITARRGEVAYQLELPASLGNVHDVFHVSQLKKCLRVPSEQADSEQIEVREDLTYVEKPVKILDAMERRTRNRVIRFCKVQWSNHAEEEATWEREDELKAAHPDLFASSSESRGRDSV

SEQ ID NO: 25903 - protein, 1332 aa, Oryza sativa
  unsure (1)..(1332): unsure at all Xaa locations
  Clone ID: TF_OsC359_6110.pep
MKITARKSTSRPELVRQSLAWTCFVETPRAEPAPSMVTTRRSAATGEGSHPEGSNHNNHGSPPPPPPPPPPPPPPDTNSILTQILAQQANMMAAFLHHIQNPPQHNVPPPSPPPQHSKLAEFLRIRPPTFSSSNNPVDALDWLHAVGKKLDTVQCNDEEKVIFAAHQLQGPASLWWDNFQAMQPEGQPITWARFTAAFRRTHVPAGVMALKKREFRELKQGNRSVMEYLHEFNDLARYAPEDVREDEEKQEKFLAGMDPELSVRLVSGDYPDFQRLVDKSIRLEAKHKELESHKRRLANFRNQQGANQRIRYTNPYPGGSSSQQQQQQQPRSAPRPQFVVRVPQPQQQQSQQGTRAPRPHVPAVQPGQGRRDAQGQQRLCFNCFEPGHFADKCPKPRRQQGQAPPRPNNGGKDVIRGRVNHVTAEDVLTTPDVIVGTFLIHSIPATILFDSGASHSFISVPFMGRNQLGVERLRNPLLITTPGGVMTAKYYSPAVPIEIQGIPFPSDLILLDTKNLDVILGMNWLAQFQGVVDCARRTVTLYRGPDQPVVFFAPPTSVDNSELHQIGLSKIPIVREFGDVFLEELPGMTPKREIEFRIDLAPGTTPLYKRPYRMAANELAEVKRQLEELKEKGALNEVTIKNKYPLPRIDDLFDQLKGATVFSKIDLRSGYHQLRIREEDIPKTAFTTRYGLYEFTVMSFGLTNAPAFFMNLMNKVFMEYLDKFVVVFIDDILVYSQSEEDHQQHLCLVLGKLREHHLYAKLSKCEFWLSEVKFLGHVISAKGVAVDPETVTAVTDWKQPKTVTQVRSFLGLAGYYRRFIENFSKIARPMTQLLKKEEKFVWSPQCEKAFQTLKEKLEGHVVAYASRQLRPHEGNYPTHDLDLAAVVHALKIWRHYLIGNRCEIYTDHKSLKYIFTQSDLNLRQRRWLELIKDYDVGIHYHPGKANVVADSLSRKSRCNTLGVRGIPLELNQQMEALNLSIVGRGFLATLEAKPTLLDQIREAHKNDPDMHGLLKNMKQGKAAGFTEDEHGTLWNGNRXFVALCDVCQRVKGEHQRPAGLLQPLQVPEWKWDEIGMDFITGLPKTQGXWDKSLPYTEFSYNNSYQASIQMAPYEALYGCKCRTPLLWDQVGESQVFGTDILREAEDKVRTIRDNLKVAQSRQKSYADNRRRNLEFAVDDFVYLWVTPLRGVHRFQTKGKLAPRFVGPFRIIARRGEVAYQLELPASFGNMHDVFHVSQLKKCLRVPSEQADSEQIEVREDLTYVERTVKILDTMERRTRNWVIRFCKVQWSNHAEEEATWEREDELKAAHPDLFANAAASEDPLFVEVEADV

SEQ ID NO: 25904 - protein, 1405 aa, Oryza sativa
  unsure (1)..(1405): unsure at all Xaa locations
  Clone ID: TF_OsC359_6132.pep
MVMPLSLFAGSVWGFQMVTTRRNAATSDGNQLEGSNHNNHGSPPPPPPPPPPPPPDTNAILTQILTQQANMMAAFLHHIQNPPQHNAPPPPPQHSKLAEFLRIRPPTFSSSNNPVDVLDWLHAVGKKLDTVQCSDEEKVVFAAHQLQGPASLWWDHFQATQPEGQPITWARFTAAFRRTHVPAGVMALKKREFRELKQGNRSVMEYLHEFNNLARYAPEDVREDEEKQEKFLAGMDPELSVRLVSGDYPDFQRLVDKSIRLEAKHKELESHKRRLANFRNQQGANQRIRYTNPYPGGSSSQQQQPRSAPRPQFVVRVPQPQQQQSQQGTHAPRPPTPAAQSGQGRRDVQGPQRLCFNCFEPGHFADKCPKSRRQQGQAPPCSNNGGKDVIRGRVNHVTAEDVLTTPDVIVGTFLIHSIPATILFDSGASHSFISVPFVGRNQLGVERLRNPLLITTPGGVMTAKYYSPAVPIEIQGIPFPSDLILLDTKNLDVILGMNWLAQFQGVVDCARRTVTLYRGPEQPVVFFAPPTSVSSSELHQIGLSEIPIVREFGDVFPEELPGMPPKREIEFRIDLAPGTTPLYKRPYRMAANELAEVKKQLEELKEKGALNEVTIKNKYPLPRIDDLFDQLKGATVFSKIDLRSGYHQLRIREEDIPKTAFTTRYGLYEFTVMSFGLTNAPAFFMNLMNKVFMEYLDKFVVVFIDDILVYSQSEEDHQHHLRLVLGKLRKHQLYAKLSKYEFWLSEVKFLGHVISAKGVAVDPETVTAVTDWKQPKTVTQIRSFLGLAGYYRRFIENFSKIARPMTQLLKKEEKFVWSPQCEKAFKTLKEKLVSSLVLILPDTRKDFMRRWLELIKDYDVGIHYHPGKANVVADAQSRKSHCNTLNVRGIPPELNQQMEALNLSIVGRGFLAALEAKPTLLDQIREAQKNDPDMHGLLKNMKQGKAAGFTEDEHGTLWNGNRXFVALCDVCQRVKAEHQRPAGLLQPLQVPEWKWNEIGMDFITGLPKTQGGYDSIWXAYHPQTDGQTERLNQILEDMLRACVLDFGNTWDKSLPYAEFSYNNSYQASIQMAPYEALYGRKCRTPLLWDQVGESQVFGTDILREAEAKVRTIRDNLKVAQSRQKSYADNRRRDLEFAVDDFVYLRVTPLRGVHRFQTKGKLAPRFVGPFRIIARRGEVAYQLELPASLGNVHDVFHVSQLKKCLRVPSEQADSEQIEVREDLTYVERPVKILDTMERRTRNRSAAVVAPDLLPLRRRLLRFRRNLADLVHPSVSLADRRNAAVPVYPSRAAAFLRSGRRSRCRRRPGVSCGPPIRFPLPFPLSGAAPPRRWSPAATIVARVRRLPSAVPAWPPSGAPRGCHVGPGRQPPAPSDAAASEDPLFVKVEATFGKVSKASHIILEHIES

SEQ ID NO: 25905 - protein, 1805 aa, Oryza sativa
  unsure (1)..(1805): unsure at all Xaa locations
  Clone ID: TF_OsC359_6141.pep
MDEVGGRWTFSRANEGYTSCGPMAGSVTRRGLDMTGFVLELRGMCVVLGYPHGVDYQARPLPEQEGEDAEPHAGWEVTAVILSGSPEWTSLAVTAGGDSFPAACQNAALLAIGTLHQRYPDELQHSPYRYHPRRGGASDHATFRDASSEDDATVVHLARMVEAYDAARIDFHQMVRRGMVENNLKILELRQENLQLKKDLDALEAQLHQLKVAQGEICRPKRRRVCRSQKITARKSTSRPELVRQSLAWTCFVETPRAEPAPVVPQEGEASGVGSSEGALLLTFRPGPSQRSPSLFAGSVWGFQMVSTRRNVNTGEGNQPEGSNPNPQGNPPPPPPPPDTNAILTQILAQQANMMNAFLHHLQNLPQQNAPPPPPQHSKLAEFLRIRPPTFSSSNNPVDALDWLHAVGKKLDTVQCSDEEKVIFAAHQLQGPASLWWDHFQATQPEGQPITWARFTAAFRRTHVPAGVVALKKREFRELKQGNRSVMEYLHEFNNLARYAPEDVREDEEKQEKFLAGMDPELSVRLVSGDYPDFQRLVDKSIRLEAKHKELESHKRRLXANFRNQQGANQRVRYTNPYPGGSSSQQQQQQQPRSAPRPQFVVRVPQQQQQQNQQGTRAPRPPTPTVQPVQGRRDAQGQQRLCFNCFEPGHFADKCPKPRRQQGQAPPRSNNGGKDVIRGRVNHVTAEDVLTTPDVIVGTFLVHSIPATILFDSGASHSFISVPFVGKNQLGVERLRNPLLITTPGGVMTAKYYSPAVPIEIQGIPFPSDLILLDTKNLDVILGMNWLAQFQGVVDCARRTVTLYRGPEQPVVFFAPPTSVRSSELHQVGLSEIPIVREFGDVFPEELPGMPPKREIEFRIDLAPGTTPLYKRPYRMAANELAEVKKQLEELKEKGYIRPSTSPWGAPVIFVEKKDKTKRMCVDYRALNEVTIKNKYPLPRIDDLFDQLKGATVFSKIDLRSGYHQLRIREEDIPKTAFTTRYGLYEFTVMSFGLTNAPAFFMNLMNKVFMEYLDKFVVVFIDDILIYSQSEEDHQHHLRLVLGKLREHQLYAKLSKCEFWLSEVKFLGHVISAKGVAVDPETVTAVTDWKQPKTVTQIRSFLGLAGYYRRFIENFSKIARPMTQLLKKEEKFVWSPQCEKAFQTLKEKLVSSPVLILPDTRKDFMVYCDASRQGLGCVLMQDGHVVAYASRQLRPHEGNYPTHDLELAAVVHALKIWRHYLIGNRCEIYTDHKSLKYIFTQSDLNLRQRRWLELIKDYDVGIHYHPGKANVVADALSRKSHCNTLNVRGIPPELNQQMEALNLSIVGRGFLAALEAKPTLLDQIREAQKNDPDMHGLLKNMKQGKAAGFTEDEHGTLWNGKRVCVPDSRELKQLILREAHESPYSIHPGSTKMYLDLKEKYWWVSMKREIAEFVALCDVCQRVKAEHQRPAGLLQPLQVPEWKWDEIGMDFITGLPKTQGGYDSIWVIVDRLTKVARFIPVKTTYGGNKLAELYFARIVSLHGVPKKIVSDRGSQFTSHFWKKLQEELGTRLNFSTAYHPQTDGQTERLNQILEDMLRACVLDFGKTWDKSLPYAEFSYNNSYQASIQMAPYEALYGRKCRTPLLWDQVGESQVFGTDILREAEAKVRIIRENLKVAQSRQKSYADNRRRDLEFAVDDFVYLRVTPLRGVHRFQTKGKLAPRYVGPFRITARRGEVAYQLELPASLGNVHDVFHVSQLKKCLRVPSEQADSEQIEVREDLTYVERPVKILDTMERRTRNRVIRFCKVQWSNHAEEEATWEREDELKAAHPGLFASSSESRGRDSV

SEQ ID NO: 25906 - protein, 1774 aa, Oryza sativa
  unsure (1)..(1774): unsure at all Xaa locations
  Clone ID: TF_OsC359_6142.pep
MAGSISRRGLDLTGFVLELRGMCVVLGYPHGVDYQGRLLLEQEGDDAEPHAAWEVTAVILTGSPERTSLAVTAGGDSFSAACQNAALLAIGTLHQRYPDELQHSPYRYHPRRGGARDYATFRDASSEDDATIMHLARMVEAYDAARIDFHQMVRRGMVENNMKILELRQENLQLKKDLDAVEAQLHQLKIAQGEVCRPKRRRVCRSQKITARKSTSRPELVRQSLAWTCFVETPRAEPAPVVPQEGEASGVGSTEDLSLFAGSVWGFQMVTTRRSAATGDGNQPEGSNHNNHGSPPPPPPPPPPPPPDTNAILTQILAQQANMMTAFLHHLQNPPQQNAPPPPPQHSKLAEFLRIRPPTFSSSNNPVDALDWLHAVGKKLDTVQCSDEEKVVFAAHQLQGPASLWWDHFQATQPEGQPITWARFTAAFRRTHVPAGVMALKKREFRELKQGNRSVMEYLHEFNNLARYAPEDVREDEEKQEKFLAGMDPELSVRLVSGDYADFQRLVDKSIRLEAKHKELESHKRRLANFRNHQGANQRVRYTNPYPGGSSSQQQQQQQPRSAPRPQFMVRVPQPQQQQSQQGTRAPRPPMPAVQPGQGRRDVQGPQRLCFNCFEPGHFADKCPKPRRQQGQAPPRSNNGGKDVIRGRVNHVTAEDVLTTPDVIVGTFLIHSIPATILFDSGASHSFISVPFVGRNQLGVERLRNPLLITTPGGVMTAKYYSPAVPIEIQGIPFPSDLILLDSKNLDVILGMNWLAQFQGVVDCARRTVTLYRGPEQPVVFFAPPTSVSSSELHQIGLSEIPIVREFGDVFPEELPGMPPKREIEFWIDLAPGTTPLYKRPYRMAANELAEVKKQLEELKEKGYIRPSTSPWGAPVIFVEKKDKMKRMCVDYRALNEVTIKNKYPLPRIDDLFDQLKGATVFSKIDLRSGYHQLRIREEDIPKTAFTTRYGLYEFTVMSFGLTNAPAFFMNLMNKVFMEYLDKFVVVFIDDILVYSQSEEDHQHHLRLVLGKLREHQLYAKLSKCEFWLSEVKFLGHVISAKGVAVDPETVTAVTDWKXPKTVTQIRSFLGLAGYYRRFIENFSKIARPMTXLLKKEEKFVWSPQCEKAFQTLKEKLVSSPVLILPDTRKDFMVYCDASRQGLGCVLMQDGHVVAYASRQLRPHESNYPTHDLELATVVHALXKIWRHYLNGNRCEIYTDHKSLKYIFTQSDLNLRQRRWLELIKDYDVGIHYHPGKANVVTDALSQKSHCNTLNVRGIPPELNQQMEALNLSIVGRGFLAALEAKPTLLDQIREAQKNDPDMHGLLNNMKQGKAAGFTEDEHGTLWNGNRVCVPDNRELKQLILQEAHESPYSIHPSSTKMYLDLKEKYWWVSMKREIAEFVALCDVCQRVKAEHQRPAGLLQPLQVPEWKWDEIGMDFITGLPKTQGGYDSIWVVVDRLTKVARFILVKTTYGGNKLAELYFARIVSLHGVPKKIVSDRGSQFTSHFWKKLQEELDTRLNFSTAYHPQTDGQTECLNQILEDMLRACVLDFGKTWDKSLPYAEFSYNNSYQASIQMAPYEALYGRKCRTPLLWDQVGESQVFGTDILREAEAKVRTIRDNLKVAQSRQKSYADNRRRNLEFAVDDFVYLRVTPLRGVHRFQTKGKLAPRFVGPFRIIARRGEVAYQLELPASLGNVHDVFHVSQLKKCLRVPSEQTDSEQIEVREDLTYVERPVKILDTMERRTRNRVIRFCKVQWSNHAEEEATWEREDELKAAHPDLFASSSESRGRDSV

SEQ ID NO: 25907 - protein, 1375 aa, Oryza sativa
  unsure (1)..(1375): unsure at all Xaa locations
  Clone ID: TF_OsC359_6230.pep
MSSGANEGYTSCGPVVEMSWHRAGVLLLGXSVLPACPGGSGRRXGIVSMYTSDQSTTYSNSRALGYGQAEQCTQKAGSVTRRGLDMTGFVLELRGMCVVLGYPHGVDYQARPLPEQEGDDAEPHAGWEVTAVILSGSPERTSLAVTAGGDSFPAACQSAALLAIGTLHQRYPDELYNWHYRYHPCCGXPATTLTFRDASSKDDATIMHLARMVEAYDAARIDFHQMVRRGMVENNMKIQELRQENLQLKKDLDAVEAQLHQLKIAQGEVCRPKRRRVCRSQKITARKSTSRPELVRQSLAWTCFVETPRAEPAPVVPQEGEASGVGSTEDALLLTFHXTTRRNAATSDGNQPEGSNHNNHGSPPPPPPPPPPPPPPPDTNAILTQILAQQANMMTAFLHHLQNPPQHNAPPPPPQHSKLAEFLRIRPPTFSSSNNPVDALDWLHAVGKKLDTVQCSDEEKVIFAAHQLQGPASLWWDHFQATQPEGQPITWARFTAAFRRTHVPAGVVALKKREFRELKQGNRSVMEYLHEFNNLARYAPEDVREDEEKQEKFLAGMDPELSVRLVSVDYPDFQCLVDKSIRLEAKHKELESHKRRLANFRNQQGANQRVRYTNPYPGGSSSQQQQQQQQPRSAPRPQFMVRVPQPQQQQSQQGTRAPRPPTPTVQPGQGRRDVQGPQRLCFNCFEPGHFADKCPKPRRQQGQVPPRSNNGGKDVIRGRVNHVTAEDVLTTPDVIVGTFLIHSIPATILFDSGASHSFISVPFVGRNQLGVERLRNPLLITTPGGVMTAKYYSPAVPIEIQGIPFPSDLILLDTKNLDVILGMNWLAQFQGVVDCARRTVTLYRGPEQPVVFFAPPTSVRSSELHQIGLSEIPIVREFGDVFPEELPGMPPKREIEFRIDLAPGTIPLYKRPYRMAANELAEVKKQLEELTEKGYIRPSTSPWGAPVIFVEKKDKTKRMCVDYRALNEVTIKNKYPLPRIDDLFDQLKGATVFSKIDLRSGYHQLRIREEDIPKTAFTTRYGLYEFTVMSFGLTNAPAFFMNLMNKVFMEYLDKFVVVFIDDILIYSQSEEDHQHHLRLVLGKLREHQLYAKLSKCEFWLSEVKFLGHVISAKGVAVDPETVTAVTDWKQSKTVTQVRSFLGLAGYYRRFIENFSKIARPMTQLLKKEEKFVWSPQCEKAFKTLKEKLVASPVLILPDTRKDFMVYCDASRQGLGCVLMQDGHVVAYASRQLRPHEGNYPTHDLELAAVVHALKIWRHYLIGNRCEIYTDHKSLKYIFTQSDLNLRQRRWLELIKDYDVGIHYHPGKANVVADALSRKSHCNTLNICGIPPELNQQMAARNLSIVSRGFLAALEAKPTLLDQIREAQKNDPDMHG

SEQ ID NO: 25908 - protein, 985 aa, Oryza sativa
  unsure (1)..(985): unsure at all Xaa locations
  Clone ID: TF_OsC359_6231.pep
MGTLHQRYPYELQHSPYRYHPRRGGARDYATFRDASSEDDATIVHLARMVEAYNAARIDFHQMVRRGMVENNMKILELRQENLQLKKDLDAVEAQLHQLKIAQGKVCRPKRRRVCRSQKITARKSTSRPELVRQSLAWTCFIETPRAEPAPVVPQEGEASGVALSLFAGSVWGFQMVTTRRNAVTGDGNQPEGSNHNHQGNPPSPSPPPPPPPPDTNAILTQILAQQANMMTAFLHHLQNPPQQNAPPPPPQHSKLAEFLRIRPPTFSSSNNPVDALDWLHAVGKKLDTVQCSDEEKVIFAAHQLQGPASLWWDHFQATQPEGQPITWARFTAAFRRTHVPAGVVALKKREFRELKQGNRSVMEYLHEFNNLARYAPEDVREDEEKQEKFLAGMDPELSVRLVSGDYPDFQRLVDKSIRLEAKHKELESHKRRLANFRNQQGANQRVRYTNPYPGGSSSQQQQQQQQPRSAPRPQFVVRVPQPQQQQNQQGTRAPRPPTQTVQPGQGRRDAQGQQRLCFNCFEPGHFADKCPKPRRQQGQAPPRPNNGGKDVIRGRVNHVMAEDVLTTPDVIVVTAVPDWKQPKTVTQVRSFLGLAGYYRXRVKAEHQRPAGLLQPLQVPEWKWDEIGMDFITGLPKTQGGYDSIWVVVDRLTKVARFIPVKTTYGGNKLAELYFARIVSLHGVPKKIVSDRGSQFTSHFWKKLQEELGTRLNFSTAYHPQTDGQTERLNQILEDMLRACVLDFGKTWDKSLPYAEFSYNNSYQASIQMAPYEALYGRKCRTPLLWDQVGESQVFGTDILREAEAKVRTIRDNLKVAQSRQKSYADNRRRDLEFAVGDFVYLRVTPLRGVHRFQTKGKLAPRFVGPFRIIARHGEVAYQLELPASLGNVHDVFHVSQLKKCLRVPSEQADSEQIEVREDLTYVERPVKILDTMERRTRNRVIRFCKVQWSNHAEEEATWEREDELKAAHPDLFASPSESRGRDSV

SEQ ID NO: 25909 - protein, 1806 aa, Oryza sativa; identical to SEQ ID NO: 19210
  Clone ID: TF_OsC359_6295.pep

SEQ ID NO: 25910 - protein, 1783 aa, Oryza sativa; identical to SEQ ID NO: 19151
  Clone ID: TF_OsC359_6321.pep

SEQ ID NO: 25911 - protein, 1779 aa, Oryza sativa
  unsure (1)..(1779): unsure at all Xaa locations
  Clone ID: TF_OsC359_6368.pep
MSWHRAGVLLLGAQSCLPVPGVPAVGGMVGLGWLGTSWDPGSGCRFGXIIVGLGLRQMAGSISRRGLDLTGFVLELXGHGRPLPEQEGDDAEPHAAWEVTAVILTSSPERTSLAVTAGGDSFSAACQNAALLAIGTLHQRYPDELQHSPYRYHPRHGGARDFATFRDASSEDDATIMHLARMVEAYDATCIDFHQMVRRGMVENNMKILEPRQENLQLKKDLDAVEAQLHQLKIAQGEVCRPKRRRVCRSQKITARKSTSRPELVRQSLAWTCFVQTPRAEPAPVVPQEGEASGVGSTEDALLLTFRPGPSQRRSANTGDGNQPEGSNHNNHGSPPPPPPPPPPPPPDTNAILTQILAQQAYMMTAFLHHLQNPPQQNAPPPPPQHSKLAEFLRIRPPTFSSSNNPVDALDWLHAVGKKLDTVQCSDEEKVVFAAHRLQGPASLWWDHFQATQPEGQPITWARFTAAFRRTHVPAEVMALKKREFRELKQGNRSVMEYLHEFNNLARYAPEDVREDEEKQEKFLAGMDPELSVRLVSGDYPDFQRLVDKSIRLEAKHKELESHKRRLANFRNQQGANQRVRYTNPYPGGSSSQQQQQQQPRSAPRPQFVVRVPQPQQQQSQQGTRATRPPMPAVQPGQGRRDVQGPQRLCFNCFEPGHFADKCPKPRRQQGQPPPRSNNGGKDVIRDRVNHVTAEDVLTTPDVIVGTFLIHSIPATILFDSGASHSFISVPFVGRNQLGVERLRNPLLITTPGGVMTAKYYSPAVPIEIQGIPFPSDLILLDTKNLDVILGMNWLAQFQGIVDCARRTVTLYRGPEQPVVFFAPPTSISSSELHQIGLSEIPIVREFGDVFPEELPGMPPKREIEFRIDLSPGTTPLYKRPYRMAANELAKVKKQLEELKEKGYIRPSTSPWGAPVIFVEKKDKTKRMCVDYRALNEVTIKNKYPLPRIDDLFDQLKGATVFSKIDLRSGYHQLRIREEDIPKTAFTTRYGLYEFTVMSFGLTNAPAFFMNLMKKVFMEYLDKFVVVFIDDILVYSQSEEDHKHHLRLVLGKLREHQLYAKLSKCEFWLSEVKFLGHVISAKGVAVDPETVTAVTDWKQPKTVTQIRSFLGLAGYYRRFIENFSKIARPMTQLLKKEEKFVWSPQCEKAFQTLKEKLVSSPVLILQDTRKDFMVYCDASRQGLGCVLMHDGHVVAYASRQLRPHEGNYPTHDLELAAVVHALKIWRHYLIGNHCEIYTDHKSLKYIFTQSDLNLRQRRWLELIKDYDVGIHYHPGKANVVADALSRKSHCNTLNVRGIPPELNQQMEALNLSINMKQGKAAGFTEDEHGTLWNGNRVCVPDNRELKQLILQEAHESPYSIHPGSTKMYLDLKEKYWWVSMKREIAEFVALCDVCQRVKAEHQRPAGLLQPLQVPEWKWDEIGMDFITGLPKTQGGYDSIWVVVDRLTKVARFIPVKTTYGGNKLAELYFARIVSLHGVPKKIVSDRGSQFTSHFWKKLQEELGTRLNFSTAYHPQTDGQTEHLNQILEDMLRACVLDFGKTWDKSLPYAEFSYNNSYQASIQMAPYEALYGRKCRTPLLWDQVGESQVFGTDILRKAEAKVRTIRDNLKVAQSRQKSYADNRRRDLEFAVDDFVYLRVTPLRGVHRFQTKGKLAPRFVGPFRIIARRGEVAYQLELPASLGNVHDVFHVSQLKKCLRVPSEQADSEQIEVREDLTYVERPVKILDTMERRTRNRVIRFCKVQWSNHAEEEATWEREDELKAAHPDLFASSSESRGRDSV

SEQ ID NO: 25912 - protein, 406 aa, Oryza sativa; identical to SEQ ID NO: 19246
  Clone ID: TF_OsC359_6432.pep

SEQ ID NO: 25913 - protein, 1344 aa, Oryza sativa
  Clone ID: TF_OsC359_6549.pep
MVMPMVTTRRNAATGDGNQPEGSNHNHQGNPPPPPPPPPPPPPDTNAILTQILAQQANMMTAFLHHLQNPPQHNAPPPPQHSKLAEFLRIRPPTFSSSNNPVDALDWLHAVGKKLDTVQCSDEEKVIFAAHQLQGPASLWWDHFQATQPEGQPITWARFTAAFRRTHFNNLARYAPEDVREDEEKQEKFLAGMDPELSVRLVSGDYPDFQRLVDKSIRLEAKHKELESHKCRLANFRNQQGANQRVRYTNPYPGGSSSQQQQQQQQQPRSAPRPQFVVRIPQPQQQQNQQGTRAPRPPTPTVQPGQGRRDAQGQQRLCFNCFEPGHFADKCPKPRRQQGQAPPRSNNGGKDVIRGRVNHVTAEDVLTTPDVIVELHQIGLSEIPIVREFGDVFPEELPGMPPKREIEFRIDLAPGTTPLHKRPYRMAANELAEVKKQLEELKEKGYIRPSTSPWGAPVIFVEKKDKTKRMCVDYRALNEVTIKNKYPLPRIDDLFDQLKGATVFSKIDLRSGYHQLRIREEDIPKTAFTTRYGLYEFTVMSFGLTNAPAFFMNLMNKVFMEYLDKFVVVFIDDILIYSQSEEDHQHHLRLVLGKLREHQLYAKLSKCEFWLSEVKFLGHVISAKGVAVDPETVTAVTDWKQPKTVTQVRSFLGLAGYYRRFIENFSKIARPMTQLLKKEEKFVWSPQCEKAFQTLKEKLVSSPVLILPDTRKDFMVYCDASRQGLGCVLMQDGHVVAYASRQLRPHEGNYPTHDLELAAVVHALKIWRHYLIGNRCEIYTDHKSLKYIFTQSDLNLRQRRWLELIKDYDVGIHYHPGKANVVADALSRKSHCNTLNVRGIPPELNQQMEALNLSIVSRGFLAALEAKPTLLDQIREAQKNDPDMHGLLKNMKQGKAAGFTEDEHGTLWNGKRVCVPDNRELKQLILQEAHESPYSIHPGSTKMYLDLKEKYWWVSMKREIAEFVALRDVCQRVKAEHQRPAGLLQPLQVPEWKWDEIGMDFITGLPKTQGGYDSIWVVVDRLTKVARFIPVKTTYGGNKLAELYFARIVSLHGVPKKIVSDRGSQFTSHFWKKLQEELGTRLNFSTAYHPQTDGQTERLNQILEDMLRACVLDFGKTWDKSLPYAEFSYNNSYQASIQMAPYEALYGRKWRTPLLWDQVGESQVFGTDILREAEAKVRIIRDNLKVAQSRQKSYADNRRRDLEFAVDDFVYLRVTPLRGVHRFQTKGKLAPRYVGPFRIVARRGEVAYQLELPASLGNVHDVFHVSQLKKCLRVPSEQADSEQIEVREDLTYVERPVKILDTMERRTRNRVIRFCKVQWSNHAEEEATWEREDELKAAHPGLFA

SEQ ID NO: 25914 - protein, 1803 aa, Oryza sativa; identical to SEQ ID NO: 19216
  Clone ID: TF_OsC359_6552.pep

SEQ ID NO: 25915 - protein, 1538 aa, Oryza sativa; identical to SEQ ID NO: 19097
  Clone ID: TF_OsC359_6647.pep

SEQ ID NO: 25916 - protein, 1868 aa, Oryza sativa
  unsure (1)..(1868): unsure at all Xaa locations
  Clone ID: TF_OsC359_6674.pep
MDEVGGRWTFSRANEGYTSCGPVVEMSWQRVGALLLGAQSCLPVPEVPAVGGIGSMAGSVTRRGLDMTGFVLELRGMCVALGYPHGVDYQARPLPDQEGDDAEPHAGWEVTAVILSGSPERTSLAVTAGGDSFPAACQNAALLAIGTLHQRYPDELQHSPYRYHPRRGGAHDYATFRDASSEDDATIVHLARMVEVYDAARIDFHQMVRRGMVENNLKILELRQENLQLKKDLDAVEAQLHQLKIAQGEVCRPKRRRVCRSQKITARKSTSRPELVRQSLAWTCFVETPRAEPAPVVPQEGEASGIGSTEALSLFAGSVWGFQMVTTRRNAATGDGNQPEGSNHNHQGNPPPPPPPPPPPPPDTNAILTQILAQQANMMTAFLHHLQNPPQHNAPPPPPQHSKLAEFLRIRPPTFSSSNNPVDALDWFHAVGKKLDTVQCSDEEKVIFAAHQLQGPASLWWDHFQATQPEGQPITWARFTAAFRRTHVPAGVVALKKREFRELKQGNRSVMEYLHEFNNLARYAPEDVREDEEKQEKFLAGMDPELSVRLVSGDYPDFQRLVDKSIRLEAKHKELESHKRRLANFRNQQGANQRGRYTNPYPGGSSSQQQQQQQQPRPAPRPQFVVRFPQPQQQQNQQGTRAPRPPTPTVQPGQGRRDAQGQQRLCFNCFEPGHFADKCPKPRRQQGQAPPRSNNGGKDVIRGRVNHVTAEDVLTTPDVIVGLSEIPIVREFGDVFPEELPGMPPKREIEFRIDLAPGTTPLHKRPYRMAANELAEVKKQLEELKEKGYIRPSTSPWGAPVIFVEKKDKTKRMCVDYRALNEVTIKNKYPLPRIDDLFDQLKGATVFSKIDLRSGYHQLRIREEDIPKTAFTTRYGLYEFTVMSFGLTNALAFFMNLMNKVFMEYLDKFVVVFIDDILIYSQSEEDHQHHLRLVLGKLREHQLYAKLSKFIENFSKIARPMTQLLKKEEKFVWSPQCEKAFQTLKEKLVSSPVLILPDTRKDFMVYCDASRQGLGCVLMQDGHVVAYASRQLRPHEGNYPTHDLELAAVVHALKIWRHYLIGNRCEIYTDHRSLKYIFTQSDLNLRQRRWLELIKDYDVGIHYHPGKANVVADALSRKSHCNTLNVRGIPPELSQQMEALNLSIVSRGFLAALEAKPTLLDQIREAXQKNDPDMHGLLKNMKQGKAAGFTEDEHRTLWNGKRVCVPDNRELKQLILQEAHESPYSIHPGSTKMYLDLKEKYWWVSMKREIAEFVALCDVCQRVKAEHQRPAGLLQPLQVPEWKWDEIGMDFITGLPKTQGGYDSIWVVVDRLTKVARFIPVKTTYGGNKLAELYFARIVSLHGVPKKIVSDRGSQFTSHFWKKLQEELGTRLNFSTAYHPQKDGQTERLNQILEDMLRACVLDFGKTWDKSLPYAEFSYNNSYQASIQLAPYEALYGRKCRTPLLWDQVGESQVFGTDILREAEAKVRIIRDNLKVAQSRQKSYADNRRRDLEFAVGDFVYLRVTPLRGVHRFQTKGKLAPRYVGPFRIVARRGEVAYQLELPASLGNVHDVFHVSQLNKCLRVPSEQADSEQIEVREDLTYVERPVKILDTMERRTRNRVIRFCKLQWSNHAEEEATWEREDELKAAHPDLLATARARGCGDAWDPRRRPASAACARSTVDREGDAWAPLPWTRPTVHGGPGARGWRRSAPWVPRVSRTRGRGRLTAGPTWQPRGRARGRPRRRGRRERRARAPMVTAGDHRRGGAAPEREEGRGKANGGPRLTPGQRRRRERRPERRKTAARLGMTMATALRRSASETEARTRSTAMRRCRGRWRRVRRKSGAAAAAERSSAAMAERAEHGASTNPTARASGERRKRKSGARATFK

SEQ ID NO: 25917 - protein, 1826 aa, Oryza sativa; identical to SEQ ID NO: 19221
  Clone ID: TF_OsC359_6898.pep

SEQ ID NO: 25918 - protein, 1511 aa, Oryza sativa; identical to SEQ ID NO: 19077
  Clone ID: TF_OsC359_6901.pep

SEQ ID NO: 25919 - protein, 1758 aa, Oryza sativa
  unsure (1)..(1758): unsure at all Xaa locations
  Clone ID: TF_OsC359_6955.pep
MDISRANEGYTSCGPVVEMSWHRAGVLLLGXSVLPAYPGGSGRRXGIGSVLLSMARMGWKLCHVFRLYTVVMAGSVTRRGLDMTGFVLELRGMCVVLGYPHGVDYQARPLPEQEGDDAEPHAGWEVTAVILSGSPERTSLAVTAGGDSFPAACQSAALLAIGTLHQRYPDELQHSPYRYHPRRGGARDYATFRDASSEDDATIVHLARMVEAYDAARIDFHQMVRRGMVENNMKILELRQENLQLKKDLDAVEAQLHQLKIAQGEVCRPKRRRVCRSQKITARKSTSRPELVRQSLAWTCFVEIPRAEPAPVVPQEGEASGVGSTEDALLLTFRPGPSQRRSANTGDGNQPEGSNHHHQGSPPPPPPPPPPPPPDTNAILTQILAQQANMMTAFLHHLQNPPQHNAPPPPPQHSKLAEFLRIRPPTFSSSNNPVDALDWLHAVGKKLDTVQCSDEEKVIFAAHQLQGPASLWWDHFQATQPEGQPITWARFTAAFRRTHVPAGVVALKKREFRELKQGNRSVMEYLHEFNNLARYAPEDVREDEEKQEKFLAGMDPELSVRLVSGDYPDFQRGSSSQQQQQQQQPRSAPRPQFVVRVPQPQQQQNQQGTRAPRPPTPTVQPGQGRRDAQGPQRLCFNCFEPGHFADKCPKPRRQQGQAPPRSNHGGKDVIRGRVNHVTAEDVLTTPDVIVGTFLIHSIPATILFDSGASHSFISVPFVGRNQLGVERLRNPLLITTPGGVMTAKYYSPAVPIEIQGIPFPSDLILLDTKNLDVILGMNWLAQFQGVVDCARRTVTLYRGPEQPVVFFAPPTSVSSSELHQIGLSEIPIVREFGDVFPEELPGMPPKREIEFRIDLAPGTTPLYKRPYRMAANELAEVKKQLEELKEKGYIRPSTSPWGAPVIFVEKKDKTKRMCVDYRALNEVTIKNKYPLPRIDDLFDQLKGATVFSMIDLRSGYHQLRIREEDIPKTAFTTRYGLYEFTVMSFGLTNAPAFFMNLMNKVFMEYLDKFVVVFIDDILIYSQSEEDHQHHLRLVLGKLREHQLYAKLSKCEFWLSEVKFLGHVISAKGVAVDPETVTAVTDWKQPKTVTQVRSFLGLAGYYRRFIENFSKIARPMTQLLKKEEKFVWSPQCEKAFKTLKEKLVSSPVLILPDTRKDFMVYCDASRQGLGCVLMQDGHVVAYASRQLRPHEGNYPTHDLELAAVVHALKIWRHYLIGNRCEIYTDHKSLKYIFTQSDLNLRQRRWLELIKDYDVGIHYHPGKANVVADALSRKSHCNTLNVRGIPLELSQQMEALNLSIVGRGFLAALEAKPTLLDQIREAQKNDPDMHGLLKNMKQGKAAGFTEDEHGTLWNGNRVCVPDNRELKQLILQEAHESPYSIHPGSTKMYLDLKEKYWWVSMKREIAEFVALCDVCQRVKAEHQRPAGLLQPLQVPEWKWDEIGMDFITGLPKTQGGYDSIWVVVDRLTKVARFIPVKTTYGGNKLAELYFARIVSLHGVPKKIVSDRGSQFTSHFWKKLQEELGTRLNFSSAYHPQTDGQTERLNQILEDMLRACVLDFGKTWDKSLPYAEFSYNNSYQASIQMAPYXALYGRKSEHALVDQVGESQVFGXDDFVYLRVTPLRGVHRFRTKGKLAPRYVGPFRIVARRREVAYQLELPASLGNVHDVLHVSQLKKCLRVPSEQADSEQIEVREDLTYVERPVKILDTMERRTRNRVIHFCKVQWSNHVEEEATWEREDELKAAHPDLFTSSSESRSRDSF

SEQ ID NO: 25920 - protein, 1666 aa, Oryza sativa
  unsure (1)..(1666): unsure at all Xaa locations
  Clone ID: TF_OsC359_7002.pep
MDISRANEGYTSCGPMAGSINRRGLDLTGFVLELRGMCVVLGYPHGVDYQGKQLLEQEVILTGSPERTSLAVTAGGDSFSAACQNAALLAIGTLHQRYPDELQHSPYRYHPRRGGARDYATFQDASSEDDATIMHLARMVEAYDAARIDFHQMVRRGLVKNNMKILELRQENLQLKKDLDAVEAQLCQLKIAQGEMVTTRRSAATGDGNQPEGSNPNIQGGPPPPPPPPPPPPPDTNSILTQILAQQANMMAAFLHHIQNPPQHNAPPPPPPPQHSKLAELLRIRPPTFSSSNNPVDALDWLHAVGKKLDTVQCNDEEKVIFAAHQLQGPASLWWDHFQATQPEGQPITWARFTAAFRRTHVPAGVMALKKREFRELKQGNRSVMEYLHGFNNLARYAPEDVREDEEKQEKFLARMDPELSVRLVSGDYPDFQRLVDKSIRLEAKHKELESQKRRLANLRNQQGANQRVRYTNPYPGGSSSQPQQQQSQQGTRVPRPPAPVVQPGQGRREVQGQQRLCFNCFEPGHFADKCPKPRRQQGQAPPRPNNGGKDVIRGRVNHVTAEDVLTTPDVIVGTFLIHSIPATILFDSGASHSFISVPFVGRNQLGVERLRNPLLITTPRGVMTAKYYSPAVPIEIQGIPFPSDLILLDTKNLDVILGMNWLAEFQGVVDCARRTVTLYRGPEQPVVFFAPPTSIGSSELHQIGLSEIPIVSEFGDVFPEELPGMPPKREIEFRIDLAPGTTPLYKRLYRMAANELAEVKKQLEELKEKGYIRPSTSPWGAPVIFVEKKDKTKRMCVDYRALNEVTIKNKYPLPRIDDLFDQLKGATVFSKIDLRSGYHQLRIREEDIPKTAFTTRYGLYEFTVMSFGLTNAPAFFMNLMNKVFMEYLDKFVVVFIDDILVYSQSEEDHQQHLRLVLGKLREHQLYAKLSKCEFWLSEVKFLGHVISAKGVAVDPETVTAVTDWKQPKTVTQVRSFLGLAGYYRRFIENFSKIARPMTQLLKKEKKFVWSPQCEKAFQTLKEKLVSSPVLILPDTRKDFMVCCDASRQGLGCVLMQEGHVVAYASRQLRHHEGNYPTHDLELAAVVHALKIWRHYLIGNRCEIYTDHKSLKYIFTQSDLNLRQRRWLELIKDYDVGILYHPGKANVVADALSRKSRCNTLGVRGIPPELHQQMEALNLSIVGRGFLATLEAKPTLLDQIREAQKNDPDMHGILKNMKQGKAAGFTEDEHGTLWNGSRVCVPDDKELKQLIVQEAHESPYSIHPGSTKMYLDLKGTYWWVSMKWEIAEFVALCDVCQRVKAEXRPAGLLQPLQVPEWKWDEIGMDFITGLPKTQGGXRFIPVKTTYGGNKLAELYFARIVSLHGVPKKIVSDRGSQFTSHFWKKLQEELGTRLNFSTAYHPQTDGQTERLNQILEDMLRACVQDFRKTWDKSLPYAEFSYNNSYQASIQMALYEALYGRKCRTPLLWDQVGESQVFGTDILREAEAKVRTIRENLKVAQSRQKSYADNRRRDLEFAVDDFVYLRVTPLRGVHRFQTKGKLAPRFVGPFRIIARHGEVANQLELPASLGNVHDVFHVSQLKKCLRVLSEQADSEQIEVREYLTYVERPVKILDAMERRTRKRVIRFCKVQWSNHAEEEATWEREDELKAAHPDLFASSSESRGRDSV

SEQ ID NO: 25921 - protein, 2016 aa, Oryza sativa
  unsure (1)..(2016): unsure at all Xaa locations
  Clone ID: TF_OsC359_7171.pep
MEPRSPRPFPPSPAALSPSRRYIFAPRASLLRFRRSPLALAVGFVLAPSSSLSAVAANLRFAAVVAPDFLPTRRHLHRLRRVVVDPVRSSVSPADRRSTVALVIPNRAAASRRFGRRFRRPRRPGVSRGPPFAFPLLSALSGAAPPRRWSPAVTIGERVRRLPSAVPARPPSAASRGCQVGPGRQPPAPAGAADAWDPRRRPPPAACSRSTVDPPRPYKDRSSGLCCKALPYFHMSSGANEGYTSCGPVVEMSWQRVGALLLGAQSCLPVPEVPAVGGIGSMYTSDQSLIYSNSRALGYGQAEQCTQMAGSVTRRGLHMTGFVLELRGMCVVLGYPHGVDYQARPLPEQEGEDAEPHAGWEVTAVILSGSPERTSLAVTAGGDSFPAACQNAALLAIGTLHQRYPDELQHSPYRYHPRRGGARDFATFRDASSEDDATIVHLARMVEAYDAARIDFHQMVRRGMVENNMKILELRQENLQLKKDLDAVEAQLHQLKIAQGEVCRPKRRRVCRSQKITARKSTSRPELVRQSLAWTCFVETPRAEPAPVVPQEGEASGVGSTEDALLLTFHXTTRRNAVTGDGNQPEGSNHNHQGNPPPPLPXPPPPPPDTNAILTQILAQQANMMTTFLHHLQNPPQQNAPPPPPQHSKLAEFLRIRPPTFSSSNNPVDALDWLHAVGKKLDTVQCSDEEKVIFAAHQLQGPASLWWDHFQATQPEGQPITWARFTAAFRRTHVPAGVVALKKREFRELKQGNRSVMEYLHEFNNLARYAPEDVREDEEKQEKFLAGMDPELSVRLVSGDYPDFQRLVDKSIRLEAKHKELESHKRRLANFRNQQGANQRVRYTNPYPGGSSSQQQQQQQQPRSAPRPQFVVRVPQPQQQQNQQGTRAPRPLTPAVQPGQGHRDAQGQQRLCFNCFEPGHFADKCPKPRRQQGQAPPRSNNGGKDVIRGRVNHVTAEDVLTTPDVIVGTFLVHSIPATILFDSGASHSFISVPFVGRNQLGVERLRNPLLITTPGGVMTAKYYSPAVPIEIQGIPFPSDLILLDTKKLDVILGMNWLAQFQGVVVCARRTVTLYRGPEQPVVFFAPPASVRSSELHQIGLSEIPIVREFGDVFPEELPGMPPKREIEFRIDLAPGTTPLYKRPYRMAANELAEVKKQLEELKEKGYIRPSTSPWGAPVIFVEKKDKTKRMCVDYRALNEVTIKNKYPLPRIDDLFDQLKGATVFSKIDLRSGYHQLRIREEDIPKTAFTTRYGLYEFTVMSFGLTNAPAFFMNLMNKVFMEYLDKFVVVFIDDILIYSQSEEDHQHHLRLVLGKLREHQLYAKLSKCEFWLSEVKFLGHVISAKGVAVDPETVTAVTDWKQPKTVTQIRSFLGLAGYYRRFIENFSKIARPMTQLLKKEEKFVWSPQCEKAFQTLKEKLVSSPVLILPDTRKDFMVYCDASRQGLGCVLMQDGHVVAYASRQLRPHEGNYPTHDLELAAVVHALKIWRHYLIGNRCEIYTDHKSLKYIFTQSDLNLRQRRWLELIKDYDVGIHYHPGKANVVADALSRKSHCNTLNVRGIPPELSQQMEALNLSIVGRGFLAALEAKPTLLDQIREAQKNDPDMHGLLKNMKQGKAAGFTEDEHGTLWNGNRRVKAEHQRPAGLLQPLQVPEWKWDEIGMDFITGLPKTQGGYDSIWVVVDRLTKVARFIPVKTTYGGNKLAELYFARIVSLHGIPKKIVSDRGSQFTSHFWKKLQEELGTRLNFSTAYHPQTDGXTERLNQILEDMLRACVLDFGKTWDKSLPYAEFSYNNSYQASIQMAPYEALYGRKCRTPLLWDQVGESQVFGTDILREAEAKVRTIRDNLKVAQSRQKSYADNRRRDLEFAVDDFVYLRVTPLRGVHRFQTKGKLAPRYVGPFRIIARRGEVAYQLELPASLGNVHDVFHVSQLKKCLRVPSEQADSEQIEVREDLTYVERPVKILDTMERRTRNRVIRFCKVQWSNHAEEEATWEREDELKAAHPDLFASSSESRGRDSV

SEQ ID NO: 25922 - protein, 994 aa, Oryza sativa
  unsure (1)..(994): unsure at all Xaa locations
  Clone ID: TF_OsC359_7226.pep
MAAGPPAPVSSLPRPPSLDPALFKPSPLLLLQFPPLAALPPRRNQGRAVALSLRRRHRAPVRRRRRPGSPPTSAPPPSALPHPRRPRPPLRFGRRPPERRRPRRLEPRRRLPPLRPPFSSSPSTXGEPWTAASFPPSLPLSRPPLRRAYGRRRRPXGAGAASRRPHRLGRPRAHRVAAAWGPAVSRPRPXVRLTRGTHGAGRXSPGAPGPPWTHLGHIRTGLRASVAKHYRXFHMSSGTNEGYTSCGPVVEMSWHRAGVLLLGAQSCLPVPGVPAVGGIGSMYTSDQSIIYSNSRALGYGQAEQCTQMAGSINRRGLDLTGFVLELRGMCVVLGYPHGVDYQGKQLPEQEGDDAEPHAAWEVTAVILTGSPERTSLAVTAGGDSFSAACQNAALLAIGTLHQRYPDELQHSPYRYHPRRGGARDYATFRDASSEDDATIMHLARMVEAYDAARMDFHQMVRRGLVENNMKILELRQENLQLKKDLDVVEAQLCQLKIAQGEVCRPKRRRVCRSLKITARKSTSRPELVRQSLAWTCFVETPRAEPAPVVPQEDGVSGVGSTEDALLLTFHGXTRRSAATGDGNQPVGSNHNNHGSPPPPPPPPPPPPLDTNTILTQIIAQRANMMAAFLHHIQNPPQHNAPPPPPQHSKLAEFLRIRPPTFSSSNNPVDALDWLHAVGKKLDTVQCNDEEKVIFAAHXLQGPASLWWDHFQATXPEGQPITWARFTASFQRTHVPVGVMALKKREFXELKQGNRSMMEYLHEFNNLARYAPEDVREDEEKQEKFLAGMDPELSVRLVSGDYPDFQRLVDKSIRLEAKHKELESHKRRLANFRNQQGANQRVRYTNPYPGGSSSQQQQQQQPRSTSRPQFVVHVPQPQQQQSQQGTRAPRPPTPAVQPVQGRRDAQGQQRLCFNCFEPGHFADKCPKPRCQQGQAPPRSNNGGKDVIRGRVNHVTAENVLTTPDVIVGTFLIHSIPATIFVTSQNDSKIHPLNYA

SEQ ID NO: 25923 - protein, 987 aa, Oryza sativa
  unsure (1)..(987): unsure at all Xaa locations
  Clone ID: TF_OsC359_7283.pep
SGPQRLCFNCFEPGHFADKCPKPRRQQGQAPPRSNNGGKDVIRGRVNHVTAEDVLTTPDVIVGTFLVHSXPLYRGPEHPVVFFAPPTSGMPPKREIEFRIDLAPGTTPLHKRPYRMAANELAEVKKQLEELKEKGYIRLSTFPWGAPVIFVEKKDKTKRMCVDYRALNEVTIKNKYPLPRIDDLFDQLKGATVFSKIDLRSGYHQLRICEEDIPKTAFTTRYGLYEFTVMSFGLTNAPAFFMNLMNKVFMEYLDKFVVVFIDDILIYSQSEEDHQHHLRLVLGKLREHQLYAKLSKCEFWLPEVKFLGHVISAKGVAVDPETVTAVTDWKQPKTVTQVRSFLGLAGYYRRFIENFSKIARPMTQLLKKEEKFVWSPQCEKAFQTLKEKLVSSPVLILPDTRKDFMVYCDASRQGFGCVLMQDGHVVAYASRQLRPHEGNYPTHDLELAAVVHALKIWRHYLIGNRCEIYTDHKSLKYIFTQSDLNLRQRRWLELIKDYDVGIHYHPGKANVVADALSRKSHCNTLNVRDIPPELNQQMEALNLSIVGRGFLAALEAKPTLLDQIREAQKNDPDMHGLLKNMKQGKAAGFTEDEHGTLWNGKRVCVPDNRELKQLILQEAHESPYSIHPGSTKMYLDLKEKYWQSTSDRPDFSNLSKYQNGNGMKLGWISSPDFQKPKVDMILYGTAYHPQTDGQTERLNQILEDMLRACVLDFGKTWDKSLPYAEFSYNNSYQASIQMAPYEALYGRKCRTPLLWDQVGESQVFGTDILREAEAKVRIFRDNLKVAQSRQKSYADNRRRDLEFAVGDFVYLRVTPLRGVHRFQTKGKLAPRYVGPFRILARRGEVTYQLELPASLGNVHDVFHVSQLKKCLRVPSEQADSEQIEVREDLTYVERPVKILDTMERWTRNRVIRFCKVQWSNHAEEEATWEREDELKAAHPDLFANAAASEDTLFVEVEADVWESEQGNLAQFFPSPEEELLEDEGFGV

SEQ ID NO: 25924 - protein, 1777 aa, Oryza sativa; identical to SEQ ID NO: 19195
  Clone ID: TF_OsC359_7369.pep

SEQ ID NO: 25925 - protein, 1831 aa, Oryza sativa
  unsure (1)..(1831): unsure at all Xaa locations
  Clone ID: TF_OsC359_7370.pep
MEVDEVGGRWTFSRANEGYTSCGPVVEMSWHRAGVLLLGAQSCLPVPGVPAVGGIGSVLLSMARMGWKLCHVFRLYTVVMAGSVTRRGLDMTGFVLELRGMCVVLGYPHGVDYQARPLPEQEGEDAEPHAGWEVTAVILSGSPERTSLAVTAGGDSFPAACQNAALLAIGTLHQHYPDELQHSPYRYHPRRGGARDYATFRDASSEDDATIVHLARMVEAYDAARIDFHQMVRRGMVENNMKILELRQENLQLKKDLDAVEAQLHQLKIAQGEDCRPKRXCRSQKITARKSTSRPELVRQSLAWTCFVETPRAEPAPVVPQEGETSGVGXNVNTGDGNQPEGSNPNHQGNPPSPSASPPPPPPDTNAILTQILAQQANMMTAFLHHLQNPPQQNAPPPPPQHSKLAEFLRIRPPTFSSSNNPVDALDWLHAVGKKLDTVQCSDEEKVIFAAHQLQGPASLWWDHFQATQPEGQPITWARFTAAFRRTHVPAGVVALKKREFRELKQGNRSVMEYLHEFNNLARYAPEDVREDEEKQEKFLAGMDPELSVRLVSGDYPDFQRLVDKSIRLEAKHKELESHKRRLANFRNQQGANQRVRYTNPYPGGSSSQQQQQQPRSAPRPQFVVRVPQPQQQQNQQGTRVPRPPTPAVQPGQGRRDAQGQQRLCFNCFEPGHFADKCPKPRRQQGQAPPRSNNGGKDVTRGRVNHVTAEDVLTTPDVIVGTFLIHSVPATTLFDSGASHSFISVPFVGRNQLGVERLRNPLLITTPGGVMTAKYYSPAVPIEIQGIPFPSDLILLDTKNLDVILGMNWLAQFQGVVDCARRTVTLYRGPEQPVVFFAPPTSVRSSELHQIGLSEIPIVGEFGDVFPEELPGMPPKREIEFRIDLAPGTTPLYKRPYRMAANELAEKKDKTKRMCVDYRALNEVTIKNKYPLPRIDDLFDQLKGATVFSKIDLRSGYHQLRIREEDIPKTAFTTRYGLYEFTVMSFGLTNAPAFFMNLMNKVFMEYLDKFVVVFIDDILIYSQSEEDHQHHLRLVLGKLREHQLYAKLSKCEFWLSEVKFLGHVISAEGVAVDPETVTAVTDWKQPKTVTQIRSFLGLAGYYRRFIENFSKIARPMTQLLKKEEKFVWSPQCEKAFQTLKEKLVSSPVLILPDTRKDFMVYCDASRQGLGCVLMQDGHVVAYASRQLRPHEGNYPTHDLELAAVVHALKIWRHYLIGNRCEIYTDHKSLKYIFTQSDLNLRQRRWLELIKDYDVGIHYHPGKANVVADALSRKSHCNTLNARGIPPELNQQMEALNLSIVGRGFLAALEAKPTLLDQIREAQKNDPDMHGLLKNMKQGKAAGFTEDEHGTLWNGNRRVKAEHQRPAGLLQPLQVPEWKWDEIGMDFITGLPKTQGGYDSIWVVVDRLTKVARFIPVKTTYGGNKLAELYFARISQTAGMELGTRLNFSTAYHPQTDGQTERLNQILEDMLRACVLDFGKTWDKSLPYAEFSYNNSYQASIQMAPYEALYGRKCRTPLLWDQVGESQVFGTDILREAEAKVRIIRDNLKVAQSRQKSYADNRRRDLEFAVGDFVYLRVTPLRGVHRFQTKGKLAPRYVGPFRIIARRGEVAYQLELPASLGNVHDVFHVSQLKKCLRVPSEQADSEQIEVREDLTYVERPMKILDTMERRTRNRVIRFCKVQWSNHAEEEATWEREDERRHRLPEPRRRLLPLRPPFSSSSLSRGEPKTAVRLPPFLLFLGCHSAAPLVAGGDHRGAGARRSRRPRRRGRPRARPRGYQVGPAVSRPRPRVRLTRGTHGADRRQPRAPGPPWTERLVHPRINKTPTSGHSIH

SEQ ID NO: 25926 - protein, 1913 aa, Oryza sativa
  unsure (1)..(1913): unsure at all Xaa locations
  Clone ID: TF_OsC359_7388.pep
MDISRTNEGYTSCGPVVEMSWHRAGVLLLGXSVLPTCPGGSGRRXGVGSVLLSMARMGWKLCHVFRLYTVVMAGSINRRGLDLTGFVLELRGMCIVLGYPHGVDYQGKQLPEQEGDDAEPHAAWEVTAVILTGSPERTSLAVTAGGDSFSAACQNAALLAIGTLHQRYPDELQHSPYRYHPRRGGARDYATFRDASSEDDATIMHLARMVEVYDAARIDFHQMVRRGLVENNMKILELRQENLQLEKDLDAVEAQLRQLKIAQGEVCRLKRRRVYRSLKITARKSTSRPELVRQSLAWTCFVETPRAEPAPVVPQEDGASGVGSTKDALLLTFRPGPSEQVVWGMVMPMVTTRRRANTGDGNQPEGSNHNNHGSPPPPPPPPPPPPPDTNAILTQILAQQANMMPAFLHHIQNPPQHNAPPPPPQHSKLVEFLRIRPPTFSSSNNPVDALDWLHAVGKKLDTVQCSDEEKVIFAAHQLQGPASLWWDHFQATQPEGQPFTWARFTAAFRRTHVPAEVMALKKREFRELKQGNRSVMEYLHEFNNLARYAPEDVREDKEKQEKFLAGMDPELSMRLVSGDYPDFQRLVDKSIRLEAKHKKLESHKRCLANFRNQQGANQRVRYTNPYLGGSSSQQQQQQQPRSAPRPHFVVRVPQPQQQQSQQGTRAPRPPTPAVQPGQGRRDVQGQQRLCFNCFEPGHFADKCPKPRRQQGQPPPRPNNDGKDVIWGRVNHVTAEDVLTTPNVIVGTFLIHSIPTTILFDSGASHSFISVPFVGRNQLGVERLRNSLLITTPRGVMTAKYYSPAVPIEIQGIPFPSDLILLDTKNLDVILGMNWLAQFQGVVDCARRTVTLYRGPEQPVVFFAPPTSVGSSELHQIGLSEIPIVREFGDVFPEELPGMPPKREIEFRIDLAPGTTPLYKRPYRMASNELAELKGATVFSKIDLRSGYHQLRIREEDIPKTAFTTRYGLYEFTVMSFGLTNAPTFFMNLMNKVFMEYLDKFVVVFIDDILVYSQSEEDHQHHLRLVLGKLREHQLYAKLSKCEFWLSEVKFLGHVISAKGVAVDPETVTAVTGWKQSKTVTQIRSFLGLAGYYRRFIENFSKIARPMTQLLKKEEKFVWSPQCEKAFQTLKEKLVSSPVLILPDTRKDFMVYCDALRQGLGCVLMQEGHVVAYASRQLRPHEGNYPTHDLELAAVVHALKIWRHYLIGNRCEIYTDHKSLKYIFTQSDLNLRQRRWLELIKDYDVGIHYHPGKANVVANALSRKSHCNTLDVRGIPPELNQQMEALNLSIVGRGFLATLEAKPTLLDQIREAQKNDPDMRGLLKNMKQGKAAGFTEDEHGTLWNGNRVCVPDDRELKQLKLQEAHESPYSIHPGSTKMYLDLKEKYWWVSMQREIAEFVALCDVCQRVKAEHQRPAGLLQPLQVPEWKWDEIGMDFITGLPKTQGGYNSIWVVVDRLTKVARFIPVKTTYGGNKLAELYFARIVSLHGVPKKIVSDRGSQFTSHFWKKLQEELRTRLNFSTAYHPQTDGQTERLNQILEDMLRACVLDFGKTWDKSLPYAEFSYNNSYQASIQMAPYEALYGRKCRTPLLWDQVGESQVFGTDILREAEAKVRTIRDNLKVAQSRQKSYADNRRCNLEFAVDDFVYLRVTPLRGVHRFQTKGKLAPRFVGPFRIIARRGEVAYQLELPASLGNVHDVFHVSQLKKCLRVPSEQADSEQIEVREDLTYVERPVKILDTMERRTRNRVIRFCKVQWSNHAEEEATWEREDEPRELRRRINGARDRRADFLPFGPPFLTPNLRLRRVLVDLVHSSVSPADRRNAAVLVDPSRAAAFLRFGRRFRCHRRPGVSRGPPFHFPLLSSLSGAAPRAGGRRRRPSGRGCAASRRPCRRGRLRARLAAARWGPAVSRPRLGGG

SEQ ID NO: 25927 - protein, 1753 aa, Oryza sativa; identical to SEQ ID NO: 19119
  Clone ID: TF_OsC359_7411.pep

SEQ ID NO: 25928 - protein, 2018 aa, Oryza sativa
  unsure (1)..(2018): unsure at all Xaa locations
  Clone ID: TF_OsC359_7419.pep
MAAGSSATDSPSSGRSLLLPTLHKHSPCLPPSFPPLAALSPRRNRARAVVLSLRRRRRAPVRRRRRPGPPPVSASPSSGSPRPRRSRPPLRFARRPPERRRPRRPEPRRRLPPLRSPFPSSPSTRGEPWTAHFVSPFPLLSRAPLRRAGGRRRRPSGRGCAASRRLCRRGRLRARPAAAMWGPAVSRPCPRVRLTRGTHGAXGRRKPRAPGPPWTHLGHIRTGLRASVAKHYRXFHMSSGANEGYTSCGPVVEMSWHRAGVLLLGAQSCLPVPGVPAVGGIGSMYTSDQSKIYSNSRALGYGQAEQCTQMAGSVSRRGLDMTGFVLELRGMCVVLGYPHGVDYQARPLPEQEGDDAEPHAAWEVTAVILAGSPERISLTVTAGGDSFPAACQSAALLAIGTLHQRYPDELQHSPYRYHPRRGGARDYATFRDASSEDDATIVHLARMVKAYDAARIDFHQMVRRGMVENNMKILELRQENLQLKKDLDAVEAQLHQLKIAQGEVCRPKRRRVCRSQKITARKSTSRPELVRQSLAWTCFVETPRAEPTPVVPQKGEASGVGSTEDALLLTFHGXTRRNAATSDGNQPEGSNHNNHGSPPPPPPPPPPPPPDTNAILTQILAQQANMMTAFLHHLQNPPQHNAPPPPPQHSKLAEFLRIRPPTFSSSNNPVDALDWLHAVGKKIDTVQCSDEEKVIFAAHQLQGPASLWWDHFQATQPEGQPITWARFTAAFRRTHVPAGVVALKKREFRELKQGNRSVMEYLHEFNNLARYAPEDVREDEEKQKKFLAGMDPELSVRLVSGDYPDFQRLVDKSIRLEVKHKELESHKRRLANFRNQQGANQRVRYTNPYPGGSSSQQRQQQQQPRSAPRPQFVVRVPQPQQQQSQQGTRAPRPPTPTVQPGQGRRDASGPQRLCFNCFEPGHFADKCPKPRRQQGQAPPRSNNGGKDVIRGRVNHVTAEDVLTTPDVIVGTFLIHSIPATILFDSGASHSFISVPFVGRNQLGVERLRNPLLITTPGGVMTAKYYSPAVPIEIQGIPFPSDLILLDTKNLDVVLGMNWLAQFQGVVDCARRTVTLYRGPGQPVVFFAPPTSVSSSELHQIGLSEIPIVREFGDVFPEELPGMPPKREIEFRIDLALGTTPLCKRPYRMAANELAEVKKQLEELKEKGYIRPSTSPWGAPVIFVEKKDKTKRMCVDYRALNEVTIKNKYPLPRIDDLFDQLKGATVFSKIDLRSGYHQLRIREEDFPKTAFTTRYGLYEFTVMSFGLTNAPAFFMNLMNKVFMEYLDKFVVVFIDDILIYSQSEEDHQHHLLLVLGKLREHQLYAKLSKCEFWLSEVKFLGHVISAKGVAVDPETVTAVTDWKQPKTVTQVRSFLGLAGYYRRFIENFSKIARPMTQLLKKEEKFVWSPQCEKAFRTLKEKLVASPVLILPDTRKDFIVYCDASRQGLGCVLMQDGHVVAYASRQLRPHEGNYPTHDLELAAVVHALKIWRHYLIGNRCEIYTDHRSLKYIFTQSDLNLRQRRWLELIKDYDVGIHYHPGKANVVADALSRKSHCNTLNVRGIPPELNQQMEALNLSIVSRGFLATLEAKPTLLDQIREAQKNDPDMHGLLKNMKQGKAAGFTEDEHGTLWNGNRRVKAEHQRPAGLLQPLQVPEWKWDEIGMDFITGLPKTQGGYDSIWVVVDRLTKVARFIPVKTTYGGNKLAELYFARIVSLHGVPKKIVSDRGSQFTSHFWKKLQEELGTRLNFSTAYHPQIDGQTERLNQILEDMLRACVLDFGKTWDKSLPYAEFSYNNSYQASIQMAPYEALYGRKYRTPLLWDQVGESQVFGTDILREAEAKVRTIRDNLKVAQSRQKSYADNRRRDLEFAVDDFVYLRVTPLRGVHRFRTKGKLAPRYVGPFRITARRGEVAYQLELPASLGNVHDVFHVSQLKKCLRVPSEQADSEQIVVREDLTYVERPVKILDTMERRTRNRVIRFCKVEWSNHAEEEATWEREDELKAAHPDLFASSSESRGRDSV

SEQ ID NO: 25929 - protein, 1805 aa, Oryza sativa; identical to SEQ ID NO: 19132
  Clone ID: TF_OsC359_7446.pep

SEQ ID NO: 25930 - protein, 1806 aa, Oryza sativa
  Clone ID: TF_OsC359_7451.pep
MSWHRAGVLLLGAQSCLPVPGVTAVGGIGSVLLSIARMGWKLCHVFRLYTVVMAGSVSRRGLDMTGFVLELRGMCVVLGYPHGVDYQARPLPEQEGDDAEPHAAWEVTAVILTGSPERTSLAVTAGGDSFPAACQSAALLAIGTLHQRYPDELQHSPYRYHPRRGGARDYATFRDASSEDDATIVHLACMVEAYDAARIDFHQMVRRGMVENNMKILELRQENLQLKKDLDAVEAQLHQLKIAQGEVCRPKRRRVCRSQKITARKSTSRPELVRQSLAWTCFMETPRAEPAPMVPQEGEASGVGSTEDALLLTFRPGPSQRRSVNTGDGNQPEGSNHNNHGSPPPPPPPPPPPPPDTNAILTQILAQQANMMTAFLHHLQNPLQQNAPPPPPQHSKLAEFLRIRPPTFSSSNNPVDALDWLHAVGKKLDTVQCSDEEKVIFAAHQLQGPASLWWYHFQATQPEGQPITWARFTAAFRRTHVPAGVVALKKREFRELKQGNLSVMEMCGKMRRSKRSSGMDPELSVRLVSGDYPDFQRLVDKSIRLEAKHKELESHKRRLANFRNQQGANQRVRYTNPYPGGSSSQQQQQQQPRSAPRPQFVVRVPQPQQQQSQQGTRAPRPSTPTVQPGQGRRDAQGPQRLCFNCFEPGHFADKCPKPRRQQGQAPPRSNNGGKDVIRGRVNHVTAEDVLTTPDVIVGTFLIHSIPATILFDSGASHSFISVPFVGRNQLGVERLRNPLLITTPGGVMTAKYYSPAVPIEIQGIPFPSDLILLDTKNLDVILGMNWLAQFQGVVDCARRTVTLYRGPEQPVVFFAPPTSVSSSELHQIGLSEIPIVREFGDVFPEELPGMPPKREIEFRIDLAPGTTPLYKRPYRMAANELAEVKKQLEELKEKGYIRPSTSPWGAPVIFVEKKDKTKRMCVDYRALNEVTIKNKYPLPRIDDLFDQLKGATVFSKIDLRSGYHQLRIREEDIPKTAFTTRYGLYEFTVMSFGLTNAPAFFMNLMNKVFMEYLDKFVVVFIDDILVYSQTEEDHQHHLRLVLGKLREHQLYAKLSKCEFWLSEVKFLGHVISAKGVAVDPETVTAVTDWRQPKTVTQIRSFLGLAGYYRRFIENFSKIARPMTQLLKKEEKFVWSPQCEKAFQTLKEKLVSSPVLILPDTRKDFMVYCDAARQGLGCVLMQDGHVVAYASRQLRPHEGNYPTHDLELAAVVHALKIWRHYLIGNCCEIYTDHKSLKYIFTQSDLNLRQRRWLELIKDYDVGIHYHPGKANVVADALSRKSHCNTLNVRGIPLELNQQMEALNLSIVGRGFLAALEAKPTLLDQIREAQKNDPDMRGLLKNMKQGKATGFTEDEHGTLWNGNRVCVPDNRELKQLILQEAHESPYSIHPGSTKMYLDLKKKYWWVSMKREIAEFVALCDVCQRVKAEHQRPAGLLQPLQVPEWKWDEIGMDFITGLPKTQGGYDSIWVVVDRLTKVARFIPVKTTYGGNKLAELYFARIVSLHGVPKKIVSDRGSQFTSHFWKKLQEELGTRLNFSTAYHPQTDGQTERLNQILEDMLRACVLDFGKTWDKSLPYAEFSYNNSYQASIQMAPYEALFQTKGKLAPRFVGPFRIIARRGEVAYQLELPASLGNVHDVFHVSQLKKCLRVPSEQADSEQIEVREDLTYVERPVKILDTMERRTRNRVIRFCKVQWSNHAEEEATWEREDERRAPVRRRRRPGPSPASASPPSASPHPRRPRPPLRFGRRPPERRRPRRPVPHRRLSPLRSPFPSSPSTRGEPWTAVSFPPSLPSLGRRSAVPMAAAGDH

SEQ ID NO: 25931 - protein, 1655 aa, Oryza sativa
  unsure (1)..(1655): unsure at all Xaa locations
  Clone ID: TF_OsC359_7468.pep
MAGSVTRRGLDMTGFVLELRGMCVVLGYPHGVDYQARPLPEQEGEDAEPHAGWEVTAVILSGSPERTSLAVTAGGDSFPAACQNAALLAIGTLHQRYPDELQHSPYRYHPRRGGARDYATFRDASSEDDATVVHLARMVEAYDAARIDFHQMVRRGMVENNMKILELRQENLQLKKDLDAVEAQLHQLKIAQGEVCRPKRRRVCRSQKITARKSTSRPELVRQSLAWTCFVETPRAEPTPVVPQKGEASGVDGETRRNAATSDGNQPEGSNHNNHGSPPPPPPPPPPPPPDTNAILTQILAQQANMMTAFLHHLQNPPQHNAPPPPPQHSKLAEFLRICPPTFSSSNNPVDALDWLHAVGKKLDTVQCSDEEKVIFAAHQLQGPASLWWDHFQATQPEGQPITWARFTAAFRRTHVPAGVVALKKREFRELKQGNRSVMEYLHEFNNLARYAPEDVREDEEKQEKFLAGMDPELSVCLVSGDYPDFQRLVDKSIRLEAKHKELESHKRRLANFHNQQGANQRVRYTNPYPGGXLLAAATAAAATSLRASTSIRGARPTAAAADESTRDSCAXPPPPTVQPGQGRRDAQGPQRLCFNCFEPGHFADKCPKPRHQQGQAPPRPNNGGKDVIRGRVNHVTAEDVLTTPDVIVGTFLIHSIPATILFDSGASHSFISVPFVGRNQLGVERLRNPLLITTPGGVMTAKYYSPAVPIEIQGIPFPSDLILLDTKNLDIGLSEIPIVREFGDVFPEELPGMPPKREVEFRIDLAPGTAPLYKRPYRMAANELAEVKEQLEELKEKGYIRPSTSPWGAPVIFVEKKDKTKRMCVDYRALNEVTIKNKYPLPRIDDLFDQLKGATVFSKIDLRSGYHQLRIREEDIPKTAFTTRYRLYEFTVKSFGLTNAPAFFMNLMNKVFMEYLDKFVVVFIDDILIYSQSEEDHQHHLRLVLGKLREHQLYAKLSKCEFWLSEVKFLGHVISAKGVAVDPETVTAVTDWKQPKTVTQVRSFLGLAGYYRRFIENFSKIARPMTQLLKKEEKFVWSPQCEKTFKTLKEKLVSSPVLILPDTRKDFMVYCDASRQGLGCVLMQDGHVVAYASRQLRPHEGNYPTHDLELAAVVHALKIWRHYLIGNRCEIYTDHKSLKYIFTQSDLNLRQRRWLELIKDYDVGIHYHPGKANVVADALSRKSHCNTLNVRGVPPELNQQMEALNLSIVSRGFLAALEAKPTLLDQIREAQKNDPDMHGLLKNMKQGKAAGFTEDEHGTLWNGNRVCVPVNRELKQLILQEAHESPYSIHPGSTKMYLDLKEKYWWISMKREIAEFVALCDVCQCVKAEHQRPAGLLQPLQVPEWKWDEIGMDFITGLPKTQGGYDSIWVVVDRLTKVARFIPVKTTYGGNKLAELYFARITDGQTERLNQILEDMLRACVLDFGKTWDKSLPYAEFSYNNSYQASIQMAPYEALYGRKCRTPLMWDQVGESQVFGTDILREAEAKVRTIRDNLKVAQSRQKSYADNRRRDLEFAVDDFVYLRVTPLRGVHRFRTKGKLAPRYVGPFRIVARRGEVAYQLELPASLGNVHDVFHVSQLKKCLRVPSEQADSEQIEVREDLTYVERPVKILDTMERRTRNRVIRFCKVQWSNHAEEEATWEREDELKAAHPDLFA

SEQ ID NO: 25932 - protein, 1382 aa, Oryza sativa
  Clone ID: TF_OsC359_7471.pep
MSWHRAGVLLLGAQSCLPVPRVPAVGGIGSVLLSMARMGWKLCHVFRPYTVVMAGSISRRGLDLTGFVLELRGMCVVLGYPHGVDYQGRPLPEQEGDDAEPHAAWEVTAVILTGSPERTSLAVTAGGDSFPAACQNAALLAIGTLHQRYPDELQHSPYRYHPRRGGARDFATFRDASSEDDATIMHLARMVEAYDAARIDFHQMVRRGMVENNMKILELRQENLQLKKELDAVEAQLHQLKIAQGEVCRPKRRRVCRSQKITARKSTSRPELVRQSLAWTCFVETPRAEPAPVVPQEGEASGVGSTEDALLLTFRPGPSQRRSANTGDGNQPEGSNHNNHGSPPPPPPPPPPPPPDTNAILTQILAQQANMMTAFLHHLQNPPQQNAPPPPPQHCKLAEFLRIRPPTFSSSNNPVDALDWLHAVGKKLDTVQCSDEEKVIFAAHQLQGPASLWWDHFQATQPEGQPITWARFTAAFRRTHVPAGVVALKKREFRELKQGNRSVMEYLHEFNNLARYALEDVREDEEKQEKFLAGMDPELSVRLVSGDYPDFQRLVDKSIRLEAKHKELESHKRRLANVRNQQGANQRVRYTNPYPGGSSSQQQQQQQPRSAPRPQFVVRVPQPQQQQSQQGTRVPRPPTPAAQSGQGRRDASGPQRLCFNCFEPGHFADKCPKPRRQQGQAPPRSNNGGKDVIRGRVNHVTAEDVLTTPDVIVGTFLIHSIPATILFDSGASHSFISVPFVGRNQLGVERLRNPLLITTPGGVMTAKYYSPAVPIEIQGIPFPSDLILLDTKNLDVILGMNWMAQFQGVVDCARRTVTLYRGPEQSVVFFAPPTSVSSSELHQIGLSEIPIVREFGDVFPEELPGMPPKREIEFRIDLAPGTTPLYKRPYRMAANELAEVKKQLEELKEKGALNEVTIKNKYPLPRIDDLFDQLKGATVFSKIDLRSGYHQLRIREEDIPKTAFTTRYGLYEFTVMSFGLTNAPAFFMNLMNKVFMEYLDKFVVVFIDDILVYSQSEEDHQHHLRLVLGKLREHQLYAKLSKCEFWLSEVKFLGHVISAKGVAVDPETVTAVTDWKQPKTVTQVRSFLGFAGYYRRFIENFSKIARPMTQLLKKEEKFVWSPQCEKAFQTLKEKLVSSPVLTLPDTRKDFMVYCDASRQGLGCVLMQDGHVVAYASRQLRPHEGNYPTHDLELAAVVHALKIWRHYLIGNRSEIYTDHKSLKYIFTQSDLNLRQRRWLELIKDYDVGIHYHPGKANVVADALSRKSHCNTLNVRGIPPELNQQMEALNLSIVGRGFLVALEAKPTLLDQIREAQCRDRENCLFPNASVLIPVPGKAGTGTTETNGEGTASAAILGQRRDAAGTRLDDAEPRTEARTGLQRLA

SEQ ID NO: 25933 - protein, 1791 aa, Oryza sativa; identical to SEQ ID NO: 19173
  Clone ID: TF_OsC359_7495.pep

SEQ ID NO: 25934 - protein, 1697 aa, Oryza sativa
  Clone ID: TF_OsC359_7522.pep
MAGSVTRRGLDMTGFILELRGMCVVLGYPHGVDYQARPLPEQEGDDAEPHAAWEVTAVILSGSPERTSLAVTAGGDSFPAACQNAALLAIGTLHQRYPDELQHSPYRYHPRRGGARDYATFRDASSEDDATIVHLARMVEAYDAARIDFHQMVRRGMVENNLKILELRQENLQLKKDLDAVEAQLHQLKIAQGEVCCPKRRRVCRSQKITARKSTSRPELVRQSLAWTCFVETPRAEPAPVVPQEGEASGVGSTEDALLLTFRPGPSQRRNAATGDGNQPEGSNHNHQGNPPPPPPPPPPPPPDTNAILTQILAQQANMMTAFLHHLQNPPQQNAPPPPPQHSKLAEFLRIRPPTFSSSNNPVDALDWLHAVGKKLDTVQCSDEEKVIFAAHQLQGPASLWWDHFQATQPEGQPITWARFTAAFRRTHVPAGVVALKKREFRELKQGNRSVMEYLHEFNNLARYAPEDVREDEEKQEKFLAGMDPELSVRLVSGDYPDFQRLVDKSIRLEAKHKELESHKRRLANFRNQQGANQRVRYTNPYPGGSSSQQQQQQQQPRSAPRPQFVVRVPQPQQQQNQQGTRAPRPPTPTVQSGQGRRDAQGQQRLCFNCFEPGHFADKCPKPRRQQGQAPPHSNNGGKDVIRGRVNHVTAEDVLTTPDVIVGTFLVHSIPATILFDSGASHWFISVPFVGRNQLGVERLRNPLLITTPGGVMTAKYYSPAVPIEIQGIPFPSDLILLDTKNLDVILGMNWLAQFQGVVDCARRTVTLYRGPEQPVVFFAPPTSVSSSELHQIGLSEIPIVREFGDVFPEELPGMPPKREIEFRIDLAPGTTPLHKRPYRMAANELAEVKKQLEELKEKGYIRPSTSPWGAPVIFVEKKDKTKRMCVDYRALNEVTIKNKYPLPRIDDLFDQLKGATVFSKIDLRSGYHQLRIREEDIPKTAFTTRYGLYEFTVMSFGLTNAPAFFMNLMNKVFMEYLDKFVVVFIDDILVYSQSEEDHQHHLRLVLGKLREHQLYAKLSKCEFWLSEVKFLGHVISAKGVSVDPETVTTVTDWKQPKTVTQVRSFLGLAGYYRRFIENFSKIARPMTQLLKKEEKFVWSPQCEKAFQTLKEKLVSSPVLILPDTRKDFMVYCDASRQGFGCVLMQDGHVVAYASRQLRPHEGNYPTHDLELAAVVHALKIWRHYLIGNRCEIYTDHKSLKYIFTQSDLNLRQRRWLELIKDYDVGIHYHPDMRQGKAAGFTEDEHGTLWNGKRVCVPDSRELKQLILQEAHESPYSIHPGSTKMYLDLKEKYWWVSMKREIAEFVALCDVCQRVKAEHQRPAGLLQPLQVPEWKWDEIGMDFITGLPKTQGGYDSIWVIVDRLTKVARFIPVKTTYGGNKLAELYFARIVSLHGIPKKIVSDRGSQFTSHFWKKLQEELGTRLNFSTAYHPQTDGQTERLNQILEDMLRACVLDFGKTWDKSLPYAEFSYNNSYQASIQMAPYEALYGRKCRTPLLWDQVGESQVFGTDILREAEAKVRIIRDNLKVAQSRQKSYADNRRRDLEFAVDDFVYLRVTPLRGVHRFQTKGKLAPRYVGPFRIIARRGEVAYQLELPASLGNVHDVFHVSQLKRCLRVPSEQADSEQIEVREDLTYVERPVKILDTRERRTRNRVIRFCKVQWSNHAEEEATWEREDELKAAHPDLFASSSESRGRDSV

SEQ ID NO: 25935 - protein, 1125 aa, Oryza sativa
  unsure (1)..(1125): unsure at all Xaa locations
  Clone ID: TF_OsC359_7570.pep
MDEVGGRWTFSRANEGYTSCGPVVEMSWHRAGVLLLGAQSCLPVPGVPAVGGIGSMYTSDQSIIYSNSRALGYGQAEQCTQMAGSVTRRGLHMTGFVLELRGMCVVLGYPHGVDYQARPLPEQEGDDAEPHAGWEVTAVILSGSPERTSLAVTAGGDSFPAACQNVALLAIGTLHQRYPDELQHSPYRYHPRRGGARDYATFRDASSEDDATIVHLARMVEAYDAARIDFHQMVPRGMVENNMKILELRQENLQLKKDLDAVEAQLHQLKIAQGEVCRPKRRRVCRSQKITARKSTSRPELVRQSLAWTCFVETPRAEPAPVVPQEGEASGVGXHGGCAVAHLPSWPVAAVDEQLVGLRMVTTRRNAATGDGNQPEGSNHNHQGNPPPPSPSPSPPPPDTNAILTQILAQQANMMTAFLHHLQNPPQQNAPPPPPQHSKLAEFLRIRPPTFSSSNNPVDALDWLHAVGKKLDTAQCSDEEKVIFAAHQLQGPASLWWDHFQATQPEGQPITWARFTAAFRRTHVPAGVVALKKREFRELKQGNRSVMEYLHEFNNLARYAPEDVREDEEKQEKFLAGMDLELSVRLVSGDYPDFQRLVDKSIRLEAKHKELESHKRRLANFRNQQCANQRVRYTNPYPGGSSSQQQQQQQQPRSAPRPQFVVRVPQPQQQQNQQGTRAPRPPTPTVQPGQGRRDAQGQQRLCFNCFEPGHFADKCPKPRRQQGQAPPRSNNGGKDVIRGRVNHVTAEDVLTTPDVIVGTFLVHPIPATILFDSGASHSFISVPFVGRNQLGVERLRNPLLITTPGGVMTAKYYSPAVPIEIQGIPFPSDLILLDTKNLDVILGMNWLAQFQGVVDCARRTVTLYRGPEQPVVFFAPPTSVSSSELHQIGLSEIPIVREFGDVFPEELPGMPPKREIEFRIDHAPGTTPLHKRPYRMAANELAEVKKQLEELKEKGYIRPSTSPWGAPVIFVEKKDKTKRMCVDYRALNEVTIKNKYPLPRIDDLFDQLKGATVFSKIDLRSGYHQLRIREEDIPKTAFTTRYGLYEFTGMSFGLTNAPAFFMNLMNKVFMEYLDKFVVVFIDDILIYSQSEGDHQHHLRLVLGKLREHQLYTCLSRPKTTLKYIL

SEQ ID NO: 25936 - protein, 1799 aa, Oryza sativa; identical to SEQ ID NO: 19135
  Clone ID: TF_OsC359_7601.pep

SEQ ID NO: 25937 - protein, 1917 aa, Oryza sativa
  Clone ID: TF_OsC359_7609.pep
MGKPSNKRSSLEMKALVSSSCLPSSACGRRPSLPLFPMAGSVTRRGLDMTGFVLELRGMCVALGYPHGVDYQARPLPEQEGDDAEPHAGWEVTAVILAGSPERTSLTVTAGGDSFPAACQSAALLAIGTLHQRYPDELQHSPYRYHPRHGGARDYATFRDASSEDDATIVHLARMVEAYDAARIDFHQMVRRGMVENNMKILELRQENLQLKKDLDAVEAQLHQLKIAQGEVCRPKRRRVCRSQKITARKSTSRPELVRQSLAWTCFVETPRAEPAPVVPQEGEASGVGSTEALSLFAGSVWGFQMVTTRRNANTGDGNQPESSNHNHQGNPPPPPPPPPPPPPDTNAILTQILAQQANMMTAFLHHLQNPPQHNAPPPPPQHSKLAEFLRIRPPTFSSSNNPVDALDWLHAVGKKLDTVQCSDEEKVIFAAHQLQGPASLWWDHFQATQPEGQPITWARFTAAFRRTHVPAGVVALKKREFRELKQGNRSVMEYLHEFNNLARYAPEDVREDEEKQEKFLAGMDPELSVRLVSGDYPDFQRLVDKSIRLEAKHKELESHKRRLANFRNQQGANQRVRYTNPYPGGSSSQQQQQQQQPRSAPRPQFVVRVPQPQQQQNQQGTRAPHPPTPTVQSGQGRRDAQGQQRLCFNCFEPGHFADKCPKPRRQQGQAPPRSKNGGKDVIRGRVNHVTAEDVLTTPDVIVGTFLVHSIPATILFDSGASHSFIFVPFVGRNQLGVERLRNPLLITTPGGVMTAKYYSPAVPIEIQGIPFPSDLILLDTKNLDVILGMNWLAQFQGVVDCARRTVTLYRGPAQPVVFFAPSTSIRSSELHQIGLSEIPIVREFGDVFPEELPGMPPKREIEFRIDLAPGTTPLHKRPYRMAANELAEVKKQLEELKEKGYIRPSTSPWGAPVIFVEKKDKTKRMCVDYRALNEVTIKNKYPLPRIDDLFDQLKGATVFSKIDLRSGYHQLRIREEDIPKTAFTTRYGLYEFTVMSFGLTNAPAFFMNLMNKVFMEYLDKFVVVFIDDILIYSHSEEDHQHHLRLVLGKLREHQLYAKLSKCEFWLSEVKFLGHVISAKGVAVDPETVTAVTDWKQPKTVTQVRSFLGLAGYYRRFIENFSKIARPMTQLLKKEEKFVWSPQCEKAFQTLKEKLVSSPVLILPDTRKDFMVYCDASRQGLGCVLMQDGHVVAYASRQLRPHEGNYPTHDLELAAVVHALKIWRHYLIGNRCEIYTDHKSLKYIFTQSDLNLRQRRWLELIKDYDVGIHYHPGKANVVADALSRKSHCNTLNVRGIPPELSQQMEALNLSIVSRGFLAALEAKPTLLDQIREAQKNDPDMHGLLKNMKQGKAAGFTEDEHGTLWNGKRVCVPDNRELKQLILQEAHESPYSIHPGSTKMYLDLKEKYWWVSMKREIAEFVALCDVCQRVKAEHQRPAGLLQPLQVPEWKWDEIGMDFITGLPKTQGGYDSIWVVVDRLTKVARFIPVKTTYGGNKLAELYFARIVSLHGVPKKFVSDRGSQFTSHFWKKLQEDLGTRLNFSTAYHPQTDGQTECLNQILEDMLRACVLDFGKTWDKSLPYAEFSYNNSYQASIQMAPYEALYGRKCRTPLLWDQVGESQVFGTDILREAEAKVRTIRDNLKVAQSRQKSYADNRRCDLEFAVDDFVYLRVTPLRGVHRFQTKGKLAPRYVGPFRIVARRGEVAYQLELPASLGNVHDVFHVSQLKKCLRVPSEQADSEQIEVREDLTYVERPVKILDTMERRTRNRVIRFCKVQWSNHAEEEATWEREDELLRPFPPLAALPPRRIRARDVALSLRRRRRAPVRRCRRPGPPPTSAPPHSGSPHPRQPRPPLRVGRRPPERRRPRRPEPRRCLPPLRPPPPSPPSPRGEPWTVASFPPSLPSLGHLSAAPVVAGGDH

SEQ ID NO: 25938 - protein, 2102 aa, Oryza sativa
  unsure (1)..(2102): unsure at all Xaa locations
  Clone ID: TF_OsC359_7625.pep
MAAGSSAPVSPSSGRPLSLPTLYKHSPCLPPPFPPLAAPSLRRNRARAVALSLRRHRRAPVCRRRRPGPSSASAPPPSVSPQPRRPRPPLRFARRQPERRRPRLPEPRRRLPPLRSPFPSSPSTRGELWTAXFVSPFPPLSRAPLYRAGGHRRRPSXGRGCAASRRLCRRGRLRARPAAAMWGPAVSRPRPRVRLTRGTHGAGRCEPGAPGPPWTHLGHIRTGLRASVAKHYRXFHMSSGANEGYTSCGPVVEMSWHRAGVLLLGAQSCLPVPGVPGVGGIGSMYTSDQSIIYSNSRALGYGQAEQCTQMAGSVSRRGLDLTGFVLELRGMCVVLGYPHGVDYQGRPLPEQEGDDAEPHAAWEVTAVILTGSPERTSLAVTAGGDSFSAACQSAALLAISTLHQRYPDELQHSPYRYHPRRGGARDYATFRDASSEDDATIMHLARMVEAYDAARIDFHQMVRHGMVENNLKILKLRQENLQLKKDLDAVEAQLHQLKIAQREVCRPQRRRVCRSQKITARKSTSRPELVRQSLAWTCFVETPRAEPAPVVPQEGEASGVGSMEDALLLTFHGXTRRNAATSDSNQPEGSNHNNHGSPPPPPPPPPPPPPDTNAILTQILAQQANMMAAFLHHIQNPPQHNAPPPPPQHSKLAEFLRIRPPTFSSSNNPVDALDWLHAVGKKLDTVQCSDEEKVIFAAHQLQGPASLWWDHFQATQLEGQPITWARFTAAFRRTHVPAGVMALKKREFRELKQGNRSVMEYLHEFNNLARYAPEDVREDEEKQEKFLAGMDPELSVRLVSGDYPDFQRLVDKSIRLEAKHKELESHKRRLANFRNQQGANQRIRYTNPYPGGSSSQQQQPRSAPRPQFVVRVPQPQQQQSQQGTRAPRPPTPAAQSGQGRRDVQGPQRLCFNCFEPGHFADKCPKPRRQQGQAPPHSNNGGKDVIWGRVNHVTAEDVLTTPDVIVGTFLIHSIPATILFDSGASHSFISVPFVGRNQLGVERLRNPLLITTPGGVMTAKYYSPAVPIEIQGIPFPSDLILLDTKNLDVILGMNWLAQFQGVVDCARRTVTLYRGPEXPVVFFAPPTSVSSSELHQIGLSEIPIVREFGDVFPEELPGMPPKREIEFRIDLAPGTTPLYKRPYRMAANELAEVKKQLEELKEKGYIRLSTSPWGAPVIFVEKKDKTKRMCVDYRALNEVTIKNKYPLPRIDDLFDQLKGATVFSKIDLRSGYHQLRIREEDIPKTAFTIRYGLYEFTVMSFGLTNAPAFFMNLMNKVFMEYLDKFVVVFIDDILVYSQSEEDHQHHLRLVLGKLREHQLYAKLSKCEFWLSEVTDWKQPKTVTQIRSFLGLAGYYRRFIENFSKITRPMTQLLKKEEKFVWSPQCEKAFKTLKEKLVSSPVLILLDTRKDFMVYCDASRQGLGXVLMQDGHVVAYASRQLRPHEGNYPTHDLELAAVVHALKIWRHYLIGNRCEIYTDHKSLKYIFTQSDLNLRQRRWLELIKDYDVGIHYHPGKANVVADALSRKSHCNTLNVRGIPPELNQQMEALNLSIVGRGFLAALEAKPTLLDQIREAQKNDPDMHGLLKNMKQGKATGFTEDEHGTLWNGNRRVKAEHQRLAGHLQPLQVPEWKWDEIGMDFITGLPKTQGGYDSIWVVVDRLTKVARFILVKATYGGNKLAELYFARIVSLHGVPKKIVSDRGSQFTSHFWKKLQEELGTRLNFSTAYHPQTDGQTERLNQILEDMLRACVLDFGKTWDKSLPYAEFSYNNSYQASIQMAPYEALYGRKCRTPLLWDQVGESQVFGTDILREAEAKVRTIRDNLKVAQSRQKSYVDNRRRDLEFAVDDFVYLRVTPLRGVHRFQTKGKLAPRFVGPFRIIARRGEVAYQLELPASLGNVHDVFHVSQLKKCLRVPSEKADSEXIEVREDLTYVERPVKILDTMERRTRNRVIRFFKVHWSNHAEEEATWEREDEPPRASLHRFRHSPLSLPAGIELAPSPSLSVVAAELRSAAVVAPDHLSPRRHLLRLRRIPGDLVHPSVSLADRRSTVDPVHPSRAAAFLRSGRRFRLRRRPGVSRGPPLLFPLPFPSLGRRSAVPMDAAGDH

SEQ ID NO: 25939 - protein, 1755 aa, Oryza sativa
  Clone ID: TF_OsC359_7654.pep
MDISRTNEGYTSCGPVVEMSWHSAGVLLLGAQSCLPILEVPAVGGVGSVLLSMARMGWKLCHVFRPYAVVMAGSVNRHGLDLCGFVLELRGMCIVLGYPHGVDYQGKKLPEQDGDDAEPHAAWEVTAVILTGSPERTSLAVTAGGDSFSAACQNAALLAIGTLHQRYPDELQHSPYRYHPRRGGARDYATFWDASSEDDATIMHLACMVEAYDAARIDFHHMVRRGLVENNMKILELRQENLQLKKDLDAVEAQLFQLKIAQGEVCHPKRRRVCRSLKITARKSTFRPELVRQSLAWTCFVETPCAEPAPVVPQEEEASGVGSTEDMVTTRRSAVAGDGNQPEGSNPNTQGGPPPPPPPPPPPPPDTNPILTQILAQQANMMAAFLHHIQNPPQHNAPPPPPPQHSKLAEFLRIRPPTFSSSNNPVDALDWLHAVGKKLDTVQCNNEEKIIFATHQLQGPASLWWDHFQATQPEGHPITWARFTAAFRRTHVPAGVMALKKREFRELKQGNRSVMKYLHEFNNLARYAPEDVREDEEKQEKFLVGMDPELSVRLVSGDYPDFQRLQQQQPQPRFAPRPQFVVRVPQPQQQQSQQGTRALRPPAPAVQLGQGRMDAQGQQRLCFNCFEPGHFADKCPKPRRQQGQAPPCPNNGGNDVARGRVNHVTAEDVLTTPDVIVGTFLIHSIPATILFDSGASYSFISVPFVGRNQLGVERPRNPLLITTPGGDMTAKYYSPTVPIEIQGIPFPFDLILLDTNNLDVILGMNWLAQFQGVVDCARRTVILYQGPKQPVVFFAPPTSVGSSELHQIGLSEIPIVSEFGDVFPEELPGMPPKREIEFRIDLAPGTTPLYKRPYRMAANKLAEVKKQLEELKKKGALNEVTIKNKYPLPRINDLFDQLKGAIVFSKIDLRSGYHQLRIREEDIPKTAFTTRYGLFEFTVMSFGLTNAPAFFMNLMNKVFMEYLDKFVVVFIDDILLSKCEFWLSEVTDWKQPKTVTQIRSFLGLAGYYRRFIENFSKITRPMTQLLKKEEKFVWSPQCEKAFKTLKEKLVSSPVLILLDTRKDFMDGHVVAYASRQLRPHEGNYPTHDLELAAVVHALKIWRHYLIGNRCEIYTDHKSLKYIFTQSDLNLRQRRWLELIKDYDVGIHYHPGKANVVADALSRKSHCNTLNVRGIPPELNQQMEALNLSIVGRGFLAALEAKPTLLDQIREAQKNDPDMHGLLKNMKQGKATGFTEDEHGTLWNGNRVCVPDNRELKQLILQEAHESPYSIHPGSTKMYLDLKEKYWWVSMKREIVEFVALYDVCQRVKAEHQRPAGLLQPLQVPEWKWDEIGMDFITGLPKTQGGYDSIWVVVDRLTKVARFIPVKATYGGNKLAELYFARIVSLHGVPKKIVSDRGSQFTSHFWKKLQEELGTRLNFSTAYHPQTDGQTERLNQILEDMLRACVLDFGKTWDKSLPYAEFSYNNSYQASIQMAPYEALYGRKCRTPLLWDQVGESQVFGTDILREAKAKVRTIRDNLKVAQSRQKSYADNRRRDLEFAVDDFVYLRVTPLRGVHRFQTKGKLAPRFVGPFRIIARRGEVAYQLELPASLGNVHDVFHVSQLKKCLRVPSEQADSEQIEVREDLTYVERPVKILDTMERRTRNRVIRFCKVQWSNHAEEEATWEREDELLPLRHRLLRLRHVLADLVHSSVSPADRRNTAVLVNPSRAAAFLRSGRRFRRPRRPGVSRGPTLSLPPSLPSLGRRSAASVVAGGDH

SEQ ID NO: 25940 - protein, 1786 aa, Oryza sativa; identical to SEQ ID NO: 19217
  Clone ID: TF_OsC359_7656.pep

SEQ ID NO: 25941 - protein, 2045 aa, Oryza sativa
  unsure (1)..(2045): unsure at all Xaa locations
  Clone ID: TF_OsC359_7699.pep
FPASFPPLFPLSLSDSFGNPPANFAGVIDGAEIAAPVSFPSGRPLSLPTLFKHSPCLPPPFPTLAAFSPRRNRARAVVLSLRRCRRASVRRRRRPGPPPASASPPSASPRPRRPRPPLRFARRPPERRRPRRPEPRRRLSPLRSPFPSSPSTRGEPRTXHLASPFPPLSRAPLRRAGGRRRXPSGRGRAASRRPCRRGRHRARPAAAMWGPAVSRPRPRVRLTRGTHGAGRRKPCAPGPPWTHLGHIRTGVRASVAKHYRXFHMSSGANEGYTSCGPVVEMSWHRAGVLLLGAQSCLPVPGVPAVDGIGSMYTSDQSKIYSNSRALGYGQAEQCTQMAGSVSRRGLDMTGFVLELRGMCVVLGYPHGVDYQARPFPEQEGDDAEPHAAWEVTAVILAGSPERTSLTVTAGGDSFPAACQSAALLAIGTLHQRYPDELQHSPYRYHPRRGGARDYATFRDASSEDDATIVHLARMVEAYDAARIDFHQMVRRGMVENNMKILELRQENLQLKKDLDAVEAQLHQLKIAQGEICRPKHRRVYRSQKITARKSTSRPELVRQSLAWTCFVETPRAEPAPVVPQEGEASGVGSTEDALLLTFHGXTRRNAATSDGNQPEDSNHNNHGSPPPPPPPPPPPPPDTNAILTQILAQQANMMTAFLHHLQNPPQHNAPPPPPQHSKLAEFLRICPPTFSSSNNPVDALDWLHAVGKKLDTVQCSDEEKVIFAAHQLQGPASLWWDHFQATQPEGQPITWARFTAAFRRTHVPAGVVALKKREFRELKQGNRSVMEYLHEFNNLARYAPEDVREDEEKQEKFLAGMDPELSVCLVSGDYPDFQRLVDKSIRLEAKHKELESHKRRLANFHNQQGANQRVRYTNPYPGGSSSQQQQQQQQPRSAPRPQFVVRVPQPQQEQNQQGTRAPRPPPPTVQPGQGRRDAQGPQRLCFNCFEPGHFADKCPKPRRQQGQAPPRPNNGGKDVIRGRVNHVTAEDVLTTPDVIVGTFLIHSIPATILFDSGASHSFISVPFVGRNQLGVERLRNPLLITTPGGVMTAKYYSPAVPIEIQGIPFPSDLILLGTKNLDVILGMNWLAQFQGVVDCARRTVTLYRGPEQPVVFFAPPTSVRSSELHQIELSEIPIVREFGDVFPEELPGMPPKREIEFRIDLAPGTAPLYKRPYRMAANELAEVKKQLEELKEKGYIRPSTSPWGAPVIFVEKKDKTKRMCVDYRALNEVTIKNKYPLPRIDDLFNQLKGATVFSKIDLRSGYHQLRIREEDIPKTAFTTRYGLYEFTVMSFGLTNAPAFFMNLMNKVFMEYLDKFVVVFIDDILIYSQSEEDHQHHLRLVLGKLREHQLYAKLSKCEFWLSEVKFLGHVISAKGVAVDPETVIAVTDWKQPKTVTQVRSFLGLAGYYRRFIENFSKIARPMTQLLKKEEKFVWSPQCEKAFQTLKEKLVSSPVLILPDTHKDFMVYCDASRQGXGCVLMQDGYVVAYASRQLRPHEGNYPTHDLELAAVVHALKIWWHYLIGNRCEIYTDHKSLKYIFTQSDLNLRQRRWLELIKDYDVGIHYHPGKANVVADALSRKGHCNTLNVRGIPPELNQQMEALNLSIVSRGFLAALEAKPTLLDQIREAQKNAPDMHGLLKNMKQGKAAGFTEDEHGTLWNGNRRVKAEHQRPAGLLQPLQVPEWKWDEIGMDFITGLPKTQGGYDSIWVVVDRLTKVARFIPVKTTYRGNKLAELYFARIVSLHGVPKKIVSDRGSQFTSHFWKKLQEELGTRLNFSTAYHLQTDGQTERLNQILEDMLRACVLDFEKTWDKSLPYAEFSYNNSYQASIQMAPYEALYGRKCRTPLMWDQVGESQVFGTDILREAEAKVRTIRDNLKVARSRQKSYADNRRRDLEFAVDDFVYLRVTPLRGVHRFRTKGKLAPRYVGPFRIVARRGEVAYQLELPASLGNVHNVFHVSQLKKCLRVPSEQADSEQIEVREDLTYVERPVKILDTMERRTRNRVIRFCKDQWSNHAEEEATWEREDELKAAHPDLFASSSESRGRDSV

SEQ ID NO: 25942 - protein, 1736 aa, Oryza sativa
  unsure (1)..(1736): unsure at all Xaa locations
  Clone ID: TF_OsC359_7713.pep
MYTSDQSKTYSNSRALGYGQAEQCTQMAGSVTRRGLDMTGFVLELRGMCVVLGYPHGVDYQARPLPDQEGDDAEPPAAWEVTAVILSGSPERTSLAVTAGGDSFPAACQNAALLAIGTLHQRYPDELQHSPYRYHPRRGGARDYATFRDASSEDDATIVHLARMVEAYDAARIDFHQMVRRGMVENNLKILELRQENLQLKKDLDAVETQLHQLKIAQGEICRPKRRRVCRSQKITARKSTSRPELVRQSLAWTCFVETPRAEPAPVVPQEGEASGVGSTEDALLLTFHXMTRRNAATGDGNQPEGSNHNHQGNPPPPPPPPPPPPPDTNAILTQILAQQANMMTAFLHHLQNPPQLNAPPPPPQHSKLAEFLRIRPPTFFSSNNPVDALDWLHAVGKKLDTVQCSDEEKVIFAAHQLQGPASLWWDHFQATQPEGQPITWARFTAAFRRTHVPAGVVALKKREFRELKQGNRSVMEYLHEFNNLARYAPEDVREDEEKQEKFLAGMDPELSVRLVSGDYPDFQRLVDKSIRLEAKHKELESHKRRLANFRNQQGANQRVRYTNPYPGGSSSQQQPQQQQQPRSAPRPQFVVRIPQPQQQQNQQGTRAPRPPTPTVQPGQGRRDAQGQQRLCFNCFEPGHFADKCPKPRRQQGQAPPRSNNGGKDVIRGRVNHVTAEDVLTTPDVIVGTFLVHSIPATILFDSGASHSFISVPFVGRNQLGVERLRNPLLITTPGGVMTAKYYSPAVPIEIQGIPFPSDLILLDTKNLDVILGMNWLAQFQGVVDCARRTVTLYRGPEQPVVFFAPPTSVRSSELHQIGLSEIPIVREFGDVFPEELPGMPPKREIEFRIDLAPGTTPLHKRPYRMAANELAEVKKQLEELKEKGYIRPSTSPWGAPVIFVEKKDKTKRMCVDYRALNEVTIKNKYPLPRIDDLFDQLKGATVFSKIDLRSGYHQLRIREEDIPKTAFTTRYGLYEFTVMSFGLTNAPAFFMNLMNKVFMEYLDKFVVVFIDDILIYSQSEEDHQHHLRLVLGKLREHQLYAKLSKCEFWLSEVKFLGHVISAKGVAVDPETVTAVTDWKQPKTVTQVRSFLGLAGYYRRFIENFSKIARPMTQLLKKEEKFVWSPQCEKAFQTLKEKLVSSPVLILPDTRKDFMVYCDASRQGLGCVLMQDGHVVAYASRQLRPHEGNYPTHDLEVAAVVHALKIWRHYLIGNRCEIYTDHKSLKYIFTQSDLNLRQRRWLELIKDYDVGIHYHPGKANVVADALSRKSHCNTLNVRGIPPELNQQMEALNLSIVSRGFLAALEAKPTLLDQIREAQKNDPDMHGLLKNMKQGKAAGFTEDEHGTLWNGKRRVKAEHQRPAGLLQPLQVPEWKWDEIGMDFITGLPKTQGGYDSIWVVVDRLTKVARFIPVKTTYGGNKLAELYFARIVSLHGVPKKIVSDRGSQFTSHFWKKLQEELGTRLNFSTAYHPQTDGQTERLNQILEDMLRACVLYFGKTWDKSLPYAEFSYNNSYQASIQMAPYEALYGRKCRTPLLWDQVGESQVFGTDILREAEAKVRIIRDNLKVAQSRQKSYADNRRRDLEFAVDDFVYLRVTPLRGIHRFQTKGKLAPRYVGPFRIIARRGEVAYQLELPASLGNVHDVFHVSQLKKCLRVPSEQADSGQIEVREDLTYVERPVKILDTMERRTRNRVIRFCKVQWSNHAEEEATWEREDELKAAHPDLFASSSESRGRDSV

SEQ ID NO: 25943 - protein, 1803 aa, Oryza sativa
  unsure (1)..(1803): unsure at all Xaa locations
  Clone ID: TF_OsC359_7732.pep
MVLMVAPRPYMDRSSGLCCKALPYFHMSSGANEGYTSCGPVVEMSWHRAGVLLLGAQSCLPVPGVPAVGGIGSMYTSDQSIIYSNSRALGYGQAEQCTQMAGSVSRRGLDMTGFVLELRGMCVVLGYPHGVDYQGRPLPEQEGDDAEPHAAWEVTAVILTGSPERTSLAVTAGGDSFSAACQSAALLAICTLHQRYPDELQHSPYRYHPRRGGARDYATFRDASSEDDATIMHLARMVEAYDAARIDFHQMVRRGMVENNLKILELRQENLQLKKDLDAVEAQLHQLKIAQGEVCRPKRRRVCRSQKITARKSTSRPELVRQSLAWTCFVENPRAEPAPVVPQEGEASGVGSTEDALLLTFHXMTRRSASTGDGNQPEGSNHNHQGSPPPPPPPPPPPPPDTNAILTQILAQQANMMIAFLHHLQNPPQHNAPPPPPQHSKLAEFLRIRPPTFFSSNNPVDALDWLHAVGKKLDTVQCSDEEKVIFAAHQLQGPASLWWDHFQATQPEGQPITWARFTAAFRRTHVPAGVVALKKREFRELKQGNRSVMEYLHEFNNLARYAPEDVRXDEEKQEKFLAGMDPELSVRLVSGDYPDFQRLVDKSIRLEAKHKELESHKRRLANFRNQQGANQRVRYTNPYPGGSSSQQQPRSAPRPQFVVRVPQPQQQQSQQGTRAPRPPTPTVQPGQGRRDAQGPQRLCFNCFEPGHFADKCPKPRRQQGQAPPRSNNGGKDVIRGRVNHVTAEDVLTTPDVIVGTFLIHSIPATILFDSGASHSFISVPFVGRNQLGVERLRNPLLITTPGGVMTAKYYSPAVPIEIQGIPFPSDLILLDTKNLDVILGMNWLAQFQGVVDCARRTVTLYRGPEQPVVFFAPPTSVRSSELHQIVLSEIPIVREFGDVFPEELPGMPPKREIEFRIDLAPGTTPLYKRPYRMAANELAEFKKQLEELKEKGYIRPSTSPWGAPVIFVEKKDKTKRMCVDYRALNEVTIKNKYPLPRIDDLFDXLKSATVFSKIDLRSGNHQLRIREEDIPKTAFTTRYGLYEFTVMSFGLTNAPAFFMNLMNKVFMEYLDKFVVVFIDDILIYSQSEEDHQHHLRLVLGKLREHQLYAKLSKCEFWLSEVKFLGHVISAKGVAMDPETVTAVTDWKQPKTVTQVRSFLGLAGYYRRFIENFSKIARPMTQLLKKEEKFVWSPQCEKAFQTLKEKLVSSLVLVLPDTRKDFMVYCDASRQGLGCVLMQDGHVVAYASRQLRPHEGNYPTHDLELAAVVHALKIWRHYLIGNRCEIYTDHKSLKYIFTQSDLNLRQRRWLELIKDYDVGIHYHPGKANVVADALSRKSHCNTLNVRGIPPELNQQMEALNLSIVGRGFLATLEAKPTLLDQIREAQKNDPDMRGLLKNMKQGKAAGFTEDEHGALWNGNRRVKAEHQRPAGLLQPLQVPEWKWDEIGMDFITGLPKTQGGYDSIWVVVDRLTKVARFIPVKTTYGGNKLAELYFARIVSLHGVPKKIVSDRGSQFTSHFWKKLQEELGTRLNFSTAYHPQTDGQTERLNQILEDMLRACVLDFGKTWDKSLPYAEFSYNNSYQASIQMAPYEALYGRKCRTPLLWDQVGESQVFGTDILREAEAKVRTIRDNLKVAQPRQKSYADNRRRNLEFAVDDFVYLRITPLRGVHRFRTKGKLAPRFVGPFRIIARRGEVAYQLELPASLGNVHDVFHVSQLKKCLRVPSEQADSEQIEVREDLTYVERPVKILDTMERRTRNRVIRFCKVQWSNHAEEEATWEREDELKAAHPDLFASSSESRGRDSV

SEQ ID NO: 25944 - protein, 269 aa, Oryza sativa
  Clone ID: TF_OsC359_7733.pep
MFGPMAFFPRLVSDVDFGAGFITSGIRAYGRSMVEEVVEAYMKLGDGQGRGVADADSESGHSACGTIVEDEAKSNTRRGGDADSDLKKSEAIGLMKSAKEFHGIALQSNKSPRQKEIGLGPLGGGDLGRRASSAESVSVMDAEAVEKQQHLDISTSGSPSINCGQAISAKGAAREFSLRMRKSVDVGFISSVHKMIRKKGFSPCLLGRIQFAWQDDCGDMREGGALLRVESEGRNYRDTGVSCYDEPGGGLSGRLGVSGEKGSTQVLVH

SEQ ID NO: 25945 - protein, 1261 aa, Oryza sativa
  unsure (1)..(1261): unsure at all Xaa locations
  Clone ID: TF_OsC359_7737.pep
MDISRTNEGYTSCGPVVEMSWHRAGVLLLGPQSCLPVPEVPAVGGVGSVLLSMARMGWKLCHVFRPYTVVVCDTWLHVRKIVTTGNNPTGVPDVRALILVPGGKAQHTQRQTRNSGRLGRRPQAQQQQNQQGTRAPRPPTPTVQPGQGRRDAQGQQRLCFNCFEPGHFADKCPKPRRQQGQAPPRPNNGGKDVIRGRVNHVTAEDVLTTPDVIVGTFLIHSIPATILFDSGASHSFISVPFVGKNQLGVERLRNPLLITTPGGVMIAKYYSPAVPIEIQGIPFPSDLILLDTKNLDVILGMNWEFGEVFPEELPGMPPKREIEFRIDLAPGTTPLHKRPYRMAANELAEVKKQLEELKEKGYIRPSTSPWGAPVIFVEKKDKTKRMCVDYRALNEVTIKNKYPLPRIDDLFDQLKGATVFSKIDLRSGYHQLRIREEDIPKTAFTTRYGLYEFTVMSFGLTNAPAFFMNLMNKVFMEYLDKFVVVFIDDILIYSQSEEDHQHHLRLVLGKLREHQLYAKLSKCEFWLSEVKFLGHVISAKGVAVDPETVTAVTDWKPPKTVTQVRSFLGLEGYYRRFIENFSKIARPMTQLLKKEEKFVWSPQCENAFQTLKEKLVSSPVLILPDTRXDFMVYCDASRQGLGXYASRQLRPHEGNYPTHDLELAAVVHALKIWRHYLIGNRCEIYTDHKSLKYIFTQSDLNLRQRRWLELIKDYDVGIHYHPGKANVVADALSRKSHCNTLNVRGIPPELNQQMEALNLSIVGRGFVAALEAKPILLDQIREAQKNDPDMHGLLKNMKQGKAAGFTEDEHGTLWNGNRVCVPDSRELKQLILLEAHESPYSIHPGSTKMYLDLKEKYWWVSMKREIAEFVALCDVCQRVKAEHQRPAGLLQPLQVPEWKWDEIGMDFITGLPKTQGGYDSIWVVVDRLTKVARFIPVKTTYGGNKLAELYFARIVSLHGVPKKIVSDRGSQFTSHFWKKLQEELGTRLNFSTAYHPQTDGQTERLNQILEDMLRACVLDFGKTWDKSLPYAEFSYNNSYQASIQMAPYEALYGRKCRTPLLWDQVGESQVFGTDILREAEAKVRIIRDNLKVAQSRQKSYADNRRRDLEFAVGDFVYLRVTPLRGVHRFQTKGKLAPRYVGPFRINARRGEVAYQLELPASLGNVHDVFHVSQLKKCLRVPSEQADSEQIEVREDLTYVERPVKILDTMERRTRNRVIRFCKVQWSNHAEEEATWEREDELKAAHPDLFASSSESRGRDSV

SEQ ID NO: 25946 - protein, 1707 aa, Oryza sativa
  Clone ID: TF_OsC359_7743.pep
MARMGWKLCHVFRLYTVVMAGSVSRRGLDMTGFVLELRGMCVVLGYPHGVDYQGRPLPEQEGDDAEPHAAWEVTAVILTGSPERTSLAVTAGGDSFPAACQNAALLAIGTLHQRYPDELQHSPYRYHPRRGGARDYAIFRDASSEDDATIMHLARMVEAYDAARIDFHQMVRRGMVGNNMKILELRQENLQLKKDLDAVEAQLHQLKIAQGEMVKTRRNAATGDGNQPEGSNHNHQGSPPPPPSPPPPPPPDTNAILTQILAQQANMMTAFLHHLQNPPQQNAPPPPPQHSKLAEFLRIRPPTFSSSNNPVDALDWLHAVGKKLDTVQCSDEEKVIFAAHQLQGPASLWTHVPAGVVALKKREFRELKQGNRSVMEYLHELNNLARYAPEDVREDEEKQEKFLAGMDPELSVRLVSGDYPDFQRLMDKSIRLEAKHKELESHKRRLANFRNQQGANQRVRYTNPYPGGSSSQQQQQQQQPRSAPRPQFVPGQGRRDAQGPQRLCFNCFEPGHFADKCPKPRRQQGQAPPRSNNGGKDVIRGRVNHVTAEDVLTTPDVIVGTFLIHSIPATILFDSGASHSFIFVPFVGRKQLGVERLRNPLLITTPGGVMTAKYYSHAVPIEIQGIPFPSDLILLDTKNLDVILRMNWLAQFQGVVDCARRTVTLYRGPEQPVVFFAPPTSVSSSELHQIGLSEIPIVREFGDVFPEELPGMPPKREIEFRIDLAPGTTPLYKRPYRMAANELAEKKDKMKRMCVDYRALNEVTIKNKYPLPRIDDMFDQLKGATVFSKIDLRSGYHQLRIREEDIPKTAFTTRYGLYEFTVMSFGLTNAPAFFMNLMNKVFMEYLDKFVVVFIDDILIYSQSEEDHQHHLRLVLGKLREHQLYAKLSKCEFWLSEVKFLGHVISAKGVAVDPETVTAVTDWKQPKTVTQVRSFLGLAGYYRRFIENFSKIARPMTQLLKKEEKFVWSPQCEKAFQTLKEKLVSSPVLILPDTRKDFMVYCDASRQGLGCVLMQDGHVVAYASRQLRPHEGNYPTHDLELAAVVHALKIWRHYLIGNRCEIYTDHKSLKYIFTQSDLNLRQRRWLELIKDYDVGIHYHPGKANVVADALSRKSHCNTLDVRGIPPELNQQMEALNLSIVGRGFLATLEAKPTLLDQIREAQKNDPDMRGLLKNMKQGKAAGFTEDEHGTLWNGNRVCVPDDRELKQLILQEAHESPYSIHPGSTKMYLDLKEKYWWVSMKREIAEFVALCDVCQRVKAEHQRPAGLLQPLQVPEWKWDEIGMDFITGLPKTQGGYDSIWVVVDRLTKVARFIPVKTTYGGNKLAELYFARIVSLHGVPKKIVSDRGSQFTSHFWKKLQEELGTRLNFSTAYHPQTDGQTERLNQILEDMLRACVLDFGKTWDKSLPYAEFSYNNSYQPSIQMAPYEALYGRKCRTPLLWDRVGESQVFGTDILREAEAKVRTIRDNLKVAQSRQKSYADNRRRNLEFAVDDFVYLRVTPLRGVHRFQTKGKLAPRYVGPFRIIARCGEVAYQLELPASLGNVHDVFHVSQLKKCLRVPSEQADSEQIEVREDLTYVERPVKILDTMERRTRNRVIHFCKVQWSNHAEEEATWEREDELLPFRRRLLRVRRDLADLVHLSVSVADRRNTAVPVGGDHRGAGAPPPVGCAGVAAFGRVPRPVHRGPWGCRVGPTPVDPVRAPSPLGSAI

SEQ ID NO: 25947 - protein, 1713 aa, Oryza sativa; identical to SEQ ID NO: 19180
  Clone ID: TF_OsC359_7797.pep

SEQ ID NO: 25948 - protein, 1822 aa, Oryza sativa
  Clone ID: TF_OsC359_7801.pep
MSWHRAGVLLLGAQSCLPVPEVPAVGGIGSVLLSMARMGWKLCHVFRLYTVVMAGSVTRRGLDMTGFVLELRGMCVVLGYPHGVDYQARPLPEQEGDDAEPHAGWEVTAVILSGSPERTSLAVTAGGDSFPAACQSAALLAIGTLHQRYPDELQHSPYRYHPRRGGARDYATFRDASSEDDATIVHLARMVEAYDAARIDFHQMVRRGMVENNMKILELRQENLQLKKDLDAVEAQLHQLKIAQGEVCRPKRRRVCRSQKITARKSTSRPELVRQSLAWTCFVEIPRAEPAPVVPQEGEASGVGSTEDALLLTFRPGPSQRRSANTGDGNQPEGSNHHHQGSPPPPPPPPPPPPPDTNAILTQILAQQANMMTAFLHHLQNPPQHNAPPPPPQHSKLAEFLRIRPPTFSSSNNPVDALDWLHAVGKKLDTVQCSDEEKVIFAAHQLQGPASLWWDHFQATQPEGQPITWARFTAAFRRTHVPAGVVALKKREFRELKQGNRSVMEYLHEFNNLARYAPEDVREDEEKQEKFLAGMDPELSVRLVSGDYPDFQRLVDKSIRLEAKHKELESHKRRLANFRNQQGANQRVRYTNPYPGGSSSQQQQQQQQPRSAPRPQFVVRVPQPQQQQNQQGTRAPRPPTPTVQPGQGRRDAQGPQRLCFNCFEPGHFADKCPKPRRQQGQAPPRSNNGGKDVIRGRVNHVTAEDVLTTPDVIVGTFLIHSIPATILFDSGASHSFISVPFVGRNQLGVERLRNPLLITTPGGVMTAKYYSPAVPIEIQGIPFSSDLILLDTKNLDVILGMNWLAQFQGVVDCARRTVTLYRGPEQPVVFFAPPTSVSSSELHQIGLSEIPIVREFGDVFPEELPGMPPKREIEFRIDLAPGTTPLYKRPYRMAANELAEVKKQLEELKEKGYIRPSTSPWGAPVIFVEKKDKTKRMCVDYRALNEVTIKNKYPLPRIDDLFDQLKGATVFSKIDLRSGYHQLRIREEDIPKTAFTTRYGLYEFTVMSFGLTNAPAFFMNLMNKVFMEYLDKFVVVFIDDILIYSQSEEDHQYHLRLVLGKLREHQLYAKLSKCEFWLSEVKFLGHVISAKGVAVDPETVTAVTDWKQPKTVTQVRSFLGLAGYYRRFIENFSKIARPMTQLLKKEEKFVWSPQCEKAFKTLKEKLVSSPVLILPDTCKDFMVYCDASRQGLGCVLMQDGHVVAYASRQLRPHEGNYPTHDLELDAVVHALKIWRHYLIGNRCEIYTDHKSLKYIFTQSDLNLRQRRWLELIKDYDVGIHYHPGKANVVADALSRKSHCNTLNVRGIPLELSQQMEALNLSIVGRGFLAALEAKPTLLDQIREAQKNDPDMHGLLKNMKQGKAAGFTEDEHGTLWNGNRVCVPDNRELKQLILQEAHESPYSIHPGSTKMYLDLKEKYWWVSMKREIAEFVALCDVCQRVKAEHQRPAGLLQPLQVPEWKWDEIGMDFITGLRKTQGGYDSIWVVVDRLTKVARFIPVKTTYGGNKLAELYFARIVSLHGVPKKIVSDRGSQFTSHFWKKLQEELGTRLNFSTAYHPQTDGQTERLNQILEDMLRACVLDFGKTWDKSLPYAEFSYNNSYQASIQMAPYEALYGRKCRTPLLWDQVGESQVFGTDILREAEAKVRTIRDNLKVAQSRQKSYADNRRRDLEFAVDDFVYLRVTPLRGVHRFRTKGKLAPRYVGPFRIVARRGEVAYQLELPASLGNVHDVFHVSQLKKCLRVPSEQADSEQIEVREDLTYVERPVKILDTMERRTRNRVIRFCKVQWSNHVEEEATWEREDELKAAHPDLFASSSESRGRDSV

SEQ ID NO: 25949 - protein, 2309 aa, Oryza sativa
  unsure (1)..(2309): unsure at all Xaa locations
  Clone ID: TF_OsC359_7868.pep
MKRVLVDGGASLSIISPAAFNALKAPGMKLQPSLPIIGVTPGHTWPLGHVELPITFGDSTNFRTERIDFDVADLNLPYNAVLGRPALVKFMAATHYAYLQMKIPGPSGPITVFGDVKVTLACAEQRADNLAVATEPQAPEASASHASKKRLTSADEESALVSFLRANSDVFEWKPSDMPGVPREVIEHRLAMRLDARPVRQKVRCQAPERQAFIREEVARLLEADFIREVIHPEWLANPVVVPKANGKLRMCIDYTDLNKACPKDPFPLPRIDQIVDSTAGFTLPKSSPAHQWSPRSPRRFPSPPAALSHSQPYLNAPRASLLRFRRPPLALPVGFELAPSSSLSAVAAELRFAAVVAPDLLPLRRRLLRLRRVLVDLVHSSVSPADRRSTIVLVDPSRAAASLRFGRRSRRRRQPGVSRGPPFRFPLPSPLSAAAPPCLWPPIYLNSRVITVLFSHAYLPLLRPYYCYCYYYLVHPRTNKTPTSEHSTHGTGFRLGSGCMVLIVAPRPYKDRSSGLCCKALPYFHMSSGANEGYTSCGPVVEMSWHRAGVLLLGAQSCLPVPGVPAVGGIGSMYTSDQSIIYSNSRALGYGQAEQCTQMAGSVTRRGLDMTGFVLELRGMCVVLGYPHGVDYQARPLPEQEGDDAEPHAAWEVTAVILAGSPERTSLTVTAGGDSFPAACQSAALLAIGTLHQRYPDELQHSPYRYHPRRGGARDHATFRDASSEDDATIVHLARMVEAYDAARIDFHQMVRRGMVENNLKILELRQENLQLKKDLDAVEAQLHQLKIAQGEICRPKRRRVCRSQKITARKSTSRPELVRXSLAWTCFVETPRAEPAPVVPQEGEASGVGSTEDALLLTFHXMTRRNANTGDGNQPEGSNHNHQGNPPPPPPPPPPPPPDTNAILTQILAQQANMMTAFLHHLQNPPQLNPPPPPPQHSKLAEFLRIRPPTFSSSNNPVDALDWLHAVGKKLDTVQCSDEEKVIFAAHQLHGPASLWWDHFQAMQPEGQPVTWARFTAAFRRTHVPAGVVALKKREFRELKQGNRSVMEYLHEFNNLARYTPEDVRKDEEKQEKFLAGMDPELSVRLVSGDYPDFQRLVDKSIRLEAKHKELESHKRRLANFRNQQGANQRVRYTNPYPGGSSSQQQQQQQQPRSAPRPQFVVRVPQPQQQQNQQGTRAPRPPTPTVQPGQGRRDASGPQRLCFNCFEPGHFADKCPKPRRQQGQAPPRPNNGGKDVSRGRVNHVTAEDVLTTPDVIVGTFLIHSIPATILFVSGASHSFISVPFVGRNQLGVQCLRNPLLIXTTRGGVMPAKYYSPAVPIEIQGIPFPSDLILLDTKILDVILGMNWLAQFQGVVDCARRTVTLYRGPEQPVVFFAPPTSVRSSELHQIGLSEIPIVREFGDVFPEELPGMPPKREIEFRIDLAPGTTPLYKRPYRMAANELAGVKKQLEELKEKGYIRPSTSPWGAPVIFVEKKDKTKRMCVDYRALNEVTIKNKYPLPRIDDLFDQLKGATVFSKIDLRSGYHQLRIREEDIPKTAFTTRYGLFEFTVMSFGLTNAPAFFMNLMNKVFMEYLDKFVVVFIDDILIYSQSEEDHQHHLRLVLGKLREHQLYAKLSKCEFWLSEVKFLGHVISAKGVAVDPETVTAVTDWKQPKTVTQVRSFLGLAGYYRRFIENFSKIARPMTQLLKKEEKFVWSPQCEKAFQTLKEKLVSSPVLILPDTRKDFMVYCDASRQGLGCVLMQDGHVVAYASRQLRPHEGNYPTHDLELAAVVHALKIWRHYLIGNRCEIYTDHKSLKYIFTQSDLNLRQRRWLELIKDYDVGIHYHPGKANVVADALSRKSHCNTLNVRGIPLELNQQMEALNLSIVGRGFLTTLEAKPTLLDQIREAQKNDPDMHGLLKNMKQGKAAGFTEDEHGTLWNGNRRVKAEHQRPAGLLQPLQVPEWKWDEIGMDFITGLPKTQGGYDSIWVVVDRLTKVARFIPVKTTYGGNKLAELYFARIVSLHGVPKKIVSDRGSQFTSHFWKKLQEELGTRLNFSTAYHPQTDGQTERLNQILEDMLRACVLDFGKTWDKSLPYAEFSYNNSYQASIQMAPYEALYGRKCRTPLLWDQVGESQVFGTDILREAEAKVRTIRDNLKVAQSQQKSYADNRRRDLEFAVDDFVYLRVTPLRGVHRFQTKGKLAPRYVGPFRIVARRGEVAYQLELPASLGNVHDVFHVSQLKKCLLVPSEQADSEQIEVREDLTYVERPVKILDTMERRTRNRVIRFCKVQWSNHAEEEATWEREDELKAAHPDLFDSSSESRGRDSV

SEQ ID NO: 25950 - protein, 1821 aa, Oryza sativa; identical to SEQ ID NO: 19141
  Clone ID: TF_OsC359_7872.pep

SEQ ID NO: 25951 - protein, 1034 aa, Oryza sativa
  unsure (1)..(1034): unsure at all Xaa locations
  Clone ID: TF_OsC359_7881.pep
MGKKLDTVQCNDEEKVIFAAHQLQGPASLWWDHYQATQPEGQPITWARFTAAFRRTHVPAGVMALKKREFRELKQGNRSVMEYLHEFNNLARYAPEDVREDEEKQEKFLAGMDPELSVRLVSGDYLDFQRLVDKSIRLEAKHKELESHKRRLTNFRNQQGANQRIRYTNPYPGGSSSQQQQQQQQPRSVPQPQFVDPRALLYPPPPSPSQQGTRAPHPPTPAVQPGQGRRDVQCQQRLCFNCFEPGHFADKCPKPRRQQGQAPPRPNNGXIGLSETLIVSEFGDVFPEELPGMPPKREIEFRIDLARGTTPLYKRPYRMAANELVEVKKQLEELKEKGALNEVTIKNKYPLPRIDDLFDQLKGATVFSKIDLRSGYHQLRIREEDIPKTAFTTRYGLYEFTVMSFGLTNAPAFFMNLMNKVFMEYLDKFVVVFIDDILLSEVKFLGHVISAKGVAVDPETVTAVTDWKQPKTVTQVRSFLGLAGYYRRFIENFSKIARPMTQLLKKEEKIVWSPQCEKAFQTLKEKLEGHVVAYASRQLRPHEGNYPTNDLVLAAVRRWLELIKDYDVGIHYHPGKANVVADALSRKSHCNTLGVRDIPSELNQQMEALNLNIVSHGFLATLEAKPTLLDQIREAQKNDPDMHGILKNMKQEFVALCDVCQRVKAEHQRPAGLLQPLQVPEWKWDEIGMDFITGLPKTQGGYDSIWVVVDRLTKVARFIPVKTTYGGSKLAELYFARIVSLHGVPKKIVSDRGSQFTSHFWKKLQEELGTRLNFSTAYHPQTDGQTERLNQILEDMLRACVLDFGKTWDKSLPYAEFSYNNSYQASIQMAPYEALYGRKCRTPLLWDQVGESQVFGTDILREAEAKVRTIRENLKVAQSRQKSYADNRRRNLEFAVDDFVYLRVTPLRGVRWFQTKGKLAPRFVGPFRIIARRGEVAYQLELPASLGNVHDVFHVSQLKKCLRVPSEQADSEQIEVREDLTYVERLVKILDNMERRTRNRVIRFCKVQWSNHAEEEATWEREDELKAAHPDLFA

SEQ ID NO: 25952 - protein, 1986 aa, Oryza sativa
  unsure (1)..(1986): unsure at all Xaa locations
  Clone ID: TF_OsC359_7928.pep
MAAGSPAPVSFPADRPLSLPTLFKPSPLLPRPFLPLAAPFPRQNRARAVVLSLLRHRRPPAGPLRSPGPPPASASSPQASPCRRXPCPPPRRARRPPKRHSPRPPEPRHRLPPLRTPPLPSPSTRGETWTTXLFPPSLPLSWPPLRCAYGRRRRPXGAGAASRRPRRRGRLRARRVAVAWGPAVSRPCPRVRLMRGAYGAGRXSPGAPGPPWTHLGHIRTGLWASVAKHYRXFHMSSGRXEKGPTCGPHMSVTRVRGGAAAAWAEFMLPLVKLYIVSTFGVPCLLGQGIIHARKERPLGYFRXDNVCXMAGNINRHGLDLTGFVLELRGMFVVLGYPHGVDYQGKKLPEQDGDDAEPRAAWEVTAVILTGSPERTSLAVTAGGDSFPAACQNAALLVIGTLHQRYLDELRHSPYSYHPRXGACDYATFRDASSEDDATIMHLARMVEAYDAARIDFHHIVRRGLVENNMKILELRQENLQLKKDLDAVEAQLCQLKIAKGEVCRPKRRRVCRNLKITARKSTSRPELVRQSLAWTCFVEIPCAESAPLVPQEEGASGVGSTEDVLLLTFHGXTRRSAVTGEGSHPEGSNPNNHDSPPPPPPXPPPPPPDTNPILTQILAQQANVMAAFLHHIQNPPQHNAPPPPPPLQHSKLAEFLRIRPPTFSSFNNPVDALDWLHAVGKKLDTVQCNDEEKVIFATHQLQGPASLWWDHFQATQPEGXPITWARFTAAFRRTHVPAGVMALKKREFRELKQGNRSVMEYLHEFNNLARYAPEDVREDEEKQQKFLAGMDPELSVHLVSRDYPDFQRLVDKSIHLEAKHKELESHKRRLANFSNQQGANQRVRYTNPYPGGSSSQQQQQQQPRPAPRPPYVVRVPQPQQQQNQQGTRAPRPPAPAVQPGQGRRDAQGQQRLCFNCFEPGHFADKCPKPRRQQGQAPPRPNNGGKDVTGGCVNHVTAEDVLTTPDVIVGTFLIHSIPATILFDSGASHSFISVPFVGRNQLGVERLRNPLLITTPGVVMTTKYYSPAVPIEIQGIPFPXDLILLDTKNLDVILGMNWLAQFQGVVDCARRTVTLYRGPDQPVVFFAXPTPAGTSVLHQLGLSVISIVSEFGDVFPEELPGMPPKREIEFRIDLAPGATPLYKRPYRMAANELAEVKKQLEELKENGYIRPSTSPWSAPVIFVEKKDKTKRMCVDYRALNEVTIKNMYPLPQIDDLFDQLKGATVFSKIDLRSGYHQLRIREEDIPKTALTTRYGLYEFTVMLFGLTNSPAFFMNLMNKVFMEYLDKFVVVFIDDILVYSESEEDHQQHLRLVLGKLREHXLYAKLSKCEFLLSEVKFLGHVISAKGVAVDPKTVTAVTDWKQPKTVTQVRSFLGLAGYYRRFIENFSKIARPMTQLLKKEEKFVWSPQCEKAFQTLKEKLVSSPVLILLDTRKDFLVYCDASRQGLGCVLMQEGHVVAYASRQLRPHEGNYPTHDLELAAVVHDLKIWRHYLIGNRCEIYTDHKSLKYIFTQSDLNLQQRRWLELIKDYDVGIHYHPSKANVVADALSRKSHCSTLGVRGIPPELNQQLEALNLSIVSYGFLAMLEAKPTLLDQIREAQKNDPDIHGILKNMKQGKAAGFTEDEHGTLWNGNHRVKAEHQRPARLLQPLQVPEWKWDEIGMDFITGVPKTQGGYDSIWVIVDRLTKVAWFIPVKTTYGGNKLAELYFARIVSLHGVPKKIVSDRGSQFTYHPQTDGQTDHPNQVLXKTWDKSLPYAEFSYNNSYQASIQMAPYEALYGRKCRTPLLWDQVGESQVFGTDILREAEAKVRTIXDNLKVAXSRQKSYADNRRRNLEFAVDDFVYLRVTLLRGVHRFQTKGKLPPRFVGPFRIIARRGEVAYQLELPASLGNVHDVFHVSQLKKCLRVPSEQADSEQIEVREDLTYVEKPVKILDTIERRTRNRVIRFCKVQWSNHAEEEATWEREDELKAAHPDLFASSSESRGRDSV

SEQ ID NO: 25953 - protein, 2015 aa, Oryza sativa
  unsure (1)..(2015): unsure at all Xaa locations
  Clone ID: TF_OsC359_7996.pep
MAAGSSTTDSPSSGRSLLLPTLHKHSPCLPPSFPPLAALSPRRNRARNVVLSLRRRRRAPVRRRRRTGPPPVSASPSSGSPRPRQSRPPLRFARRPPERRRPRRPEPRRPLSPLRSPFPSSPSTRGEPWTAHFASPFPPLSRAPLRRAGGRRRRPSGRGRAASRRLCRRGRLRARPAAAMWGPVVSRPRPRVRLTRGTHGAGRRKPRAPGPPWTHLGHIRTGVRASVAKHYRXFHMSSGANEGYTSCGPVVEMSWHRAGVLLLGAQSCLPVPGVPAVGGIGSMYTSDQSKIYSNSRALGYGQAEQCTQMAGSVSRRGLDMTGFVLELRGMCVVLGHPHGVDYQARPLPEQEGDDAEPHAAWEVTAVILAGSPERTSLTVTAGGDSFPAACQSAALLAIGTLHQRYPDELQHSPYRYHPRRGGARDYATFRDASSEDDATIVHLARMVEAYDAARIDFHQMVRRGMVENNMKILELRQENLQLKKDLDAVEAQLHQLKIAQGEICRPKHRRVYRSQKITARKSTSRPELVRQSLAWTCFVETPRAEPAPVVPQEGEASGVGSTEDALLLTFHGXTRRNAATSDGNQPEDSNHNNHGSPPPPPPPPPPPPPDTNAILTQILAQQANMMTAFLHHLQNPPQHNAPPPPPQHSKLAEFLRICPPTFSSSNNPVDALDWLHAVGKKLDTVQCSDEEKVIFAAHQLQGPASLWWDHFQATQPEGQPITWARFTAAFRRTHVPAGVVALKKREFRELKQGNRSVMEYLHEFNNLARYAPEDVREDEEKQEKFLAGMDPELSVCLVSGDYPDFQRLVDKSIRLEAKHKELESHKRRLANFHNQQGANQRVRYTNPYPGGSSSQQQQQQQQPRSAPRPQFVVRVPQPQQEQNQQGTRAPRPPPPTVQPGQGRRDAQGPQRLCFNCFEPGHFADKCPKPRRQQGQAPPRPNNGGKDVIRGRVNHVTAEDVLTTPDVIVGTFLIHSIPATILFDSGASHSFISVPFVGRNQLGVERLRNPLLITTPGGVMTAKYYSPAVPIEIQGIPFPSDLILLGTKNLDVILGMNWLAQFQGVVDCARRTVTLYRGPEQPVVFFAPPTSVRSSELHQIELSEIPIVREFGDVFPEELPGMPPKREIEFRIDLAPGTAPLYKRPYRMAANELAEVKKQLEELKEKGYIRPSTSPWGAPVIFVEKKDKTKRMCVDYRALNEVTIKNKYPLPRIDDLFNQLKGATVFSKIDLRSGYHQLRIREEDIPKTAFTTRYGLYEFTVMSFGLTNAPAFFMNLMNKVFMEYLDKFVVVFIDDILIYSQSEEDHQHHLRLVLGKLREHQLYAKLSKCEFWLSEVKFLGHVISAKGVAVDPETVIAVTDWKQPKTVTQVRSFLGLAGYYRRFIENFSKIARPMTQLLKKEEKFVWSPQCEKAFQTLKEKLVSSPVLILPDTHKDFMVYCDASRQGXGCVLMQDGYVVAYASRQLRPHEGNYPTHDLELAAVVHALKIWWHYLIGNRCEIYTDHKSLKYIFTQSDLNLRQRRWLELIKDYDVGIHYHPGKANVVADALSRKSHCNTLNVRGIPPELNQQMEALNLSIVSRGFLATLEAKPTLLDQICKAQKNDPDMHGLLKNMKQGKAAGFTEDEHGTLWNGNRRVKAEHQRPAGLLQPLQVPEWKWDEIGMDFITGLPKTQGGYDSIWVVVDRLTKVARFIPVKTTYGGNKLAELYFARIVSLHGVPKKIVSDRGSQFTSHFWKKLQEELGTRLNFSTAYHPQTDGQTERLNQILEDMLRACVLDFGKTWDKSLPYAEFSYNNSYQASIQMAPYEALYGRKCRTPLLWDQVGESQVFGTDILREAEAKVRTIRDNLKMAQSRQKSYADNRRRDLEFAADDFVYVRVTPLRGVHRFRTKGKLAPRYVGPFRITARRGEVVTTGNNPTGIPYVRALILVPGGKAQNTQRQTRNSGRLGRRPQALDGRHELDTKAFIFKELLFWTWEKLSKTEYNHRTQQDTPTNATRHIFLTCYHAPHTTTVYRRKT

SEQ ID NO: 25954 - protein, 1846 aa, Oryza sativa
  Clone ID: TF_OsC359_8144.pep
MEVDEVGGRWTFSRANEGYSCGPVVEMSWHRAGVLLLGAQSCLPVPGPVGGIGSVLLSMARMGWKLCHVFRLYTVVMAGSVTRRGLDMTGFVLELRGMCVVLGYPHGVDYQARPLPDQEGDDAEPHAGWEVTAVILSGSPERTSLAVTAGGDSFPAACQNAALLAIGTLHQRYPDELQHSPYRYHPRRGGACDHATFRDASSEDDATIVHLARMVEAYDAARIDFHQMVRRGMVENNMKILELRQENLQLKKDLDTVEAQLHQLKIAQGEVCRPKRRRICRSQKITARKSTSRPELVRQSLAWTCFVETPRAEPAPVVPQEGEASGVGSTEGALLLTFRPGPSQRRNANTGDGNQPEGSNHNHQGNPPPPPPPPPPPPPDTNAILTQILAQQANMMTAFLHHLQNPPQQNAPPPPPQHSKLAEFLRIRPPTFSSSNNPVDALDWLHAVGKKLDTVQCSDEEKVIFAAHQLQGPASLWWDHFQATQPEGQPITWARFTAAFRRTHVPAGVVALKKREFRELKQGNRSVMEYLHEFNNLARYAPEDVREDEEKQEKFLAGMDPELSVRLVSGDYPDFQRLVDKSIRLEAKHKELESHKRRLANFRNQQGANQRVRYTNPYPGGSSSQQQQQQQQPRSAPRPQFVVRVPQPQQQQNQQGTRAPRPPTPTVQPGQGRRDAQGQQRLCFNCFEPGHFADKCPKPRRQQGQAPPRSNNGGKDVIRGRVNHVTAEDVLTTPDVIVGTFLVHSIPATILFDSGASHSFISVPFVGRNQLGVERLRNPLLITTPGGVMTAKYYSPAVPIEIQGIPFPSDLILLDTKNLDVILGMNWLAQFQGVVDCARRTVTLYRGPEQPVVFFAPPTSVRSSELHQIELSEIPIVREFGDVFPEELPGMPPKREIEFRIDLAPGTTPLHKRPYRMAANELAEVKKQLEVLKEKGYIRPSTSPWGAPVIFVEKKDKTKRMCVDYRALNEVTIKNKYPLPRIDDLFDQLKGATVFSKIDLRSGYHQLRIRKEDIPKTAFTTRYGLYEFTVMSFGLTNAPAFFMNLMNKVFMEYLDKFVVVFIDDILIYSQSEEDHQHHLRLVLGKLREHQLYAKLSKCEFWLSEVKFLGHVISAKGVAVDPETVTAVTDWKQPKTVTQVRSFLGLAGYYRRFIENFSKIARPMTQLLKKEEKFVWSPQCEKAFQTLKEKLVSSPVLILPDTRKDFMVYCDASRQGLGCVLMQDGHVVAYASCQLRPHEGNYPTHDLELAAVVHALKIWRHYHIGNRCEIYTDHKSLKYIFTQSDLNLRQRRWLELIKDYDVGIHYHPGKANVVADALSRKSHCNTLNVRGIPPELSQQMEALNLSIVGRGFLAALEAKPTLLDQIREAQKNDPDMHGLLKNMKQGKATGFTEDEHGTLWNGKRVCVPDNRELKQLILQEAHESPYSIHPGSTKMYLDLKEKYWWVSMKREIAEFVALCDVCQRVKAEHQRPAGLLQPLQVPEWKWDEIGMDFITGLPKTQGGYDSIWVVVDRLTKVARFIPVKTTYGGNKLAELYFARIVSLHGVPKKIVSDRGSQFTSHFWKKLQEELGTRLNFSTAYHPQTDGQTERLNQILEDMLRACVLDFGKTWDKSLPYAEFSYNNSYQASIQMAPYEALYGRKCRTPLLWDQVGESQVFGTDILREAEAKVRIIRDNLKVAQSRQKSYADNRRRDLEFAVGDFVYLRVTLLRGVHRFQTKGKLAPRYVGPFRINARRGEVAYQLELPASLGNVHDVFHVSQLKKCLRVPSEQADSEQIEVREDLTYVERPMKILDTMERRTRNRVIRFCKVQWSNHAEEEATWEREDELKAAHPDLFASSSESRGRDSV

SEQ ID NO: 25955 - protein, 1219 aa, Oryza sativa
  Clone ID: TF_OsC359_8156.pep
MVTAGDHRRGGAAPERAERRGKREGRSTAHPGTTRTAETTAGVEKGGGAVRDAEGDGAPAVGGRSGAADGVDGDAATRKEVTPSREEDRSDDGGETELGGDGGERGARREHESDGESERRAAETEERSTGDDFIAPRGREGGRGGRKPAAEFSGSIDDAGEDCGRDSNESEGEREGKEGETGEGITGDVTLRRGKPPALVARRMVTTRRNVNTGEGNQPEGSNPNHQGNPPPPPPPDTNAILTQILAQQANMMTAFLHHLQNPPQQNAPPPPPQHSKLAEFLRIRPPTFSSSNNPVDALDWLHAVGKKLDTVQCSDEEKVIFAAHQLQGPASLWWDHFQATQPEGQPITWARFTAAFRRTHVPAGVVALKKREFRELKQGNRSVMEYLHEFNNLARYAPEDVREDEEKQEKFLAGMDPELSVRLVSGDYPDFQRLVDKSIRLEAKHKELESHKRRLANFRNQQGANQRVRYTNPYPGGSSSQQQQQQQQPRSAPRPQFVVRVPQPQQQQNQQGTRAPRPPTPAVQPVQGRRDAQGQQRLCFNCFEPGHFADKCPKPRRQQGQAPPRSNNGGKDVIRGRVNHVTAEDVLTTPDVIVGTFLVHSIPATILFDSGASHSFISVPFVGRNQLGVERLRNPLLITTPGGVMTAKYYSPAVPIEIQGIPFPSDLILLDTKNLDVILGMNWLAQFQGVVDCARRTVTLYRGPEQPVVFFAPPTSVRSSELHQIGLSEIPIVREFGDVFPEELPGMPPKREIEFRIDLAPGTTPLHKRPYRMAANELAEVKKQLEELKGKGYIRPSTSPWGASVIFVEKKDKTKRMCVDYRALNEVTIKNKYPLPRIDDLFDQLKGATVFSKIDLRSGYHQLRIREEDIPKTAFTTRYGLYEFTVMSFGLTNAPAFFMNLMNKVFMEYLDKFVVVFIDDILIYSQSEEDHQHHLRLVLGKLREHQLYAKLSKCEFWLSEVKFLGHVISAKGVAVDPETVTAVTEWKQPKTVTQIRSFLGLAGYYRRFIENFSKIARPMTQLLKKEEKFVWSPQCEKAFQTLKEKLVSSPVLILPDTRKDFMVYCDASRQGLGCVLMQDGHVVAYASRQLRPHEGNYPTHDLELAAVVHALKIWRHYLIGNRCEIYTDHKSLKYIFTQSDLNLRQRRWLELIKDYDVGIHYHPGKANVVACHVVINSSRIKNHSDISPPSSSLSRAAGRLQPPLPPRRSAVRSRRRLL

SEQ ID NO: 25956 - protein, 2273 aa, Oryza sativa
  Clone ID: TF_OsC359_8161.pep
MTGFVLELRGMCVVLGYPHGVDYQARPLPEQEGDDAEPHAAWEVTAVILAGSPERTSLTVTAGGDSFPAACQNAALLAIGTLHQRYPDELQHSPYRYHPRRGGARDHATFRDASSEDDATIVHLARMVEAYDAARIDFHQMVRRGMVENNMKILELRQENLQLKKDLDAVEAQLHQLKIAQGEVCRPKRRRVCRSQKITARKSTSRPELVRQSLAWTCFVETPRAEPAPVVPQEGEASGIGSTEDALLLTFRPGPSQRRNAVTGDGNQPEGSNHNHQGNPPPPPPPPPPPPPDTNAILTQILAQQANMMTAFLHHLQNPPQLNAPPPPPQHSRLAEFLRICPPTFSSSNNPVDVLDWLHAVGKKLDTVQCSDEEKVIFAAHQLQGPASLWWDHFQATQPEGQPITWARFTAAFRRTHVPAGVVALKKREFRELKQGNRSVMEYLHEFNNLARYAPEDVREDEEKQEKFLAGMDPELSVRLVSGDYPDFQRLVDKSIRLEAKHKELESHKRRLANFRNQQGANQRVRYTNPYPGGSSSQQQQPRSAPRPQFVVRVPQPQQQQNQQGTRAPRPPTPAVQPVQGRRDAQGQQRLCFNCFEPGHFADKCPKPRRQQGQAPPRSNNGGKDVIRGRVNHVTAEDVLTTPDVIVGTFLVQSIPATILFDSGASHSFISVPFVGRNQLGVERLRNPLLITTPGGVMTAKYYSPAVPIEIQGIPFPSDLILLDTKNLDVILGMNWLAQFQGVVDCARRTVTLYRGPEQPVVFFAPPTSVRSSELHQIELSEIPIVREFGDVFPEELPGMPPKREIEFRIDLAPGTTPLYKRPYRMAANELAEVKKQLEELKEKGYIRPSTSPWGAPVIFVEKKDKTKRMCVDYRALNEVTIKNKYPLPRIDDLFDQLKGATVFSKIDLRSGYHQLRIREEDIPKTAFTTRYGLYEFTVMSFGLTNAPAFFMNLMNKVFMEYLDKFVVVFIDDILIYSQSEEDHQHHLRLVLGKLREHQLYAKLSKCEFWLSEVKFLGHVISAKGVAVDPETVTAVTDWKQPKTVTQIRSFLGLAGYYRRFIENFSKIARPMTQLLKKEEKFVWSPQCEKAFQTLKEKLDGHVVAYASRQLRPHEGNYPTHDLELAAVVHALKIWRHYLIGNRCEIYTDHKSLKYIFTQSDLNLRQRRWLELIKDYDVGIHYHPGKANVVADALSRKSHCNTLNVRGIPPELSQQMEALNLSIVGRGFLAALEAKPTLLDQIREAQKNDPDMHGLLKNMKQGKAAGFTEDEHGTLWNGKRVCVPDSRELKQLILQEAHESPYSIHPGSTKMYLDLKEKYWWVSMKREIAEFVALCDVCQRVKAEHQRPAGLLQPLQVPEWKWDEIGMDFITGLPKTQGGYDSIWVIVDRLTKVARFIPVKTTYGGNKLAELYFARIVSLHGVPKKIVSDRGSQFTSHFWKKLQEELGTRLNFSTAYHPQTDGQTERLNQILEDMLRACVLDFGKTWDKSLPYAEFSYNNSYQASIQMAPYEALYGRKCRTPLLWDQVGESQVFGTDILREAEAKVRIIRDNLKVAQSRQKSYADNRRRDLEFAVDDFVYLRVTPLRGVHRFQTKGKLAPRYVGPFRIIARRGEVAYQLELPASLGNVHDVFHVSQLKKCLRVPSEQADSEQIEVREDLTYVEKPVKILDTMERRTRNRVIRFCKVQWSNHAEEEATWEREDELKAAHPDLFATARAEEAAKEEAARARQAEATAAAGASTGPTPSGNPQATASGEARDVAAGTSPGPTSPGDAQDQTGPGDIPEPSTSSGGPSRIAFSPRRLFSSSSVAPLSAEPILQALAAANTAVLDGFSAQVEALRAERAELEAAWARVEEGRRSVDAMVEVGRKAHRRHISELEARKAALAEIAREVEEEREAALITTTAMIEAQDTLRLQHASWEAELKKKLDAAQGVLDSAAARERRVTETEAASRRREEALEARAMALEEHAGAVERGLTDREAAAVLREATLAAHEAACAEEECALRLREDALAERERALEEAEATTKRLADSLSLREAAQEEQARRNLECVRAERAALEQRAADLEAREKELDARARVGGAAAGESDLAARLAAAEHTVADMQRALDSSIGEAEALRLAGEMGPDMLWDSVSRMDRAGRQAGLWKGQTRMRPANLEGLAPHLNRMAWVLEQLPEELEKTIKSSSRDLARGAVELVLASYQARDPNFSPWMALEEFPPGTEDDARARVRDAADHIVNGFEGSAPRLAFAPSSDEEGDASGEDDGGDEAGDPGASE

SEQ ID NO: 25957 - protein, 1436 aa, Oryza sativa
  Clone ID: TF_OsC359_8190.pep
MEMEEVGGRWTSVPGVPAVGGIGSVLLSMARMDWKLCHVFRLYTVVMAGSVTRRGLDMTGFVLELRGMCVVLGYPHGVDYQARPLPEQEGDDAEPHAGWEVTAVILSGSPERTSLAVTAGGDSFPAACQNAALLAIGTLHQRYPDELQHSPYRYHPRRGGARDYATFRDASSEDDATIVHLARMVEAYDAARIDFHQMVRRGMVENNLKILELRQENLQLKKDLDAVEAQLHQLKIAQGEDCRPKRRCVCRSQKITARKSTSRPELVRQSLAWTCFVETPRAEPAPVVPQEGEASGVGSTEDALLLTFRPGPSQRRNANTGDGNQPEGSNHNHQGNPPPPPPPPPPPPPDTNAILTQILAQQANMMTAFLHHLQNPPQHNAPPPPPQHSKLAEFLRIRPPTFSSSNNPVDALDWLHAVGKKLDTVRCSDEEKVVFAAHQLQGPASLWWDHFQATQPEGQPITWARFTAAFRRTHVPAGVVALKKREFRELKQGNRSVMEYLHEFNNLARYAPEDVREDEEKQEKFLAGMDPELSVRLVSGDYPDFQRLVDKSIRLEAKHKELESHKRRLANFRNQQGANQRVRYTNPYPGGTSSQQQQQQQPRPAPRPQFVVRVPQPQQQQNQQGTRAPRPPTPTVQPVQGRRDAQGPQRLCFNCFEPGHFADKCPKPRRQQGQAPPRSNNGGKDVIRGRVNHVTAEDVLTTPDVIVGTFLVHSIPATILFDSGASHSFISVPFVGRNQLGVERLRNPLLITTPGGVMTAKYYSPAVPIEIQGIPFPSDLILLDTKNLDVILGMNWLAQFQGVVDCARRTVTLYRGPEQPVVFFAPPTSVRSSELHQIGLSEIPIVREFGDVFPEELPGMPPKREIEFRIDLAPGTTPLYKRPYRMAANELAEVKKQLEELKEKGYIRPSTSPWGAPVIFVEKKDKTKRMCVDYRALNEVTIKNKYPLPRIDDLFDQLKGATVFSKIDLRSGYHQLRIREEDIPKTAFTTRYGLYEFTVMSFGLTNAPAFFMNLMNKVFMEYLDKFVVPRRAAVAAAVVSRRRHHRVRKVAAVPVHRFAAAEDRRSTVAAVDPIFSAAFSSTPPPSVGLPPTFWSSVSSPRRDLRLGALRLCRRAAVRRRACAVRAVRAAEPPPVLTSSLTPFPRYRGGTEAHGDMMWGCVLWVQWYTSGQRYYRRFIENFSKIARPMTQLLKKEEKFVWSPQCEKAFQTLKEKLVSSPVLILPDTRKDFMVYCDASRQGLGLSVHGGPGARGWRRPAPWVPRVSRTRGRGRLTAGPHLAAAGRARRRPRRHGRRENGAPAPRWSPPATNGAAEWHPRERREGGSERSGPRLTPVDGDDGNGGRKRRKAAARFGTTRTTAFRRSASEAEGRTRSTTTRRSRRRRRREGRKSGATAAANRSSAATAERRCDGASTIPTGRASGERRKRRRRARGTFK

SEQ ID NO: 25958 - protein, 945 aa, Oryza sativa
  unsure (1)..(945): unsure at all Xaa locations
  Clone ID: TF_OsC359_8241.pep
DPPWFLRRGKPPALVARRMRCCSPSMVTTRRSAVTGDGNQPEGSNHNNHGSPPPPPPPPPPPPPDTNAILTQILAQQANMMAAFLHHIQNPPQHNAPPPPPQHSKLAEFLRIRPPTFSSSNNPVDALDWLHAVGKKLDTVQCSDEEKVVFAAHQLQGPASLWWDHFQATQPEGQPITWARFTAAFRRTHVPAGVMALKKREFRELKQGNRSVMEYLHEFNNLARYAPEDVRENEEKQEKFLAGMDPELSVRLVSGDYPDFQRLVDKSIRLEAKHKELESHKRRLANFRNQQGANQRIRYTNPYPGGSSSQQQQQQQQPCSAPRPQFVVRVPQPQQQQSQQGTRAPRPPTPAVQSGQGRRDVQGPQRLCFNCFEPGHFADKCPKPRRQQGQAPPRSNNGGKDVIRGQVNHVTAEDVLTTPDVIVGTFLIHSIPATILFDSGASHSFISVPFVGRNQLGVERLRNPLLITTPGGVMTAKYYSPAVPIEIQGIPFPSDLILLDTKNLDVILGMNWLAQFQGVVDCARRTVTLYRGPEQPVVFFAPPTSVSSSELHQIGLSEIPIVREFGDVFPEELPGMPPKREIEFRIDLAPGTTPLYKRPYRMAANELAEVKKQLEELKEKGYIRPSTSPWGSPVIFVEKKDKTKRMCVDYRALNEVTIKNKYPLPWIDDLFDQLKGATVFSKIDLRSRYHXLRIREEDIPKTAFTTXYGLYEFTVMSFGLTNAPAFFMNLMNKVFMEYLDKFVVVFIDDILVYSQSEEDHQHHLRLVLGKLREHQLYAKLSKCEFWLSEVKFLGHVISAKGVAVDPETVTAVTDWKQPKTVTQIRSFLGLAGYYRRFIENFSKIARPMTQLLKKEEKFVWSPQCEKAFQTLKEKLVSSPVLILPDTRKDFMVYCDASRQGLGCVLMQDGHVVAYASRQLRPHEGNFPTERSIKATQIPAKITVSA

SEQ ID NO: 25959 - protein, 1800 aa, Oryza sativa
  unsure (1)..(1800): unsure at all Xaa locations
  Clone ID: TF_OsC359_8245.pep
RAGPTAPTAASRVRPGPPWTERLTRGPHFPWTRANEGYTSCGPVVEMSWHRAGVLLLGAQSCLPVPGVSAVGGVGSVLLSMARMGWKLCHVFRPYTVVMAGSINRRGLDLTGFALELRGMCVVLGYPHGVDYQGKQLPEQEGDDAEPHATWEVTVVILTGSPERTSLAVTAXMVRRGLVENNKQILELHXENLQLKKDLDAVEAQLRQLKIAQGEVCRPKRRRVCRSLKITARKSTSRPELVRQSLAWTCFVETPRAEPAPMVPQEDGASGVGXHGGCAAAHLPPWPVAAVDEQLVGLRMVTTRRSAVTGEGSHPEGSNHNNHGSPHPPPPPPPPPPPDTNAILTQILAQQANMMAAFLHHIQNLPQHNAPPPPPQHSKLAEFLRIRPPTFASSNNPVDALDWLHAVGKKLDTVQCSDEEKVIFAAHQLQGPASLWWDHFQATQPEGQPITWARFTAAFRRTHVPAGVMALKKREFRELKQGNRSVMEYLHEFNNLARYAPEDVREDEEKQEKFLAGMDPELSVRLVFGDYSDFQRLVDKSIRLEVKHKELESHKRRLATFRNQQGANQRVRYTNPYPGGSSLQQQPRSAPRPQFVVRVPQPQQQQSQQGTRAPRPPTPAMQPGQGRGDVQGQQRLCFNCFEPGHFADKCPKPRRQQGQAPPRPNNGGKDVIRGRVNHVTAEDVLTTPDIIVGTFLIHSIPATILFDSGASHSFISVPFVGRNQLGVERLRNPLLITTPGGVMTAKYYSPAVPIEVQGIPFPSDLILLDTKNLDVILGMNWLAQFQGVVDCARRTVTLYRGPEQPVVFFAPPTSVGSSELHQIRLSKIPIVREFGDVFPEELPGMPPKREIEFRIDLAPGTTPQYKRPYRMASNELAEVKKQLEELKEKGYIRPSTSPWGAPVIFVEKKDKTKRMCVDYRALNEVTIKNKYPLPRIDDLFDQLKGATVFSKIDLHSGYHQLRIREEDIPKTAFTTRYGLYEFTVMSFGLTNAPAFFMNLMNKVFMEYLDKFVVVFIDDILVYSQSEEDHQHHLRLVLGKLREHQLYDKLSKCEFWLSEVKFLGHMISAKGVAVDPETVTAVTDWKQPKTVTQIRSFLGLAGYYRRFIENFSKIARPMTQLLKKEEKFVWSPQCEKAFQTLKEKLVSSPVLILPDTRKDFIVYCDASRQGLGCVLMQEGQVVAYASRQLRPHEGNYPTHDLELAAVVHALKIWQHYLIGNRCEIYTDHKSLKYIFTQSDLNLRQRRWLELIKDYDVGIHYHPGKANVVADALIRKSHYNTLDVRGIPPELNQQMEALNLSIVGRGFLATLEAKLTLLDQIREAQKNDPDMRGLLKNMKQGKAAGFTEDEHGTLWNGNRVCVPDDRELKQLILQEAHESPYSIHPGSTKMYLDLKEKYWWVSMKREIAEFVALCDVCQRVKAEHQRPAGLLQPLQVPEWKWDEIGMDFITGLPKTQGGYDSIWVVVDRLTKVARLIPVKTTYGGNKLAELYFARIVSLHGVPKKIVSDRGSQFTSHFWKKLQEELGTRLNFSTAYHPQTDGQTERLNQILEDMLRACVLDFGKTWDKSLPYAEFSYNNSYQASIQMAPYEALYGRKCRTPLLWDQVGESQVFRTDILREAEAKVRTIRDNLKVAQFRQKSYADNRRRNLKFAVDDFVYLRVTPLRGVHRFQTKGKLTPRFVGPFRIIARRGEVAYQLELPTSLGNVHDVFHVSQLKKCLRVPSEQADSEQIEVREDLTYVERPVKILDTMERRTRNRVIPFCKVQWSNHAEEEATWEREDEMKAAHPDLFASSSESRGRDSV

SEQ ID NO: 25960 - protein, 1794 aa, Oryza sativa
  Clone ID: TF_OsC359_8260.pep
MSSGANEGYTSCGPMAGSVTRRGLDMTGFVLELRGMCVVLGYPHGVDYQARPLPEQEGEDAEPHAGWEVTAVILSGSPERTSLAVTAGGDSFPAACQNAALLAIGTLHQRYPDELQHSPYRYHPRRGGARDHATFRDASSEDDATVVHLARMVEAYDAARIDFHQMVRRGMVENNMKILELRQENLQLKKDLDALEAQLHQLKIAQGEGSRPKRRRVCRSQKITARKSTSRPELVRQSLAWTCFVETPRAEPAPVVPQEGEASGVGSSEGALLLTFRPGPSQRSPSLFAGSVWGFQMVTTRRNVNTGEGNQPEGSNPNPQGNPPPPPPPDTNAILTQILAQQANMMNAFLHHLQNPPQQNAPPPPPQHSKLAEFLRIRPPTFSSSNNPVDALDWLHAVGKKLDTVQCSDEEKVVFAAHQLQGPASLWWDHFQATQPEGQPITWTRFTAAFRRTHVPAGVVALKKREFRELKQGNRSVMEYLHEFNNLARYAPEDVREDEEKQEKFLAGMDPELSVRLVSGDYPDFQRLVDKSIRLEAKHKELESHKRRLANFRNQQGANQRVRYTNPYPGGSSSQQQQQQPRPAPRPQFVVRVPQQQQQQNQQGTRAPRPPTPAVQPVQGRRDASGPQRLCFNCFEPGHFADKCPKPRRQQGQAPPRSNNGGKDVIRGRVNHVTAEDVLTTPDVIVGTFLVHSIPATILFDSGASHSFISVPFVGKNQLGVERLRNPLLITTPGGVMTAKYYSPAVPIEIQGIPFPSDLILLDTKNLDVILGMNWLAQFQGVVDCARRTVTLYRGPEQPVVFFAPPTSVRSSELHQISLSEIPIVREFGDVFPEELPGMPPKREIEFRIDLAPGTTPLHKRPYRMAANELAEVKKQLEELKEKGYIRPSTSPWGAPVIFVEKKDKTKRMCVDYRALNEVTIKNKYPLPRIDDLFDQLKGATVFSKIDLRSGYHQLRIREEDIPKTAFTTRYGLYEFTVMSFGLTNAPAFFMNLMNKVFMEYLDKFVVVFIDDILIYSQTEEDHQHHLRLVLGKLREHQLYAKLSKCEFWLSEVKFLGHVISAKGVAVDPETVTAVTEWKQPKTVTQIRSFLGLAGYYRRFIENFSKIARPMTQLLKKEEKFVWSPQCEKAFQTLKEKLVSSPVLILPDTRKDFMVYCDASRQGLGCVLMQDGHVVAYASRQLRPHEGNYPTHDLELAAVVHALKIWRHYLIGNRCEIYTDHKSLKYIFTQSDLNLRQRRWLELIKDYDVGIHYHPGKANVVADALSRKSHCNTLNVRGIPPELNQQMEALNLSIVGRGFLAALEAKPTLLDQIREAQKNDPDMHGLLKNMKQGKAAGFTEDEHGTLWNGKRVCVPESRELKQLILQEAHESPYSIHPGSTKMYLDLKEKYWWVSMKREIAEFVALCDVCQRVKAEHQRPAGLLQPLQVPEWKWDEIGMDFITGLPKTQGGYDSIWVVVDRLTKVARFIPVKTTYGGNKLAELYFARIVSLHGIPKKIVSDRGSQFTSHFWKKLQEELGTRLNFSTAYHPQTDGQTERLNQILEDLLRACVLDFGKTWDKSLPYAEFSYNNSYQASIQMAPYEALYGRKCRTPLLWDQVGESQVFGTDILREAEAKVRIIRDNLKVAQSRQKSYADNRRRDLEFAVDDFVYLRVTPLRGVHRFQTKGKLAPRYVGPFRIIARRGEVAYQLELPASLGNVHDVFHVSQLKKCLRVPSEQADSEQIEVREDLTYVERPVKILDTMERRTRNRVIRFCKVQWSNHAEEEATWEREDELKAAHPDLFASSSESRGRDSV

SEQ ID NO: 25961 - protein, 2479 aa, Oryza sativa
  unsure (1)..(2479): unsure at all Xaa locations
  Clone ID: TF_OsC359_8276.pep
MTGFVLELRGMCVVLGYPHGVDYQARPLPEQEGEDAEPRAGWEVTAVILSGSPERTSLAVTAGGDSFPAACQNAALLAIGTLHQRYPDELQHSPYHYHPRRGGARDFATFRDASPEDDATIVHLARMVEAYDAARIDFHQMENLQLKKDLDAVEAQLHQLKIAQGEICRPKRRRVCRSQKITARKSTSRPELVRQSLAWTCFVETPRAEPAPVVPQEGEASGVGSSEALSLFAGSVWGFQMVTTRRNAVTGDGNQPEGSNHNHQGNPPPPPPPPPPPPPDTNAILTQILAQQANMMTAFLHHLQNPPQQNAPPPPPQHSKLAEFLRIRPPTFSSSNNPVDALDWLHAVGKKLDTVQCSDEEKVVFAAHQLQGPASLWWDHFQATQPEGQPITWARFTAAFRRTHVPAGVVALKKKEFRELKQGNRSVMEYLHEFNNLARYAPEDVREDEEKQEKFLAGMDPELSVRLVSGDYPDFQRLVDKSIRLEAKHXQQQQQQPRPAPRPQFVVRVPQPQQQQNQQGTRAPRPPTPAVQPVQGRRDAQGQQRLCFNCFEPGHFADKCPKPRRQQGQAPPRSNNGGKDVIRGHXLSEIPIVREFGDVFPEELPGMPPKREIEFRIDLAPGTTPLHKRPYRMAANELAEVKKQLEELKEKGYIRPSTSPWGAPVIFVEKKDKTKRMCVDYRALNEVTIKNKYPLPRIDDLFDQLKGATVFSKIDLRSGYHQLRIREEDIPKTAFTTRYGLYEFTVMSFGLTNAPAFFMNLMNKVFMEYLDKFVVVFIDDILIYSQSEEDHQHHLRLVLGKLREHQLYAKLSKCEFWLSEVKFLGHVISAKGVAVDPETVTAVTDWKQPKTVTQIRSFLGLARYYRRFIENFSKIARPMTQLLKKEEKFVWSPQCEKAFQTLKEKLVSSPVLILPDTRKDFMVYCDASRQGLGCVLMQDGHVVAYASRQLRPHEGNYPTHDLELAAVVHALKIWRHYLIGNRCEIYIDHKSLKYIFTQSDLNLRQRRWLELIKDYDVGIHYHPGKANVVADALSRKGHCNTLNVRGIPPELNQQMEALNLSIVGRGFLAALEAKPTLLDQIREAQKNDPDMHGLLKNMKQGKAAGFTEDEHGTLWSGKREKYWWVCMKREIAEYVALCDVCQRVKAEHQRPAGLLQPLQVPEWKWDEIGMDFITGLPKTQGGYDSIWVVVDRLTKVARFIPVKTTYGGNKLAELYFARIVSLHGVPKKIVSDRGSQFTSHFWKKLQEELGTRLNFSTAYHPQTDRQTERLNQILEDMLRACVLDFGKTWDKSLPYAEFSYNNSYQASIQMAPYEALYGRKCRTPLLWDQVGESQVFRTDILREAEAKVRIIRDNLKVAQSRQKSYADNRRRDLEFAVDDFVYLRVTPLRGVHRFQTKGKLAPRYVGPFRIVARRGEVAYQLELPASLGNVHDVFHVSQLKKCLRVPSEQADSEQIEVREDLTYVERPVKILDTMERRTRNRHIPISSPVLPNLGVEIPFKEAGPPATLADGWGPPVIAFLPPQPPLARALTPPPPRIPPHPAVPARHNEGGIIPRDSLSQFPHFPLSLSLGFVRFPSRKPRRRNQWRPRSPRPFPPFPGTLSFSRCYLNVSRALLLRFRRSPLALPVGIEPAPLHLSAVAAVLRFAAAVAPDFLPTRRDLHRLRRGPVDLVRALGLLADRRSTVVLAVPNRAAAFFRFGRRSRRRRRPGRAPPSFQPSPSLGKTTVVLAKSSPSSSDPSPSPEITGAASPSSTRRFPPLPPRRRRRLLVFRRRLGHRNQHPHRLGTAGYAGKEEEWQREDEEAEESCTPLVFGDIPHPWARNWARARYQKNDDGTIFMPNAEDQRVYEAIKELVAEQQASQEACSQRREDDLLTKALGNKEHRGRTRGVGSSVPWKNGFPDYKWQYKKRTSNKAEKDARLGAKIRASIRAELTSEFDEKLESMRAKIRQEIREEQQNPQAAAAAAHEELGSPTQKRSSCASTELAENSTSVDSAVDHITVTEPTICTLTVRVMPTFTVPAAEGLAYKSTLETRVHGAQLRADCANVQVDSVKPEYELFPLKYPPNDEVLSLGNARGTFIQWPKDLIEIRVTTRPTTAAGGRPPKRPASTPSAPPAQDRHAQSYDVQLQYDTDFGEDRMEADSKAIHEPPPMKKSRKAHSSPQRITLDKPEANGRGRGGKVQASLLAPRKLDLGKGQEETKGKEVKKKYVAPQEFKLGMPLVGDDVLATMGTAWKDLHLYYMEKSNARKPSKATDILGEHDGKPFLGPTNYVVVDFKDLFDLYRLRTVDTSLLKCYSLLSWQWCQKHAPEVAFLDPQVVTVTNLQNDRQGMVNYIYDTLWSCRDKEYIIAHWILLVITPKLSTCHYLNSRIDKNAYDWTPIQLAIDEVWAQYVQRGGLRKTGHDTVILKKDFPVKQQIDPLRVWRHVCGIAQAYPVRDRSQHSSLVGAGVRTPGVGTSAPARYIPSFIAIIARKPLYEEG

SEQ ID NO: 25962 - protein, 1832 aa, Oryza sativa
  Clone ID: TF_OsC359_8285.pep
MATAGDHRGAGAASRRLRRLGRPRARRVAAAWGPARPYKDRSSGLCCKALPYFHMSSGANEGYTSCGPMAGSVTRRGLDMSGFVLELRGMCVVLGYPHGVDYQARPLPEQEGEDAEPHAGWEVTAVILSGSPKRTSLAVTAGGDSFPAACQNAALLAIGTLHQRYPDELQHSPYRYHPRRGGARDFATFRDASSEDDATVVHLARMVEAYDAARIDFHQMVRRGMVENNMKILELRQENLQLKKDLDALEAQLHQLKIAQGEDSRPKRRRVCRSQKITARKSTSRPELVRQSLAWTCFVETPRAEPAPVVPQEGEASGVGSSEGALLLTFRPGPSQRRNVNTGEGNQPEGSNPNPQGNPPPPPPPDTNAILTQILAQQANMMNAFLHHLQNPPQQNAPPPPPQHSKLTEFLRIRPPTFSSSNNPVDALDWLHAVGKKLDTVQCSDEEKVVFAAHQLQGPASLWWDHFQATQPEGQPITWARFTAAFRRTHVPAGVVALKKREFRELKQGNRSVMEYLHEFNNLARYAPEDVREDEEKQEKFLAGMDPELSVRLVSGDYPDFQRLVDKSIRLEAKHKELESHKRRLANFRNQQGANQRVRYTNPYPGGSSSQQQQQQQQPRPAPRPQFVVRVPQQQQQQNQQGTRAPRPPTPAGQPVQGRRDASGPQRLCFNCFEPGHFADKCPKPRRQQGQAPPRPNNGGKDVIRGRVNHVTAEDVLTTPDVIVGTFLVHSIPATILFDSGASHSFISVPFVGKNQLGVERLRNPLLITTPGGVMTAKYYSPAVPIEIQGIPFPSDLILLDTKNLDVILGMNWLAQFQGVVDCARRTVTLYRGPEQPVVFFAPPTSVRSSELHQIELSEIPIVREFGDVFPEELPGMPPKREIEFRIDLAPGTTPLHKRPYRMAANELAEVKKQLEELKEKGYIRPSTSPWGAPVIFVEKKDKTKRMCVDYRALNEVTIKNKYPLPRIDDLFDQLKGATVFSKIDLRSGYHQLRIREEDIPKTAFTTRYGLYEFTVMSFGLTNAPAFFMNLMNKVFMEYLDKFVVVFIDDILIYSQSEEDHQHHLRLVLGKLREHQLYAKLSKCEFWLSEVKFLGHVISAKGVAVDPETVTAVTDWKQPKTVTQIRSFLGLAGYYRRFIENFSKIARPMTQLLKKEEKFVWSPQCEKAFQTLKEKLVSSPVLILPDTRKDFMVYCDASRQGLGCVLMQDGHVVAYASRQLRPHEGNYPTHDLELAAVVHALKIWRHYLIGNRCEIYTDHKSLKYIFTQSDLNLRQRRWLELIKDYDVGIHYHPGKANVVADALSRKSHCNTLNVRGIPPELNQQMEALNLSMVGRGFLAALEAKPTLLDQIREAQKNDPDMHGLLKNMKQGKAAGFTEDEHGTLWNGKRVCVPDSRELKQLILQEAHESPYSIHPGSTKMYLDLKEKYWWVSMKREIAEFVALCDVCQRVKAEHQRPAGLLQPLQVPEWKWDEIGMDFITGLPKTQGGYDSIWVIVDRLTKVARFIPVKTTYGGNKLAELYFARIVSLHGIPKKIVSDRGSQFTSHFWKKLQEELGTRLNFSTAYHPQTDGQTERLNQILEDMLRACVLDFGKTWDKSLPYAEFSYNNSYQASIQMAPYEALYGRKCRTPLLWDQVGESQVFGTDILREAEAKVRIIRDNLKVAQSRQKSYADNRRRDLEFAVDDFVYLRVTPLRGVHRFRTKGKLAPRYVGPFRIVARRGEVAYQLELPASLGNVHDVFHVSQLKKCLRVPSEQANSEQIEVREDLTYVEKPVKILDTMERRTRNRVIRFCKVQWSNHAEEEATWEREDELKAAHPDLFASSSESRGRDSV

SEQ ID NO: 25963 - protein, 1858 aa, Oryza sativa; identical to SEQ ID NO: 19121
  Clone ID: TF_OsC359_8301.pep

SEQ ID NO: 25964 - protein, 1270 aa, Oryza sativa
  Clone ID: TF_OsC359_8310.pep
MVTTRRNANTGDGNQPEGSNHNHQGNPPPPPPPPPPPPPDTNAILTQILAQQANMMTAFLHHLQNPPQHNAPPPPPQHSKLAEFLRIRPPTFSSSNNPVDALDWLHAVGKKLDTVQCSDEEKVIFAAHQLQGPASLWWDHFQATQPAGQPITWARFTAAFRRTHVPAGVVALKKREFRELKQGNRSVMEYLHEFNNLARYAPEDVREDEEKQEKFLAGMDPELSVCLVSRDYPDFQRLVDKSIRLEAKHKELESHKRRLANFRNQQGANQRVRYTNPYPGGSSSQQQQQQQQPRSAPRPQFVVRVPQPQQQQNQQGTRAPRPPTPTVQPGQGRRDTQGNFPGRDKRLCFNCFEPGHFADKCPKPRRQQGQAPPRSNNGGKDVIRGRVNHVTAEDVLTTPDVIVGTFLIHSIPATILFDSGASHSFISVPFVGRNQLGVERLRNPLLITTPGGVMTAKYYSPAVPIEIQGIPFPSDLILLDTKNLDVILGMNWLAQFQGIGLSEIPIVREFGDVFPEELPGMPPKREIEFRIDLAPGTTPLYKRPYRMAANELAEVKKQLEELKEKGYIRPSTSPWGAPVIFVEKKDKTKRMCVDYRALNEVTIKNKYPLPRIDDLFDQLKGATVFSKIDLRSGYHQLRIREEDIPKTAFTTRYGLYEFTVMSFGLTNAPAFFMNLMNKVFMEYLDKFVVPRRAAVAAAVVSRRRHHRVRKVAAVPVHRFAAAEDRRRTGDAVDPIFSAAFSSTPPPSVGLPPTFWSSVSSPRRDLRLGALRLCRRAAVRRRACAVRAVRAAEPPPVLTSSLTPFPRYRGGTEAHGDMMWGCVLWVQWYTSGQRYYRRFIENFSKIARPMTQLLKKEEKFVWSPQCEKAFQTLKEKLVSSPVLILPDTRKDFMVYCDASRQGLGCVLMQDGHVVAYASRQLRPHEGNYPTHDLELAAVTTGNNPTGIPHVRALILVPGGKTEPQTKPYPLDMWKYGSALQQRPEDRRGRGRADRVHGSGAHASASRSTADREHAAGGGRRRGSHASAVPAGAVGLRPAPYWEAWGPPLRLAPPFVGPLTVCVAGAGWGSGYCVGGLNVPSWESGVGRAGVAGGSGGWRGRGGVGGVWDDGGAWLRVGFAGALRSVRLRSAHVPMAAFINYRLALFDVLGLLGGCVAVVGCLCDGFWGSPGWRATTGTAAETEEAGGAFGTTRTTAFRRSASEAEGRTRSTTTRRSRRRRRREGRKSGATAAANRSSAATAERRCDGASTIPTGRASGERRKRRRRARGTFK

SEQ ID NO: 25965 - protein, 1829 aa, Oryza sativa
  Clone ID: TF_OsC359_8331.pep
MAAGSSAPFPPRPAALSPSRPYINPPRASLHRFRHSPLSLPAGIELAPSPSLSVVAAELRSAAVVAPDHLSPRRRLLRLRRIPGDLVHPSVSLADRRSTVDPIHPSRATAFLRTGRRFRRCRRPGVSRGPPLLFPLPFPSLGRRSAVPMAAAGDHRGAGVPPPAAAPAWPPSGAPCGYRVGPGYQPPAPSAPRPYKDRSSGLCCKALPYFHMSSGTNEGYTSCGPVVEMSWHRAGVLLLGAQSCLPVPEVPAVGGIGSMAGSVSRRGLDMTGFVLELRGMCVVLGYPHGLDYQGRPLPEQEVTAGGDSFSAACQSAALLAISTLHQRYPDELQHSPYRYHPRRGGARDYATFRDASSEDDATIMHLARMVEAYDAARIDFHQMVRRGMVENNLKILELRQENLQLKKDLDAVEAQLHQLKIAQGEVCHPKRRRVCRSQKITARKSTSRPELVRQSLAWTCFVETPRAEPAPVVPQEGEASGVGSTEDALLLTFRPGPSQRSNNPVDVLDWLHAVGKKLDTVQCSDEEKVVFAAHQLQGPASLWWDHFQATQPEGQPITWARFTAAFRRTHVPAGVMALKKREFRELKQGNRSVMEYLHEFNNLARYAPEDVREDEEKQEKFLAGMDPELSVRLVSGDYPDFQRLVDKSIRLEAKHKELESHKRRLANFRNQQGANQRIRYTNPYPGGSSSQQQQPRSAPRPQFVVRVPQPQQQQSQQGTHAPRPPTPAAQSGQGRRDVQGPQRLCFNCFEPGHFADKCPKSRRQQGQAPPDVIVGTFLIHSIPATILFDSGASHSFISVPFVGRNQLGVERLRNPLLITTPGGVMTAKYYSPAVPIEIQGIPFPSDLILLDTKNLDIGLSEIPIVREFGDVFPEELPGMPPKREIEFRIDLAPGTTPLYKRPYRMAANELAEVKKQLEELKEKGYIRPSTSPWGAPVIFVEKKDKTKRMCVDYRALNEVTIKNKYPLPRIDDLFDQLKGATVFSKIDLRSGYHQLRIREEDIPKTAFTTRYGLYEFTVMSFGLTNAPAFFMNLMNKVFMKYLDKFVVVFIDDILVYSQSEEDHQHHLRLVLGKLRKHQLYAKLSKYEFWLSEVKFLGHVISAKGVAVDPETVTAVTDWKQPKTVTQIRSFLGLAGYYRRFIENFSKIARPMTQLLKKEEKFVWSPQCEKAFKTLKEKLVSSPVLILPDTRKDFMVYCDASRQGLGCVLMQDGHVVAYASRQLQPHEGNYPTHDLELAAVVHALKIWRHYLIGNRCEIYTDHKSLKYIFTQSDLNLRQRRWLELIKDYDVGIHYHPGKANVVADAQSRKSHCNTLNVRGIPPELNQQMEALNLSIVGRGFLAALEAKPTLLDQIREAQKNDPDMHGLLKNMKQGKAAGFTEDEHGTLWNGNRSSWPFVMCASVSRQSTNDRPDFSNLSKYQNGNGMKLGWISSPDFQKPKVDMILYGTAYHPQTDGQTERLNQILEDMLRACVLDFGKTWDKSLPYAEFSYNNSYQASIQMAPYEALYGRKCRTPLLWDQVGESQVFGTDILREAEAKVRTIRDNLKVAQSRQKSYADNRRRDLEFAVDDFVYLRVTPLRGVHRFQTKGKLAPRFVGPFRMIARRGEVAYQLELPASLGNVHDVFHVSQLKKCLRVPSQQADSEQIEVREDLTYVERPVKILDTMERRTRNRSAAVVAPDLLPLRRRLLWFRRNLADLVHPSVSPADRRNAAVPVYPSRAAAFLRSGRRSRRRRRPGVSCGPPIRFPLPSPLSGAAPPRRWSPAATIGARVRRLPSAVPAWPPSGAPRGCHVGPGRQPPAPSDAAASEDPLFVEVEADVWESEQGKSHHL

SEQ ID NO: 25966 - protein, 1505 aa, Oryza sativa
  unsure (1)..(1505): unsure at all Xaa locations
  Clone ID: TF_OsC359_8385.pep
MVTTRRSAATGECSHPEGSNHNNHGSPPPPPSPPPPPPPDTNAILTQILAXQANMMAAFLHHIQNPPQHNAPPPPPQHSKLAEFLRIRPPTFSSSNNPVDALDWLHAVGKKLDTVQCSDEEKVIFGAHQLQGPASLWWDHFQATQPEGQPITWARFTAAFRRTHVPAGVMALKKREFRELKQGNRSVMEYLHEFNNLARYAPEDVREDEEKQEKFLAGMDPELSVRLVSGDYPDFQRLVDKSIRLEAKHKELESHKRRLANFRNQQGANQRVRYTNPYPGXSSSQQQQQQQPRSVPRPQFVVRVPQPQQQQSQQGTRAPRPPTLAVQPGQVRRDVQGQQRLCFNCFEPGHFADKCPKPRRQQGQAPPRSNNGGKDVIRGRVNHVTAEDVLTTPDVIVGTFLIHSIPATILFDSGASHSFISMPFVGRNQLGVERLRNPLLITTPGGVMTAKXYSPAVPIEIQGIPFPSDLILLDTKNLDVILGMNWLAQFQGVVDCARRTVTLYRGPEQPVVFFAPPTSVGSSELHQIGMSEIPIVREFGDMFPEELPGMPPKREIEFRIDLAPGTTPQYKRPYRMASNELAEVKKQLGELKEKGYIRPSTSPWGAPVIFVEKKDMTKRMCVDNRALNEVTIKNKYPLPRIDDLFDQLKGATVFSKIDLRSGYHQLRIREEDIPKTAFTTRYGLYEFTVMSFGLTNAPAFFMNLMNKVFMEYLDKFVVVFIDDILVYSQSEEDHQQHLRLVLGKLREHQLYAKLSKCEFWLSEVKFLGHMISAKGVAVDPETVTAVTDWKQPKTVTQVRSFLGLAEYYRRFIKNFSKIARPMTQLLKKEEKFVWSPQCEKAFQTLKEKLVSSPVLILPDTRKDFLVYCDASRQGLGCVLMQEGHMVAYASQQLRPHEGNYPTHDLELAAVVHALKIWRHYLIGNRCEIYTDHKSLKYIFTQSDLNLRQRRWLELIKDXDVGIHYHPGKTNVVADALSRKSRCNTLGVRGIPPKLHQQMEALNLSIVGRGFLATLEAKPTLLDQIREAQKNDPDMHGILKNMKQGKAAGFTEDEHGTLWNGNRVCVPDDRELKQLILQEAHESPYSIHPGSTKMYLDLKEKYWWVSMKREIAEFVALYDVCQRVKAEHQRPAGLLQPLQVLEWKWDEIGMDFITGLPKTQGGYDSIWVVVDRLTKVARFIPVKTTYGGNKLAELYFARIVSLHGVPKKIVSDRGSQFTSHFWKKLQEELGTRLNFSTAYHPQTDGQTECLNQILEDMLRACILDFGKTWDKSLPYAEFSYNNSYQASIQMAPYEALYGRKCRTPLLXDQVGESQVFGTDILREAEAKVRTIRDNLKVAQSRQESYADNRRRNLEFAVDDFVYLRVTPLRGVHRFQTKGKLASRFVGPFRIIARRGEVAYQLELPASLGNVHDVFHVSQLKKCLRVLSEQADSEQIEVRENLTYMERPVKILDTMERRTRNRVIRFCKVQWSNHAEEEATWERENELKAAHPDLFASSSESRGRDSV

SEQ ID NO: 25967 - protein, 1857 aa, Oryza sativa
  Clone ID: TF_OsC359_8402.pep
MVLMVAPRPYKDRSSGLCCKALPYFHMSSGANEGYTSCGPMAGSVTRRGLDMTGFVLELRGMCVVLGYPHGVDYQARPLPEQEGEDAEPHAGWEVTAVILSGSPERTSLAVTAGGDSFPAACQNAALLAIGTLHQRYPDELQHSPYRYHARRGGARDYATFRDASSEDDATVVHLARMVEAYDAARIDFHQMVRRGMVENNMKILELRQENLQLKKDLDAVEAQLHQLKIAQGEDSRPKRRRVCRSQKITARKSTSRPELVRQSLAWTCFVETPRAEPAPVVPQEGEASGVGSSEGALLLTFRPGPSQRSPSLFAGSVRGFQMVTTRRNVNTGEGNQPEGSNPNHQGNPPPPPPPDTNAILTQILAQQANMMNAFLHHLQNPPQQNAPPPPPQHSKLAEFLRIRPPTFSSSNNPVDALDWLHAVGKKLDTVQCSDEEKVIFAAHQLQGPASLWWDHFQATQPEGQPITWARFTAAFRRTHVPAGVVALKKREFRELKQGNRSVMEYLHEFNNLARYAPEDVREDEEKQEKFLAGMDPELSVRLVSGDYPDSQRLVDKSIRLEAKHKELESHKRRLANFRNQQGANQRVRYTNPYPGGSSSQQQQQQQQPRSAPRPQFVVRVPQQQQQQNQQGTRAPRPPTPTVQPVQGRRDAQGQQRLCFNCFEPGHFADKCPKPRRQQGQAPPRSNNGGKDVIRGRVNHVTAEDVLTTPDVIVGTFLVHSIPATILFDSGASHSFISVPFVGRNQLGVERLRNPLLITTPGGVMTAKYYSPAVPIEIQGIPFPSDLILLDTKNLDVILGMNWLAQFQGVVDCARRTVTLYRGPEQPVVFFAPPTSVRSSELHQIGLSEIPIVREFGDVFPEELPGMPPKREIEFRIDLAPGTTPLHKRPYRMAANELAEVKTQLEELKEKGYIRPSTSPWGAPVIFVEKKDKTKRMCVDYRALNEVTIKNKYPLPRIDDLFDQLKGATVFSKIDLRSGYHQLRIREEDIPKTAFTTRYGLYEFTVMSFGLTNAPAFFMNLMNKVFMEYLDKFVVVFIDDILIYSQSEEDHQHHLRLVLGKLREHQLYAKLSKCEFWLSEVKFLGHVISAKGVAVDPETVTAVTDWKQPKTVTQIRSFLGLAGYYRRFIENFSKIARPMTQLLKKEEKFVWSPQCEKAFQTLKEKLVSSPVLILPDTRKDFMVYCDASRQGLGCVLMQDGHVVAYASRQLRPHEGNYPTHDLELAAVVHALKIWRHYLIGNRCEIYTDHKSLKYIFTQSDLNLRQRRWLELIKDYDVGIHYHPGKANVVADALSRKSHCNTLNVRGIPPELNQQMEALNLNIVGRGFLAALEAQPTLLDQIREAQKNDPDMHGLLKNMKQGKAAGFTEDEHGTLWNGKRVCVPDSRELKQLILQEAHESPYSIHPGSTKMYLDLKEKYWWVSMKREIAEFVALCDVCQRVKAEHQRPAGLLQPLQVPEWKWDEIGMDFITGLPKTQGGYDSIWVIVDRLTKVARFIPVKTTYGGNKLAELYFARIVSLHGVPKKIVSDRGSQFTSHFWKKLQEELGTRLNFSTAYHPQTDGQTERLNQILEDMLRACVLDFGKTWDKSLPYAEFSYNNSYQASIQMAPYEALYGRKCRTPLLWDQVGESQVFGTDILREAEAKVRIIRDNLKVAQSRQKSYADNRRRDLEFAVDDFVYLRVTPLRGVHRFQTKGKLAPRYVGPFRITARRGEVAYQLELPASLGNVHDVFHVSQLKKCLRVPSEQADSEQIEVREDLTYVEKPVKILDAMERRTRNRVIRFCKVQWSNHAEEEATWEREDELRHRHPEPRRRFPPLRPPFSSSSLSRGEPKTAVRLPPSLLSLGRRSAAPVVAGGDH

SEQ ID NO: 25968 - protein, 1636 aa, Oryza sativa; identical to SEQ ID NO: 19252
  Clone ID: TF_OsC359_7886.pep

SEQ ID NO: 25969 - protein, 1432 aa, Oryza sativa
  Clone ID: TF_OsC359_5737.pep
FPPWVLPPPPPPPPPPPPDTNAILTQILAQQANMTAAFLHHIQNPPQHNAPPPPPPPQHSKLAEFLRIRPPTFSSSNNPVDALDWLHAVGKKLDTVQCNDEEKVIFATHQLQGPASLWWDHFQATQPEGQPITWARFTAAFRRTHVPAGVMALKKREFRELKQGNRSVMEYLHEFNNLARYAPEDVREDEEKQEKFLAGMDSELSVRLVSGDYPDFQRLVDKSILLEAKHKELESHKRRLANFRNQQGANQRVRYTNPYLGGSSSQQQQQQPRSAPRPQFVVRVPQPQQPQGQQGPRAPRPPAPAVQPGQGHRDVQGQQRLCFNCFEPGHFAEKCPKPRRQQGQAPPRPNNGGKDVARGHVNHVTAEDVLTTPDVIVGTLLIHSIPATILFDSGASHSFISVTFVGRNQLGVERLRNPMLITTPGGVMTAKYYSPAIPIEIQGIPFPSDLILLDTKNLDVILGMNWLAQFQGVVDCARRTVTLYRGPEQPVVFFAPPTSVSSSELHQIGLSEIPIVREFGDVFPEELPGMPPKREIEFRIDLAPGTTPLYKRPYRMAANELAEVKKQLEELKGKGYIRPSTSPWGAPVIFVEKKDKTKRMCVDYRALNEVTIKNKYPLPRIDDLFDQLKGATVFSKIDLRSGYHQLRIREEDIPKTAFTMRYGLYEFTVMSFGLTNAPAFFMNLMNKVFMEYLDKFVVVFIDDILVYSQSEEDHQQHLCLVLGKLREHQLYAKLSKCEFWLSEVKFLGHMISAKGVAVDPETVTAVTDWKQPKTVTQIRSFLGLAGYYRRFIENFSKIARPMTQLLKKEEKFVWSPQCEKAFKTLKEKLVSSPVLILPDTHKDFMVYCDASRQGLGCVLMQEGHVVAYASRQLRPHEGNYPTHDLELAAVRRWLELIKDYDVGIHYHPGKANVVADALSRKSHCNTLNVRGIPPELNQQMEALNLSIVGRGFLAALEAKPTLLDQIREAQKNDPDMRGLLKNMKHGKAAGFTEDEHGTLWNGNREAHESPYSIHPGSTRMYLDLKEKYWWVSMKREIAEFVALCDVCQRVKAEHQRPAGLLQPLQIPEWKWDEIGMDFITGLPKTQGGYDSIWVVVDRLTKVARFIPVKTTYGGNKLAELYFARIVSLRGVPKKIVSDRGSQFTSHFWKKLQEELGTRLNFSTAYHPQTDGQTERLNQILEDMLHACVLDFGKTWDKSLPYAEFSYNNSYQASIQMAPYEALYGRKCRTPLLWDQVGESQVFGTDILREAEATVRTIRENLKVAQSRQKSYADNRRHDLEFAVDDFVYLRVTPLRGVHRFQTKGKLAPRFVGPFRITARRGEVAYQLELPASLGNVHDVFHVSQLKKCLRVPSEQADSEQIEVREDLTYVERPVKILDTMERRTRNRVIRFCKVQWSNHAEEEATWEREEELKAAHPDLFASSSESRGRDSV

SEQ ID NO: 25970 - protein, 1498 aa, Oryza sativa
  Clone ID: TF_OsC1528_1659.pep
MAALTDDANGEGASQPRTGPYSSGRAGGSRRAATAEQHDDEPSLAQLLANQNRLFERMVANSENMGAAMAQQANQAPSKLADVQRTHPPHFSSAADPLAADDWLRDIEIKLNLCRCDPVEKATFAAYYLQGAAAAWWETYKTLIPPDEPITWTVFREGFRSAHIPAGLMEIKKKEFLNLKQGNMPFMEFMERFNYLGRYAASDLNTETKKVELCRDRLAPELKHALAAHEITSMKTLVALRVESSEKEVVEDRKRKWAAKKFAGSSSSTRPRLAPSPAVRPMAPQPPRQMYVPPRPQTQLVRQVPRAVQAAGDASRNANVTCYNCGKKGHYSPSCPYPKTGTSGPYSQGAPQQPRGPPQVQPGQRGAPAVPKPAPTFGRGRLNHVTAEEATDAPGVVLGTFLVHSIPLTVLFDSGATHSFMSTLKAKQLDLKTEFLSDAMRIQSPGSTMVTKLLCKGVELIIDGVKFKANLILLDTLGLDVILGMDWLTKHEGTIDCAHRTVTLRSTDGQFVRFTFEQTSTSNQPSIQSLSIPELKSVPIVNEYSDVFPDELPGMPPDRDIEFVIDLIPGTAPIAKRPYRMTSENLMELKKKLNEQLAKGFIRPSSSPWGCPVLFVPKKDGTMRMCVDYRPLNEVTIKNKYPLPRIDDLFDQLTGARVFSKIDLRLGYFQLKIRPEDIPKTAFTTRYGLFEYTVVSFGLTNAPASFMNMMNKIFMEYLDKFVVVFIDDILIYSKSEEEHAQHLRMVLDKLREHQLYAKFSKCEFWLKEVEFLGHVLSEGGIAVNPRNVQNVLNWKQPQNVPEIRSFLGLAGYYRRFIENFSKIARPLTQLLKKENKFIWSEACETSFHELKRRLTTAPVLVMPDVLKPFHVYCDASHHGLGCVLMQEGKVVAYASRQLRPHEINYPTHDLQLAAVVHALKIWRHYLVSNRCEIFTDHKSLKYFFTQPDLNLRQRRWLELIKDYDLGIHYHPGKANVVADTLSRKLHHLAVIETINQPSLSSEFQKLNLGLVEDGYVAALALQPTLYSQIKAAQSIDEEVAEIMKEINSKPQSIYTLNSDGMVMLGKRIFVPNNQHLRETILDEAHQTPLSIHPGCTKMYQDIRTQYWWPSLRRDIAAYVAICDVCQRVKAEHQRPAGLLQPLQVPEWKFDEVGMDFITGLPKTPNGHDSIWVIMDRLTKVAHFIPVHVTYGGAKLAELYLTHIVRLHGVPKVIVSDRGTQFTSRFWKNLHELLGTKLFLSTAFHPQTGGQVERTNQILEDMLRACVLEHNTNWEKCLSFAEFSYNNSFQSSIQMSPFEALYGRKCRTPLYWSEVGERQFFGPAIINEAEKNVTLIRDRLKEAQTRQKSYSDRRRRELSFDVGDHVYLKVSPMRGTQRFQIHGKLAPRYIGPYQIISKRGQVAYQLELPFQLSNIHDVFHVSQLKKCLRTPIEHTSLEDINLKPNLSYQEYPIRILEESERRTRKSSIKILRVQWSNHTADEATWEREDRLKAEFPSFF

SEQ ID NO: 25971 - protein, 1494 aa, Oryza sativa; identical to SEQ ID NO: 19262
  Clone ID: TF_OsC359_6268.pep

SEQ ID NO: 25972 - protein, 1074 aa, Oryza sativa; identical to SEQ ID NO: 19260
  Clone ID: TF_OsC65158_1.pep

SEQ ID NO: 25973 - protein, 1756 aa, Oryza sativa
  unsure (1)..(1756): unsure at all Xaa locations
  Clone ID: TF_OsC359_6599.pep
RRSSPVRGPDPPWTALPEPLTGELPHRVRLEVHGYVGTCLANMVVEASGGPADHACQEAAYLMMARLRERHNYIFHDTVYRFHPRRASSDDVSTFRPTAGENDTTFGHMCAVMRGLDRMHSDLDKATKALNDGKLMRIVALKDEIARLKRENAQLKGLPAPGGVRIRTTPRKTMTAPVRIQLAPRNPPPSAAPAAPPVPPAVPAAPAPAPASALSFAPASAARGPARGNGGWLDLMVYTRNGSRATGEGSNGEERTEGVHPNSNSGNGPPPLPENPTLAQVMAHQTQMMAAMMQQMQQQHQQMHQRMLQHAEQQHQQFGPPPPQSKLPEFLRVRPPTFSSTTNPMEANDWLHAIEKKLNLLQCNDQEKVAFATHQLQGPASAWWDNHMATRPPGTEVTWAEFCRSFRKAQVPDGVVAQKKREFRALHQGNRTVMEYLHEFNRLARYAPEDVRTDAEKQEKFMAGLDDELTNQLISGDYADFERLVDKAIRQEDQRNKMDRKRKAAQFRAPQGSHQRPRFAPGQQGGPTTMIVRQYRPFNPSNFPHGAGGSQTHHRGQSNRGAAPRPPMAPAQSGPPAQAKKETGAKPGSCFNCGELGHFADKCSKPRRAGPRFIRARVNHASAEEAQAAPEVVLGTFPVNSIPATVLFDSGATHSFISKKFVGMHGLIREELSTPMRVHTPRNSSTSVQFSPSITIEIQRSPFLANLILLESKDLDVILGMDWLTKFKGVIDCANRTVTLTNEKGETVVYKSLDSSKRGVFLNQIETEIPVDTVEKNLRKWEDIPIVCEYPEVFPEDLTTMPPKREIEFRIDLAPGTAPIYKRPYRMAANELAEVKKQVDEQLQKGYIRPSTSPWGAPVIFVEKKDKTKRMCVDYRALNEVTIKNKYPLPRIDDLFDQLKGAKVFSKIDLRSGYHQLRIREEDIPKTAFTTRYGLYECTVMSFGLTNAPAFFMNLMNKVFMEFLDKFVVVFIDDILIYSKSEEEHEQHLRLVLEKLKEHQLYAKFSKCDFWSTEVKFLGHVITAQGVAVDPSNVESVTKXTPPKTVSQIRSFLGLAGYYHQFIENFSRIARPMTQLLKKDEKFKWTAECDKSFEELKKKLVSAPVLILPDQMKDFQVYCDASRHGLGCVLMQEGRVVAYASRQLRPHEGNYPTHDLELAAVVHALKIWRHYLIGNRCEVYTDHKSLKYIFTQPDLNLRQXRWLELIKDYDMGIHYHPGKANVVADALSRKSYCTALCIEGMCEELRQEFEHLNVGIVEHGFVAALEARPTLVDQVRAAQVNDSEIAELKKNMRVGKARDFHEDEHGTIWLGERLCVPDDKELKDLILTEAHQTQYSIHPGSTKMYQDLKEKFWWVSMRREIAEFVALCDVCQRVKAEHQRPAGLLQPLQIPEWKWEEIGMDFITGLPRTSSGHDSIXVVVDRLTKVSHFIPVHTTYTGKRLAELYLSRIMCLHGVPKKIVSDQGSQFTSKFWQKLQEELGTRLNFSTAYHPQTDGQTERVNQILEDMLRACALDFGGAWDKSLPYAEFSYNNSYQASLQMAPFEALYGRKCRTPLFWDQTGERQLFGTEVLAEAEEKVRIIRERLRIAQSRQKSYADNRRRELTFEAGDYVYLRVTPLRGVHRFQTKGKLAPRFVGPYKILERRGEVAYQLELPSNMIGIHDVFHVSQLKKCIRVPEEQADSEHIDIQEDLTYVEKPVRILDTSERRTRNKITRFCRVQWSHHSEEEATWEREDELKAAHPHLFTSSSESRGRDSV

SEQ ID NO: 25974 - protein, 506 aa, Oryza sativa
  Clone ID: TF_OsC1528_2334.pep
MWIRGGREATDGRAKPASLARRGGRGGPMTMRSWTVNTRVATAVRTVYGQRVWRRRKLHEFLGRRRTGAGGPSQADTIGSQDEIVKTNTDGTEKGEYSGGDRPVRSRVGKLAPTCMKFDLVKFDGFGNFGLWQTRVKDLLAQQEVSKALKGVKPAKMEDDDCEEMQLQAAATIRRCLSDQIMYHVMEETSPKIIWEKLEAQFMSKTLTNKRYLKQKLYGLKMQEGADLTAHVNVFNQLVTDLVKMDVEVDDEDKAIVLLCSLPESYEHVMRKNKEGETSQAEGLLVKEDHAGHKVKKNKKKKMVKCFRCDEWGHIRRECPTLKGKAKANVATSSNDSDSDGCDLLTMSSAQSKDAEAWILDSASSFHVTPRKEWFSSYKSGEFGFVYLGDDTSYPAVGVGEVKIKLEDGGEHVLQGVRHVPGLKRNLISLGTLHEEGLIFRGNRNRKTIEIMKGKMTMMTGEKVESHLYKLRGCTVAGVVQEEAVAGIAIAFGGGGSGADSSGGLR

SEQ ID NO: 25975 - protein, 462 aa, Oryza sativa; identical to SEQ ID NO: 19275
  Clone ID: TF_OsC359_5686.pep

SEQ ID NO: 25976 - protein, 2112 aa, Oryza sativa; identical to SEQ ID NO: 19276
  Clone ID: TF_OsC91_1942.pep

SEQ ID NO: 25977 - protein, 223 aa, Oryza sativa
  Clone ID: TF_OsC547_335.pep
LAEGNPVSPHEIKMIGYTESLDKLGFPLSRELATDLILQSLPPSFEPFIMNFNMNNLNRTLAEVHGMLKTAEESIKKNSNHVMVMHKRKPNNKKSGQKRKLNSDEITSTGNSKTKVQKTGPAKDTECFFCKETGHWKRNCRKYLEHLKQMQQDGKSSTLGINVIEINLATSSTDSWVFDSSFSMKDLGEAVYILGIRIYRDRSNRLIGLSQSTYIDKVLKRLN

SEQ ID NO: 25978 - protein, 445 aa, Oryza sativa
  unsure (1)..(445): unsure at all Xaa locations
  Clone ID: TF_OsC93807_1.pep
MLLRLPCARGPAPAAAARWRPPGRAARTAPRLGRGHAAASSADGSGAPSSPLFVLCHSQALTLALPPQSLHYDYDPLADLLGPDVDPTSSQRSFNAGVILVTWLIWKEHNESLRGVQSLRNTAPVAEKGKLRSWVGPNGQYYRELPCPSCRGRGYTPCKQCGIDRSSLDCPMCNGKGIRECVQCAGECVIWQESIDEQPWEKVRSSSPLKVKEDDEVDKLEIKINTSKRSRRTYPSPSPEVALKISRSLRSLNAKTGLFTKHMKIIHQDPKLHAQRVAAIKKTKGTAAARKHASETQKAFFSNPENRLKRSIAMKGVKFFCSKCGQEGHRSFYCPTVREISGRAHFRCRLCGGKGHNSRTCGKPKSENECQRQPRHCSQCGERGHNRRNCPRSTTVEVEDVKIYSEXKQDNVHSSGIYSCSFCSAKGHNRRTCPKRKASIGQQKD

SEQ ID NO: 25979 - protein, 52 aa, Oryza sativa
  Clone ID: TF_jC-osroLIB3475021f01a1.pep
IGLGFRVYAICYSIGHLILLVVSVAARGGLLRCLSIICFVNHFLHEVTPGLS

SEQ ID NO: 25980 - protein, 1511 aa, Oryza sativa; identical to SEQ ID NO: 19284
  Clone ID: TF_OsC359_7398.pep

SEQ ID NO: 25981 - protein, 1475 aa, Oryza sativa; identical to SEQ ID NO: 19308
  Clone ID: TF_OsC1713_4193.pep

SEQ ID NO: 25982 - protein, 1200 aa, Oryza sativa
  unsure (1)..(1200): unsure at all Xaa locations
  Clone ID: TF_OsC359_6606.pep
SVPRRSRPFRRAAAAAVTSSLTSSGSSAVSRSWTRSISAVHLGSIPSFPESPFSPEKSLKSSKASKATPGLEWYIPGLEIELCSRDGCSEWLGLCNRMPRYKPEYLFGVEGFVQELRTMSFVIGFGTAPFYAQIPHDRHEERCRVKVTLNSNSEDILSVMFEAGGRNYIHACQEVARIAIGELRDRYSDQLADTEYRYHPRQPQGSDRGSYLETEGIENDATTRHLVEMLWAMDESHAETVLAAQDREDWNRGKICKLEDKVDRLEKELAALKGEAPPQKARIRLTARKRALFVPRYQLAPKMVNTRSNGNGPNLNNPNNNNNNEGNPTLAQVLAQQTQLMHMMMQQLQNQQNQGNNHAPPQNKLAEFLRVRPPIFSSTTNPVEAGDWLHAIEKKLDLLQCTDQEKVSFASHQLLGPASEWWDHFRLNRTTAEPITWLELTAAFRKTHIPSGVVSLKKKEFRSLTQGSRSVTEYLHEFNRLARYAPEDVRNDEERQEKFLEGLNDELSYPLMTGDYSNFQKLVDKAIRQEDKYNRMEQKKRRIAQFKIQQGNNQKPRLTFVPQSMPHGGSSSVVRPQRQFFNNNAGNNIRNQAPRPVAAPTQQPPAKREQGSKPVVCFNYGDPGHYADKCPKPRRVKVVPAXSNSTIPASKARVNHVAAAEAQDAPDVILGTFPVNSVHATVLFDSGATHSFLSMSFAGNHGMEVEDLRRPLMVSTPSNQALSLQRSPSVRIEIKGVPFLANLILLESKDLDVILGMDWLTRHKGVIDCANRKVTLTSSDGRVVTVHALSSESLRSRLNQITLEEIPIVREYPDVFPDDLPGMPPKRDIEFRIDLVPGTTPIHKRPYRMAANELAEVKRQVDDLLQKGYIRPSSSPWGAPVIFVEKKDHTQRMCVDYRALNDVTIKNKYPLPRIDDLFDQLKGATVFSKIDLRSGYHQLRIKEEDIPKTAFTTRYGLFECTVMSFGLTNAPAFFMNLMNKVFMEYLDKFVVVFIDDILIYSRTREEHEEHLRLALEKLREHQLYAKFSKCEFWLSEVKFLGHVISAGGVAVDPSNVESVTNCKQLKTVSEIRSFLGLAGYYRRFIENFSKITKPMTRLLQKDVKYKWSEECEQSFQELKNRLISAPILILPDPKKGFQVYCDASKLGLGCVLMQDGKVVTYASRQLRPHEKNYPTHDIELAAVVHALKIWRHYYLDTRSV

SEQ ID NO: 25983 - protein, 2246 aa, Oryza sativa
  unsure (1)..(2246): unsure at all Xaa locations
  Clone ID: TF_OsC359_7671.pep
MAAGSSAPVSISSGRPLSLPTLYNRSSCFAPPFPPLAAHSPRRIRARAVFLSLRRRRRAPVRRRRRSGPPPDSASPPSASPRSRRPRPPLRFARRLSERRRPRRSEPRRRLPPLRLSFPPSSSSRGEPWTASFASPFPPLSRPPLRRAVGRRRRPSGRGCAASRRPCRRGRLRARPAAARWXPAVSRPRPRVRLTRGTHGAGRRQPRAPGPPWTERLTXHLGHIRTGLRASVAKHYRXFHMSSGANEGYTSCGPVVEMSWHRAGVLLLGAQSCLPVPGVPAVGGIGSMAGSVTRRGLGMTGFVLELRGMCVALGYPHGVDYQARPLPEQEGDDAEPRAAWEVTAVILAGSSERTSLTVTAGGDSFPAACQSAALLAIGTLHQRYPDELQHSPYRYHPRRGGARDYATFRDASSEDDATIVHLARMVEAYDAARIDFHQMVRRGMVENNMKILELRQENLQLKKDLDAVEAQLHQLKIAQGEVCRPKRRRVCRSQKITARKSTSRPELVRQSLAWTCFVETPRAEPAPVVPQEGEASGVGSTEALSVAGSVWGFQMVTTRRNAVTGDGNQPEGSNHNHQGNPPPPPPPPPPPPPDTNAILTQILAQQANMMTAFLHHLQNPPQHNAPPPPPQHSKLAEFLRIRPPTFSSSNNPVDALDWLHAVGKKLDTVQCSDEEKVIFAAHQLQGPASLWWDHFQATQPEGQPITWARFTAAFRRTHVPAGVVALKKREFRELKQGNRSVMEYLHEFNNLARYAPEDVREDEEKQEKFLAGMDPELSVRLVSGDYPDFQRLVDKSIRLEAKHKELESHKRRLANFRNQQGANQRVRYTNPYPGGSSSQQQQQQQQPRSAPRPQFVVRVPQPQQQQGQQGTRAPRPPTPTVQPGQGRRDAQGQQRLCFNCFEPGHYADKCPKPRRQQGQAPPRSNNGGKDVIRGRVNHVTAKDVLTTPDVIVGTFLVHSIPATILFDSGASHSFISVPFVGRNQLGVERLRNPLLITTPGGVMTAKYYSPAVPIEIQGIPFPSDLILLDTKNLDIGLSEIPIVREFGDVFPEELPEKKDKTKRMCVDYRALNEVTIKNKYPLPRIDDLFDQLKGATVFSKIDLHSGYHQLRIREEDIPKTAFTTRYGLYEFTVMSFGLTNAPAFFMNLMNKVFMEYLDKFVVVFIDDILIYSQSEEDHQHHLRLVLGKLREHQLYAKLSKREFWLSEVKFLGHVISAKGVAVDPETVTAVTDWKQPKTVTQVRSFLGLAGYYRRFIENFSKIARPMTQLLKKEEKFVWSPQCEKAFQTLKEKLVSSPVLILPDTRKDFMVYCDASRQGLGCVLMQDGHVVAYASRQLRPHEGNYPTHDLELAAVIHDLKIWRHYLIGNRCEIYTDHKSLKYIFTQSDLNLRQRRWLELIKDYDVGIHYHPGKANVVADALSRKSHCNTLNVRGIPPELNQQMEALNLSIVSRGFLAALEAKPTLLDQIREAQKNDPDMHGLLKNMKQGKAAGFTEEEHGTLWNGNREKYWWRVKAEHQRPAGLLQPLQVPEWKWDEIGMDFITGLPKTQGGYDSIWVVVDRLTKVARFIPVKTTYGGNKLAELYFARIVSLHGVPKKIVSDRGSQFTSHFWKKLQEELGTRLNFSTAYHPQTDGQTERLNQILEDMLRACVLDFGKTWDKSLPYAEFSYNNSYQASIQMAPYEALYGRKCRTPLLWDQVGESQVFGTDILREAEAKVRIIRENLKVAQSRQKSYADNRRRDLEFAVDDFVYLRVTPLRGVHRFQTKGKLAPRYVGPFRIIARRGEVAYQLELPASLGNVHDVFHVSQLKKCLRVPSEQADSEQIEVREDLTYVERPVKILDTMERRTRNRAGPPATLADGWGPPVIAYLAPRPPPARALAPPPPPPNPPHPAVPVRHKEGEITPRDSLSLFPRFSLSLSLGFVWNLSRNPRRRNQWRPDPPRRFPSPPAALSHSRRYIIAPRASLLRFRHSPHTLPVGFVPAPSSSLSAVAAELRFAAVVAPDLLPTRRHLLRLRRVPVDLVHPFVSPADCRSAAVLVDPNRAAAFLRSGCRFRRPRRPGVSHGPPPSLPPSLPSLGRRSAAPLVAGGDHRGAGAPPPVGRAGEAAFGRAPRLPGGPGRQPPAPAGAADAWDPRRRSASAACTRSTVDREADAWAPLPWTRLGSGCMVLMVAPRPYKDRSSGLCCKALPYFHMSSGANEGYTSCGPVVEMSWHRAGVLLLGAQSCLPVPGVPAVGGIGLAQFFPSP

SEQ ID NO: 25984 - protein, 1651 aa, Oryza sativa
  Clone ID: TF_OsC359_7991.pep
MPRYKPEYLFGVEGFVQELRTMSFVIGFGTAPFYAQIPHDRHEEKCRVKVTLNSNSEDVPSVMFEAGGRNYIHACQEVARIAIGELRDRYSDRLADTEYRYHPRQPQGSDRGSYLETEGIENDATTRHLVEMLWAMDESRAETVLAAQDREDWNRGKICKLEDKVDRLEKELAALKGEAPPQKARIRLTARKRALFVPRYQLAPKVRVVEKEVAPADPPVIIISDDEEEESKRTHSKIEWVATQDDEDEPNEPTIDLRCSEELDNGNGPNSNNNNNNGENPTLAQVLAQQTQLMNMMMQQLQNQQNQGNNHAPPQNKLAEFLRVRPPIFSSTTNPVEAGDWLHAIEKKMDLLQCTDQEKVSFASHQLLGPASEWWDHFRLNRITAEPITWLEFTAAFRKTHIPSGVVSLKKKEFRSLTQGSRSVTEYLHEFNRLARYAPEDLRNDEERQEKFLGGLNDELSYPLMVGDYPDFQKLVDKAIRQEDKYNRMEQKKRRIAHFKAQQGSNQKPRLTLGPQSVPQGGSSSIVRPQRQFFNNNAGNNIRNQVPRPVAASTQQQPAKRKQGSKPVVCFNYGDPGHYADKCPKPRRVKVVPAQNNSAVPASKARVNHVAAAEAQDAPDVILGTFPVNSVPATVLFDSSATHSFLSMSFAGNHGMEVEDLRRPLMVSTPSNQALSLQRSPSVRIEIQGVPFLANLILLESKDLDVILGMDWLAKHKGVIDCANRKVTLISNDGRVVTVHALSSEFLRSRLNQITLGEIPIVREYPDVFPDDLPGMPPKRDIEFRIDLVPGTTPIHKRPYRMAANELAEVKRQVDDLLQKGYIRPSSSPWGAPVIFVEKKDHTQRMCVDYRALNDVTIKNKYPLPRIDDLFNQLKGATVFSKIDLRSGYHQLRIKEYGLFECTVMSFGLTNAPAFFMNLMNKVFMEYLDKFVVVFIDDILIYSRTKEEHEEHLRLALEKLREHQLYAKFSKCEFWLSEVKFLGHVISAGGVAVDPSNVESVTNWKQPKTVSEIHSFLGLAGYYRRFIENFSKIAKPMTRLLQKYVKYKWSEECEQSFQELKSRLISAPILILPDPKKGFQVYCDASKLGLGCVLMQDGKVVAYASRQLRPHEKNYPTHDLELAAVVHALKIWHHYLFGTRTEEFERLNLGIVSRGFVAALEAKPTLIDQVREAQISDPDIQEIKKNMRRGKAIGFLEDEQGTVWLGERICVPDNKDLKDAILKEAHDTLYSIHPGSTKMYQDLKERFWWASMKREIAEYVAVCDICQRVKAEHQKPAGLLQPLKIPEWKWEEIGMDFITGLPRTSSGHDSIWVIVDRLTKVAHFIPVKTTYSGSRLAELYMARIVCLHGVPKKIVSDRGSQFTSNFWKKLQEEMGSKLNFSTAYHPQTDGQTERVNQILEDMLRACALDFGGSWDKNLPYAEFSYNNSYQASLQMAPYEALYGRKCRTPLLWDQTGERQVFGTDILREAEEKVKIIQERLRVAQSRHKSYADNRRRDLSFEEGDYVYLRVTPLRGVHRFHTKGKLAPRFVGPYKIVSRRGEVAYQLELPQSLAGVYNVFHVSQLKKCLRVPTEEANIEQIEVQEDLTYVEKPIRILETNERRTRNRVIRFCKVQWSNHSEEESTWEREDELKSAHPHLFASSSESRGRDSV

SEQ ID NO: 25985 - protein, 1693 aa, Oryza sativa; identical to SEQ ID NO: 19316
  Clone ID: TF_OsC1713_4447.pep

SEQ ID NO: 25986 - protein, 983 aa, Oryza sativa
  unsure (1)..(983): unsure at all Xaa locations
  Clone ID: TF_OsC91_2190.pep
MAGPEDKDEEGASHSPRTKGIIQYFTRQVKQHTEGLDTDLQVTNEKIGQLESTQISTNTKLTGLETAVARIDTSLAALVRHFDALNAGGNGGGNDDDIDGEYVEDNLEDEYIADTEQDDRDARDRRRLHNNRRGMGGRRRREVRNNDDAFSKIKFKIPPFDGKYDPDAYLSWEIAVDQKFACHEFPESTRVRAATSEFTDFASVWWIEHGKKNPNNMPQTWDALKRVMRARFVPSYYARDLLNRLQQLRQGAKSVEEYYQELQMGLLRCNLEETEDAAMARFLGGLNREIYDIVDYKDYTNMTRLFHLACKAEREVQGRRASAKANFSAGKTSSWQTRTTPPAGRTASPSSTPTTSRAAPPPSSDKSATKAAQPAPSASSMASTGRMRDVQCHRCKGFGHVQRDCPSKRVLVVKNDGEYSSASDFDDDTLALLAADHADNEPPEEHIGAAFADHYESLIVQRVLSAQMEKAEQNQRHTLFQTKCVVKERCCRMIMDGGSCNNLASSEMVEKLALSTKPHPHPYYIQWLNNSGKAKVTKLVHINFAIGNYHDVVECDVVPMQACNILLGRPWQFDRDSMHHGRSNQYSFLYHDKKIVLHSMSPEDILRDDVAKAAKSKCESDKKAQSDGKKPETINLKPKCLLATKSDINELIASPSVAYALEYSDVFPKEVPPGLPPVRGIEHQIDLIPGASLPNRAPYRTNPEETKEIQRQXHELLDKGYVRESLSPCAVPXINNITIRYRHPIPRLDDMLDELSGSIVFSKVDLRSGYHQIRMKLGDEWKTAFKTKFGLYEWLVMPFGLTNAPSTFMRLMNEVLRPFIGKFVVVYFDDILIYSKSMGEHFNHLRAVFNALRDARLFGNLEKCTFCTDRVSFLGYVVTPQGIEVDQAKVEAIQSWPTPKTVSQVRSFLGLAGFYRRFVQDFSTIAAPLNVLTKKGVPFTWGTSQENAFHMLKDKLTHAPLLQLPDFNKTFELECDASGIGLG

SEQ ID NO: 25987 - protein, 2447 aa, Oryza sativa
  Clone ID: TF_OsC91_2385.pep
MAGPEDKDEEGASHSPRTKGIIQYFTRQVKQHTEGLDTDLQVTNEKIGQLESTQISTNTKLTGLETAVARIDTSLAALVRHFDALNAGGNGGGNDDDIDGEYVEDNLEDEYIADTEQDDRDARDRRRLHNNRRGMGGRRRREVRNNDDAFSKIKFKIPPFDGKYDPDAYLSWEIAVDQKFACHEFPESTRVRAATSEFTDFASVWWIEHGKKNPNNMPQTWDALKRVMRARFVPSYYARDLLNRLQQLRQGAKSVEEYYQELQMGLLRCNLEETEDAAMARFLGGLNREIYDIVDYKDYTNMTRLFHLACKAEREVQGRRASAKANFSAGKTSSWQTRTTPPAGRTASPSSTPTTSRAAPPPSSDKSATKAAQPAPSASSMASTGRMRDVQCHRCKGFGHVQRDCPSKRVLVVKNDGEYSSASDFDDDTLALLAADHADNEPPEEHIGAAFADHYESLIVQRVLSAQMEKAEQNQRHTLFQTKCVVKERCCRMIIDGGSCNNLASSEMVEKLALSTKPHPHPYYIQWLNNSGKAKVTKLVHINFAIGNYHDVVECDVVPMQACNILLGRPWQFDRDSMHHGRSNQYSFLYHDKKIVLHSMSPEDILRDDVAKAAKSKCESDKKAQSDGKKPETINLKPKCLLATKSDINELIASPSVAYALVCKDALISLHDMQHSLPPAVANILQEYSDVFPKEVPPGLPPVRGIEHQIDLIPGASLPNRAPYRTNPEETKEIQRQVHELLDKGYVRESLSPCAVPVILVPKKDGSWRMCVDCRAINNITIRYRHPIPRLDDMLDELSGSIVFSKVDLRSGYHQIRMKLGDEWKTAFKTKFGLYEWLVMPFGLTNAPSTFMRLMNEVLRPFIGKFVVVYFDDILIYSKSMGEHFNHLRAVFNALRDARLFGNLEKCTFCTDRVSFLGYVVTPQGIEVDQAKVEAIQSWPTPKTVSQVRSFLGLAGFYRRFVQDFSTIAAPLNVLTKKGVPFTWGTSQENAFHMLKDKLTHAPLLQLPDFNKTFELECDASGIGLGGVLLQEGKPVAYFSEKLSGPVLNYSTYDKELYALVRTLETWQHYLWPKEFVIHSDHESLKHIRSQGKLNRRHAKWVEFIESFPYVIKHKKGKENIIADALSRRYTLLTQLDYKIFGLETIKDQYAHDADFNDVLLHCKDGRTWNKFVINDGFVFRANKLCIPASSVRLLLLQEAHGGGLMGHFGAKKTHDILASHFFWPQMRRDVGRFVARCATCQKAKSRLHPHGLYMPLPVPTVPWEDISMDFVLGLPRTKRGRDSIFVVVDRFSKMAHFIPCHKTDDASHIADLFFREIVRLHGVPNTIVSDRDTKFLSHFWRTLWAKLGTKLLFSTTCHPQTDGQTEVVNRTLSTMLRAVLKKNIKMWEECLPHIEFAYNRSLHSTTKMCPFQIVYGLLPRAPIDLMPLPSSEKLNFDAKQRAELMLKLHETTKENIERMNAKYKFAGDKGRRELNFEPGDLVWLHLRKERFPDLRKSKLMPRADGPFKVLAKINENAYKIDLPADFRVSPTFNVADLKPYLGEEDELESRTTQMQEGEDDEDINTIDTSTSPHIQHDGPITRARARQLNYQDECPRGRVDAHHKFAATIGDDRATNPSGFASYGLYEFTVMSFGLTNAPAFFMNLMNKVFMEYLDKFVVVFIDDILVYSQSEEDHQHHLRLVLGKLREHQLYAKLSKCEFWLSEVKFLGHVISAKGVAVDPETVTAVTDWKQPKTVTQIRSFLGLAGYYRRFIENFSKIARPMTQLLKKEEKFVWSPQCEKAFQTLKEKLVSSPVLILPDTRKDFMVYCDASPQGLGCVLMQEGHVVAYASRQLWPHEGNYPTHDLELAAVVHALKIWRHYLIGNRCEIYTDHKSLKYIFTQSDLNLRQRRWLELIKDYDVGIHYHPGKANVVADALSRKSHCNTLGVRGIPPELNQQMEALNLSIVSRGFLATLEAKPTLLDQIREAQKNDPDMRGLLKNMKQGKAAGFIEDEHGTLWNRNRVCVPDVRELKQLILQEAHESPYSIHPGSTKMYLDLKEKYWWVSMKREIAEFVALCDVCQRVKAEHQRPAGLLQPLQVPEWKWDEIGMDFITGLPKTQGGYDSIWVVVDRLTKVARFIPVKTTYGGNKLAELYFARIVSLHGVPKKIVSDRESQFTSHFWKKLQEELGTRLNFSTAYHPQTDGQTERLNQILEDMLHACVLDFGKTWDKSLPYAEFSYNNSYQASIQMAPYEALYGRKCRTPLLWDQVGESQVFGTDILREAEAKVRTIWDNLKVAQSRQKSYADNRRRNLEFAVDDFVYLRVTPLRGVHRFQTKGKLAPRFVGPFRIIARRGEVAYQLELPASLGNVHDVFHVSQLKKCLRVPSEQADSEQIEVREDLTYVERPVKILDTMERRTRNRVIRFCKVQWSNHAEEEATWERENELKAAHPDLFASSSESRGRDSV

SEQ ID NO: 25988 - protein, 1391 aa, Oryza sativa
  unsure (1)..(1391): unsure at all Xaa locations
  Clone ID: TF_OsC91_2423.pep
MGNLRGHEFKDWNGVVQYRGIHASKFVSFEGGIHASSGFKVWALQQLLAWKTQSLKGAISILGPTTNNSNGTHISPIVSKVLMWLKNTVGAGFSYFNTYSAVLCASFCRSEASSTVAAPLQCRSTRLQIFPGSYSLQAFGRMMRSLIELLRLFILYTCDLMPQDSIAGDGSGVDLVDECPCGQVDAHHKFAVTIGDGVSVAKAQRLWTVTNEKIGQLKSTQISTNTKLTVLETAVARIDTCLAALVRHFDALNAGGNGGGNDDDIDGKYVEDNLEDEYIADTEQDDRDARDRRRLHNNRREHGKKNPNNMPQTWDALKRVMRARFVPSYYTRDLLNRLQQLRQGAKSVEEYYQELQMGLLRCNLEETEDAAMARFLGGLNREIFDIVDYKDYTNMTRLFHLTCKAEREVQGRRASAKANFSAGKTSSWQTRTTPPAGRTASPSSTPTISRAAPPPSSDKSATKAAQPALSASSMASTGRTRDVQCHRCKGFGHVQRDCPSKRVLVVKKDGEYSSASDFDDDTLALLAADHADNEPPEEHIGAAFADHYESLIVQRVLGAQMEKAEQNQQHTLFQTKCVVKERCCRMIIDGGSCNNLASSEMVEKLALSTKPYPHPYYIQWLNNSGRPWQFDRDSMHHGRSNQYFFLYHDKKIVLHPMSPEDILRDDVAKATKSKCESDKKAQSDGKKPETINLKPKCLIATKSDINELIASPSVAYALEYSDVFPKEVPPGLPPXASLPNRAPYRTNPEETKEIQRXVHELLDKGYVRESLSPCAVPVXDDMLDELSGSIVFSKVDLRSGYHQIRMKLGDEWKIAFKTKFRLYEWLVMPFGLTNAPSTFMRLMNEVLRPFIGKFVVVYFDDILIYSKSMGEHFNHLRAVFNALRDARLFGNLEKCSFCTDRVSFLGYVVTPQGIEDFSTIAALLNALTKKGVPFTWGTSQENAFHMLKDKLTHTPLLQLPDFNKTFELECDASGIGLGGVLLQEGKPVAYFSEKLSGPVLNYSTYDKELYALVRTLETWQHYLWPKEFVIHSDHESLKHIRSQGKLNSRHAKWVEFIESFPYVIKHKKGKENIIADALSRRYTLLTQLDYKIFGLETIKDQYAHDADFNEAHGGGLMGHFGAKKTHDILASHFFWPQMRRDVGRAVLKKNIKMWEECLPHIEFAYNRSLHSTTKMCPFQIVYGLLPRAPIDLMPLPSSEKLNFDAKQCAELMLKLHETTKENIERMNAKYKFAGDKGRRELNFEPRDLVWLHLRKERFPDLRKSKLMPRADGPFKVLAKINENAYKLDLPADFGVSPTFNVADLKPYLGEEDEHESRTTQMQEGEDDEDINTIDTSTSPHVQHDGSITRARARQLNYQDECPRGRVDAHHKFASXLETVYRLLRRSVFGRL

SEQ ID NO: 25989 - protein, 1748 aa, Oryza sativa; identical to SEQ ID NO: 19295
  Clone ID: TF_OsC91_2584.pep

SEQ ID NO: 25990 - protein, 1567 aa, Oryza sativa
  Clone ID: TF_OsC91_2593.pep
MAGLEDKDEEGASHSPRTKGIIQYFTRQVKQHTEGLDTDLQVTNEKIGQLESTQISTNTKLTGLETAVARIDTSLAALVRHFDALNAGGNGGGNDDDIDGEYVEDNLEDEYIADTEQDDRDARDRRRLHNNRRGMGGRRRREVRNNDDAFSKIKFKIPPFDGKYDPDAYLSWEIAVDQKFACHEFPENTRVRAATSEFTDFASVWWIEHGKKNPNNMPQTWDALKRVMRARFVPSYYARDLLNRLQQLRQGAKSVEEYYQELQMGLLRCNLEETEDAAMARFLGGLNREIYDIVDYKDYTNMTRLFHLACKAKREVQGRRASAKANFSAGKTSSWQTRTTPPAGRTTSPSSTPTTSRAAPPPSGDKSAIKAAQPAPSASSMASTGRMRDVQCHRCKGFGHVQRDCPSKRVLVVKNDGEYSSASDFDDDTLALLAADHADNEPPEEHIGAAFADHYESLIVQRVLSAQMEKAEQNQRHTLFQTKCVVKERCCRMIIDGGSCNNLANSEMVEKLALSTKPHPHPYYIQWLNNSGKAKVTKLVHINFAIGNYHDVVECDVVPMQACNILLGRPWQFDRDSMHYGRSNQYSFLYHDKKIVLHPMSPEDILRDDVAKAAKSKCESDKKAQSDGKKPETINLKPRCLLATKSDINELIASPSVAYALVCKDALISLHDMQHSLAPAVANILQEYSDVFPKEVPPGLPPVRGIQHQIDLIPGASLPNRAPYRTNPEETKEIQRQVHELLDKGYVRESLSPCAVPVILVPKKDGSWRMCVDCRAINNITIRYRHPIPRLDDMLDELSGSIVFSKVDLRSGYHQIRMKLGDEWKTAFKTKFGLYEWLVMPFGLTNAPSTFMRLMNEVLRPFIGKFVVVYFDDILIYSKSMGEHFNHLRAVFNALRDARLFGFQHHCCTIECASKKGVPFTWGTSQENAFHMLKDKLTHAPLLQLPDFNKTFELECDASGIGLGGVLLQEGKPVAYFSEKLSGPVLNYSTYDKELYALVRTLETWQHYLWPKEFVIHSDHESLKHIRSQGKLNRRHAKWVEFIESFPYVIKHKKGKENIIADALSRRYTLLTQLDYKIFGLETIKDQYAHDADFNDVLLHCKDGRTWNKFVINDGFVFRANKLCIPASSVRLLLLQEAHGGGLMGHFGAKKTHDILASHFFWPQMRRDVGRFVARCATCQKAKSRLHPHGLYMPLPVPTVPWEDISMDFVLGLPRTKRGRDSIFVVVDRFSKMAHFIPCHKTDDASHIADLFFREIVRLHGVPNTIVSDRDTKFLSHFWRTLWAKLGTKLLFSTTCHPQTDGQTEVVNRTLSTMLRAVLKKNIKMWEECLPHIEFAYNRSLHSTTKMCPFQIVYGLLPRAPIDLMPLPSSEKLNFDAKQRAELMLKLHETTKENIERMNAKYKFAGDKGRRELNFEPGDLVWLHLRKERFPDLRKSKLMPRADGPFKVLAKINENAYKIDLPADFGVSPTFNVADLKPYLGEEDELESRTTQMQEGEDDEDINTIDTSTSPHIQHDGPITRARARQLNYQDECPRGRVDAHHKFAATIGDGVSVAKAQRLWTVVVGP

SEQ ID NO: 25991 - protein, 986 aa, Oryza sativa
  Clone ID: TF_OsC91_2616.pep
MAAGWMGKVVTRVKCDSQVLRPSVYDHCRTGHPTATNKPEDPTNEDDENEHKNVQAANAILSALSGSEFNRVDDIESAKVIWDTLRNLHEGTDSVRESKVEILKGQFERFVILDGESPSDMYDRLNKIVNEIKGFGSKDMIDEVVVKKMIRAITPRNSILVTIIRERPDYKTLTPYDLLGHTLAHDMLKQESKEVIQFINQSSTTSIKKEDLALKGSSSKHYSNKSSGRHSARVCYMCKEPEHFIADCPHINEEKKKIEKKVEKKEKHKHSKHDHYGQSHLGMIFGSDSESSSSNEEGVATFAVKPSSAPRLFNYSSDEDAPICLMAKKPKVPSSLKSFNVDLVSDEEDDVQDEVMDEELFKSITKESLPHLSEFLGRIEDQYATLERQEALLIREKERSHELKGPQIGTTATFTELGKREKVASVNALCKLFDQPTAIQQWSTVTALISSYATARRRGHGSFPSAASHGCRSGGSRLSACGGAARRRRLWQRHLLPLLRRRQHPGGGPFYLVRQTTASEAVKAATAATADRSSSVVSDGEYYALAQCRADVPAGDCSRCLAACLGVIGGSGDDLCEKAAVRYDDRCLLRFAKGDDFTGFDVDEHTATVFDGGRSGLTVAEEVPTRLLATVAAAAPASRSRTAAGIASYGGGGSLYGLAQCTTQIPAPDCARCLRGALSRLSEDFNSTAAGMQLLRSSCMLRYGSSLFFNQSSPLLPVAHLAIAPAGGGAGPPAAAPPSPGHRPARARTIAISAGQPGYQTLVNSTGKFAERNKLGSGGCGTVYKGILHNNEEIAVKKLTRKDLREVEREVSLVAQLQHENIVKFLGHCFRHDKMFLVYEYLSNGTLSRYFKSDCQKLDWPKWLNIIRGIARGLSYLHRDSGKDIVHRDLKPSNVLLIPTSMQRLLTLILQDHTTGTKAMRALKREQAPRKNTTRIYWFHCFSLKWIHSSRTVCGRGILYQIGCVQFRRDDSGDHSWSEHQQVRQR

SEQ ID NO: 25992 - protein, 1619 aa, Oryza sativa
  Clone ID: TF_OsC91_2677.pep
MAGPEDKDEEGASHSPRTKGIIQYFTRQVKQHTEGLDTDLQVTNEKIGQLESTQISTNTKLTGLETAVARIDTSLAALVRHFDALNAGGNGGVNDDDIDGEYVEDNLEDEYIADTEQDDRDARDRRRLHNNRRGMGGRRRREVCNNDDAFSKIKFKIPPFDGKYDPDAYLSWEIAVDQKFACHEFPESTRVRAATSEFTDFASVWWIEHGKKNPNNMPQTWDALKRVMRARFVPSYYARDLLNRLQQLRQEETEDAAMARFLGGLNREIYDIVDYKDYTNMTRLFHLACKAEREVQGRRASAKANFSAGKTSSWQTRTTPLAGRTASPSSTPTTSRAAPPPSSDKSATKAAQPAPSASSMASTGRMRDVQCHRCKGFGHVQRDCPSKRVLVVKNDGEYSSASDFDDDTLALLAADHADNEPPEEHIGAAFADHYESLIVQRVLSAQMEKAEQNQRHTLFQTKCVVKERCCRMIIDGGSCNNLASSEMVEKLALSTKPHPHSYYIQWLNNSGKAKVTKLVHINFAIGNYHDVVECDVVPMQACNILLGRPWQFDRDSMHHGRSNQYSFLYHDKKIVLHPMSPEDILRDDVAKAAKSKCESDKKAQSDGKKPETINLKPKCLLATKSDINELIASPSVAYALVCKDALISLHDMQHSLPPAVANILQEYSDVFPKEVPPGLPPVRGIEHQIDLIPGASLPNRAPYRTNPEETKEIQRQVHELLDKGYVRESLSPCAVPVILVPKKDGSWRMCVDCRAINNITIRYRHPIPRLDDMLDELSGSIVFSKVELRSGYHQIHMKLGDEWKTAFKTKFGLYEWLVMPFGLTNAPSTFMRLMNEVLRPFIGKFVVVYFDDILIYSKSMGEHFNHLRAVFNALRDARLFGNLEKCTFCTDRVSFLGYVVTPQGIEVDQAKVEAIQSWPTPKTVSQVRSFLGLAGFYCRFVQDFSTIAAPLNALTKKGVPFTWGTSQENAFHMLKHKLTHAPLLQLPDFNKTFELECDASGIGLGGVLLQEGKLVAYFSEKLSGPVLNYSTYDKELYALVRTLETWQHYLWPKEFVIHSDHESLKHIRSQGKLNRRHAKWVEFIESFPYVIKHKKGKENIIANALSRRYTLLTQLDYKIFGLETIKDQYAHDADFNDVLLHCKDGRTWNKFVINDGFVFRANKLCIPASSVRLLLLQEAHGGGLMGHFGAKKTHDILASHFFWPQMRRDVGRFVARCATCQKAKSRLHPHGLYMPLPVPTVPWEDISMDFVLGLPRTKRGRDSIFVVVDRFSKMVHFIPCHKTDDASHIADLFFREIVRLHGVPNTIVSDRDTKFLSHFWRTLWAKLGTKLLFSTTCHPQTDGQIEVVNRTLSTMLRAVLKKNIKMWEECLPHIEFACNRSLHSTTKMCPFQIVYSLLPRAPIDLMPLPSSEKLNFDAKQRAELMLKLHETTKENIERMNAKYKFAGDKGRRELNFEPGDLVWLHLRKERFPDLRKSKLMPRADGPFKVLAKINENAYKIDLPADFGVSPTFNVADLKPYLGEEDELESRTTQMQEGEDDENINTIDTSTSPHVQHDGPITRARARQLNYQVSSFLSSYSSSLYPGDACTRVLLRNDGEDPKGRGFARGGFGLQGSANF

SEQ ID NO: 25993 - protein, 804 aa, Oryza sativa
  unsure (1)..(804): unsure at all Xaa locations
  Clone ID: TF_OsC1528_2042.pep
NPRPGPAGDATVRAYRTAPAAPPVPPAVPAAPVPAPAFTLSFAPASAARGPASGTGXVYTRTGSRATGEGSNGEERADGVHPNSDSGNGPPPLPENPTLAQVMAHQTQMMAAMMQQMQQQHQQMHQRMMQHAEQQHQQFGPPPPQSKLPEFLRVRPPTFSSTTNPMEANDWLHAIEKKLNLLQCNDQEKVAFATHQLQGPASAWTVTEYLHEFNRLARYAPEDVRTDAEKQEKFMAGLDDELTNQLISGDYADFERLVDKAIRQEDQRNKMDRKRKAAQFRAHQGSHQRPRFTPGQQGGPTTMIVRQHRPFNPSNFHQGTSGSQNHHGGQPNRGAAPRPSVAPAQSGQPAQAKKETGAKPGSCFNCDELGHFADKCPKPRRAGPRFIQARVNHASAEEAQAAPEVVLGTFPVNSIPATVLFDSSATHSFISKKFVGMHGLIREELSTPMRVHTPGNSSTSVQFSPSITIEIQRSPFLANLILLESKDLNVILGMDWLTKFKGVIDCASRTVTLTNEKGETVIETEIPVDTVEKNLRKLEDIPIVCEYPEVFPEDLTTMPPKREIEFRIDLAPGTAPIYKRPYRMAANELAEVKKQVDEQLQKGYIRPSTSPWGAPVIFVEKKDKTKRMCVDYRALNEVTIKNKYPLPRIDDLFDQLNGAKVFSKIDLRSGYHQLRIREEDIPKTAFTTRYGLYECTVMSFGLTNAPAFFMNLMNKVFMEFLDKFVVVFIDDILIYSKSEEEHEQHLRLVLEKLKEHQLYAKFSKCDFWLTEVKFLGVTGAPVASLVFCKVNVQPSSHMSRPEIH

SEQ ID NO: 25994 - protein, 1244 aa, Oryza sativa; identical to SEQ ID NO: 19318
  Clone ID: TF_OsC359_5634.pep

SEQ ID NO: 25995 - protein, 713 aa, Oryza sativa
  unsure (1)..(713): unsure at all Xaa locations
  Clone ID: TF_OsC359_5743.pep
VKTGNDPRASNDARGSEEQTDGAHISGASDSSSSPPPENPTVTQMMTMMIQQMQQHYHQMLQQAQQNQQQAQQNQQSGPPSSHLSKLLDFHHIQPPTFSSTTNPMXANDWLRAIEKKLNLLQCNDQEKVAFATHQLQGPASAWWDNYVVTRPDSTEVTWAEFCQSFRKAQIPEGIMAQKKREFRALHQETRIVTEYLHEFNRLARYAPKDVRTDAEKQEKFLFGLDDKLTNQLISGVYDDFEKLVDKAIRQEEQRNKMDRNRKVAQISFPQGNNXKPRFMTGQLGEPSTLIIRQHHPYHPSNFNNDYNGGSHNNSKQHNHNSTSPPLMAPAQSDPPAMSAQSEQLKKESAGKPRPCFNCGKHGHFAGKCPKLKRVGPRFVQARVNHASAEKAQASPEVVLGTFPVNSYPATVLFDSGASHSFISKRFAGAHGLSVVELKILMQVHTPGNDMRTAHYCPSVTIEIKRSRFLSNLILLESKDLDVILGMDWLTRHKGVIDCASRTITLSNDKGEKITFRSPVSQKSVASLNQAVIEDQTEIAEKNPKKLEDIPIVQEYPEVFPEGLTTMPPKREIEFQIDLAPGTAPIYKRPYRMAANELAEVKKQVDEQLQKGYIRPSTSPWGAPVIFVEKKDKTKRMCVDYRALNEVTIKNKYPLPRIDDLFDQLKGAKVFSNIDLRSGYHQLRIREEDIPKTAFATRSCSLFPHTRGVFGHE

SEQ ID NO: 25996 - protein, 1867 aa, Oryza sativa; identical to SEQ ID NO: 19326
  Clone ID: TF_OsC359_5787.pep

SEQ ID NO: 25997 - protein, 407 aa, Oryza sativa
  Clone ID: TF_OsC359_6467.pep
AKWIKPKDIFFHPPLASRELTRVHPWSIPSMLLGSQLPLVGSQDQNQYVFDRAFATQVDKLPMPEEDVPFCHDCRERGHCALNCPWVYAKEAPSFGLAGQTSLNQPPHTKSSLQPSVQSREPNGENPWNPGKCFPPSLSYHVGSRTKQAKRKKSKNQKRKAPMRTEEEVCKMTITSTEWPPAGITIPRRQRGNTFRGARQLTQHLLSHGGRVSDSEGSDQVSSDDEDESPRHLGEEEMESKACTRCGEIGHIASMCLTLCSYCEEDHPPGECPTRKVTCFLCEGTNHVPKDCQLSVLLTKTAEIQRTTLRLSHQLVSSNSNIDDIIHSTNAPPAAPDSAINHSNNTFSTNHSLHRQPQQRFVIDRRSCVSPRPTPGRAKGNQPQEDDTKQKTVIRFNQQSEGSFPCE

SEQ ID NO: 25998 - protein, 2050 aa, Oryza sativa
  unsure (1)..(2050): unsure at all Xaa locations
  Clone ID: TF_OsC359_8130.pep
RPGPTWQPRGAPEGGLAGTADGRRRARAPMVAGGGHRHGGAAAERGEGRGKRNGRSMAHPGSMATTGTATGAERGGGAARVDGDGGVPAVGDRNGEVDEVGEDAAKPKEAVPKREMVRGNDGGEPELGGDGGERGRRRELDSDGERERRVAETVERGTGSVYIEPGARGMNLSGRDTHGVDYQGKPVPEQEGDDAEPVAAWEVTAVILSGSPERTSLAVTAGGDSFSAACQNAALLAIGTLHQRYPDELQHSPYRYHPRRGGARDYATFRDASSEDDATIMHLARMVEAYDAARIDFHQMVRRGMVDNNMKILELRQENLQLKKDLDVLEAQLCQLKVAQGEVCRPKRRRVCRSQKITARKSTSRPELVCQSLAWTCFVETPRAEPAPVVPQEGEASGVGSTEDALLLTFRPGPSQRRSANTGDGHQPEGSNLNNHGSPPPPPPPPPPPPPDTNAILTQILAQQANMMAAFLHHIQNPPQHNAPPPPPPPQHSKLAEFLRIRPPTFSSSNNPVDALDWLHAVGKKLDTVQCNDEEKVIFATHQLQGPASLWWDHFXATQPEGQPITWARFTAAFRRTHVPAGVMALKKRAFRELKQGNRSVMEYLHEFNNLARYAPEDVREDEEKQEKFLAGMDPELSVRLISGDYPDFQRLVDKSIRLEAKHKELESHKRRLANFRNQQGANQRVRYTNPYPGGSSSQQQQQQPPSAPRPQFVVRVPQPQQPQGQQGTRAPRPPAPAVQPGQGHRDVQGQQSLCFNCFEPGHFADKCPKPRRQQGQAPPRSNNGGKDVIRGRVNHVTAEDVLTTPDVIVGTFLIHSTPATILFDSGASHSFISVPFVGRNQLGVERLRNPMLITTPGGVMTAKYYSPAVPIEIQGIPFPSDLILLDTKNLDVILGMNWLAQFQGVVDCARRTVTLHRGPEQPVVLFAPPTSVSSSELHQIGLLEIPIVREFGDVFPEELPGMPPKREIEFRIDLAPGTTPLYKRPYRMAANELAEIKKQLEELKEKGYIRPSTSPWGAPVIFVEKKDKTKRMCVDYRALNEVTIKNKYPLPRIDDLFDQLKGATVFSKIDLRSGYHQLRIREEDIPKTAFTTRYGLYEFTVMSFGLTNAPAFFMNLMNKVFMEYLDKFVVVFIDDILVYSQSEEDHQQHLRLVLGKLREHQLYAKLSKCEFWLSEVKFLGHVISAKGVAVDPETVTAVTDWKQPKTVTQIRSFLGLAGYYRRFIENFSKIARPMTQLLKKEEKFVWSPQCEKAFKTLKEKLVSSPVLILPDTRKDFLVYCDASRQGLGCVLMQEGHVVAYASRQLRPHEGNYPTHDLELAAVVHALKIWRHYLIGNRCEIYTDHKSLKYIFTQSDLNLRQRRWLELIKDYDVGIHYHPGKANVVADALSRKSRCNTLGVRGIPLELNQQLEALNLSIVSHGFLATLEAKPTLLDQIREAQKNDLDMHGILKNMKQGKAAGFTEDEHGTLWNGNRRVKAEHQRPAGLLQPLQVPEWKWDEIGMDFITGLPKTQGGYDSIWVVVDRLTKVARFIPVKTTYGGNKLAELYFARIVSLHGVPKKIVSDRGSQFISHFWKKLQEELGTRLNFSTAYHPQTDGQTERLNQILEDMLRACVLDFGKTWDNSLPYAEFSYNNSYQASIQMAPYEALYGRKCRTPLLWDQVGESQVFGTDILREAEAKVRTIWENLKVAQSRQKSYADNRRRDLEFAVDDFVYLRVTPLRGVHRFQTKGKLAPRFVGPFRITARRGEVAYQLELPASLGNVHDVFHVSQLKKCLRVPSEQADSEQIEVREDLTYVERPVKILDTMERRTRNRVIRFCKVQWSNHAEEEATWEREDEHPRAPLHRFRHSPPFLPVGIEPAPSHSLSAVAAELRSAAVVAPDHLPPRRRLLRLRRILADLVHPSASLADRRNAVDPVDPSRAATFLRSGCRFRRRRRLRVSRGPPFRFPLSLPSLGRCSAMPVVAGGDHRGEGAASRRPRRRGCLRAHRAAAAWGPAVSRPRPRVRLTRGARGAGRSEPRAPGPPWTVRLPRGPHSRGPGPRAPPFGSAI

SEQ ID NO: 25999 - protein, 2742 aa, Oryza sativa
  unsure (1)..(2742): unsure at all Xaa locations
  Clone ID: TF_OsC415818_1.pep
MALWNGLGQVANIAQLAGVDAYGLIKMIVEAAQTAKRNRETCQKLARHVKMIGDLLQRLQSTELMQHQETRNPVEQLEETLRHTYMLILSCQDSSYLHSCFMGGKQAHQLREVQSDITFYLQLFPLVSFVDTTRTWERLLRRAQPSCTEDTADELQKVHHSDHRIRNHVQDYAHKYIKLIELHWQFIFRFNTEILNATEFGDQSVTQCPEVFEEKRSEQASIRSLNLDQLVVNDIGKGAVLTFSQILAATNNFSGRSLIGQGGFGPVYKGKLPNGLEIAVKRHDTSSHQGEEEFMAEIDVIPKLRRKNIIELIGFCVQGKEYETKRILLNWSKRLKIIEGISDGLLYLHNHSPKCIVHRDIKASNILLDYEMNAKISDFGLAIKLAPKATTEVLVRGTWGYADPEYVATGVISEKTDVYSFGIVLLEIISGKLETWRGGMRGRGERGDLAGDGPTTAAVTSGGRSSALTIDLPPLLPSPAGISKLRLPSPARALNLSQVRPGEAFQNLILHLFHCPVTPIATTLGPSKIIPTPIWLCAAPSKPLNSLYVKNALNFWFSSSFSSFSVSSLGFGLFLSHVANKDVATSLFLAGSSVLKSAGLSIHLTKDSAAKDIQENVTRFLVQFEGSSSVPSLVGEKVVPALQTVKPAFTATSRHIGCSQQSSKTSTPSVPTGPALKSVYCPVTNSFRDALLSQPKPKPPARSATSRLPSRGRKNLTMLNRCFRCLGSDHQVKDCRDPLICASCRRAGHRQDSCRSSMASNISPRRSSSSFHPSTANSTSRFTTRWVRRALNTPAPPPPRLPTAPYPRSNHSSPPPDNLAIVPYVPPLTHVDAQLEDVIAMLESSLCSSPVRSVTAGPLVPMEVSENAVTSSVASPLPDVRNALVCVQDSSISVAALVPVLACAVNDLETVSTEVVPATVSLVSVMPTRAAAVAEVAHATVESVVVPSSVSEDLSPAVNLSSMPPRLRCKNKGFLAWYGACPSSRQPSSVPPQEPRDIFVCSEQLSANPILSPPQDPDSTRSPPPTLSGPSAAEQIRRALAGLSPEGSIHSASLSPGRVPVITSNDTTAAQDFAFGEPDPVNISGDSDDDILDIFIPFVDMRVTAHYATAYVTPPCECPGRVIRKAMQDAHPRFQFTLISACRGAMTLRFIHSQDRDFAVDHQENLTAEGHLVRLERPEDSAARFIQHNTMLSELDCIDFPPEMLFPNKIRNAFENYGELMEVDDQCLYGDEQSSLRLVVLHYPGKRMSPRFRLRYNLGIVCTVYVRVLRTWELAMNVDEDGNYIKHYEQFLFPHQLDPPRSGPTVGPEAELDNLNQAPSNQISNNQGLQNRGRLLAILPAASTVFIEEISDTPEIFVPPSIHSAPSSIHDCLQDLVPSDTENEHELSARKRRRQKKRTIDSDVKRRYSERLAAKEGHLYISMESKAARAKKLKEQLAKCSSKLNDAVHKHNLLDLNFKTTPKALEDLAIACSLNDHDIAQLRKLFFSSLVSSLPSLCSLSVYLLHETKLQNIPPEKAKTILPPNLANYDFVGSYGSTAGLPTAWNADFTKTSFISRHFSLTISFTSTFTDLSFSLTNIYGPAELDQKQDFLHELLEIDPLIQGPRLLIGDFNLTRSPSDKNSQNFSTGLAAAFNQTINSLSLFELPLPDRLYTWSNKREVPVLARLDRAFFNNAXGTTPSQTPPXSSCTRTTSDHVPLLLTASTSIPKSKTFRFENHLLLDRDFLPSVMHRWPQQLNMNDPAACLAAKLKQTRSIIKVWMKEHRKRSSLNEDCKFTIDLLDYIEELRPLNDGERCLRNLVQEKLFQAIQSKVAYWKQRGKVKRLKIGIDNSAFFKAHASKNYRNSRIRSIKHNGSEIADHNGKALLLHSFFQHFLGSDCQPLWDFDLSTLYSEDERDYNLLASQGLQFSTEEIITSIKGMNSNSAPGPDGFGPSFYNSAWNSIKEDIIKLAASFCSNSVQLERINRAHIVLIPKPGKENTVDGYRPISLQNCSVKILSKVLANRLQKVLTRMIHLDQTGFLKGRCISENLIYATELIQACHARKCKTLIIKLDFAKAFDSVLWTSLFQILAVRGFPNNWISWIKSLLQTSKSAVLLNGIPGKWINCKKGLRQGDPLSPYLFILVADVLQRLLEKNFQIRHPIYQDRPCATIQYADDTLVICRAEEDDVLALRSTLLQFSKATGLQINFAKSTMISLHIDRSKESSLSELLQCKLESLPMSYLGLPLSLHKLTNNDLQPIVVKVDSFLTGWEASLLSQAERLILVNAVLSSVPVYAMSAFKLPPKVIEAIDKRRRAFFWTGDDTCSGAKCLVAWDEVCTAKEKGGLGIKSLKTQNEALLLKRLFNLFSDNSSWTNWIWKEFDGRSLLKSLPLGQHWSVFQKLLPELFKITTVHIGDGSRTSFWHDRWTGNMTLAAQFESLFSHSTDDLATVEQILSFGIYDILTPRLSSAAQNDLQELQTILQNFSLTNESDTRLNNRLGNLTTKTIYDLRSPPGFPSPNWKFIWDCRMPLKIKLFAWLLVRDRLSTKLNLLKKKIVQTATCDICSTTDETADHLSFNCPFAISFWQALHIQPIINETKYLAQLKAPATIPTRHFQSFFMLCSWVLWNHRHDVVFRGRPPSIASCLQRGISESSLWAETFTPDDRFVIDVWKDISSSINAMTIQVGNLSPPALKNRKKLHKLIDPSLGAKKHERAQIMQCLRVAMLCVRDRAEHRPTMSEVVTMLPSIKTPKDRKAVVNVRF

SEQ ID NO: 26000 - protein, 694 aa, Oryza sativa
  unsure (1)..(694): unsure at all Xaa locations
  Clone ID: TF_OsC91_2199.pep
MTGFNLPENFKENPEAFFRSIKPRVVAPQKTLPTKKPAILAPPTFKTMADKTLREFAAPSVGNVAIGPQLNLGDVDFDLKSSLITMAXASLFCGKPNEDANAYLQQFLEICSTYTMKGVSPDVVRLRLFPFSLLGKAKXWFYANRATINTWDKCSIAFLSKFFPIGKTNPLHGRISSFQQTRDKSIPETWERLQKYTPMSCDHLDTLAGVAFFSKTVQGAVDLIEKMASNMSWSKERLQTRQRGIHTIKEIEMLAAKLDLLMKRLDDHDKRPQGTIKALDSHVTCEICGSTGHSRNDCPETREEAMYMGNNNNGYRPQGETQLAQLALLVPANEYGRIPRQPDSSKTDSLVKFMQNFLEKETTMPRNRYWKTPVKSSIPAKKLEQPAQRKPSSTPKSKRGSGSSSSHHDESSAHSSADVSMEDADAPRHLLNDADLDLVDDREMQAYYLLSDRKYAHTREYSPELLKKIGMDVDFRAIWKAVGWQRFAVIDXPGSHLLTLQFLCTLKEIEDGISFRFFHKEYTPTWKGLSTLLGFHDSCKIDLLKGISGFEKNRFWEDISGAPICKKPRTNDIHNPTLMLMHKWIAMTLFTRGDLRPIRGXELIIMFAMVRKIKIAPVKCMIRQCYHELTIPLXTIVESRAGGAYRETHNMTRNEXEGSSSSTPVQMYEAGWEPTGDVPGWTXQAPCHSIGVSS

SEQ ID NO: 26001 - protein, 2420 aa, Oryza sativa
  Clone ID: TF_OsC280853_1.pep
MMPLRDAARAACASHIFLQSWRCRPNLIFTGETLGLIINGTGKDDAKRDFINIVQRILLNHSGIGVKTLKLELLHFSDLDLGCLEAWLQIAVAPGIEELTLMFPCVRYKFPCSLLFERGGNSVRYLHLMVCTFRPTIGLGCLIKLTQLHLSFVWITGDELELLSKCVALEWLKLSYCPEIICLKVPCMLRQLGSLEVAECRYLKVIEICAPNLSNFYLTGFLVRTSFENPLLVKKLRIMCLRQGNFVSYARTKLPSLVPNVETLTVASNEATGQAIPTDRRPLRPRRPPPCAGSHPGADAHHPRLSCPIALPLEPARPPLDVAGQMRLASLPPSWPALQPAHPTLLRHHKPVIPSQPLSGPPLSPRSSTPRRNPQFWLESPPPPPSRSAVPFSADDVSHVSESPDPRSSPTPAMPRSFADAVRLDFNPAKGDGLPVFKSPHGQPPPRPKLKSAITIPAWSTFQRRAYRATPGEEMGVRRIHGTARPGRFNGEWKEVKPRHWWRRSPHSPESQRPASRRQDAHSRRSLAPAASASLRLFRERTAGKCFNCLARDHRAARCRDPVRCFRCFRSGHKANSCSRREPRPRQPRQSPQKALRRQASTPPPPQNTSHRQASTPSPSLPRATRPRQPRQSPQNTSCRQASTPPLQLPLPPKPSCNTRMALLGDPATRPDEDHCFVPTPFATEAERKEWESSAVVSWAMRAPASTTAQDVEAAFREEFRLRRGEVTVTRHHPEAFLIKFEHSSHCYEAMRKGFVKRNGIELHFIKWRSLSAALGIALMFRRLIARTCGLEEIETNLIHPVDTRTVDVWAWTGNPSSIPKRMWLTFTGSTRGAKPEQILVSDRPPAHWQHGAKFCVYIHLEEIHDYTTVAVDLDGNEACAPSKRRLPEWHLGVADGDPVPTRAFENFPHHPPPPRTRQGREPERIDDRDDRRRRAKDDRDRSRPRRSYNDDHPDHDRDQAWRRRDDDDDRDGRGGRGREAWRGRESRKVSGLDGQRVRERSPRRRDWAEDDRRGDRRHHVQAAVALPATIPPLKLAPKQAPRENLRETGERLVNRVNNFAAAVDDASQPGGEEAWSDRRPSRVHDVPIRQVFDRLKHCLFPAGIHSTPSHSGQVMPHDERASIGARGNTAAATAVASKTVTPPQLITAAPTTEQDEHQDAGNKNTLQVLESLFSTPPRAVLPRPTSPALTTTQATPAPAPAPPGGHGMERRRSARLAAKPPMPTMQRCTRVLLKRLGMLHDDKTLDEVLSDYIAMFNGPLPQHVIAALTSIFDIDADAIMEANHVDNTLLEVVGEGVADLVEECTALNELIAETSCNLVCIQETKLRAVDDQLARFLGAYRLDSYAFKPSRGTRGGILLLWNSTAISVHSTRIGRYSLTANITVLRCGTSFMLTTVYGPTRHREKDSFLRHIRSLKPSPGNKWLILGDFNLVYRARDKNNNNLNLGRMNRFRAALNRCELKEIHLQNRKFTWSNERRRPTLMRLDRFFCNEEWDLSFDRHILHALSTGPSDHCPLLLTDPSCPRKPRPFKFENFWIKLPGFKEVVEQAWGKPSNHTEPMHRLAYKLRDMAKELKRWARTTCSQTKLKYHMALDVILRLDVAQEQRTLSPEEGNLRAALKRRVLGLAVIERARKRQASRITNIRAGDANTKFFHLKVNSTRRKNHIHRLRKQNGWAVTHEEKSQAIFDHFSLFMGRPQERQLDLNWQSLGLETTDLNSLNEPFTVDEIKRAICHMPTDKAPGPDGFTGCFFKACWETIKNDVTTAFNAIYNHRCNHLNLLNSASVVLIPKKDGAEQVSDFRPISLIHGFAKIFSKLLALRLQPLMHKLVSTSQSAFIRGRSIHDNFLYVRTLFATSSSKILLNGIPGTKIIHGQGLRQGDPLSPLLFILAIDPLQRLLSKATELKLLSKLRGKSVTLCTSLYADDAAVFIKPGKSEVQNFTAILHRFGLATGLRANIEKTQVVAIRCENVDLDEVLQNTPATRASLPMKYLGLPLTTGRLRKADLQLLFDKSAGKMAAWRGRNLGLAGRTTLVKSVLSSQPVYLLIALKVSKESMETLDKQRKSFLWAGSEKLTRGKCKVNWKRTCSPTVYGGLGILNLENFARALRIRWLWQEWKAPERTWIGRDNPCDNTEKTLFAAATTITVGDGETASFWNSAWMQGRRPRDVMPLVYAISKRKNRSLKEGVTDNVWVQDLNFSSPDAITVELLDQIVTLWSIIQSVQLSPDVTDEITWKFTNHGEYTTSSAYKMQFLGSINANYDAIIWKPWAPNKCKIFAWLAIQNRVWTAGRLTTRGWPNNTFCPLCRHTRETVFHLLVDCRYSRRIWENLACWTSQEHIKPGNWAQPASLQDWWTAIATHPGTPRKGNRTLLLLVTWEIWKERNQRIFQRNELSILSLCTKIKEEAKTWTLAGAKRLSEIIP

SEQ ID NO: 26002 - protein, 1718 aa, Oryza sativa; identical to SEQ ID NO: 19339
  Clone ID: TF_OsC359_7853.pep

SEQ ID NO: 26003 - protein, 1378 aa, Oryza sativa
  unsure (1)..(1378): unsure at all Xaa locations
  Clone ID: TF_OsC1713_4081.pep
MRAQVSTRMPSFTSSRSNMRHSPCCLMSVNDMYGRLNVIVDDLKGLGANYTDLEVAQKMLRALPEKYETLVTMLINSDMSRMTPASLLGKINTNDMYKLKKKEMEETSPSKKCIARQAEVEDKGNGKVNEANENLEEEIALLARRFNDLLGRRKERGRGSNSNRRRNRRPNKTLSNLRCFECGEKGHFALKCPSKDDDGDKSSKKKSGGYKLMKKLKNSASSGSEEEDGDDTSSKKKKMAVVAIKEAPSLFAPLCLMAKGSSKVTSLSDSESDDDCDDVSYDELVSMFEELYAYSEKEIVKFKALKKDHASLEVLYEELKTSHERLTISHEKLKEAQDNLISTTQHGALIDVGISCDLLGDSATCHIAHVASSSISTSCDDLVDMSSSSSTSCVSICDASLVVENNELKEQVAKLNKSLERCFKDKNTLDKILSEQRCILNKEGLGFIPKKGKKPSHCATRFVKSNGRLMMVALLLDMWVPLYSVVNYRTGGSHWVFDSGCTQHMTGDRAMFTTFEVGGNKQEKVTFGDNSKGKVIGLGKIAISNDLSIDNVSLVKSLNFNLLSVARICDLGLSCAFLPQEVIVSSLLDKSCVFKGFRYGNLYLVDFNSSEANLKTCLVAKTSLGWLWHRRLAHVGMNQLSKLSKRDLVVDLKDVKFEKDKLCSACQAGKQVACSHPTQSIMSTSRPLELLHMDLFGPTTYKSIGGNSHCLVIVDDYSRYTWVFFLHDKSIVAELFKKFAKRAQNEFSCTLVKIRSDNGSEFKNTNIEDYCDDLGYASNSKAYQVYNKNKGIVEETADVQFDETNGSQEGHENLDDVGDEGLMRAMKNMSIGDVKPIEVEDKPSTSTQDKSSTSATPSQAQVEVEEEKAQDPPIPPRIHTALSKDHPIDQVLGDISKGVQTRSRVASICEHYSFVSCLEPKHVDEALCDLDWMNAMHEELNNFARNKVWTLVERPRDHNVIGTKWVFRNKQDENGLVVRNKARLVAQGFTQVEGLDFGETFAPVARLKAILILLAFASCFDIKLFQMDVKSAFLNDFKIGKVDTTLFTKIIGDDFFVCQIYVDDIIFGSTNEVFCKEFGDMMSREFDMSMIGELSFFLGLQIKQLQDGTFVSQTKYIKDLLKRFGLEDAKPIKTHMATNGHLDLDEGGKPVDLKLYRSMIVSLLYLTASRPDIMFSVCMCARFQAAPKECHLVAVKRILRYLKHSSTIGLWYPKGAKFKLVGYSDSDYAGCKVDRKSTSCSFQMLGRSLVSWSSKKQNSVALSTAEAEYVSAGSCCAQLLWMKQILLDYGISFTKTPLLCDNDSAIKIANNPVQHSRSKHIDXIRHHFLRDHVAKCDIVISHIRTKDQLADIFTKPLDETRFCKLRNELIVIDFSNVA

SEQ ID NO: 26004 - protein, 1430 aa, Oryza sativa; identical to SEQ ID NO: 19343
  Clone ID: TF_OsC1713_4390.pep

SEQ ID NO: 26005 - protein, 1632 aa, Oryza sativa
  Clone ID: TF_OsC154683_1.pep
MGEDRGLTTDEDIEVLTTIERWQQCRVVDNKLMAMVDGLMEDGAGSGEDDRGGWHNSAAPFAARACDDSGNIGAHSIGLQHNRVYSMSRGRNLGRIIVSSNSSKTWNGGLQREKEGVLDLLIEEDRELSGQPEDAQGLWDAVDTGDVPYQEDCQALSAILRAVPAEMVRPLAEKDSAKDAWDALKSMRVGADRVKESRAQKLRQTFESMRFKNGEHLEDFSLRLQSLEMICLKRRLFENCFASFPGGAVPHDAGGGRKSPAQRRLAEEKTWMGATLKILEDNKNNARQEGKACRFTTHVDIMAECRRDEMANLSIFVLCPRPTSPDNILAKADKAAVINSFHLSMTDEVLFSEKEAPAHSNKEAGQNSAGGRASSSRQPHRSRRERDGNGSDGKSGSSQAANRNVSKDKCRYCGKLGHWAKDCCKAKRDREKLAQANLLITEPAQAADEGEPTLLMAQVCELAPATDPVITDGEVTLKEERAHVSLQDEGKPVDLDWILDTGASNHMTGSRDAFSELHTTVRGTVKFGDASRVRIEGRGTVLFACKNGDHCALTGVYYIPKLRSNMVSLGQLDEARCKTVIEDGVLTLRDSQRRLLCRVRRGTGCLYVLHVELAQPVSLLAKGNDQAWVWHARYGHLNFDALRSLASRGMARDIPTLERVTQVCDGCLIGKQRRAPFPTAALHRATGRLDLVHGDICGPITPSTHGGVEVETGCKLRVLRTDRGGEFTSVEFGLYCANEGVARQLMAPYSPQQNGVVERRNQTVVAMARCMMKAKNMPGEFWGEAVTTAVYILNQAPTKSVRDKTPFEAWHGRTPAVHYFRTFGCIVYVKEVKPHINKLDDRSKAMVFLGYEPGSKAYRIYDPVAKRIVVSHDAVFDKAASWPWASPGEEDGVASSQETFTVRYEVAAVEVPSRHSDSMSSPAHSGPPAPSISASPGVPAVEFVSPPAETPDVDDDNVGPRRFRTVANILDTTSPIELDSDELHLAAAEEPSNHTEAAQDTLWQRAMQEELKSIVENNTWTLADLPAGKRPIGLKWVFKLKKDETGVIVKHKARLVAKGYVQQQGIDFDEVFAPVARMESVRLLLAIAAHLGWFVHHMDVKSAFLNGELEEEVYVAQPPGFVDDKHPHQVLRLNRALYGLRQAPRAWNAKLDVSLHELGFTRGITEHAVYTRGTGNARLIVGVYVDDLIITGAHSETIQSFKGEMHSLFRMSDLGLLSYYLGIEVHQGNDGITINQSTYAQKLLKMGGLAGCNSACVPMEPRLKLTKNSDRPSVDSTFYRSLVGSLRYLVHSRPDIAFAVGYFSRFMESPRDDHLTAVKHILRYVAGTVNYGCKFAHSGEEGIHLLGFSDSDLGGDVDDRKSTSGALFFLGSSPVAWLSQSKLPLSSSITTSSSKLYTPSCSSSTASASRGPQAAVDRCTPRADLRPHAPSPRQFRSSDASALRPPSPLFARMRHCPTPPVAAPPASRASLLRPPSPRFALRPRWTVSFHRRGVKEERTILKGITDKVRPWEVLAVLGPSGRGKSTLVSILGGRLAGRHAGMVLAGGRAPCRAVQRRAGFVAQDDVLHPHLTVCETLLFCAMLRLPTSAPATAEAATAEAVISELGLASCADTIVGNAGICAYLSAKYMVIL

SEQ ID NO: 26006 - protein, 1616 aa, Oryza sativa; identical to SEQ ID NO: 19347
  Clone ID: TF_OsC91_2278.pep

SEQ ID NO: 26007 - protein, 733 aa, Oryza sativa
  unsure (1)..(733): unsure at all Xaa locations
  Clone ID: TF_OsC1713_4158.pep
PAIIMIIILFFGIKICXFMTKFPTFQKFDRSFLVVGFVALLKPHAFDGPNYKRWKACALLWLMAMQCFFASRGKMSEQPVSPEKEAKFEVTDCLFRVALINVLADNIVDMYMHMPSGKDMWDALEAKFGVSDAGSELYVMEQFYDYNMVDDXSVVEQAHEIQMLAKELENNKCVLSDKLVAGGIIAKLPHSWSDFATSLKHKRQEFSVTDFIGSLGVGEKARAKDNRGXKVEGGSSANLVQKKNPHASHNNKKVKPDVKPKTTINSKKKGKEKVKGDYFVCGKLGHWAKDCPDRKDKNSANMVVSNGRGTMGYGXFLPTILSIFHSPNWRVDNGANSHLCADIFLFSSYQIAGGSSLLMGNRSLAAIHGVGMVVLKFTSGKTLQLKNVQHVPSIKRNLVSGSXSCRDGFILVFKSNRCVVSKYGTFIGXGYDSGGLFRFSLDDRCNIVVNHVSNDDESNVWQXPLCHVNFGCMTRLANMSLISKFTLAKGSKCHTCVQSKQPRKPHKXSEARNLAPLELVHSDMCEMNVVLTKGGKKYFMTLIDDCTRFCXYLLKTNDEALHYFMICKAEVXNQLERKIKQLGSDQGGEYFSTEFTSFCEEFGIFHERMPLYSPQSNGVAERKNRTLTELVNAMLDTAGLSKEWWGEAILTACHVLNRIXLKKEVTSFEEWEKKKLNLSYLRTXGCLAKVNVPIVKKRKLRLKTVDCVFLGYVIHGVGYRFLIANSRVSQQPA

SEQ ID NO: 26008 - protein, 1524 aa, Oryza sativa; identical to SEQ ID NO: 19354
  unsure (1)..(1524): unsure at all Xaa locations
  Clone ID: TF_OsC359_6842.pep

SEQ ID NO: 26009 - protein, 383 aa, Oryza sativa
  unsure (1)..(383): unsure at all Xaa locations
  Clone ID: TF_OsC359_7631.pep
MSWHRAGVLLLGGSILPACPGGSGRRWGWMFNREKGKNVSGYASSNSSFQLNPPLASRELTRAHPWSIPSMRLSSQLPLVGSQDQNKYVFDRAFATQANELPMPEEHVPFCHDCREQGHYALNCPWVYAKEAPSFGLAGQTSLSQPPRTKSSLQPSVQSREPNEENPLNPGNCFLSSLSYHVGSHTKQAKGKKSKNQKRKAPMRTEEEVRKMTITSTEWPPAGITIPRRQRGNTFRGARQLTQHLLSHGGRVYDSEGSDQVSSDYEDESPRHLGEEEMESKACNRCGEIGHIASMCLTLCPHCGEDHPPGECPTRKVTCFLCEXTNHSLHRQPQQRIVIDGRSCVSPRPTPGRAKGNQSQEGDTKQKTVLCFEXQSEGSFSCE

SEQ ID NO: 26010 - protein, 1306 aa, Oryza sativa
  unsure (1)..(1306): unsure at all Xaa locations
  Clone ID: TF_OsC1528_1733.pep
MAGFADALRPDKFTGVHFKRWQIRVTLWLTAMKCFWVSTDKPMGVLNADQQKEFDEATTLFVGCILSVLGDRLVEVYMHMTDAKELXDALNTKFGATDASNDLYIMEQFHDYKMADNRSVVEQAHEIQTTAKELELLKCVLPDKFVAGCTIAKLTPSWRGFGTALKHKRQEYSVEGLIASLDVEEKAREKDAASKGDGGQSTANVVHKAQNKSKGKYKAQQTTNFKKKNNNNNPNQDERTCFVCGQPGYLARKCPQRKGMKAPAGQTSKSANVTIGNTGDGSGYGNLPTVFSVNQSTNWWVDTGANAHVCADISLFSSXVARGSTVLMGNRSHAFVHGVGTVDLKFTSGKIVQLKNVQHVPSIDRNLVSGSRLTRDRFKLVFESXKVVVSKHGYFIGKGYECGGLFCFSLSDFCNKSMNHICGSVDDEANVWHSRLCHINFGLMSRLSSMCLIPKFSIVKGSKCHSCVQSKQPRKPHKAAEERNLAPLELLHSDLCEMNRVLTKGEKRYFMTLIDDATRFCYVYLLKTKDEALDYFKIYKAEVENQLDRKXKRLRSDRDVEFFXNEFDLFCEEHDIIHERTPPYSPESNGFAESENRTLTDLVNAMLDTAGLPKAWWGEALLTSNHVLNRVPNRNKDKTPYKIWIGRKPSLSYLRTWGCLAKVNASITKKRKLGPKTVDCVFLGYAHHSIAYRFLIVKSEVPDMHLGTIMESRYATFFESFFPMKDTHSSSSQPSEIIPSSITLPEQTEHTHEHVTEEDDSEAPRRSKRQRTAKSFGDDFTVYLVDDTPKSILEAXASPDADYWKXAVRSEMDSIIANGTWEVTERPYGCKPMGCKWVFKKKLRPDGTIEKYKARLVAKGYTQKEGEDFFDTYSPVARLTTVRMLLSLAASHGLLVHQMDVKTAFLNGELDEEIYMDQPDGFVVEGQEGKVCKLLKSLYGLTQAPKQWHEKFDKTLTSAGFAVNEADKCVYYRHGGGEGVILXLYVDDILIFGTNLEVINEVKSFLSQNFDIKDLGVADVILNIKLIRGENGITLLQSHYVEKIFNRFGYIDSKPSPTPYDPSLLLRKNKRIARNQLEYSQIIGSLMYLASATRPDISFAVSKLSQFTSNPGDDHWRAVERVMRYLKGTMELGLHYSGYPAVLEGYSDSNWISDVDEIKATSGYVFTLGGGAVSWRSCKQTILTRSTMEAELTALDTATVEAEWLCDLLMDLPIVEKPTCEKTIEVCQEIEKLRSYNVGLHPNNXKPSRSLHEGTITKCDRXCIEGDGFETHSILERTHLCKLDCWSQSMKILSESSRKLTKDLGV

SEQ ID NO: 26011 - protein, 1003 aa, Oryza sativa
  unsure (1)..(1003): unsure at all Xaa locations
  Clone ID: TF_OsC783_2.pep
CRRNPSSSSSSSRQAAAISMAPANPRHRLIAPIHAAAAAGGGGGGAGATSPSGLPSVSRQSVKMHAAXVAISHDLPIELTCFLKQAFAAASIKFPSALFGMFCVFSVLVVLDAFAPALAKGFMDFFEPATLFIQRWLPLFYVPSLVVLPLAVRDVPAASGLKIFLIIFGGWFASLMVAGYTALTVRKIVQTQLIPAEPMSKPSPFATLEFWAWGAVFVASFAVAYVNPTALGTTARTCLPFLLASTVLGYMVGSGIPSGVKKVLHPIICCALSADLAAIAYGYLSRSGVDAVLGDYLTKAPSNPGAGDVLMGFLGSVIISFAFSMFKQRKLVKRHAAEIFTSIAIASTFSLYSTAILGRVIGLEPSLTISILPRCITVALALSIVSFFEGVNSSLTAAVVVLTGLIGANFVQAAMDKLGLNDPIARGIGTASSAHGLGTAALSAKEPEALPFCAIAYGLTGIFENMNTPRRENAKAIFTKSKTNYEVQGKSQARTARTSAGTGGRQEAAPRQQEAFGWEEASAAKVDSDEDDAAEECDDGAVVLGGVEREVAGEEVLQVLQPPDAIGAQHLDHAVHQLDEDILYYYPLAKTQKSSANLSVPKNCLSPGNLNLLGLGQPHLGRIVIILVEMRGILEYKEYNTVNRLFQFACKAEREVQGRNKHRSSFAGATSTRQSTPRQFTTAVRPPTSTPSHAQETSKNASVQTPAKSATSVASTGRTRDITCHRCHGIGHIARDYPNQRALFVNDDGEYTSTSDCDDEYALVATDHVGGQDNDDIEEVHLHPESLDQYPSLIVKLALSAKEKCEEQNQRHNLFQSKVLVKGHTVKVIIDSGSCNNLASEEMVKKLGLTTHPHPHPYHIQWFNTCGKMKEYEGAFHDEIPPRMTPGRQSEHDQEDGIESRTTPIQEGEDDEDITSSETHITSHVPMIIPSPSPVRPPETALTSNGPSAFMPTPIWVILDLMERLSRYLSNASGLMSKFISSQRESSKQDSDVAETELGPWAL

SEQ ID NO: 26012 - protein, 1395 aa, Oryza sativa; identical to SEQ ID NO: 19363
  Clone ID: TF_OsC1713_3518.pep

SEQ ID NO: 26013 - protein, 972 aa, Oryza sativa
  unsure (1)..(972): unsure at all Xaa locations
  Clone ID: TF_OsC1713_3822.pep
MPVPVYAAAAMLPPSPCPSLAAAVLVYKGWLQGADRACRGAPPAMGCPAISSRNHLIPGRYHPIPRKYHAIHGRNRLIPDKYHMIPRENHAIRGRNRLIHDRFHMIPREYHAIRGRNRMIPDKYHLKRGYSLMGCIKDIPTLKEDNYAQWKRKLNLAFILGEVDWVLTTPCPIEPAALVRGENKSDADWKKRQRDNAPLVMSYDIEQKTWSLANKKCLAVVKNTIEPTILGSILECDAVSEYLERTKSQFTGSSKTYATQLIKQLVTERYHGGGVRDHILRMSNMASKLKPMDLGITYDFLVHLVMASFPKQFDNFIVNYNISPEKWNFEKLIANCVQEEERIKESNGGSINYVKDKKKNYKSPTSKAKQSQHLPQQQQFAVEKDQCLHCKKTGHYKKDCPDFLKMIMARKGENIITFVNESHYVGYSRSTWWIDSGATIHACNCLKAFRSTRTTQRRESSIRVANGVEEKVEAVGDLPLEIANGFTLLLRDVFYVPSLQRNLISVSKLDFDGYDCRFGSGKCELCVDGYDSFITFTDDYSRYGYIYTIKERSEALDKFKIFKAEDENQHDIKIKVVRSDRGGEYYGRHTPYGQVPGPFARFLLENGIVAQYSTPGEPQQNGVAERRNRTLMYMVRSMMSYSTLPLGLWMEALKTAIHILNRVPSKSVTKTPYELWIGRVPSLAHLRVWGSPVQTPVVTSPVATINENEEPVIQDSIEMVATPEEELQQPQTDNVPVQETQQEPQDDPTSYEEAMRSARLSEWLEAMKDEMKSMKLNDVWDLEEIPKGAKIVGXDVKTTFLNGDLEEKVYMAQPKGFVMKGNENMGCRXKRSIYGLKQASRQWYLKFDGTIKKFGFQENVEDNCIYSKFKNGRFIFLILYVDDILLASSDVSLLQETKKFLSSNFDMKDLGEASYVLGIEIHRDKTKYALGLSQKTYXKVLKKFNMNRCSATPAPIVKGEKYGASQCPRNQY

SEQ ID NO: 26014 - protein, 1390 aa, Oryza sativa; identical to SEQ ID NO: 19367
  Clone ID: TF_OsC1713_4196.pep

SEQ ID NO: 26015 - protein, 1148 aa, Oryza sativa
  unsure (1)..(1148): unsure at all Xaa locations
  Clone ID: TF_OsC1713_4332.pep
MEKKLDLAFILGEVDWVLTTPCPIEPAELVRGENESDADWQKRQRDNAPLVMSYDIEQKKWSLANKKCLAVVKNTIEPTILGSIPECDVVSEYRERIKSQFTGSSKTYATQLIKQLVTERYHGGGVRDHILRMSNMASKLKPMDLGITDDFLVHLVMASLPKQFDNFIVNYNISPEKWNFEKLIANCVQEEERIKESNGGSINYVKDKKKNHKSPTSKGKQSQHLPQQQQFAVEKDQCLHCKKTGHYKKDCPDFLKMIMAKKGENIITFVNESHYVGYSRSTWWIDSGATIHACNCLKAFRSTRTTQGRESSIRVANGFEEKVEAVGDLPLELANGFTLLLRDVFYVPSLQRNLISVSKLDFDGYDCRFGSGKCELWHNNACIGLAVLRDELYLLSLSENVNVVSSLTKENKKRKRTSDVSSKLWHCRLGHISRGRIERLVKNEILSPLEFSDLEQCIECIKGKFVKSIKKGAKRSAGILEIIHTDICGPFPMKSMDGYDSFITFTDDYSRYGYIYPIKERSEALDKFKIFKAEVENQHDIKIKVVRSDRGGEYYGRHTPYGQVPGPFARFLLENGIVAQYSTPGEPQQNGVAERRNRTLMXWTGRVPSLTHLXYTKFVETRHAVFLEDGMIRGSSVVREIDLEERRVSVPAPSTQEPFFSLPADVVPAMPVIEVPAPVVTPPVATMNESEEPVIQDSTEMVATPEEELQQPQIDNVPVQETHQEPQVQDVPNVQAPRRSERVRRSAIRDDYKVYNIEESHMEDDPTSYEEAMRSARSSEWLEAMKDEMKSMKLNDVWDLEEIPKGAKTVGCKWVYKTKYDSRGNIEKFKARLVAKGFTQREGIDYNETFSPVSCKDSFRIIMALVAHYDLELHQMDVKMAFLNGDLEEKETKKFLSSNFDMKDLGEASYVLGIEIHRDRTKYALGLSQKTYIEKVLKKFNMYRCSATPAPIMKGEKYGASQCPRNKYELNEMKTKPYASAVGSLQRSESLQIVGYSDSDFAKDNTKSTSGYVFTLAGGAISWKSSKQTITGGSTMYAEFIACYEATGQVNWLKKFIPGLKVVDSIEKPLKLYCDNEPAVMYAHNNQSSGAAKHIDIKYYVVKDKVRDQTISLEHIKTERMLADPLTKGLPPNVFKEHVAGMGLREAL

SEQ ID NO: 26016 - protein, 1407 aa, Oryza sativa; identical to SEQ ID NO: 19379
  Clone ID: TF_OsC1713_4463.pep

SEQ ID NO: 26017 - protein, 1391 aa, Oryza sativa
  Clone ID: TF_OsC1713_4855.pep
MVAFPSLTPLCSLLGCRRRPFAPRHHQSSPPFSSFAPAAVFAGGYSLMGCIKDIPTLKGDNYAEWKRKLDLAFILGEVDWVLTTPCPIEPAELVRGENESDADWQKRQRDNAPLVMSYDIEQKKWSLANKKCLAVVKNTIEPTILGSIPECDAVSEYLERIKSQFTGSSKTYATQLIKQLVTERYHGGGVRDHILRMSNMASKLKPMDLGITDDFLVHLVMASLPKQFDNFIVNYNISPEKWNFEKLIANCVQEEERIKESNGGSINYVKDKKKNHKSPTSKGKQSQHLPQQQQFAVEKDQCLHCKKTGHYKKDCPDFLKMIMAKKGENIITFVNESHYVGYSRSTWWIDSGATIHACNCLKAFRSTRTTQGRESSIRVANGVEEKVEAVGDLPLELANGFTLLLRDVFYVPSLQRNLISVSKLDFDGYDCRFGSGKCELWHNNACIGLAVLRDELYLLSLSENVNVVSSLTKENKKRKRTSNVSSKLWHCRLGHISRGRIERLVKNEILSPLEFSDLEQCIECIKGKFVKSIKKGAKRSAGILEIIHTDICGPFPVKSMDGYDSFITFTDDYSRYGYIYPIKERSEALDKFKIFKAEVENQHDIKIKVNGVAERRNRTLMDMVRSMMSYSTLPLGLWMEALKTAIHILNRVPSKSVPKTPYELWTGRVPSLTHLRVWGSPTEAKVFNPNIGKLDPKTVSCHFIGYPERSKGYRFYCPNSYTKFVETRHAVFLEDEMIRGSSVVREIDLEERRVSVPAPSTQEPFFSLPADVVPAMPVIEVPAPVVTPPVATMNESEEPVIQDSTEMVATPEEELQQPQIDNVPVQETHQEPQVQDVANVQAPRRSERVRRSAIRDDYKVYNIEESHMEDDPTSYEEAMRSARSSEWLEAMKDEMKSMKLNDVWDLEEIPKGAKTVGCKWVYKTKYDSRGNIEKFKARLVAKGFTQREGIDYNETFSPVSCKDSFRIIMALVAHYDLELHQMDVKTAFLNGDLEEKVYMAQPKGFFMKGNENMGCRLKRSIYGLKQASRQWYLKFDGTIKKFGFQENVEDNCIYSKFKNGRFIFLILYVDDILLASSDVSLLQETKKFLSTNFDMKDLGEASYVLGIEIHRDRTKYALGLSQKTYIEKVLKKFNMYRCSATPAPIMKGEKYGASQCPINQYELNEMKTKPYVSAVGSLQYAQVCTRPDLAFVTGLLGRFQSNPGLEHWKLVKKVLRYLQGTKGLMLTYRRSESLQIVGYSDSDFAKDNTKSTSGYVFTLAGGAISWKSSKQTITAGSTMYAEFIACYEATGQVNWLKKFIPGLKVVDSIEKPLKLYCDNEPAVMYAHNNQSSGAAKHIDIKYYVVKDKVRDQTISLEHIKTERMLADPLTKGLPPNVFKEHVAGMGLREAL

SEQ ID NO: 26018 - protein, 1340 aa, Oryza sativa
  unsure (1)..(1340): unsure at all Xaa locations
  Clone ID: TF_OsC1713_5239.pep
GYSLMGCIKDIPTLKGDNYAEWKRKLDLAFILGEVDWVLTTPCPIEPADLVRGEKCDAVSEYLERIKSQFTGSSKTYATQLIKQLVTERYNGGGVRDHILRMSNMASKLKPMDLGITDDFLVHLVMASLPKQFDNFIVNYNISPEKWNFEKLIANCVQEEERIKESNGGSINYVKDKKKNHKSPTSKGKQSQHLPQQQQFAVEKDQCLHCKKTGHYKKDCPDFLKMIMAKKGENIITFVNESHYVGYSRSTWWIDSGATIHACNCLKAFRSTRTTQRRESTIRVANGVEEKVEAVGDLPLELANGFILLLRDVFYVPSLQRNLISVSKLDFDGYDCRFGSGKCELWHNNACIGLAVLRDELYLLSLSENVNVVFSLTKENKKRKRTPDVSSKLWHCRLGHISRGRIERLVKNEILPPLEFSDLEQCIECIKGKFVKSIKKGAKRSAGILEIIHTDICGPFPVKSVDGYDSFITFTDDYSRYGYIYPIKERLEALDKFKIFKAEVENQHDIKIKVVRSDRGGEYYGRHTPYGQVPGPFARFLLENGIVAQYSTPGEPQQNGVAERRNRTLMDMVRSMMSYSTLPLGLWMEALKTAIHILNRVPSKSVPKTPYELWTGRVPSLTHLRVWGSPTEAKVFNSNIGKLDPKTVSCHFISYPERSKGYRFYYPNSYTKFVETRHAVFLEDEMIRGSSVVREIDLEERRVSVPAPSTQEPFFSLPADVVPAMPVIEVPAPVVTPPVATLNESEEPVIQDSTEMVATPEEELQQPQINNVPVQETHQEPQVQDVPNVQAPRRSERVRRSAIRDDYKVYNIEESHMEDDPTSYEEAMRSARSSEWLESMKDEMKSMKLNDVWDLEEIPKGAKTVGCKWVYKTKYDSRGNIEKFKARLVAKGFTQREGIDYNETFSPVSCKDSFRIIMALVAHYDLELHQMDVKTAFLNGDLEEKVYMAQPKGFVMKGNENMGCRLKRSIYGLKQASRQWYLKFDGTIKKFGFQENVEDNCIYSKFKNGRFIFLILYVDDILLASSDVSLLQETKKFLSSNFDMKDLGEASYVLGIEIHRDRTKYALGLSQKTYIEKVLKKFNMYRCSTTPAPIMKGEKYGASQCPRNQYELNEMKTKPYASAVGSLQYAQVCTRPDLAFVTGLLGRFQSNPGLEHWKLIKKVLHYLQGTKGLMLSYRRSESLQIVGYSDSDFAKDNTKSTSGYVFTLAGGAISWKSSKXTITAGSTMYAEFIACYETTGQVNWLKKFIPGLKVVDSIEKPLKLYCDNEPAVMYAHNNQSSGAAKHIDIKYYIVKDKVRDQTISLEHIKTERMLADPLTKGLPPNVFKEHVAGMGLREAL

SEQ ID NO: 26019 - protein, 1479 aa, Oryza sativa
  Clone ID: TF_OsC1713_5492.pep
MAGAAKASWMVAMSVGAVEALKDQGGLCRWNYALRSIHKAAKANAAGVSQGKKLPASAAAVAERRRAEKAEEGLRTVMYLSCWGPNCGYSLMGCIKDIPTLKGDNYAEWKRKLDLAFILGEVDWVLTTPCPIEPADLVRGENESDADWQKRQRDNAPLVMSYDIEQKKWSLANKKCLAVVKNTIEPTILGSIPECDAVSEYLERIKSQFTGSSKTYATQLIKQLVTERYHGGGVRDHILRMSNMASKLKPMDLGITDDFLVHLVMASLPKQFDNFIVNYNISPEKWNFEKLIANCVQEEERIKESNGGSINYVKDKKKNHKSPTSKGKQSQHLPQQQQFAVEKDQCLHCKKTGHYKKDCPDFLKMIMAKKGENIITFVNESHYVGYSRSTWWIDSGATIHACNCLKAFRSTRTTQRRESTIRVANGVEEKVEAVGDLPLELANGFILLLRDVFYVPSLQRNLISVSKLDFDGYDCRFGSGKCELWHNNACIGLAVLRDELYLLSLSENVNVVSSLTKENKKRKRTPDVSSKLWHCRLGHISRGRIERLVKNEILPPLEFSDLEQCIECIKGKFVKSIKKGAKRSAGILEIIHTDICGPFPVKSVDGYDSFITFTDDYSRYGYIYPIKERSEALDKFKIFKAEVENQHDIKIKVVRSDRGGEYYGRHTPYGQVPGPFARFLLENGIVAQYSTPGEPQQNGVAERRNRTLMDMVRSMMSYSTLPLGLWMEALKTAIHILNRVPSKSVPKTPYELWTGRVPSLTHLRVWGSPAEAKVFNPNIGKLDPKTVSCHFIGYPERSKGYRFYCPNSYTKFVETRHAVFLEDEMIRGSSVVREIDLEERRVSVPAPSTQEPFFSLPADVVPAMPVIEVPAPVVTPPVATMNESEEPVIQDSTEMVATPEEELQQPQIDNVPVQETHQEPQVQDVPNVQAPRRSERVRRSAIRDDYKVYNIEESHMEDDPTSYEEAMRSARSSEWLEAMKDEMKSMKLNDVWDLEEIPKGAKTVGCKWVYKTKYDSRGNIEKFKARLVAKGFTQREGIDYNETFSPVSCKDSFRIIMALVAHYDLELHQMDVKTAFLNGDLEEKVYMAQPKGFVMKGNENMGCRLKRSIYGLKQASRQWYLKFDGTIKKFGFQENVEDNCIYSKFKNGRFIFLILYVDDILLASSDVSLLQETKKFLSSNFDMKDLGEASYVLGIEIHRDRTKYALGLSQKTYIEKVLKKFNMYRCSATPAPIMKGEKYGASQCPRNQYELNEMKTKPYASAVGSLQYAQVCTRPDLAFVTGLLGRFQSNPGLEHWKLVKKVLRYLQGTKGLMLSYRRSESLQIVGYSDSDFAKDNTKSTSGYVFTLAGGAISWKSSKQTITAGSTMYAEFIACYEATGQVNWLKKFIPGLKVVDSIEKPLKLYCDNEPAVMYAHNNQSSGAAKHIDIKYYVVKDKVRDQTISLEHIKTERMLADPLTKGLPPNVFKEHVAGMGLREAL

SEQ ID NO: 26020 - protein, 412 aa, Oryza sativa
  unsure (1)..(412): unsure at all Xaa locations
  Clone ID: TF_OsC1713_5587.pep
MLMLGGAIHYAQLMDLQEWSCQHINDKQIQGGYSLMGCIKDIPTLKGDNYAEWKRKLDLAFILGEVDWVLTTPCPIEPADLVRGENESDADWQKRQRDNAPLVMSYDIEQKKWSLANKKCLAVVKNTIEPTILGSIPECDAVSEYLERIKSQFTGSSKTYATQLIKQLVTERYNGGGVRDHILRMSNMASKLKPMDLGITDDFLVHLVMASLPKQFDNFIVNYNISPEKWNFEKLIANCVQEEERIKESNGGSINYVKDKKKNHKSPTSKGKQSQHLPQQQQFAVEKDQCLHCKKTGHYKKDCPDFLKMIMAKKGXTQRRESTIRVANGVEEKVEAXGDLPXELANGFILLLRDVFYVPSLQRNLISVSKLDFDGYDXRFGSGKCELWHNNACIXLAVLRDELYLXSSFLRM

SEQ ID NO: 26021 - protein, 1118 aa, Oryza sativa
  Clone ID: TF_OsC1713_5318.pep
MEHIKQWLSHQEEEGKNNFEEKKNEAPKLGQESISGNLTDGQLDQEKYEKPNGWYNVDAIGINSPNVVLKINDNIQEGKCCALLNSEGSSTARHGCAHERSEGAGPSEPHLRLRSAPGRRVIRFLGSASARLLSTSALFVVVSSSTMSAPGAAGAVSRVGAPGAGAAAGTAAAVSGDGAPGSRAAANFNINGGSSASQSSGGPFSGKDMWDALEAKFGVSDAGSELYVMEQFYDYKMVDDRSVVEQAHEIQMLAKELENNNCELPDKFVAGGIIAKLPPSWSDFATSLKHKRQEFSVSDLIGSLGVEEKARAKDNRGKKFEGGSSANMVQKKNPHASHNNKKVKPDVKSKATTNFKKKGKGKAKRDYFVCGKSGHRAKECPERKDRKSANMVGRGSSLLMGNGSLAAVHGVGSKCHTCVQSKQPRKPHKASEARNLAPLELVHSDLCEMNGVLTKGGKKYFMTLIDDCTRFLYVYLLKTKDEALHYFKTYKAEVENQLERKIKRLRSDRGGEYFSNEFASFCKEFGIIHERTPPYSPQSNGVAERKNRTLTEMVNAMLDTAGLSKEWWGEAVLTACHILNKIPTKHKEVTPFEESERKKLNLSYLRTWGCLAKSRDATFFENEFPMKHTPSTSSQETVMPHEHFAPIEHNDQMPEGNPEEHNIVDTHKSKQQRVAKSFGDDYIVYLVDDTPRTIEEAYSSPDADYWKEAVRSEMDSIMSNGTWEVIECPYGCKLVGCKWVFKKKLRPDGTIEKYKARLVVKGYTQKEDEDFFDTYSPVARLTTIRVLLALAASHGFLVHQMDVKTAFLNGELLNVIEEVKDFLSKSFEMKDLGEADVILNIKLLRGDEVGITLVQSHYVDKVLSRFGYSDCKPAPTPYDPSVLLRKNPRIARDQLRYSQIIGSLMYLASATRPDISFAVSKLSGFVSNSGDDHWQALERVMRYLKGTMSYGIHYTGYPKVLEGYSDSNWISDANEIKATSRYVFTLGGGAVSWKSCKQTILTRSTMEAELTALDTATVEAEWLLELLMDLPVVGKPVPAILMNCDNQTMIIKVNSSKDNMKSSRHIKRRLKSVRKQKNSGVIALDYVQTARNLADQFTKGLPRNVIDSASMEMGLIPT

SEQ ID NO: 26022 - protein, 128 aa, Oryza sativa
  unsure (1)..(128): unsure at all Xaa locations
  Clone ID: TF_OsC951_16.pep
HQEQAHVTTTEDEPAATTTVGTCDAVVLGGAPRDVHRRAAAVARAADVIEFVEQKVIAALDDATDHDNKRXILDTDASNHMTGSXTNVTGNXRXGDGXKEXXGPPPTILFACKNGERRMLHNAYVGIS

SEQ ID NO: 26023 - protein, 1397 aa, Oryza sativa
  Clone ID: TF_OsC91_2461.pep
MDISRTNEGYTSCGPVVEMSWHRAGVLLLGAQSCLPVPEVPAVGGVGSVLLSMARMGWKLCHVFRPYAVVVTKSRATTNSPRKYSKGHHGSRCKVCPDAFTKIGFLNHMERLDKRISTLTDRVAALETPSNEEVVKLKIPSFSGYYDAEKYLDWEMTVEQKYNAHLVPEQHRVRQASSEFKDFAIMWWAGLSDEGVLPTTWEELKVAMRDRFVPPSYHRDLRKKLMRLEQGDKSVQDYYGELQKGVRRCGIVEGVEDAICRFYSGLREEIHNIVDCKEFNSVNQLFRFAMPAEKELQGRDHQGKSKASTYTPRTTPSAGLPKAVSFRASSQPAGKRPAASGASAAPKPFPPPRPAESGKGSTQVPAKSASYVASTGRIQCHRCQGFGHVQKDCPSQRAYVATEDGYITTSDMEEEEEEEEVEDEDGEIFGRDDTTDYRTIIVQRVLSTQIFFVINNRRARVIIDGGSCNNLWLNDSGRAKVTQVCRVSFSIGSYADSVDCDVVPMQACSLLLGRPWEHDNDATHHGRSNKYTFVHNGKKITLLPLTPAEIVEADKERAASLKLDESENQQVAKSVFPPKKDKLSPSSKVEGIKLKGGVMIATKCEIAEISDDDMCYFLICKQALVSLDDIASSMPPVVTNLLQEYEDVFPAEIPLGLPPMRGIEHQIDLIPGASLPNRAAYRTNPEETKEIQRQVQDLLDRWYVRQSLSPCVVPVILVPKKDGSWRMCVDYRAINNITIRYRHPIPRSDDMLDELCGSIIFTKIDLRSGYHQIRMKLGDEWKTAFKTKFGLYEWLVMPFGLTNAPSTFMRLMNEVLRPFIGRFVVVYFDDILIYSKSFDEHMDHLRAVFNALHDARLFANLENCIFCTERVSFLGYVVTPQGIEVDESKIEAIKSWPVPQTITQLRSFLGLAGFYRRFVKDFSIFAAPLNELTKKGVVFHWGKTQEQSFDTLKDKLTHAPLLQLPNFGKTFELECDASGVGIGGVLMQDGKPVAYFSEKLHGPVLNYSTYDKELYALEAHGGGLIGHFGAKKTKDVLAMHFFWPRMRKDVERTKRGRDSIFVVVDRFSKMAHFIPYHKSDDAVHIADLFFHEIVRLHGMPFTIVSDRDAKFLSHFWRTLWNKLGTKLLFSTTCQPQTDGQTEVVNCTLGTMLRAILKKNLKMWEECLPHVEFAYNRTIHSTTKVSPFQVVYGFNPCASIDILPLPTSERVHNDDKAHAEFILSMHESTKFNIEKMTEKYRIAGSKVEKINDNAYKLELPPEFGVSPTFNISDLKPHLGEEDELESRTTSIQEGEDDADITTSDTHNNPPTVIQGPITRARARQLNLEVSSFLCSSLYEFENRLLPNDYIVLWNNGGDKETLGEGLTAMEDHRGCSSQGGGPNQVDVWCNSEFRTNLH

SEQ ID NO: 26024 - protein, 611 aa, Oryza sativa; identical to SEQ ID NO: 19402
  Clone ID: TF_OsC91_2524.pep

SEQ ID NO: 26025 - protein, 1641 aa, Oryza sativa
  unsure (1)..(1641): unsure at all Xaa locations
  Clone ID: TF_OsC91_2590.pep
MEDADAPQHILNDADLDLVDDRERQAYYKLSDREYAHTREYSPELLKKISIDVGFCAIWKAVGWQRFAVVDEPGSHLFTLQFLCTLKEIEDGISFRFFHKEYTLTWKGLSTLLGFHDFCKIDLQKGIYGFEKNRFWEDISGAPICKKSRTNDIHNPTLRLMHKWITMTLFPRSNEGEKSPQNFADYVSQEQLRTLQENTQKDITEAVAKSVQDAFIKIGFLNHMERLDKRISTLTDRVAALETRCMIPVASGDDDAHPEDTVYDSSGDAPATRQARLRRRLCTNHTGMGGTHHQQGNNNNRVPDDPCAKVKFKIPSFSGYYDAEKYLDWEMTVEQKFNAHLVPEQHRVRQASHEFKDFAIMWWAGLSDEGVLPTTGEELKVAMRDRFVPPSYHRDLRKKLMRLEQGDKSVQDYYGELKKGLFWFAMLAEKELQGRDHQGKSKASTYTPRKTPSVGLPKAVSFRVSSQPASKRPATSGASAAPKPSPPRPAESGKGSSQVPAKSASSIASTGRIQCHRCQGFGHVQKDCPSQRAYVATEDGYITTSDVEEEEGEXEVEDEDGEVFGRDDTMDYRTIIVQRVLSTQLXNLVSSDLVKKLXDYTYTSTPLPYSVVKRFRKSKDSVDCDVVPMQACSLLLGHPWXNMIMMLHTMKIILLPLTPAEIQVAKSVFPPKKDKLSPSSKVEGIKLKSAEIPPGLPPMRGIAHQIDLIPGASLSNRAAYRTNPEETKEIQRQVQDLLDRGKSLDEHMDHLRAVFNALRDARLFANLEKCIFCTERVSFLGYVVTPQGIEVDESKIEAIKSWPVPQTITQVRSFLGLAGFYRCFAKDFSTFAAPLNELTKKGVVFHWGKTQEKSFDTLKDKLTHAPLLQLPNFGKTFELECDASGVGIGGVLMQDGKPVAYFSEKLHGPVLNYSTYDKELYALEAHGGGLMGHFGAKKTEDVLAMHFFWPRMRKDVERTKRGRDSIFVVVDRFSKMAHFIPYHKSDDVVHIADLFFHEIVRLHGMPSTIVSDRDAKFLSHFWRTLWNKLGTKLLFSTICHPQTDGQTEVVNRTLGTMLRAILKKNLKMWEECLPHVEFAYNRATHSTTKMTEKYRIAGSKGRQEVKLEPGDLVWLHLRKDRFPELRKSKLMPRADGPFKIVEKIDNAYKLELPPEFRVSPTFNISDLKPYLGEEDELESRTTSIQDGEDDADITNSDTHNNPATVIQGPITRARARQLNLEATRRHLEKDLELWRIIEDVQVKEEAQTKSTLGAIRSPGPVCTKMGAQMDQQWMYADRRSKEFIECVHYFLRVAEANKRNGFICCPCNKWFMPSYNCWISHGEQGVEMEEDEAEDENIPDWAQYAGFEGNQTGEVDRDAGDNDAADDLGRMLQDAKEDYKKLEVQKIHACPNDCILYRGEEYENLEACPVCKALRYKIRREDPGEVDGQPTKKRIPAKQPFKAANKGYKTCTHCMDETESTYLKHCRKVVYMGHRRFLAANHPVRKKGKHFEHKMDHRTKPKHRSGKTVFAMVKDLKVVFGKRPGSQPIESEDGHATIWKKNSIFWELPYWEFLDVCHAIDVMHLTENLCINLPGFLGVYGKAKDTLEAQCHKDGSTNPENASCHNKFYLLLKIETDAAQPESKNSFSLSGDSSGAKAISK

SEQ ID NO: 26026 - protein, 1819 aa, Oryza sativa
  unsure (1)..(1819): unsure at all Xaa locations
  Clone ID: TF_OsC1713_5484.pep
CSSIVVVEVALDKSQVHLLPFVELVWHLIDHLHAGSLLVTLGGCRLLDGLWRSCPVTSPRRLWRRPGAGFAITGTPLTEIDHRNLQLNAQAMNVLFNSLSQEEFDRVSHLETAYEIWNKLASWXKIHEGTSEYKDAKLHFLKIQYETFSMLPHESVNDMYGRLNVIVNDLKGLGANYTDLEVAQKMLRALPGKYETLVTMLINSDMSRMTPASLLGKINTNDMYKLKKKEMEEASPSKKCIALQAEVEDKGKGKERGRGSNSSRRRNRRPNKTLSNLKCFECGEKGHFTSKCPSKDDGDKSSKKKSGGYKLMKKLKKEGKKIEAFIGEWDSNEESSASSGSEEEGGEDASSKKKKMAVVAIKEALSLFAPLCLMAKGSSKVTSLSDSESDDDCDDVSYDELVSMFEELHAYSEKEIVKFKALKKDHASLEVLYEELKTSHERLTISHEKLKEAHDNLLSTTQHGALIDVGISCDLLDDSATCHIAHVASSSISTSCDGLVDMPSSSSSSCISICDASLVVENNELKEQVAKLNKSLERCFKGRLMMVALLLDMWVPLYSVVNYRTGGSHWVLDSGCTQHMTGDRAMFTTFEVGGNEQEKVTFGDNSKGKVIGLVAKTSLGWLXHRRLAHVGMNQLSKLSKRDLVVGLKDVKFEKDKLCSACQAGKQVACSHPTKSIMSTSRPLELLHMDLFGPTTYKSIGVERKNRTLIEMARTMLDEYGVSDSFWAEAINTACHATNWLYLHRLLKKTSYELIVGRKPNVAYFRVFGCKCYIYRKGVRLTKFESRCDEGFLLGYASNSKAYRVYNKNKGIVEEIVDIQFDETNGSQEGHENLDDVGDEGLMRAMKNMSIGDVKPIEVEDKPSTSTQDKPSTSATPSQAQVEVEEEKAQDPPMPPRIHTALSKDHPIDQVLGDISKGVQTRSRVASICEHYSFVSCLEPKHVNEALCDPXWMNAMHEELNNFARNKVWTLVERPRDHNVIGTKWVFRNKQDENGLVVRNKARLVAQGFTQVEGLDFGETFAPVARLEAIRILLAFASCFDIKLFQMDVKSAFLNGEIAELVFVEQPPGFEDPKNPNHVYKLSKALYGLKQAPRAXYERLRDFLLSKDFKIGKVDTTLFTKIIGDDFFVCQIYVDDIIFGSTNEVFCKEFGDMMSREFEMSMIGELSFFLGLQINQLKDGTFVSQTKYIKDLLKRFGLEDAKPIKTPMATNGHLDLDEGGKLVDLKLYRSMIGSLLYLIASRPDSMFSVCMCARFQAAPKECHLVAVKRILRYLKHSSTIGLWYPKGAKFKLVGYSDSDYTGCKVDRKSTSGSCQMLSRSLVSWSSKKQNSVALSTAXGGICFGGIXILSFGQNEIYPQNKIEKEFEKSFKTKLRRSDRAACXGLTGCGRRSDRPSVRGLTAPDWPMMPPRTRHGRCAPTPDPVSEPEESSGEDYAQSDEEVEANIEGASEEASGDDDSGSGEDEDEGSDDMHVDPSIXFDVNMRNPSQYTILRHHDQFLRPRDTPDPRFHTAFQKLWVAGDYNEMKWMSDTLQCSISRRQFWRLLNIRLDFGYDLHEEHTHNPLSIDYLSQFYEDGVRYTHGKVAGLRTIPSVVNRIVRATILPRLGNNDDIRGVAWHIIDTIIQGRQFDIVSLMMQEIAISKGTFTQGIYYAPYIMRLIQDKLGAAGXNLKKHKQYKPRLQLGAPHAXRMVPSSHLGASSSSAPPPPHGYDPNAFFHPQYTYFGIQPNEYFNPVLGAINTLSKSIQRLSTGHEAXHEDVRGLRTDVGDLNASMGRLHTRVGTLDSQVQMLESSQAFVYHRRRDAPHPSTSARPPSPPQ

SEQ ID NO: 26027 - protein, 493 aa, Oryza sativa; identical to SEQ ID NO: 19408
  Clone ID: TF_OsC1528_1773.pep

SEQ ID NO: 26028 - protein, 1326 aa, Oryza sativa
  unsure (1)..(1326): unsure at all Xaa locations
  Clone ID: TF_OsC547_327.pep
MAAPAPSNFNLWSILEKEKLTRTNFMDWYRNLRIVLRXEHKKFVLTQPFPADFPNNAPAAQRREHERRCNEYLDISCLMLATMSPELQRQYEALDAHTIITGLRNMFEDQARAERFNTSKSLFACRLAEGNPVSPHVIKIIGYTESLDKLGFPLSQELATDLILQSLPPSFEPFIMNFNMNNLNRTLAELHGMLKTAEESIKKNSNHVMVMHKRKPNNRKSGQKRKLNSDEITSTSNSKTKVQKTVPAKDAECFFCKETGHWKRNCKKYLEQLKQKQQDGKSSTSGINVIEINLATSSTDSWVFDTGSVAHICKSLXGLKRSRSLARGEVDIRVGNGARVAAVAVDTMPLSLPLGLVLELNNCYCIPALCKNVISASCLQAEGYGFRSMDNGCSVYYNDIFYFHAPMMNGLYIVNLDGCSVYNINAKWQRPNDLNPTFIWHCRLGHINEKRMEKLHRDGLLHSFDFESFETCESCXLGKITKAPFTGQSERASELLGPVHTDVCGPMSSTARGGFGYFITFTDDFSRYGYVYLMRHKSESFEKFKEFQNEIQNHLGKTIKYLRSDRGGEYLSLEFGNHLKECGIVPQLTPPGTPQWNGVSERRNRTLLDMVRLMMSQTDLPLSFWGYALETAAFTLNRVPSKSVDKTTYEIWTGKRPILSFLKIWGCEVYVKRLQSDKLTPKSDKCFFVGYPKETKGYYFYHREEGKVFVARHSVFLEKKFISRKDSVSMVXLEEIQETPENAPTSTQPQAEQDVVQQVEQAVVEPVVEAPASRRSEKIRRTPARYALLTTVQCDILLLDNDEPTTYEKAMVGPDSEKWLGTMKSEIESMHVNQVXKLVDPPDDVKAIECKWVFKKKTDVDGNVHIYKARLVTKSFKQIQGVDYDETFSPVAMLKSIWIVLAIAGYFDYEIWQMDVKTAFLNGNLYEDVYMTQPKGFVDPQSAKKICKLHKSIYGLKQASRSWNIRFDEVVKALGFVKNEEEPCVYKKVSGSALVFLILYVDDILLIGNDIPMLESVKTSLKNSFSMKDLGEVVYILGIRIYRDKSKRLIGLSQSTYIDKVLKRFNMQDSKKGFLPMSHGINLGKNQCPQTTDEXNKMSVIPYASAIGSIMYAMLCTRPNVSYALSATSRYQSDPGESHXITVKNILKYLRRTKDMFLVYGGXEELVVNGYTDASFQTDKDDFRSQSGFVFCLNRGAVSWKSSKQDTVADSTTEAEYIAASEAAKEVVWIKKFVSQLGVMTSASSPMDLYCDNSGAIAQAKXPRSHQKSKHILRRYHLIREIVGRGDVKIHKIHTDLNVADPLTKPLPQPKHEAQTRAMGVIYIHD

SEQ ID NO: 26029 - protein, 1387 aa, Oryza sativa; identical to SEQ ID NO: 19417
  Clone ID: TF_OsC547_340.pep

SEQ ID NO: 26030 - protein, 1325 aa, Oryza sativa
  unsure (1)..(1325): unsure at all Xaa locations
  Clone ID: TF_OsC547_379.pep
MAAPAPSSFNLRSILEKEKLTGTNFMDWYRNLRIVXQEHKEFVLTQPFPTDLPNNAPAAQHREHEKRCNDYLDISCLMLATMTPELQRQYEALDAHTIITGLRNMFEEHARAERFNTSKSLFACRLTEGNPVSPYVIKMIGYTESLDKLGFPLSRELATDLILQLLPPSFEPFIMNFNMNNLNRTLAELHGMLKTAEESIKKNSNHVMVIHNASPTTRKVXQKIKLNSDEITSTSNSKTKVQKTGPTKDAECFFCKETGHWKRNCKKYLEQLKQKQQDGKSSISGINVIEINLATFSTDSXVFDTWSVAHICKSLQGLKRSRNLARGEVDIRVGNGARVAAVAVGSMLLSLPSGLVLELNNCYCIPALCKNVISASCLQAEGYGFRSVDNGCLVYYNDIFYSHAPIMNGLYIVNLDGCSVYNINAKRQRPNDLNPTFIWHCRLGHINEKHIEKLHRDGLLHWFDFESFXCESCLLSKMTKAPFTGQSERASELLGLVHTDVCGPMSSTARGGFGYFITFTDDFSRYGYVYLMRHKSESFEKFKEFQNEVQNHLGKTIKYIXSDRGGEYLSLEFGNHVKECGIVPQLTPPGTPQWNGVSERRNRTLLDMVRSMMSQTDLPLSFWGYALETAAFTLNRVPSKSVDKTPYEIWTDKRPSLSFLKIWGCEVYVKRLQSNKLTPKSDKCFFVGYPKETEGYYFYNWEEGKVFVAXHGVFLEKEFISRKVSGSMVXLEEIQETPENASTSTQPQQAEQDVVQQVEQVVVEPVVEAPASRRSERIRRTPTRYAVLTTGQRDILLLDNDEPTTYEEAMVGPDSEKWLGAMKSEIESMHVNQVWNLVDQPDGVKAIECKWVFKKKTDVDGNVHIYKARLVAKCFRQIQGVDYDETFSPVAMLKSIRIVLAIAAYFDXEIWQMDVKTAFLNGNLDEDVYMTQPKRFVDPQSAKRICKLQKSIYGLKQASRSWNIRFDEVVKVLGFVKNEEEPCVYKKISGXALVFIILYVDDILXIGNDIPMHESVKTSLKNSFSMNDLGEAAYILGIRIYRDRSKRLIGLSQSTYIDKVLKRFNMQYSKKGFLPMLHGINLGKNQCPQTTDEGNKMSAIPYASAIGSIIYAMLCTRPDVSYALSATNXYQSDPGESHWIALKNILKYLRRTKDIFLVYGGQEELVVNGYTYATFQTDKDDFRSQSGFVFCLNGGAVSWKSSKQDTVADSTTEAEYIATSEAAKEAVWIMKFVSQLGVMTSVSSPMDLYCDNSGAIAQAKEPRSHQKSKYILRRYHLIREIVGRGDVKICKIHTDLNVADPLTKPLPQPKHEAHTRAMGIRYVHD

SEQ ID NO: 26031 - protein, 1159 aa, Oryza sativa
  Clone ID: TF_OsC547_389.pep
MEIQYEHTSYRDPNRSLTGLGGPSDGSYIFVRGVTGGGIASPRRVVTIYDLILAWFLVYAIEMFDLCYRSLRLSQQWIDVGHLCAEIIGLLDKIMAAPASSNFNLRSILEKEKLTGINFMDWYRNLRTVLRQEHKEFVLTEPFPANLPNNAPAAQRREHEKRCNDYLDTSYLMLATMSPELQRKYDALDAHTIITRLRNMFEDQARAERFNTSKSLVACRLAEGNPMSPHVIKMIGYAESLDKLGFPLSRELVTDLILQSLPPSFEPFIMNFNMNNLNRTLAELHGMLKTAEESIKKNSNHVIVVHKRKPNNKKSCQKRKLNSDEITSTSNSKTKVQKTGPAKDAECFFCKETGHWKRNCKKYLEQFKQKQQDGKSSTSVYNINAKRQRPNDLNPTFIWHCRLGHINEKRMEKLHRDGLLHSFDFKSFETCESCLLGKMTKAPFTGQSERASELLGLVHTDVCGPMSSTAKGGFGYFITFTADFSRYGYVYLMRHKSEYFEKFKEFQNEVQNHLGKTIKYLRFDRGGKYLSLEFGNHLKECAIVPQLTPPGTPQWNGVSERRNRTLLDMVRSMMSQTDLPLSFWGYALETVAFTLNRVPSKSVDKTPYEIWTGKRPSLSFLKIWGCVVYVKRLQSDKLTPKSDKCFFVGYPKETKGYYFYNREEGKVFVARHGVFLEKEFISRQDSGSMVQLEEIQETPENASTSTQPQAEQDVVQQVEQVVVEPVVEAPASRRSDRIRRTPASLELLVDPPNGVKAIECKWVFKKKTDVDGNFNIYKARLVAKGFRQIQGVDYDETFSPVAMLKSIRIVLAIAAYFDYEIWQMDIKIAIHNGNLDEDVYMTQPKGFVDPQSAKKICKLQKSIYGLKQASRSWNIRLDKVVKALGFVKNEEEACVYKKISGSALVFLILYVDDILLIGNDILMLESVKTSLKNSFSMKDLGEATYILGIRIYRDRSKRLIGLSQSTYIERFIMYAMLCTRPDVSYSLSATSRYQSDPCESHWIAVKNILKYLRRTKDMFLVNGGQEELVVNGYTDASFQTDKDDFRSQSGFVFCLNGGAVSWKSSKQDTVSNYTTEAEYIASSEAAKEAVWIKKFISRLGVVTSASSPMDLYCDNSGAIAQAKEPRSHQKSKHILRRYHLIREGVSNRALAVVARFQSR

SEQ ID NO: 26032 - protein, 379 aa, Oryza sativa
  Clone ID: TF_OsC547_396.pep
MWLEQNHIHLPSKKKKRKISANLFLVPRMVKDGLPRMVEDGLASHYELFLCLQMDDTLTTGSIRSTEGEKRRLAEASLAYNCERIDVGHLYAEIIGLLDKIMAAPAPYNFILQSILEKEKLTGTNFMDWYCNLRIVLRQEHKEFMLTQPFPADLPNNAPVAQRREHERRCNEYLDISCLMLATMSPELQRQYEALDAHMIITGLRNMFEDQARAEWFNTSKSLFACRLVEELHGMLKTVEESIKKNSNHVMVMHKRKPNNKKSGQKRKLNSDEITSTSSSKTKVQKTGPAKDAECFFCKETGHWKRNCKKYLQQLKQKQQDGKSSTSGINVIEINLATSFTDSWVFDTGSVAHICKSLQGLKRSRSLVSHPEVPFPSLN

SEQ ID NO: 26033 - protein, 1310 aa, Oryza sativa; identical to SEQ ID NO: 19427
  Clone ID: TF_OsC91_1938.pep

SEQ ID NO: 26034 - protein, 1516 aa, Oryza sativa; identical to SEQ ID NO: 19451
  Clone ID: TF_OsC359_7913.pep

SEQ ID NO: 26035 - protein, 1547 aa, Oryza sativa
  unsure (1)..(1547): unsure at all Xaa locations
  Clone ID: TF_OsC1517_1429.pep
PPHRAARAPARFGFEEGRVEPEADHESANEQSHHSNRSHRTASRNAEVEQSHRSNRSHRIVSRNAEVEXSHRSHRSVGHNSGEERIPSPPHVENNMQHLMAVQTQILQGLATAIAGIQHNAHGNGHPHMGNNRSKLTDFLRSRPPEFSQTVKPVEAGDWLKDVERKLNLVQCIPIEKTVYASHQLRGPAADWWENYCNAHPEPTNIPWNEFAAAFRVAHVPKSTIDMKKEEFIRLKQGNSSVNEYLSQFNKLARYAPEEVDTDKKKIRKFLKGVTVGMRLQLLAHDFPTFQHMINKALPLEDARKEATEEYKKRKSTHQGNSSRGAPHPRFGQPKQYHQSVTQANRQPGYAPRPQMNRPAPPPQQRAPSGNIAPNSVTSFKSPPGLSTVQCFRWDKMGHSARQCPQNPTNTNSGHANGSTARTPTLAAAQSRPSSXASGQGSHASNNFGRGRVNHIQAETAQDAPDVVMGMFSVNSIPAIILFDSGASYSFISQAFVKRNGWKTXNLRVPMIVHSTGRDIRATKICPEVNLRIEEVDFLAKLIVLDSQSLDIILGMDWLAKHKGQIDCAERSITLQGPGGKQVHFTPNTLTASRSILTNLQATPLESVPIVCEYPDVFPEELSSMPPDREIEFAIELAPGTAPITKRPYRMAANELAEVKRQIEELESKGYVRPSSSPWGAPVLLVKKKDGYERMVIDYRALNEVTIKNKYPLPRIDDLFDQLKGARVFSKIDLRSGYHQLKIRSEDIPKTAFSTRYGLYEFTVMSFGLTNAPAFFMNLMNKIFMEFLDQFVVVFIDDILIYSKNKEEHVEHLRLIMEKLRDHQLFAKFSKCEFWLDRVAFLGHVISSNGVEVDPSKVEAVLAWNPPKNVSEIRSFLGLAGYYRRFIEGFSKLARPMTELLKKEKKFQWSVACEDSFQEMKKRLTTAPVLTLPDIRKDFEIFCDASRQGLGCVLMQERKVVAYASRQLRPHEVNYPTHDLELAAVVHALKIWRHYLIGNRCEVYTDHKSLKYIFTQIELNMRQRRWLELIKDYDLGIHYHPGKANVVADALSRKAYCNVAQIRPGQDRLCRELEKLRLTVVQSGVPASLTVQPTLESQIREAQKDDEGIKELIKRIQEKKDTNFSIDDQGTVWCGPRICVPAKKELRDLMLKEAHESAYSIHPGSTKMYQDIKAYFWWAGMKRDVAEYVALCDICQRVKAEHQRPAGLLQPLPIPEWKWEEIGMDFITGSPRTPSGYDSIWVIVDRLTKSAHFVPVKTTFDRKKLAELYMTHVVCRFGCPKKIVSDRGTQFTSRFWKQLHEALGTDLNFSTAYHPQTDGTWDRCLPYAEFSYNNSYQASIQMLPNEAMFGRKCRTPLCWNEVGEALVFGPDILKAAEEQVKLIRERLKTAQNRQKNYADNRRHDLEFEKGDHVYLRVSPLRGMRRFGMSGKLAPRYIGPYLITARRGEVAYQLELPEGLADVHNVFHVSQLKKCLRVPEEQVPLGNIELEKNLTYKERPIKVLEEAERQTRRKTIKFYKVQWSNHSEDEATWEREDLLRAEFPELLP

SEQ ID NO: 26036 - protein, 1513 aa, Oryza sativa
  Clone ID: TF_OsC1458_1.pep
NDRDMETQRLWEQAAAIEAQLDFDREQGGRDIGARSPRRQRASPSSDRHRGRRGRSGSPPVVQTIVKDVGGAWPMLTKTNYAEWAMVMKVKLQARHLQKWRQMESRYPTRPWTRCSQLNNLVETLRSNRHLQRRNLIGTRSPFVAIRIGSDRARRSTLQKLRQDWENLAFKPGEDIDDFVLRLNSLQQRLAQLGDTTIDEERAVEKLLRVVPEKYTQLALSIETLLDFTELTIEEVMGRLKAVDNRKQLPPSEPITIGGKLFFTKEQWLARQQEWKKGEATGSSASGSSSSRKRRPRKWEKARSGALGDANGEHKGSRDDTCHNCGKTGYWAKDCRQAKHGGQAHVAQAQEAAAHVFLSNGSCGDKIDGWCLDTGATHHMTGRREFFSELDSSVQGSVKFGDASTVVIKGVGSILFTAKTGEHRLLTGVYYIPALRNSIISLGQLDENGSRVEIEDGVLRVWDRHRRLLVKVAQPVCLAARRDDDAWRWHERFGHLNFGALKQLGNKEMVQGMPRVEHVEQFCDTCVLTKQRRLPFPRQASFRAEEKLELVHGDLCGPVTPATPGGRRFFLLLVDDVSRYMWVVLHDSKAAAADAIKHHQVAAEKECGRKLRVLRTNNGGEFTAAEFAAYCADEGIQRHFSAPYTPQQNGVVERRNQTVVATARALLKQRGMPAIYWEEAVMTAVHLLNRLPTKALDGKTPYEAWHGRKPVVSHLRVFGCLAFAKELNHVGKLDDRSSPGVFIGYAEGVKAYRILDPATQRVRISRDVVFDEGRGWAWDKAVDDGSTSTLRDFVVDYVHFGGAGGASSSSSPSSSTSAPGSPSAPASPPPPTPPATPPSPATPCSPTPAPTPPVEFATPLSNDEDRVDAYHDDEPLRYHTVDNIFGDQPVLGLATHDFEAELHLAHEDGEPCSFAEANGDVAWRTAMQHEMDAVERNRTWVLADLPVGHRAITLKWVYKLKKDEAGAVIKHKARLVARGFVQQEGVDFDDAFAPVARMESVRLLLALAAQEGWRVHHMDVKSAFLNGDLKKEVYAHQPPGFVIPSKENKVLRLRKALYGLWQAPRAWNAKLDSTLKQMGFQQSSHEAAVYRRGKDGNALLVGVYVDDLVITGTKEAEVEAFKEEMKATFQMSDLGLLSFYLGIEVHQDSSGISLRQTAYAKRIVELGGLTGCNLAYTPMEERLKLSRDSTAEEIWHSLLAVSRFMQRPTTEHQQAVKRILRYVEGTTNYGLHYPRCPGAQHFIGYSDSDLAGDSDTSKSTSGMLFFLSKCLISWQSVKQQVVALSSCEAEYIATTTASTQALWLVRLLGDLLGRDAEAVELRVDSKSALALAKNPVFHERSKHIRIKYHFIRSCLEERSIKASYINTQDQLVDLLTKSLGRVKFQEFRARIGMDESCGKVNDRKAELKSHGEKAVKRNDYLAASKIYSEALELDYFDATLYSNRSLCNLQIGEAQKALLDADRCVELRPKWVKGHYREGAALMVLKEHKKAFEAFLNALKLDPANAEIEKVMW

SEQ ID NO: 26037 - protein, 1726 aa, Oryza sativa
  Clone ID: TF_OsC1713_5622.pep
MDLSRSLFRRIASRDDKSLSCIDKQKGKNEDIDELEDIAEVDKQLERYQRDTLRAIRPQQIYCMGFFENKNGLYRISREVELSVLTKPVELKIVAKEFENGLKYSGYKYIHQGMYIIGIKGMTRKKLGAKVLITLLDKRWDTIDKAALGFLEGDMNENMLITYIAPDLMMPVKEFIDKMSFGFQTKGYEEFKGTNLLVSIEFIGRLTNRSASKYKINVNDVIENMHSKGITFMSPLKISSEERAGEEWKISDLIESKTLSQPENFISYQNSKGNTSIRFINYKPRTTDDLETEASDRNIIDNRRHSVSEFMEKLDQESEIKYYENKLKEINEEYNNSMKCEWPKIRDKELYFYRELARVKKVKKNEDMAVEIFKTQETKIEQIKRKEQDKYDKEEQNLGKILSEEEQWAENERLFLESYEEEINLINEMENIENEIDNTEQYNDFINTLDEVGLHNLDNAMEAMEVDLGTGKRKRYGEGTVKNEGERERPARAAGKWPPDREEFSYNYIPGQYRHMGTKRRDFEKPVKFQNQRSDGAILNLAAHDPIDWPNIISIWKGLIVQKYIQNQHNIGSKVEDMITYLETFLGESAKILWEQWVEKNPNNYEELKRAGSNPHNFANVISNIIIAEDPELGYTTLQNERLKEIEKLTLTSWKGIKEFSQHYLYNATTAKQGYNRGIVERYFNKLPDPLGSMIFEEYKKETEGAEINISQAITFVFKQLRKICTGIQAQRSMKHSDYNFCNKIVQIPLSYGEDKPRSKRIYKHQNRNHNNIRTKKRYFLRRSDNRAPFLHKRNVRRYNPKKTYDKTCRCFICNSPDHLSRTCPNKDQKRYSSKYEEQERVLIIDSVNENILVCDDEIKDDESIYSIIETDEVETINEEYESSDEELDLIDELAGLKVEMMDQLNCEHDWIRGKGDYNIKCAFCIYYPSQENRVTCSICLKQACAECIKANKQKWRKEIELESDEKTLSSRVRVLENRLNKLEVELENLKNNCDIKALPENKDIQNTEFKEQLITLKDSNTAKIIQLREAITNFGNKYIVRLPFKEILGIRIPVKVKLTPKVSYKILALVDTGCTKNIIHDKYFTRCPEIVHTIDDNKAEVSTDMSGIKKIHNQLAYNMEVYINATKYIIDEITIRDLSMINDDMIIGLRFLQQSVQTTVIHEQGITFIPYQNNVPYISEVYINATKYIIDEITIRDLSMINDDMIIGLRFLQQSVQTTVIHEQGITFIPYQNNVPYISEVRKRGGTSPSPKPDKLDNLEVPNLESEERINEYELSENIDNYSFSSYLPKSIELPGKTSWEDRYLLKATKDFEYICREMASQKSEWLTNMSSWRLPQLPRGHGERFNHNFRITELQHGLLNLLWQTKNKKEKAHALNSLAYYFKNFVPSDQKITEKRAKMQDIPHHEERLLDYREEKSRDGQDKLLMEVEQSMATDKNTKVFSDKILISADPASSMVAFHININNLLQSFPHNKPSSSTKRHDIIPQTPYILHNHPNLFLPQYILRTQPKAPCRSCAYKDSCKKKLKSQNPMSTTYENLQPRLSFKTEQTLSCFGQDILDLVWQKFKERQMKIFLGLQDYFFDLLEGRERNPAIRVIIYMLPLLRLDNQAISDPSYRFLVLKAEINLQRFRNLPTYNHEEISLQTIIDHGLVNSIYATLDQILQSDLGNAVKDVCRRLGHGRYRIIFSSIPPKFTPPGKSIDFGRYDGKESSCKYIVFTTCSLLV

SEQ ID NO: 26038 - protein, 410 aa, Oryza sativa
  unsure (1)..(410): unsure at all Xaa locations
  Clone ID: TF_OsC359_7376.pep
MAALGRAEWLPRGARPSAARALGMFNREKGKNVSGYASSNLSFQLNPPLASRELTRAHPWSIPSMLLSSQLPLVGSQDQNRYVFDRAFATQVNELPMPEEDVPFCHDCRERGHYALNCPWVYAKEAPSFGLAGQTSLNQPPRSKSSLQPSVQSREPNGENPLNPENCFPPSLSYHMGSRTKQAKGKKSKNQKRKAPMRTEEEVHKMTITSTEWPPAGITIPRRQRGNTFRGARQLTQHLVSHGGRVSDSEGSDQVSSDYEDESLRHLGEEEMESKACPRCGEIGHVASMCFTLCPHCEEDHPPGECPTRKVTCFLCEXVSSNSNIDDIIHSTNAPLAAPDSAINHSNNTFSTNHSLHRRPQQRIVIDGRSCVSPRPTPGRAKGNQPQEDDTKQKTVIRFNQQSEGSFSCE

SEQ ID NO: 26039 - protein, 1149 aa, Oryza sativa
  unsure (1)..(1149): unsure at all Xaa locations
  Clone ID: TF_OsC359_7371.pep
WWDHFQXTQPEGQPITWAHFTAAFRRTHVPAGVMALKKREFRELKQGNRSVMEYLHEFNNLARYAPEDVREDEEKQEKFLAGMDPELSVPLVDKSIRLEAKHKELESHKRRLANFRNQQGANQRIRYTNPYPGGSSSQPQQQPRSALRPQFVVRVPQPQQQQNQQGAHAPRPPAPAVQPGQGRRDAQGQQCLCFNCFKPGHFADKCPKPRRQQGQAPPRPNNGGKDVTRGRVNHVTAEDVLRTPDIIVGTFLIHSIPATILFDSGASHSFISVPFMGRNQLGVERLRNPLLITTPGGVMTAKYYSPAVPIEIQGIAFPSDLILLDTKNLDVILGMNWLAQFQGVVDCARRTVTVYRGPDQPVVFFAPPTSAGSSVLHQLGLPEIPIVSEFGDVFPEELPGMPPKREIEFQIDLAPGTAPLYKRPYRMAANELAEPSTSPWGAPVIFVEKKEKTKRMCVDYRALNEVTIKKKYPLPRIDDLFDQLKGATVFSKIDLRSGYHQLRIREEDIPKTAFTTQYGLYEFTVMLFGLTNAPAFFMNLMNKVFMEYLDKFVVVFIDDILVYSQSEEDHQQHLRLVLGKLREHQLYAKLSKCEFWLPEVKFLGHVISAKGVVVDPETLLKKEEKFVWSPQCEKAFQTLKEKLVSLLVLILPDTRKDFLVYCDASRQGLGCVLMQKGHVVAYASRQLRPYEGNYPTHDLELAAVVHALKIRRQYLIGNRCEIYTDHKSLKYIFTQSDLNLRQRRWLELIKDYDVGIHYHPGKANVVADTLSRKSHCNTLGIRGIPPELNQQMEALNLSIVGRGFLATLEAKPTLLDRIREAQKNDPDIHGILKNMKQRKAAGFTEDEHGTLWNGNRVCVPDDKELKRLILQEAHESPYSIHPGSTKMYLDLKEKYWWVSMKRXVKAEHQRPAGLLQPLQVPEWKWDEIGMDFITGLPKTQGGYDSIWVVVDRLTKVARFIPVKTTYGGNKLAELYFARIVSLHGVPKKIVSDRGSQFTSHFWKKLQEELGTRLNFSTAYHPQTDGQTERLNQILEDMLRACVLDFGKTWDKSLPYAEFSYNNSYQASIQMAPYEALYGRKCRTPLLWDQVGESQVFGTDILREAEAKVRIIRDNLKVAQSRQKSYADNRRRDLEFAVDDFVYLRVTPLR

SEQ ID NO: 26040 - protein, 1908 aa, Oryza sativa
  unsure (1)..(1908): unsure at all Xaa locations
  Clone ID: TF_OsC160495_1.pep
MGREALTYHPADHHSGARRPPSKPQFGSWRDVVKKGRGPAAAEEAAWTEVRRKGSTEHSLRAGDPTSNKHDRAFKPRKEFSNHDRAFNSEKEIPRWLLGRCFKCLGLGHRKLDCKGETRCFHCWYPGHLAWACPERKEVSGGNPGRQSQGRAATEKGAVIAMAGANLGGYQICAATPPQFVEKYRIGEPDSRPERGRVVLSWTSGMERHERYLQELSLMASVLKGRPPVSPAELAEAIELHTGVQQRYFRVEVTRPEDFLISFRNQREKEAVLRCSKALFCNEVPVSFKPWNICCWAEASAFQFFTKISLDGLPPHAWEEEAMHKLVNSLDGQLAELIPAADARCLGLFAWFKNPSDLSHHLDVEIPERPAAGRWREGTSATPPSPPREKPALTYPVIIHVEEVIDPTPLHTPPTSFDDNSDDEDVTRRNTFSCWAGRYDGAGPWPTEVGGGHVYAAAVVGVVDMAAADRVLDRADIVVQDMEAGEVLASQPHSPTLVLQAPGVWFSPQAVQAVEQPGADVGIATPLAAPVVATAKALIVLDDDCSWALVAGGVSPLSPPLQLSLDELTGGELSALGTEKDGDRAELSDEDTMAEVSLVEHGCERPALKATGDALSSAQESRSDRGFESAAKAGEFRVYVRKQAQKKPSHEQPGTEGIGLMGLAGQDLGQADLRRAVAGLGQEMSVGQVVCGEDEPPQAHQEEVAHSDDERPVQETEIESSREALSGEMMLPPPASPSTALARARPTSEGSPANTPLPPEADQILQGFLASVATEPPPSLLGRRPPESVPKSKPCWRNVIPEWFTPWRSPRLQQQGNGARRHSTSKAQKVTMKKMGIIEEEEEADQDTFQQNTTVIDQPLSTQHMKVLAELLDVDVALEEADVPPPDLASLVAAGSKLEVVDLLVIHELCGPDFDDFVALPASHTRGGVIVAWKGSVFRGSQVHLGQWSVTAKLEWIAGNHSCFLTSVYGPQDDNEKILFLEELAEIRGICGEVWLVAGDFNLIAAAADKNNSRVNRRLMNAFRNKINELELKELYLFGRRYTWSSEQQIPTLVKLDRVLVSTEWEDAFPDAHLQALSSSSSDHCALLLSCGETPQGRRRFRFETFCSMFLDFDQEEAHSRPPPVEDSDPFVILYVKRARLPMPFCSWGPKRISRFRLLLQIANELIYRFAAAPEITLLCAVEPSSKAFLKNRSLGFATLXRLRLRQQGRISPLREGKVNSAKDYFQGILGVADPDSAELQFNQIFPPAPNLQELEVPFSEEEVWKVIKEMPNEKAPGPDGFTGLFYQRCWQVIKGEVLAALTKFHSGNHQNLDNLNTAVITLLPKKDAPTLIKDYRPISLIHSFSKLATKILASRLAPRMGDLVAENQTAFIRGRSIHENFIFVRGLALQFHRRKKPMILLKLDITKAFDTISWCFLLNLLRNRGFGSRWRSWIAALLLTSETRILLNGHESDSFKPARGLRQGDPLSPLLFVLVMDALQGLLAKATSWGLLAKLDTRRSIPNTSIYADDTIVFLQPIEREATAVNAILQLFGKATGLKTNLSKSALTPIRCDDDVLVGVQQLLGCRVENFPITYLGLPLSLRRPTKAEVQPILDRLSKKVAGWKPKLLSPDGRLRLIKSVLTALPVHFMSVLVLPKWAIKEFNKKCRAFLWKGQEEVNGGHCLVAWDIVCSPKECGGLGVKNLELFGQAMRMKWLARRLEQRGRPWTLINSVPTNDITGLFQSVASFQVGDGKDTDFWRANWLPRGCISVSSPLLFTHLGRTKLTVAEALSQNRWVRDIRGSFSALALSEYFRLWDEIQEVQLQEDAQDSTSWKLTPNRVFCTASVYEMFFAAREFADWWIKVRLCFQTGYRGAFDSLCILICWFVWRERNLRIFEQKARTAAELFSDIKDEVAVWRETNILREVG

SEQ ID NO: 26041 - protein, 312 aa, Oryza sativa
  Clone ID: TF_OsC359_7998.pep
MFNREKGKNVSGYASSNSSFQFNPPLASRELTRAHPWSIPSMLLSSQLPLVGSQDQNQYVFDRAFATQVNELPMPEEDVPFCHDCREQGHYALNCPWVYVKEAPSFGLAGQTSLNQPPRTKSSLQPSVQSEEPNGDNPLNPRKCFPPSLSHHVGSRTKQAKGKKSKNQKRKAPMRTEEEVRKMTITSTEWPPAGITIPRRQRGNTFRGARQLTQHLLSHGGRVSDSEGSDQVSSDYEDESPRHLGEEEMESKACPRCGEIGHVASMCFTLCPHCEEDHPPGRAKGNQPQEGDTKQKTVICFKQQSEGSFSCE

SEQ ID NO: 26042 - protein, 300 aa, Oryza sativa
  Clone ID: TF_OsC359_5677.pep
HKALGSPKPRLANFHIHREANQRIRYPNPFPEGSSSQQQQQQQPRSAPRLHFVVRVPQPQHKQSQQGTRAPRPLTPAAQSGQGRRDVQGPQRLCFTCFEPGHFADKCPKQRRQQGQAPPRSNNGGKDVIRGRVNHVTAEDVLTTPDVIVGTFLIHSIPATILFDSGASHSFISVPFVGRNQLGVERLRNPLLITTPGGVMTAKYYSPAVPIEIQGIPFPSDLVRLITKNIAQPAHNRGHGYSNSFTLARGVPLYPQDTIPHMLLCPEIPPRHCKGGNRDNTLCTTQLKTVHRSWIIVTPL

SEQ ID NO: 26043 - protein, 1446 aa, Oryza sativa
  unsure (1)..(1446): unsure at all Xaa locations
  Clone ID: TF_OsC91_2068.pep
MTGGSGEHPQHSPRTRGIIQHFERQVREHAEGLDEDVRVANDRLGQLEAAQIDTNSKLSSLERSLVAVNTSLAGILNTLERMGQDGHDGSARRNHNGHDANSSIAAREELEYAADTEHDEEVLGRPQRQQRRQRHGMGAPPRREVRDNDDSLGKIKFTIPCFDGKYDPDAYLTWELAIDQKFACHDFPENKRVRAATRMLRCGLVENDDAGMARFMGGLNREIQDILAYKEYNSINRLFHLACKAEREVQGRRASFRTNISAGRASSWTSSNAAAPSTRAAAPSSSSNKLRPSTTNSTPCPSEPTRGVAATPSKSSSSVASSGRTRDIQCLRCKGYGHVRKDCPSTRVMIVRADGGYSSASDLDEETYALLATNNAGEGDAPHQDEEHIGAEAAEHYESLMVQRVLSAQMERAEQNQRHTLFQTKCVIKERSCRVIIDGGSCNNLASAEMVEKLALSTQPHPQPYYIQWLNSSGKERTRSEHLIAANELEKHKKKPTNSVQNNKNEIKLKGSCFIATKSDLDEVDTDTVVCYALVCKETLFPIEDTPISLPPPVTNLLQEYADIFPKEVLPGLPPIRGIEHQIDLIPGASLPNRAPYRTNPEETKEIQRQVQELLDKGFVVVYFDDILIYSRSIEDHHGHLRVVFDALRDARLFGNLEKCTFCTDRVSFLGYVVTPQGIEVVQAKVEAIHSWPVPTTITQVRSFLGLAGFYRRFVKDFSTIAAPLHELTKRNVTFTWAAAQRNAFDTLKDKLTHAPLLQLPDFNKTFELECDASGIGLGGVLLQEGKPVAYFSEKLSGPSLNYSTYDKELFALVRTLETWQHYLWPKEFVIHSDHESLKHIRSQAKLNRRHAKWVEFIESFPYVIKHKKGKENVIADALSRRYAMLSQLDFKIFGLETIKEQYAHDDDFKDVLLNCKEGRTWNKFVLTNGFVFRANKLCIPASSVRMLLLQEAHGGGLMGHFGVKKTEDILADHFFWPKMRRDVERFVARCTTCQKAKSRLNPHGLYMPLPLPSVPWEDISMDFVLGLPRTKKGRDSIFVVIDRFSKMAHFIPCHKSDDATHVADLFFREIVHLHGVPNTIVSDRDTKFLSHFWRTLWAKLGTKLLFSTTCHPQTDGQTEVVNRTLSTMLRAVLKKNIKMWEECLPHVEFAYNRSQHSTTKKCPFEIVYGLLPRAPIDLLPLPTSERVNFDAKYRAELMLKLHKTTKENIERMNIKYKLAGSKGKKHVAFEPGDLVWLHLRKDRFPNLRKSKLLPRADGPFKVLQKINDNAYKLELPADFGVSPTFNIADLKPYLGEEDELESRMTQMQEGEDDEDIPSNDTTTPIAQQGPMTRARAXVQGCSWHGKNSNNVESVYRLLRRSTPVVVVVGPPTSYPSPNRSLSSSHRKIGNPRCCIKTRMEMLEKHILGAVIRVTGKKARQNLSRNFSQLPFTHPTVEVYHCFALS

SEQ ID NO: 26044 - protein, 873 aa, Oryza sativa
  Clone ID: TF_OsC91_2397.pep
MSKNHVLAFFELFDSAKGCCWPDLSVSCDNYDLGETLTIRLQPYETLCCALAIDTPLRGLLILPVQINPIPASKSKKQDEQFARFVIQKIHIKVPLLDAMQVPTYARYLKDILNNKRPLPTTEVVKLTEQCSNLILHKLPEKKKDPGCPTITCSIGAQQFDQTWCDLGASVSVMPKDVFDKLNFTVLEPTPMRLQLADSSVRYPAGIAENVPVKIRDFFIPVDFVVLDMDMGKEMPLILGRPFLSTAGANIDVGTGSIRFHINGKEEKFEFQPRTEQCSMNFLEKETTMPRNRYWKTPVKSPVPAKKSDQPAQKKPPSAPKSKKGWENDHNDEDIPSNDTTTPIAQQGPMTRARARELNYQDILAYKEYNSINRLFHLACKAEREVQGRRASFRTNISAGCASSWTSPNAAAPSTRAAAPSSSSNKLRPSTTNSTPCPSEPTRGVAATPSKSSSSVASSGRTRDIQCLRCKGYGHVRKDCPSTRVMIVRADGGYSSASDLDEETYALLATNNAGEGDAPHQDEEHIRAEAAEHYESLVVQRVLSAQMERAEQNQRHTLFQTKCVIKERSCRVIIDGGSCNNLASAEMVEKLSLSTQPHPQPYYIQWLNSSGKEHTRSEHLIAANELEKHKKKPTNSVQNNKNEIKLKGSCFIATKSDLDEVDTDTVVCYALVCKETLFPIEDTPISLPPPVTNLLQEYADIFPKEVPPGLPPIRGIEHQIDLIPGASLPNRAPYRTNPEETKENQRQVDEDIPSNDTTTPIAQQGPMTRAQARELNYQVQGCSWHGKNSNNVESVYRLLRRNTPVVVVVGPPTSYPSPNRSLSSSHRKIGNPRCCITSARVTRQGSCSTRLGRTPHGPHLGRGPKRSYKPKGP

SEQ ID NO: 26045 - protein, 1402 aa, Oryza sativa
  Clone ID: TF_OsC91_2562.pep
MTGGSGEHPQHSPRTRGIIQHFERQVREHAEGLDEDVRVANDRLGQLEAAQIDTNSKLSSLERSLVAVNTSLAGILNTLERMGQDGHDGSARHNHNGHDTNSSIAAREELEYAADTEHDEELLGRPQRQQRRQRHGMGAPPRREVRDNDDSLGKIKFTIPCFDGKYDPDAYLTWELAIDQKFACHDFPENKRVRAATSEFTDFASIWWSEFVRSNPNNTPQTWDAMKRVMRARFVPSYHARDLLHKLQQLRQGNKSVEEYYQALQTGMLRCGLVENDDAGRASSWTPSNTAAPSTRAAAPSSSSNKLRPSTTNSTPCPSEPTRGVAATPSKSSSSVASLGRTRDIQCLRCKGYGHVRKDCPSTRVMIVRADGGYSSASDLDEETYALLATNNTGEGDAPHQDEEHIGAEAAEHYESLVVQRVLSAQMERAEQNQRHTLFQTKCVIKERSCRVIIYGGSCNNLASAEMVEKLALSTQPHPQPYYIQWLNSSGKEYADIFSKEVPPGLPPIRGIEHQIDLIPGASLPNRAPYRTNPEETKEIQRQVQELLDKGYVRESLSPCAVPVLLVPKKDGSWRMCVDCRAINNITIRYRHPIPRLDDMLDELSGSLVFSKIDLRSGYHQIRMKLGDEWKTAFKTKFSLYEWLVMPFGLTNAPSTFMRLMNEVLRAFIGRFVVVYFDGILIYSRSIEDHHGHLRAVFDALRDARLFGNLEKCTFCTDRVSFLGYVVTPQGIEVDQAKVEAIHSWPVPTTITQVRSFLGLAGFYRRFVKDFSTIAAPLHELTKRNVTFTWAAAQRNAFDTLKDKLTHAPLLQLPDFNKTFELECDASGIGLGGVLLQEDKPVAYFSEKLSGPSLNYSTYDKELFALVRTLETWQHYLWPKEFVIHSDHESLKHIRSQAKLNRRHAKWVEFIESFPYVIKHKKGKENVIANALSRRYTMLSQLDFKIFGLETIKEQYAHDDDFKDVLLNCKEGRTWNKFVLTNGFVFRANKLCIPASSVRMLLLQEAHGGGLMGHFGVKKTEDILANHFFWPKMRRDVERAVLKKNIKMWEECLPHVEFSYNRSQHSTTKKCPFEIVYGLLPRAPIDLLPLPTSERVNFDAKHRAELMLKLHETTKENIERMNIKYKLAGSKGKKHVAFEPGNLVWLHLRKDRFPNLRKSKLLPRADGPFKVLQKINDNAYKLELPADFGVSPTFNIADLKPYLGEEDELESRTTQMQEGEDDEDIPSNDTTTPIAQQGPMTRARARELNYQVQGYSWHGKNNNNVESVYRLLRRSTPVMRKPPYVGSPTVTELFPPHRTSLPLSSSRLTKPHNCHRQIWRGGLYSKPSRLALWFWFFPVQPPSRSGFFVLWMLVEEPEEIFVIWSGVDKEWWVVIFVMGNDFSMCVDFFKGGAFSTRQQKSS

SEQ ID NO: 26046 - protein, 3340 aa, Oryza sativa
  Clone ID: TF_OsC91_2597.pep
MTGGSGEHPQHSPRTRGIIQHFERQVREHAEGLDEDVRVANDRLGQLEAAQIDTNSKLSSLERSLVAVNTSLAGILNTLERMGQDGHDGSARRNHNGHDANSSIAAREELEYAADTEHDEEVLGRPQRQQRRQRHGMGAPPRQEVRDNDDSLGKIKFTIPCFDEKYDPDAYLTWELAIDQKFACHDFPENKRVRAATSEFTDFASIWWSEFVRSNPNNTPQTWDAMKRVMRARFVPSYHARDLLHKLQQLRQGNKSVEEYYQALQTGMLRCGLVENDDAGMARFMGGLNREIQDILAYKEYNSINRLFHLACKAEREVQGRRASFRTNISAGRASSWTSSNVAAPSTRAAAPSSSNNKLRPSTTNSTPCPSEPTRGVAATPSKSSSSVASSGRTRDIQCLRCKGYGHVRKDCPSTRVMIVRADGGYSSASDLDEETYALLATNNAGKGDAPHQDEEHIGAEAAEHYESLVVQRVLSAQMERAEQNQRHTLFQTKCVIKERSCRVIIDRGSCNNLASAEMVEKLALSTQPHPQPYYIQWLNSSGKVKVTRLVRVHFAIGSYHDSINCDVVPMQACSIFLGRPWQFDKDSLHFGKSNQYSFVHNGKKLVLHPMSPEVILKDELARASKQKNQEHTRSEHLIAANELEKHKKKPTNSVQNNKNEIKLKGSCFIATKSDLDEVDTDTVVCYALVCKETLFPIEDTPISLPPPVTNLLQEYADIFPKEVPPGLPPIRGIEHQIDLIPGASLPNRAPYRTNPEETKEIQRQVQELLDKGYVRESLSPCSIPVLLVPKKDGSWRMCVDCRAINNITIRYRHPIPRLDDMLDELSGSLVFSKIDLRSGYHQIRMKLGDEWKTAFKTKFGLYEWLVMPFGLTNAPSTFIRLMNEVLRAFIGRFVVVYFDDILIYSRSIEDHHGHLRAVFDALRDERLFGNLEKCTFCTDRVSFLGYVVTPQGIEVDQAKVEAIHSWPVPTTITQVRSFLGLAGFYRRFVKDFSTIAAPLHELTKRNVTFTWAAAQRNAFDTLKDKLTHAPLLQLPDFNKTFELECDASGIGLGGVLLQEGKPIEYFSEKLSGPSLNYSTYDKELFALVRTLETWQHYLWPKEFVIHSDHESLKHIRSQAKLNRRHAKWVEFIESFPYVIKHKKGKENVIADALSRRYAMLSQLDFKIFGLETIKEQYAHDDDFKDVLLNCKEGRTWNKFVLTNGFVFRANKLCIPASSVRMLLLQEAHGGGLMGHFGVKKTEDILADHFFWPKMRRDVERFVARCTTCQKAKLRLNPHGLYMPLPVPSVPWEDISMDFVLGLPRTKKGRDSIFVVVDRFSKMAHFIPCHKSDDATHVADLFFREIVRLHGVPNTIVSDRDTKFLSHFWRTLWAKLGTKLLFSTTCHPQTDGQTEVVNRTLSTMLRAVLKKNIKMWEECLPHVEFAYNRSQHSTTKKCPFEIVYGLLPRAPIDLLPLPTSERVNFDAKYHAELMLKLHETTKENIERMNIKYKLAGSKGKKHVAFEPGDLVWLHLRKDRFPNLRKSKLLPRADGPFKVLQKINDNTYKLELPADFGVSPTFNIADLKPYLGEEDELESRTTQMQEGEDDEDIPSNDTTTPIAQQGPMTRALARELNYQVQGCSWHGKNSNNVESVYRLLRRSTPVVADVTSGPSLSVEMLSLKHLGSTHNSIDQDSHWEMLTECDLTEFAIGLYLAQEVGHLPPEDLGEIRLRPRSNLAPGRLALYSNLLGQSRRKNWMVTSAPLASVHDQPRSSTTTTSATTTTTATSTTSTIAMRITTRPSFSAYSWLTTKRRNSAEPEKWRKSAHDKKLNVADWKKNDNDKSENDYNTKTMIAASVPANSASTRTPTGSRVPPLRSQDYHQPSLSIAGAGSSHRSRGHDERSVRSPPERHRERRVERLHSPHRRRPVDLRDTINQRRAARGHAPHYSLDRYDDDMDGVAAFTNDLRRVDWPASFKPTGIEKYDGTTNPESWLTVYGLAIRAAGGDSKAMANYLPVALADSARSWLYGLPRGTIGSWAELRDHFIANFEGTFERPDYIRRFSKQRNKISDITDDVIIAAFTKGIRHEDLVGKFGRKPPKTVKQMFEKANEYAKAEDTITASKQSGTTWKPKKDTPAAGGSGSNNHKDRKRKPEELVATTTPSSRQRSRVNTFDKIMNSQCPHHPNSNHAAKDCFVYKQFAEQYAKNARKPSDGDQGTSKKKDNEDDPPTGFQDHRKELNHIFSGPLAYESKRKQKLTEREINAVQPNTPQYLRCALNILFAKTLDDMQIPRTELKPSNAPFHGVIPGLSATPLGQITLPVTFGTWDNFRTENVCFKVADFETAYHAILGRPALAKFMAVPHYTYMMMKMPGPRGVISLRSNIKQAVTCDKESCEMAQTREITFAREEIRLAATVANEGEVPATKMSKTQESDAKTKKIPLDPSDPTKTANNKDIFAWKPSDMPGIAREVIEHSLHVKEDAKPIKQRLCRFAQDRKDAIKEELTKLLAAGFIKEVLHPDWLANPILVWKKTGQWRMCVDYTDLNKSCPQDPFGLPRIDQFFGAYCYITMPFGLKNAGATYQRMIQRCFSAQIGRDVEAYVDDVVVKTKQKDVLIADLEETFASIRAFRMKLNPEKCIFGVPSGKLLGFMVSHRGIQANPEKINAILNMKPPSSQKDVQKLTGCMAALSRFVSRLGERGMPFFKLLKKTDNFQWGPEAQKAFEDFKKLLTTPPVLASPHPQEPLLLYVSATSQVVSTVLVVEREEDGHVQKVQRPIYFVSEVLADSKTRYPQPRISIKFQALADFVAEWTECQEDMPEEKMEYWTMHFDGSKRLSGTGAGVVLISPTGERLSYVLWIHFSASHNVAEYEALLHGLRIAISLGIRRLIVRGDSQLVVNEVMKEWSCLDDNMTAYRQEVRKLEDKFDGLELTHVLRHNNEAADRLANFGSKREAAPSDVFVEHLHEPIVPRKETIEAMDTQGVSMIEADWREPFIRFLTKQELPQDKNEAEQISRRSRLYVIHETELYKKSPSGILQRCVSLEEERQLLKDIHSGICGNHAAARTIVGKAYRQGFFWPTAVSDADKIVRTCEGCQFFARQTHLPAQDLQTIPLSWPFAVWGLDMVSPFKKAVGGYTHLFVAVDKFSKWIEAKQVITITADKARDFFINIVHRFGVPNCIITDNGTQFTCGVFKDFCEDFGIKICYASVAHPMSNGQVERANGMVLQGIKARVFDRLRPYTGKWVEQLPSVLWSLRTTPSQATGQSPFFLVYGAEAMLPSELEFESLRFRNFHEERYEEDRVDDINRLEEAREAVLIQSARYLQGLHRYHNRNVRSRAFLVGDLVLRNIQTTRDRHKLSPLWE

SEQ ID NO: 26047 - protein, 1683 aa, Oryza sativa
  Clone ID: TF_OsC91_2633.pep
LSGSRLFLARQEQQQRGVGVPVAKAQHPCGSCSRTANVVSFPKSKFILLSSKDREPPLLHQVVSELKLLGGSGEHPQHSPRTRGIIQHFERQVREHAEGLDEDVRVANDRLGQLEAAQIDTNSKLSSLERSLVAVNTSLAGILNTLERMGQDGHDGSARRNHNGHDANSSIAAREELEYVADTEHDEEVLGRPQRQQRRQRHGLGAPPRREVRDNDDSLGKIKFTIPCFDGKYDPDAYLTWELAIDQKFACHDFPENKCVRAATSEFTDFASIWWSEFVRSNPNNTPQTWDAMKRVMRARFVPSYHARDLLHKLQQLRQGNKSVEEYYQALQTGMLRCGLVENDDAGMARFMGGLNREIQDILTYKEYNSINHLFHLACKAEREVQGRRASFRTNISAGRASSWTSSNAAAPSTRAAAPSSSSNKLRPSTTNSTPCPSEPTRGVAATPSKTSSSVASSGRTRDIQCLRCKGYGHVRKDCPSTRVMIVRADGGYSSASDLDGETYALLATNNAREGDAPHQDEEHIGAEAAEHYESLVVQRVLSAQMERAEQNQRHTLFQTKCVIKERSCRVIIDGGSCNNLASAEMVEKLALSTQPHPQPYYIQWLNSSGKVKVTRLVRVHFAIGSYHDSINCDVVPMQACSMLLGRPWQFDKDSLHFGKSNQYSFVHNGKKLVLHPMSPEVILKDELARASKQKNQEHTRSEHLIAANELEKHKKKPTNSVQNNKNEIKLKGSCFIATKSDLDEVDTDTVVCYALVCKETLFPIEDTPISLPPPVTNLLQEYADIFPKEVPPGLPPIRGIEHQIDLIPGASLPNRAPYRTNPEETKEIQRQVQELLDKGYVRESLSPCSVPVLLVPKKDGSWRMCVDCRAINNITIRYRHPIPRLDDMLDELSGSLVFSKIDLRSGYHQIRMKLGDEWKTAFKTKFGLYEWLVMPFGLTNAPSTFMRLMNEVLRAFIGRFVVVYFDDILIYSRSIEDHHGHLRAVFDALRDARLFGNLEKCTFCTDRVSFLSYVVTPQGIEVDQAKVEAIHNWPVPTTITQVRSFLGLAGFYRRFVKDFSTIAAPLHELTKRNVTFTWAAAQRNAFDTLKDKLTHAPLLQLPDFNKTFEHECDASGIGLGGVLLQEGKPVAYFSEKLSGPSLNYSTYDKELFALVRTLETWQHYLWPKEFVIHSDHESLKHIRSQAKLNRRHAKWVEFIESFPYVIKHKKGKENVIADALSRRYAMLSQLDFKIFGLETIKEQYAHDDDFKNVLLNCKEGRTWNKFVLTNGFVFRANKLCIPASSVRMLLLQEAHGGGLMGHFGVKKTEDILADHFFWPKMRRDVERFVARCTTCQKAKSRLNPHGLYMPLPVPSVPWEDISMDFVLGLPRTKKGRDSIFVVVDRFSKMAHFIPCHKSDDATHVADLFFREIVRLHGVPNTIVSDRDTKFLSHFWRTLWAKLGTKFLFSTTCHPQTDGQTEVVNRTLSTMLRAVLKKNIKMWEECLPHVEFAYNRSQHSTTKKCPFEIVYGLLPRAPIDLLPHPTSERVNFDAKYRAELMLKLHETTKENIERMNIKYKLAGSKGKKHVAFEPGDLVWLHLRKDRFPNLRKSKLLPRADGPFKVLQKINDNAYKLELPADFGVSPTFNIADLKPYLGEEDELESRTTQMQEGEDDEDILSNDTSTPIAQQGPMTRARAHELN

SEQ ID NO: 26048 - protein, 934 aa, Oryza sativa
  unsure (1)..(934): unsure at all Xaa locations
  Clone ID: TF_OsC359_8235.pep
MEPPALAARRMCCCSPSMVTTRRSAATGEGSHPEGSNHNNHGSPPPPPPPPPPPPPDTNSILTQILAXQANMMAAFLHHIQNPPQHNAPPPPPQHSKLAEFLRIRPPTFSSSNNPVDALDWLHAVGKKLDTVQCSDEEXVIFAAHQLQGPASLWWDHFQAMQPEGQPITWARFTAAFRRTHVPAGVMALKKREFRELKQGNRSVMEYLHEFNNLARYALEDVREDEEKQEKFLAGMDPELSVRLVSGDYLDFQRLVDKSIRLEAKHKELESHKRRLANFRNQQGANQKVRYTATXNPYPGRSSSQQQQQQQPRSAPRPQFVVRVPQPQQQQSQQGTRAPRPPTPAVQPGQGRRDVQGQQCLCFNCFEPGHFADKCPKPRCQQGQAPPRSNHGGKDVIRGRVNHVMAEDVLTTPDVIVGTFLIHSIPATILFDSGASHLFIFVPFVGRNQLGVERLRNPLLITTPGGVMTAKYYSPAVPIEIQGIPFSSDLILLDTKNLDVILGMNWLAQFQGVVDCARRTVTLYRGPEQPVVFFAPPTSVGSSELHQIRLSEIPIIREFGDVFPEELPGMPPKREIEFRIDLALGTTPLYKRPYRMAANELAEVKKQLEELKEKGYIRPSTSPWGAPVIFVEKKDKTKRMCVDYRALNEVTIKNKYPLPRIDDLFDQLKGATVFSKIDLRSGYHQLRIREEDIPKTAFTSRYGLYEFTVMSFGLTNAPAFFMNLMNKVFMEYLDMFVVVFIDDILVYSQSEEDHQHHLRLVLGKLREHQLYAKLSKCEFWLSEVKFLGHVISAKGVAVDPETVTAVTDWKQPKTVTQIRSFLGLAGYYRRFIENFSKIARPMTQLLKKEEKFVWSPQCEKAFQTLKERLVSSPVLILPDTRKDFMLYCDASRQGLGIFISHGHWNGWIIVELDSHRGNIPRDSLPLSPHFSLPL

SEQ ID NO: 26049 - protein, 1261 aa, Oryza sativa; identical to SEQ ID NO: 19489
  Clone ID: TF_OsC1713_4303.pep

SEQ ID NO: 26050 - protein, 839 aa, Oryza sativa
  unsure (1)..(839): unsure at all Xaa locations
  Clone ID: TF_OsC333328_1.pep
MILTIMGEMSQFGAIVIPKFVVGGIIAKLPPFWRDFATALKHKREDMMVDDLIAHLDVEEKARAKDTPTMAQEGTSNANLVQKSNAKNKGKQAVQNHKAKNTTNFKKKITCYVCGLEGHKANKCRDRKGKKNVQQGQKIANMVVSEAGSSGYDSTPVALSAYQSFDWWVDTGANIHAATGSSILMGNGSGAAVLGVGKVDLKLTSGKIISLKNVQHAEAENQLERKIKRLRSDRGGEYVSDEFSQFCADHGIIHEITPPYSPQSNGVAERKNRTLTDLVNAMLDSAGMSKAWWGEAVLTACHILNRVPTKNSEITPYEGWKGRKPSLSYLRTWGCLAKVNVPITKKRKLGPKTIDCVFLGYAHNSVAYRFLVVRSDVPDVPINMVTESRDATFFEDIFPMKANETWEITDRPFGCKPVGCKWIFKKKLRPDGTIEKYKVRLVAKGYTQKEGEDFFDTYSPVARLTTIRVLLSLAALYGFVVHQMDVKTAFLNGELDEEIYMEQPDGFVALGQEGKVVKLLKSLYGLKQAPKQWHEKFDRTLTSAGFIVNEADKCVYYRFGGGEGVILCLYVDDILIFGTNINVVSELKSFLSQKFDMKDLGEADVISNIKLIKGEDGIMLSQAHYVEKVLTRFGLMDCKIAPTPYDPSLKLRKNKGLGKDQLRYSQIIGSLMYLACATRPDISYAVSKLSRFTSNPXDDHWQALERILRYLRGTMSYGIHYTGYPAVLEGYSDSNWISDADEIKATSGYLFTLGGAAVSWRSCKQTVLTRSTMEAELVALDTATVEAEWLRELLMDLPVGEKPIPAILMYCDNQTVLIKVKSTKDNMKSSRHVKRPGIL

SEQ ID NO: 26051 - protein, 1851 aa, Oryza sativa
  unsure (1)..(1851): unsure at all Xaa locations
  Clone ID: TF_OsC359_7957.pep
MDISRTNEGYTSCGPVVEMSWHRAGVLLLGXSVLPTCPGGSGRRXGVGSMYTSDQSIIYSNSRALGYGQAEQCTQMAGSINRRGLDLTGFVLELRGMCVVLGYLHGVDYQGKQLPEQEGDDADPHAAWEVTAVILTGSPERTSLAVTAGGDSFSAACQNAALLAIGTLHQRYPDELQHXAYRYHPRRGGARDYATFRDASLEDDATIMHLARMVEAYDAARIDFHQMVRRGLVENNMKILELRQENLQLKKDLDAVEAQLRQLKIAQGEVCRPKRRRVCRSLKITARKSTSRPELVRQSLAWTCFVETPRAEPAPVVPQEEGASGVGSTEDALLLTFHPGPSQKRSAATGEGSHPEGSNHNNHGSPPPPPPPPPPPPPDTNAILTQILAQQANMMAAFLHHIQNPPQHNASPPPPQHSKLAEFLRIRPPTFSSSNNPVDALDWLHAVGKKLDIVQCNDEEKVIFAAHQLQGPASLWWDHFQAMQPEGQPITWARFTAAFRRTHVPAGVMTLKKREFQELKQGNRSVMEYLHEFNNLARYAPEDVREDEEKQEKFLAGMDPELSVRLVSGDYPDFQRLVDKSIHLEAKHKELESHKRRLANFRNQQGANQRVRYTNPYPGESSSQQQQQQQPRSAPRPQFVVRVPQPQQQQSXQGTRAPRPPTPAVQPGQGRRDAQGQQRLCFNCFEPGHFADKCXKPRRQQGQAPPRPNNGGKDIIRGRVNHVTAEDVLTTPDVIVGTFLIHSVPATILFDSGASHSFISVPFMGRNQLGVERLRNPLLITTPGGVMTAKYYSPAVPIEIQGIPFLSDLILLDTKNLDVILGMNWLAQFQGVVDCARRTVTLYRGPEXPVVFFAPPTSVGSSELHQIRLSEIPIVREFGDVFPEELPGMPPKREIEFRIDLALGTTPLYKRPYRMAANELAEVKKQLEELKEKGYIRPSTSSWGAPVIFVEKKDKTKRMCVDYRALNEVTIKNKYPLPQIDDLFDQLKGATVFSKIDLHSGYHQLRIREEDIPKTAFTTRYGLYEFTVMSFGLTNAPAFFMNLMNKVFMEYLDKFVVVFIDDILVYSQSEEDHQHYLRLVLGKLREHQLYAKLSKCEFWLSEVKFLGHVISAKGVAVDPETVTAVTDWKQPKTVTQIRXFLGLAGYYRRFIENFSKIARPMTQLLKKEEKFVWSPQCEKAFQTLKERLVSSPVLILPDTRKDFLVYYDASRQGLGCVLMQEGHVVAYASRQLRPHEGNYPTHDLELAAVVHALKIWRHYLIGNRCEIYTDHKSLKYIFTQSDLNLRQRRWLELIKDYDVGIHYHPGKANVVADALSRKSHCNTLNVRGIPPELNQQMEALNLSIVRRGFLATLEAKPTLLDQIREAQKNDPDMRGLLKNMKQGKAAGFTEDEHGTLWNGNRVCVPDDKELKQLILQEAHESPYSIHPGSTKMYLDLKEKYWWVSMKREIAEFVALCDVCQRVKAEHQRPAGLLQPLQVPEWKWDEIGMDFITGLPKTQGGYDSIWVVVDRLTKVARFIPVKTTYGGNKLAELYFARIVSLHGVPKKIVSDRGSQFTSHFWKKLQEELGTRLKFSTAYHPQTDGQTERLNQILEDMXRTCPRHTAVLPFSGTTWDKNLXPYAEFSYNNSYQTSIQMAPYEALYGRKCRTPLLWDQVGESQVFGTDILREAEAKVRTIRDNLKVAQSRQKSYADNRRCNLEFAVDDFVYLRVTPLRGVHRFQTKGKLAPRFVGPFRIIARRGEVAYQLELPASLGNVHDVFHVSQLKKCLRVPSEQADSEQIEIREDLTYVERPVKILDTMERRTRNRVIRFCKVQWSNHAEEEATWEREDELKAAHPNLFGSSSESRGRDSV

SEQ ID NO: 26052 - protein, 324 aa, Oryza sativa
  unsure (1)..(324): unsure at all Xaa locations
  Clone ID: TF_OsC359_8257.pep
MAPQPTCQTCVRNYLGSEEDPALSENPNQLAEQVTNQVAKTGNAVPGPKKEVATRNQHSSMDIYQILANQTQMLQEIAQNLASIQQQLLLPQPKVNPDKSKNEAAEIQGTQSVEGTDTHKEKNKEFLNVMITGMKTPLRANNCPNLQNSINESVSQENSMVKEGSCHKRKTLPSEVDMQDVPQCQTLQSCQNLSKTPTLKSKKIRHVPGFICFICHEIGHYMRHCPQKPYMDALLQANMSISRMPFYPQGSPNSPNVNAVRPTFPDDKRAKASCDMCQDIQEKKEMQEYKRRKVMSLEIQAKEDLCRKXTNSPAQYYQKASHST

SEQ ID NO: 26053 - protein, 404 aa, Oryza sativa
  Clone ID: TF_OsC91_2592.pep
MMKEILQVVVEPITWLEFTVAFKKIHVPSGVVALKKREFRALTLRSCSITEFLHEFNCLARYAPEDVCMDEKLVDKAIRQEDKYNRMEEKKHKIAHNQPIKEQGNMPVVCFNYDEPGHFADKCPKPRRVETAPIQNKSIAPAPKARVNHVAAAEAQGAPDVISMRDYPNVFPVDLRGIPPKRDIEFRIDLVMRTSPTITRWQRRNKGSSGGGNDEDILYYYPLAKTRDTNRSGFLNAHALELRNHSTTSSLVITRVETRMTSPRRLIPVCELKNTNKDKILDVKLFSQVPLTRKEFGRGTKTIGKFIFLAFHPYKECPNMSTKDPAAVREEEERRWSGLLHRGTWSSVTAGSTPPTPAVAATKEALADAAVGERWIRALSARVWGKKRNKIWTGGWSGLEFGIS

SEQ ID NO: 26054 - protein, 928 aa, Oryza sativa
  unsure (1)..(928): unsure at all Xaa locations
  Clone ID: TF_OsC91_2399.pep
CYNCRYSRACVPTDADITTSDTHNNPPTVIQGPITRARTMEGTRRHLEKDLEPWRIIWDVQVKVEAQTKSTSGAIRSPGPVCTKTGAQHYYLSLDCVPLIYIYLAFLAPHITSAQHRFLIPAIADYAFXVSFALLTQKDITEAVAKSVQDAFTKIGFLNHMERLDKRISTLSDQVAALETPSNEEVVSGDDDAHPEDTVYDSSGYIDALATRQAWLRHRLRTNRTGMGGTRHQQGNNNNHVPDDPYAKVKFKIPSFSGYYDAEKYLDWEMTVEQKFNAHLVPEQHRVRQASSEFKDFAIMWWAGLSDEGVLPTAWEELKVAMRDRFVPPSYHRDLRKKLMRLEQGDKSVQDYYGELQKGLFRFVMLAEKELQGCDHQGKSKASTYTPRTTPSAGLPKAISFRASFQPAGKRPAAFGASAAPKPSPPPRPAESGKGSSQVPAKSASYVASTGRIQCHRCXGFGHVQKDCPSQRAYVATEDGYITTSDVEEEEEEEEVEDEDGEXFGRDDTTDYRTIIVQRVLSTQIFFVINNRRARVIIDGGSCNNFVVKRFRKSKDSVDCDVVPMQACSLLLGRPWXNMIMMLHTMQVAKTVFPPKKDNLSPSSKAKGIKSKGGVMLATKCDIAENSDDDMCYFLICKQALVSLDDIASSIHLVVTNLLQEYEDVFPAEIPPGLPNRAAYRTNLEETKEIQRQVQDLLDHGYVRQRLSPCAVPVILVPKKDGSWRMCVNCRAINNITIXYRHPIPRLDDMLDELCGSIIFTKIDLRSGYHQIRMKLGDEWKTAFKTKFGLYEWLVMPFGLINAPSTFMRLMNEVLRPFIGRFVVVYFDDILIYSKSLNEHMDHLRAVFNALRDARLFATLEKCIFCTERVSFLGYVVTPQGXIEVDESKIEAIRSWPVPETITQVRSFLALCDPSRSAATHGCRSNTS

SEQ ID NO: 26055 - protein, 307 aa, Oryza sativa
  Clone ID: TF_OsC334495_1.pep
MAKSMAAVALNAGRASRQSDGRGTLETPDATGRLLAGGGVRKEMGLGSPKDGFARGMGIDTVVYMCSSASASSSRKDAAVVGLGRRSVLAASFRSASTSTPLIPVGVDKAPNIDPNLYFVAITGIKVASGEIVSDKAAAIMTTVSTLYTFLNPVLFDHLKKQLPPLADKGSSVLCYTKDTELPAITLVFAGKDAAMKLAPEHYSYKRSDGAVCLSILRSPLHGGVFVIGRRGGPRIFNLVRYRLRHLVVDGSGRSAPGGNSSPRRRTGGRRRLEHGGGRRGGMPDAPSARAAKAPTAPCAPAPRPKG

SEQ ID NO: 26056 - protein, 1497 aa, Oryza sativa; identical to SEQ ID NO: 19510
  Clone ID: TF_OsC359_5835.pep

SEQ ID NO: 26057 - protein, 1627 aa, Oryza sativa
  unsure (1)..(1627): unsure at all Xaa locations
  Clone ID: TF_OsC359_6886.pep
MSWHRAGVLLLGAQSCLPVPGVPAMAGSVTRRGLDMTGFVLELRGICVVLGYPHGVDYQARPLPEQEGDDAEPHAGWEVTAVILSGYPERTSLAVTAGGDSFPAACQNDALLAIVTLHQRYPDELQHSPYRYHPRRGGARDYATFRDASSEDDATIVHLARMVEAYDAARIDFHQMVHRGMVENNMKILELRQENLQLKKDLDVVEAQLHQLKIAQGEVCRPKRRRVCRSQKITARKSTSRPELVRQSLAWTCFVETPRAEPAPVVPQKGEASGVGSTEDALLLTFRPGPSQRRNAATGDGNQPEGSNHNHQGNPPPPPPPPPPPPPDTNAILTQILAQQANMMTAFLHHLQNPPQHNAPPPPPQHSKLAEFLRIRPPTFSSSNNPVDALDWLHAVGKKLDTVQCSDEEKVIFAAHQLQGPASLWWDHFQATQPEGQPITWARFTAAFRRTHVPAGVMALKKREFRELKQGNRFVMEYLHEFNNLARYAPEDVREDEEKQEKFLAGMDPELSVRLVSGDYPDFQRLVDKSIRLEAKHKELESHKRRLANFRNQQGANQRVRYTNPYPGGSSSQQQQQQQQPRSAPRPQFVVRVPQPQQQQNQQGTRAPRPPTPTVQPGQGRRDAQGQQRLCFNCFEPGHFVDKCPKPRRQQGQAPPRSNNGGKDVIRGRVNHVTAKDVLTTPDVIVGXFGDVFPEELPGMPPKREIEFRIDLAPGITPLHKRPYRMAANELAEVKKQLEELKEKGYIRPSTSPWGAPVIFVEKKDKTKRMCVDYRALNEVTIKNKYPLPRIDDLFDQLKGATVFSKIDLRSGYHQLRIREEDIPKTAFTTRYGLYEFTVMSFGLTNAPAFFMNLMNKVFMEYLDKFVVVFIDDILIYSQSEEDHQHHLRLVLGKLREHQLYAKLSKCEFWLSEVKFLGHMISAKGVAVDPETATAVTDWKQPKTVTQIRSFLGLAGYYRRFIENFSKIARPMTQLLKKEEKFVWSPQCEKAFQTLKEKLVSSPDGHVVAYASRQLRPHEGNYPTHDLELAAVVHALKIWRHYLIGNLCEIYTDHKSLKYIFTQSDLNLRQRRWLELIKDYDVGIHYHPGKANVVADALSRKSHCHTLNVRGIPPELNQQMEALNLSIVSRGFLATLEAKPTLLDQIREAQKNDPDMHGLLKIMKQGKAAGFTEDEHGTLWNENRVCVPDNRELKQLILQEAHESPYSIHSGSTKMYLNLKEKYWWVSMKREIAEFVALCDVCQRVKAEHQRPAGLLQPLQVPEWKWDEIGMDFITGLPKTQGGYDSIWVVVDRLTKVARFIPVKTTYGGNKLAELYFARIVSLHGVPKKIVSDRGSQFTSHFWKKLQEELGTRLNFSTAYHPQTDGQTERLYQILEDMLRACVLDFGKTWDKSLPYAEFSYNNSYQASIQMAPYEALYGRKCRTPLLWDQVGESQVFGTDILRETEAKVRTIRDNLKVAQSRQKSYADNRRRDMEFAVDDFVYLRVTPLRGVHRFQTKGKLAPRYVGPFRIIARRGEVAYQLELPASLGNVHDVFHVSQLKKCLRVPSEQADSEQIEVREDLTYVERPVKILDTMERRTRNRVIRFCKVQWSNHAEEEATWEREDELKAAHPDLFASSSESRGRDSV

SEQ ID NO: 26058 - protein, 662 aa, Oryza sativa
  unsure (1)..(662): unsure at all Xaa locations
  Clone ID: TF_OsC1713_5255.pep
MSAPGAAAAAGATVAIPEDGAPGAGAAANVNVNGGSSASQSSGGTFSGSFSVVGFAAALKPHAFDGSNYKRCKARALLWLTAMQCFYVSRGIRSEPPLSPEEEVKFEASDCLFRGALISVLADNIVDVYMHMPSGKDMWDALEAKFGVSDTGSELYVMEQFYDYKMVDDHSVVEQAHEIQMLAKELENNNCELPDKFVAGGIIAKLPPSSSDFATSLKHKRQEFSVSDLIGSLGVEEKARAKDNRGKKVERGSSANMVQKKNPHASHNNKKVKPDVKSKATINFKKKGKGKAKGDCFVCGKSGYWAKDCPECKDRKSANMVGRGSSLLMGNGSLAAVHGVGTVDLKFTSGKTVQLKNMQHVPSIKKNLVSGSLLCREGFRLAFESNKCVVSKYGTFVGKGYDRGGLFRSSLDDMCNNHNVVNHISKNDESXCGIRNSVMTPPYSPQSNWVAXRKSRTLTEMVNAMLDTAGLSMEWWGEAILTACHILNKIPMKHKEVTPFEEWKRKKLNLPYLRTWGCLAKVSVPIAKMRKLRPNTVDCVFLGYVIHSVGYRFLIVNSGVPNMRVGTIIESRDATFFENEFPMKHTPSTSSQETVIPHEHFAPIEHNDQTPEENPEEDNIVDTRKSKRQRVAKSFGDDYVVYLVDDTPRIIEEAYSSPNADY

SEQ ID NO: 26059 - protein, 209 aa, Oryza sativa
  Clone ID: TF_OsC369407_1.pep
MKSEYMTEEDPLVLWQSLKDRCDHQGSILLPWAQHGLITLCFQDYKFIVAYNSALYWISAWLCLCDQKITDTEMIEKKLSTYHPNNMHGRRDRRVREVSCSRGKGRVSPKAKAECKKVTCGTSGENMIIAIDVEALSIGLVTAMFPSIWLSSNEKMSQYESYFTTEPEAHIENYDDMFVNTKDGEDVHMDDDEDNLIEEVISYMSLISV

SEQ ID NO: 26060 - protein, 1107 aa, Oryza sativa
  unsure (1)..(1107): unsure at all Xaa locations
  Clone ID: TF_OsC1713_4313.pep
MSTTGDNNNTGDKEKEPLVNTNGGNTASNSSRGPFSGYNVSLLPFVLRFLQLSVAVLLRSLIYVDAYSILSMLMLYTSSTVTRSTQITNVMWKARALLWLTVMQCFFVSRGKPSEPPLSPEEEAKFEVADCLFRGALISVLADSIVDVYMHMPSRKDMWDALQAKFRVSDAGSELYVMEQFYDYNMVDDRSVVEQFVAGGIIAKLPPSWSDFATSLKHKRQEFSVTDLIGSLGVEEKARAKDNRGKKKNDGGSSANLVQKKNPHASHNNKKKVKPDVKPKATTNFKKKGQGKAKVDFFVCGKPGHWAKDCLDRKDKKSANMIISEGGGTSGRGSSLLMGNGSLAAVHDVGTVDLKFTSGKIVQLKNMQHVLSIKKNLVSGSLLCKGGFRLVFESNKCVVSKYGTFIGKGYDCGGLFRFSMDDMCNKVVNHVSDDDDESNVWHSRHCHVNFGCMTRLANMSLIPKFTLVKGSKCHTCVQSKQPRKPHRASEVRNLAPLELVHSDLCEMNGVLTKGGKKYFMRVIDNCTRFCYMYLLKTKDEALHYFKIDKAEVENHLERKIKRLRSDRGGEYFSNEFNSFCEEYEIIHERTPPYSPQSNGVAERKNRTLTEMVNAMLDTAGFSKEWWGEAILTVCHVLNRIPTKHKEVTPFKEWERKKLNLSHLHTWGCLVKVNVPIAKKCKLGQKTVDCVFLGYAIHSVGYRFLIVNSRVPNMRVGTITESRDATFFENEFPMKNALSTSSQEPILSPEHFVPIEHIDQMLEENPEEDNIVATRKSKRQRTAKSFGDDYIVYLVDDTPRTIEEAYSSLDADYWKEAVCSEMDSIMSNGTWEVAERPYGCKPVGCKWVFKKKLRSDGTIEKYKARLVAKGYTQKEGDDFFDTYSPVARLTTIRPLMVYSSIRWMLKTAFLNGELEDEIYMDQPDGXKQWHEKFDNTLTSAGFIVNEADKCVYYRYGGGEGVILCLYVDDILIFGTSLNVIGEVKDFLSKSFEMKDLEVADVILNIKLLRGDEGRITLVQSHYMDKVLSRFGYSDCKAAPTPYHPSVLLRKNQRIGKDQLRYSQIIGSLMYLASATRPDISFVVSKLSRFISNPGDDHWHALERVMRAI

SEQ ID NO: 26061 - protein, 1319 aa, Oryza sativa
  unsure (1)..(1319): unsure at all Xaa locations
  Clone ID: TF_OsC1528_1743.pep
MAGFADALRPDKFSGVHFKRWQIRVTLWLTAMKCFWVSTGKPEGILIADQQKQFEEATTLFVGCILSVLGDRLVEVYMHMTDAKELWDALNTKFGATDASNDLYIMEQFHDYKMTDNRSIVEQAHEIQTMAKELELLKCVLPDKFVAGCIIAKLPPSWRSFGTALKHKRXEYSVEGLIASLNVEGKAREKDAASKGDSGQSSANVVHKAQNKSKGKYKAQQTTNFKKKKKNNNNPNQDERTCFMCGQPGHLARKCPQRKGMKAPAGQTSKSANVTIGNTGDGGGYSNLPTVFLVNQSTNWWVDTRANVHVCADILLFSSYQVARGSIVLMGNGSHASFHGVGTVDLKFTSGKIVQLKNVQHVPSIDRNLVSGSRQTRDEFKLVFECNKVVVSKHGYFIGKGYECGGLFRFSLSDFCNKSVNHICGSVDDEANVWHSCLCHINFDLMSRLSSMCLIPKFFTVKGSKCHSCVQSKQPRKPHKAVEERNLAPLELLHSDLCEMNGVLTKCGKXYFMTLIDDATIFCYVYLLKTKDEALDYLKIYKAEVENQLDKKIKRLRFDRGGEFFSNEFDLFCEEHDIIHKRTPPYSPESNGIAERNNRTLTDLVNDMLDTTGLPKAWWGXALLTSNHLLNRVPNRNKDKTPYEIWIGRKPSLSPSTXGCLAKVNIPITKKRKLGPKTVDCVFLGYAHYSITYRFLIVKSEVPDMHVGTIMESRDATFFESFFPMKDTHSSSSQPSEVIPRSITQPEQTEHTHKHVIEEDVSEAPRRSKRQRTAKSFGDDFTVYLVDDTPKSISEAYASPDADYWKETVRSEMDSIIANGTWEVTNRPYGCKPVGCKWVFKKKLRPDGTIEKYKARLVAKGYNQKEGEDFIDTYSPVARLTTVHVLLSLAATHGLLVHQMDVKTAFLNGELDEEIYMDQPDGFVVEGQEGKVCKLLKSLYGLKQAPKQWHEKFDKTLTSSGFAVNEADKCVYYRYGGGEGVILCLYVDDILIFGTNLEVINEVKSLLSQNFDMKDLGVADVILNIKLIRGENVITFLQSHYVEKILNRFGYIDSKPSPTPYDPTPSLRKNKRIARNQLEYSQIIGSLMYLASATRPDISFVVSKLSRFTSNPGDDYWRALERVMRYLKDTMELGLHYSRYPAVLEGYSDSKWISDVDEIKATSGYVFTLGGGAVSWRSCKQTILTRSTMEAELTVLDTATVEAEXLRDLLMDLPIVEKPVPAVLMNYDNQTTCEKTIEVCQEIEKLRSYNVGLHPNSXKPGRSLHEGTITKCDRQCIVGDRFETHSILERTHLCKLDCWSQSIEILGESSRNLTKDLGV

SEQ ID NO: 26062 - protein, 1753 aa, Oryza sativa; identical to SEQ ID NO: 19850
  Clone ID: TF_OsC1713_5231.pep

SEQ ID NO: 26063 - protein, 1811 aa, Oryza sativa
  Clone ID: TF_OsC359_8337.pep
MDEVGGRWTFSRANEGYTSCGPMAGSVTRRGLDMTGFVLELRGMCVVLGYPHGEDYQARPLPDQEGDDAEPHAGWEVTAVILSGSPERTSLAVTAGGDSFPAACQNAALLAIGTLHQRYPDELQHSPYRYHPRRGGARDYATFWDASSEDDATIVHLARMVEAYDAARIDFHQMVRRGMVENNMKILELRQENLQLKKDLDAVEAQLHQLKVAQGEICRPKRRRVCRSQKITARKSTSRPELVRQSLAWTCFVETPRAEPAPVVPQEGEASGVGSSEAVDEQLVGLRVCSFSFVFFGVVWGMVMPMVTTRRNAVTGDGNQPEGSNPNHQGNPPPPPPPPPPPPPDTNAILTQILAQQANMMNAFLHHLQNPPQQNAPPPPPQHSKLAEFLRIRPPTFSSSNNPVDALDWLHAVGKKLDTVQCSDEEKVVFAAHQLQGPASLWWDHFQATQPEGQPITWARFTAAFRRTHVPAGVVALKKREFRELKQGNRSVMEYLHEFNNLARYAPEDVREDEEKQEKFLAGMDPELSVRLVSGDYPDFQRLVDKSIRLEAKHKELESHKRRLANFRNQQGANQRVRYTNPYPGGSSSQQQQQQQQPRPAPRPQFVVRVPQPQQQQNQQGTRAPRPPTPTVQPVQGRRDAQGQQRLCFNCFEPGHFADKCPKPRRQQGQAPPRSNNGGKDVIRGRVNHVTAEDVLTTPDVIVGTFLVHSIPATILFDSGASHSFISVPFVGKNQLGVERLRNPLLITTPGGVMTAKFYSPAVPIEIQGIPFPSDLILLDTKNLDVILGMNWLAQFQGVVDCARRTVTLYRGPEQPVVFFAPPTSVRSSELHQIELSEIPIVREFGDVFPEELPGMPPKREIEFRIDLAPGTTPLHKRPYRMAANELAEVKKQLEELKEKGYIRPSTSPWGAPVIFVEKKDKTKRMCVDYRALNEVTIKNKYPLPRIDDLFDQLKGATVFSKIDLRSGYHQLRIREEDIPKTAFTTRYGLYEFTVMSFGLTNAPAFFMNLMNKVFMEYLDKFVVVFIDDILIYSQSEEDHQHHLRLVLGKLREHQLYAKLSKCEFWLSEVKFLGHVISAKGVAVDPETVTAVTDWKQPKTVTQVRSFLGLAGYYRRFIENFSKIARPMTQLLKKEEKFVSSPQCEKAFQTLKEKLVSSPVLILPDTRKDFMVYCDASRQGLGCVLMQDGHVVAYASRQLRPHEGNYPTHDLELAAVVHALKIWRHYLIGNRCEIYTDHKSLKYIFTQSDLNLRQRRWLELIKDYDVGIHYHPGKANVVADALSRKGHCNTLNVRGIPPELSQQMEALNLNIVGRGFLAALEAKPTLLDQIREAQKNDPDMHGLLKNMKQGKAAGFTEDEHGTLWNGNRVCVPDNRELKQLILQEAHESPYSIHPGSTKMYLDLKEKYWWVSMKREIAEFVALCDVCQRVKAEHQRPAGLLQPLQVPEWKWDEIGMDFITGLPKTQGGYDSIWVVVDRLTKVARFIPVKTTYGGHKLAELYFARIVSLHGVPKKIVSDRGSQFTSHFWKKLQEELGTRLNFSTAYHPQTDGQTERLNQILEDMLRACVLDFGKTWDKSLPYAEFSYNNSYQASIQMAPYEALYGRKCRTPLLWDQVGESQVFGTDILREAEAKVRIIRDNLKVAQSRQKSYADNRRRDLEFAVDDFVYLRVTPLRGVHRFQTKGKLAPRYVGPFRITARRGEVAYQLELPASLGNVHDVFHVSQLKKCLRVPSEQADSEQIEVREDLTYVEKPVKILDTMERRTRNRVIRFCKVQWSNHAEEEATWEREDELKAAHPDLFASSSESRGRDSV

SEQ ID NO: 26064 - protein, 715 aa, Oryza sativa
  unsure (1)..(715): unsure at all Xaa locations
  Clone ID: TF_OsC359_7847.pep
LAPPPPRIPPLPSTPRAIKRXGINPRVPLPRFPLFPLSLSLGFVRIKPVIIAGAINGGRNLRGRFPSSPAAFSPFRRYKNVARAPLFRFRRSPLTLAVEIVLAPCSSLSAIAAELRSAAAAAPXLPPTRRPLRPLRRDAVDPVRRSASPVDRRSTVVIVIPSRAAVFLRSVRRFHRLRRLGVSRGPXVRFPLPSSLLGAAPPRRWSPAATIGARARSSRRPRRRGRPRARPRGCQVGPAVSRPRPRVRLTRGTHGADRRQPRAPGPPWTERLTRGPHFPWTRANEGYTSCGPMADNEKGNKVRSQDIGTSSSRVNEAPDTSCVAVVQHLINQNKLLIEILQQHRMPILNPSRMQPQVQLEAVQALTPQVSAPPTSQKAPHAMPHVDPKEASIICFMCDEQGHYARNCPQQKRKAPMRTEDEVRKMIITSTEWPPPGMTRRQRRNTFRGAPQLTEHLLANGGRVSDSEDSDQVSSDDEDEMERKACSRCGEIGHVASSCATICVHCEEDHPPDRCPTSRITCFFCEGTDHVPKDCQFSFLLTKKMANQPASSNGEKHQGNTNPRQDYSSSLTPVPGQRNRNEKRKCRVREDICCFNCQGMGHFADKCPKPRNIAAGTTVHATPCNQKLAPQRIVIHASRSSPIARVATAPIPMNALPQGVNAQFQPQQRIVVDGRSCVSPRPTPGRAKGNQPPEGDTQQKTVIRFNQQSEGSFSCE

SEQ ID NO: 26065 - protein, 859 aa, Oryza sativa
  unsure (1)..(859): unsure at all Xaa locations
  Clone ID: TF_OsC359_8062.pep
RVGPTCHPQPRAAPAAARALAPPPPRIPPHPAVPARIKERGITPRVSLSRFPLFSLSLSLGFVRIHPAKFAGVFNGARDLRARFPLSPAALSPSRCYKIVPRASLFRFRRSPLALAVGFVPAPCSSLSAVAAELRFAAVVAPVLLPTRRHLHRLRRVVADPVRRSASPADRRSTVDIGIPNRAAAFLHSGRRFRRPRCPGVSRGPSLXFPLLSALSGAAPPRRWSPAVTIGARARRSRRPCRRGRLRARPXGCQVGPAVSRPRPRVRLTRGTHGADRRQPRAPGPPWTERLTRGPHFPWTRANEGYTSCGPMADNEKGNKVRSQDIGTSSSRVNEAPDTSCVAVVQHLINQNKLLIEILQQHRMPILNPSQMQPQVQLEAVQALTPQVSAPPTSQKAPHAMPHVDPKEASIICFMCDEQGHYARNCPQQKRKAPMRTEDEVRKMIITSTEWPPPGMTKHQRRNSFRGAQQLTEHLLANGGRVSDSEDSDQVSSDDEDEKSPQGFNQNKMERKACSRCGEIGHVASSCATTCFHCEEDRPPGECPMSRITCFFCEGTDHVPKDCQFSFLLTKKMANQPTSSNGEKHQGNTNPRQDYRFSLTPVPGQRNRNEKRKCRVREDICCFNCQGMGHFADKCPKPRNIAASTSVHATPCNQKLAPQRIVIHASQSSPIARVATAPTPASALPQGVNAQFQPQPSVDKTEASIGIVPLDVPAQQPRNQVQDEEPKQKHEIMNELDKFIEGSMLGLQVLSGTEAPSSSAATQSKSAKGSTRDKSGEEKIPSIFLLASSNLGDEIPVRGVDLSRRVGPTSIGFAASSSTSSAPPFRPPTVGAPSSSSSRTAPPPSSASAAVPVVAVDPG

SEQ ID NO: 26066 - protein, 349 aa, Oryza sativa
  unsure (1)..(349): unsure at all Xaa locations
  Clone ID: TF_OsC359_7548.pep
QVPSDYLLRPRRSHLIIHLINIHYEQASLEKENXELKSQFEEITKKYMDLQETHDELLCXSHENLVDSHAMVEIAHEVIIATVKSYEPHVQVDFTCANTCCSNTNISPSTTCDLDCVGKREKHMDHGLVDKAQPSQDNRGNMVKKLEKGSTVACTKSCQENNKSNNKSKGQIQSWIKTLITCFMCKKVGHYALICSNKIDDQVTLPKRRTRRSNRKCYGCNEKSHEVASCPHMKNHFVSSRKKLNIKVASSKVAEKMQDVVKKAPCKDKNRLCYNCRAKGHIGNNCPMGNIPKPNSSFDYDLPRDAKKDICAIRVISSPHASIKSIWVPKSHVTYLYGPNVVEDQNVLK

SEQ ID NO: 26067 - protein, 1661 aa, Oryza sativa
  Clone ID: TF_OsC91_2609.pep
MAGLEDKDEEGASHSPRTKGIIQYFTRQVKQHTEGLDTDLQVTNEKIGQLESTQISTNTKLTGLETAVARIDTSLAALVRHFDALNAGGNGGGNDDDIDGEYVEDNLEDEYIADTEQDDRDARDRRRLHNNRRGMGGRRRREVRNNDDAFSKIKFKIPPFDGKYDPDAYLSWEIAVDQKFACHEFPENTRVRAATSEFTDFASVWWIEHGKKNPNNMPQTWDALKRVMRARFVPSYYARDLLNRLQQLRQDAKSVEEYYQELQMGLLRCNLEETEDAAMARFLGGLNREIYDIVDYKDYTNMTRLFHLACKAEREVQGRRASAKANFSASKTSSWQTRTTPPAGRTTSPSSTPTTSRAAPPPSGDKSAIKAAQPAPSASSMASTGRMRDVQCHRCKGFGHVQRDCPSKRVLVVKNDGEYSSASDFDDDTLALLAADHADNEPPEEHIGAAFADHYESLIVQRVLSAQMEKAEQNQRHTLFQTKCVVKERCCRMIIDGGSCNNLASSEMVEKLALSTKPHPHPYYIQWLNNSGKAKVTKLVHINFAIGNYHDVVECDVVPMQACNILLGRPWQFDRDSMHHGRSNQYSFLYHDKKIVLHPMSPEDILRDDVAKAAKSKCESDKKAQSDGKKPETINLKPRCLLATKSDINELIASPSVAYALVCKDALISLHDMQHSLPPAVANILQEYSDVFPKEVPPGLPPVRGIEHQIDLIPGASLPNRAPYRTNPEETKEIQRQVHELLDKGYVRESLSPCAVPVILVPKKDGSWRMCVDCRAINNITIRYRHPIPRLDDMLDELSGSIVFSKVDLRSGYHQIRMKLGDEWKTAFKTKFGLYEWLVMPFGLTNAPSTFMRLMNEVLRPFIGKFVVVYFDDILIYSKSMGEHFNHLRAVFNALRDARLFGNLEKCTFCTDRVSFLGYVVTPQGIEVDQAKVEAIQSWPTPKTVSQVRSFLGLAGFYRRFVQDFSTIAAPLNALTKKGVPFTWGTSQENAFHMLKDKLTHAPLLQLPDFNKTFELECDASGIGLGGVLLQEGKPVAYFSEKLSGPVQNYSTYDKELYALVRTLETWQHYLWPKEFVIHSDHESLKHIRSQGKLNRRHAKWVEFIESFPYVIKHKKGKENIIADALSRRYTLLTQLDYKIFGLETIKDQYAHDADFNDVLLHCKDGRTWNKFVINDGFVFRANKLCIPASSVRLLLLQEAHGGGLMGHFGAKKTHDILASHFFWPQMRRDVGRFVARCATCQKAKSRLHPHGLYMPLPVPTVPWEDISMDFVLGLPRTKRGRDSIFVVVDRFSKMAHFIPCHKTDDASHIADLFFREIVRLHGVPNTIVSDRDTKFLSHFWRTLWAKLGTKLLFSTTCHPQTDGQTEVVNRTLSTMLRAVLKKNIKMWEECLPHIEFAYNRSLHSTTKMCPFQIVYGLLPRAPIDLMPLPSSEKLNFDAKQRAELMLKLHETTKENIERVNAKYKFAGDKGRRELNFEPGDLVWLHLRKERFPDLRKSKLMPRADGPFKVLAKINENAYKIDLPADFGVSSTFNVADLKPYLGEEDELESRTTQMQEGEDDEDINTIDTSTSPHVQHDGPITRARARQLNYQERWRGSKGKRIRAGWIRIAGQRQLLTAATTSCELRFGTSALVAGLTRPTSSRRPLETPTNSSTTNPTTA

SEQ ID NO: 26068 - protein, 728 aa, Oryza sativa
  unsure (1)..(728): unsure at all Xaa locations
  Clone ID: TF_OsC359_5828.pep
RRRRRGFRRIPPSPRALKRGKITPVIPSPVSPSFPXLSPSDSFXIAPAILAGAINGXAEISAPVYSLFGRALPLSALYNRSPXPFFRFRRLPLALAFGFVLATFSSLSAVAADLRLAAVVAPVFLPTRRHLHRLRRVVADPVRPFASPADRRSSVAFVVPNRAAAFLRSGRRFRRPRCPGVSRGPSLSLPSPLRSLGRRSAAPVVAGXPSGRGRASPVGRAGEAAFGRLPRLPGGARPSAARARGMFNREKGKNVSGYASSNSSFQLNPPLASRELTRAHPWSIPSMPLSSQLPLVGSQDQNQYVFDRAFATQVNELPMPEEDVPFCHDCREQGHYALNCPWVYAKEAPSFGLAGQTSLNQPPHTKTSLQPSVQSREPNEENPLNPGNCSPPSLSYHVGSRTKHAKGKKSKNQKRKAPMRTEEEVRKMTITSTEWSTAGITIPRRQXGNTFRGARQLTQHLLSHGGRVSDSEGSDQVSSDYEDESPPHLGEEEMESKACPRCGEIGHIASMCLTLCPHCEEDHPPGECPTRKVTCFLCEGTNHVPKDCQLSVLLTKTAEIQRTTLRLSRQLVSSNSNIDDIIHSTNAPPAAPDSEKRKCRVREDICCFNCQGMGHFADKCPRPRNIAASTSVHATPCNQKLAPQRIVIHASRSSPIDRVATAPTPASALPQVVNAQFQPQPSVDKTEASXSALYLWMFQHSSQRNQVQDEEPERKKPPAALADGWVPP

SEQ ID NO: 26069 - protein, 620 aa, Oryza sativa; identical to SEQ ID NO: 19891
  Clone ID: TF_OsC359_6320.pep

SEQ ID NO: 26070 - protein, 3260 aa, Oryza sativa
  unsure (1)..(3260): unsure at all Xaa locations
  Clone ID: TF_OsC359_6170.pep
MAMRRRRAVAGDDNQRQAMPRYKPEYLFGVEGFVQELRTMSFVIGFGTVLFYAQIPHDRHEEKCRVKVTLNSNSEDIPSVMFEAGGRNYIHACQEVARIAIGELRDRYSDQLADTEYRYHPRQPQGSDRGSYLETEGIENDATTRHLVEMLWAMDETRAETVLAAQDREDRNRGKICKLEDKVDRLEKELAALKGEAPPQKARIRLTARKRALFVPRYQLALKMVNTRASGSGNNNNEGNPTLAQVLAQQAQLMNMMMQQLQNQQNQGNNHAPPQNKLAEFLRVRPPTFSSTTNPVEAGDWLHAIEKKLDLLQCTDQEKVSFASHQLHGPASEWWDHFRLNRTTAEPITWLEFTAAFRKTHIPSGVVSLKKKEFRSLTQGSRSVTEYLHEFNRLTRYAPEDVRTDEERQEKFLEGLNDELSYPLMTGDYPDFQKLVDKAIRQEDKYNRMEQKKRRIAQFKTQQGNNQKPRLTLGPQSMPQGGSSSVVRPQRQFFNNNAGNNIRNQAPRPVAVSTQQQPAKREQGSMPVVCFNCGDPGHYADKCPKPRRVKVVPAQSNSTAPASKARVNHVAAAEAQGAPDVILGTFLVNSVSATVLFDSGATHSFLSMSFAGNHGMEVEDLRRPLMVSTPSNQALSLQRSPSVRIEIKGVPFLANLILLESKDLDVILWMDWLARHKGVIDCANRKVTLTSNDGRVVTVHALSSESLRPSLNQITLEEIPIVREYPDVFPDDLPGMPPKRDIEFRIDLVPGTTPIHKRPYRMAANELAEVKRQVDDLLQKGYIRPSSSPWGAPIIFVEKKDHTQRMCVDYRALNDVTIKNKYPLPRIDDLFDQLKGATVFSKIDLRSGYHQLRIKEEDIPKTAFTTRYGLFECTVMSFGLTNAPAFFMNLMNKVFMEYLDKFVVVFIDDILIYSRTKEEHEEHLRLALEKLREHQLYAKFSKFEFWLSEVKFLGHVISAGGVAVDPSNVESVTNWKQPKTVSEIRSFLGLAGYYRRFIENFSKIAKPMTRLLQKDVKYKWSEECEQSFQELKNRLISAPILILPDPKKGFQVYCDASKLGVGCVLMQDGKVVAYASRQLRPHEKNYPTHDLELAAVVHALKIWHHYLFGTRTEVYTDHKSLKYIFTQPDLNMRQRRWLELIKDYDMGIHYHPGKANVVADALSRKGYCNATEGRQLPLELCKEFERLNLGIVSRGFVAALEAKPTLIDQVREAQINDPDIQEIKKNMRRGKAIGFLEDEQGTVWLGERICVPDNKDLKDAILKEAHDTLYSIHPGSTKMYQDLKERFWWASMKHEIAEYVAVCDVCQRVKAEHQKPAVDRLTKVAHFIPVKTTYSGSRLAELYMARIVCLHGVPKKIVSDRGSQFTSNFWKKLQEETDEQTERVNQILEDMLRACALDFGGSWDKNLPYAEFSYNNSYQASLQMAPYEALYGRKCRTPLLWDQTGERQVFGTDILREAEEKPCAAAVPVVAVAREGRHRGRQVVAVLVRPFAVAVDRRSTVAAVDPIFSAASTSTPSPSVDLPPLLWSPIPTFPESPFSQEKNLKSSKASKATPGLEWYIPGLEIELCSRDGCSEWLVLYNRMPRYKLEYLFGVEGFVQDLRTMSFAIGFGTAPFYAQIPHDRHEEKCRVKVTLNSNSEDIPSVMFEAGGRNYIHACQEVARIAIGEFRDRYSDQLADTEYRYHPRQPQGSDRGSYLETEGIENDATTRHLVEMLWAMDETRAETVLAAQDREDRNRGKICKLEDKVDRLEKELAALKGEAPPQKARIRLTARKRALFVPRYQLVPKMVLTRSNGNGPNNNNNNNGENPPLAQVLAQQAQLMNMMMQQLQNQQNQGNNHAPPQNKLAEFLRVRPPTFSSTTNPVEAGDWLHAIEKKLDLLQCTDQEKVSFASHQLHGPASEWWDHFRLNRTTAEPITWLEFTAAFRKTHIPSGVVSLKKREFRSLTQGSRSVTEYLHXFNRLARYAPEDVRTDEERQEKFLEGLNDELSYPLMTGDYPDFQKLVDKAIRQEDKYNRMEQKKRRIAQFKTQQGNNQRPRLTLGPQSMPQGGSSSVVHPQRQFFNNNAGNNIRNQAPRPVAVLTQQQPAKKEQGSKPVVCFNCGEPGHYADKCPKPRRMKVVPAQSNSTVPASKARVNHVAAAEAQDAPDVILGTFLVNLVPATVLFDSGATHSFLSMSFAGNHGMEVEDLRRPLMVSTPSNQALSMQRSPSVRIEIQGVPFLANLILLESKDLDVILGMDWLARHKGVIDCANRKVTLTSNDGRVVTVHALSSESLRSRLNQITLEEIPVVREYPDVFLDDLPGIPPKRDIEFRIDLVPGTTPIHKRPYRMAANELAEVKRQVDDLLQKGYIRPSSSPWGAPVIFVEKKDHTQRMCVDYRALNDVTIKNKYLLPRIDDLFDQLKGATVFSKIDLRSGYHQLRIKEEDIPKTAFTTRYGLFECTVMSFGLTNAPAFFMNLMNKVFMEYLDKFVVVFIDDILIYSRTKEEHEEHLRLALEKLREHQLYAKFSKCEFWLSEVKFLGHVISAGGVAVDPSNVESVTNWKQPKTVSEIRSFLGLAGYYQRFIENFSKIAKPMTRLLQKDVKYKWSEACEQSFQELKNHLISAPILILPDPKKGFQVYCDASKLGLGCVLMQDGKVVAYASRQLRPHEKNYPTHDLELAAVVHALKIWRHYLFGTRTEVYTDHKSLKYIFTQPDLNMRQRRWLELIKDYDMGIHYHPGKANVVADALSRKGYCNATEGRQLPLELYKEFERLNLGIVSRGFVAALEAKPTLIDQVREAQINDPDIQEIKKNMRRGKAIGFLEDEQGTVWLGERICVPDNKDLKDAILKEAHDTLYSIHPGSTKMYQDLKERFWWASMKREIAEYVAVCDVCQRVKAEHQKLAGLLQPLKIPEWKWEEIGMDFITGLPRTSSGHDSIWVIVDRLTKVAHFIPVKTTYSGSRLAELYMARIVCLHGVPKKIVSDRGSQFTSNFWKKLQEEMGSKLNFSTAYHPQTDGQTERVNQILEDMLRACALDFSGSWDKNLPYAEFSYNNSYQASVQMAPYKALYGRKCRTPLLWDQTGERQVFGTDILREAEEKVKIIQERLRVAQSRHKSYADNRRRDLSFDEGDYVYLRVTPFRGVHRFHTKGKLAPRFXVGPYKIISRRGEVAYQLELPQSLAGVHNVFHVSQLKKXLRVPTEEANLEQIEVQEDLTYVEKPIRILEIDERRTRNRVIRFCKVQWSNHSEEESTGEREDELKSAHPHLFAGSSESRGRDSV

SEQ ID NO: 26071 - protein, 666 aa, Oryza sativa
  unsure (1)..(666): unsure at all Xaa locations
  Clone ID: TF_OsC359_7815.pep
MDEVVATMDISEANEGYASCGSVIEMSRQMKATRVGARAQSWPACPGIPAVGRVGSVLLFTARMGKGLCHVFYDGFQXAMECRVKACLVGWPGLAWDELGPRSGCQFGPNHRRPWVKAVLGGQLCEEEDVVNCLPKLRKTVGSASEAREAVKPDVKQEKKCSSVKVLSLVSDLSLPFVFPLSLSKXLQQMADNEKGNKVRSQEMGTSSSRVNEAPDTNCVAVVQHLINQNKLLIEILQQHRMPILNPSQMQPQAQLEAIQALTPQVSAPPTSQKAPHAMSHVDSKEASIIGFMCDEQGHYARNCPQQKRKAPMRTEDEVRKMIITSTEWPPPGMTKRQRRNSFRGAPXLTEHLLANGGRVSDSEDSDQVSSDDEDEKSPQGFNQNKMEHKACSHCGEIGHVASSCATTCFHCKEDHPPGECPMSRITCFLCEGTDHVPKDCQLSFLLTKKMANQHARSNGEKHQGNTNPRQDYSFSLTPVPGQRNQNEKRKYXVRKDICCFNCQEMCHFTDKCPKPRNIATSTSVHATPHNQKLAPQRIVIHASRSIPIARVATAPTPVIALPQGVNAQFQPQPPVDKTEASICVVPLDVPAQQPRNQVQDEEPERKKVIVYFNCREEGHYSRDCPLPRQNQPPHFRQFTGSRHTNRQVVTGANAVPVKPSASQKQ

SEQ ID NO: 26072 - protein, 828 aa, Oryza sativa
  unsure (1)..(828): unsure at all Xaa locations
  Clone ID: TF_OsC359_8038.pep
GRSRGSMDISRTNEGYTSCGPVVEMSWHRAGVLLLGAQSCLPVPEVPAVGGVGSVLLSMARMGWKLCHVFRPYTVVVFCSITKMSNGXPGLAWDELGPRXSGCQFGLDHRRPWVKAVLDGQVSEEEDIVSCLPKLRKTAGSASEVEEAVKPAVKQDKRLRSVKVLSLVSNLSLPFVFPLFLSKPLQQMADNEKGNKVRSQDIGTSSSRVNEAPDTSCVTLVQHLINQNRLLIEILQQHQTPILNLSQIQPQVQLEAVQALTPQVSMPPASRRTHGDVPHVDSKEASIICFMCDEQGHYARECPQQKRKTPMRTEDEVRMTKRQRRNTFRGAPQLTEHLLANGGRVSDSEDSDQVSSDDEDEMERKACSRCGEIGHVASSCATTCVHCEEDHPPDRCPTSRITCFFCEGTDHVPKDCQFSLLLTKKMANQPASSNGEKHQGNTNPRQDYSFSLTPVPGQRNQNEKRKCRVREDICCFNCQGMGHFADKYPKPRDIAASTSVHATPCNQKLAPQRIVIHASRSSPIARVATAPTPASALPQGVNAQFQPQPPVDKTEASIGILPLDVPAQQPRNQVQDEEPKPMGMITVQLLLEEYEDFEKLVDKAIQLESEHNRMKNCKRRIVSIPVFPCGNQRQRTEPLQITGSSVAHQEFPPQEDGHNADNNISNTNDDDTTNNHASCPISDHSNQACNVNIIHQGVDDSINDGTQNDNPSNCDSEKDSNGDSNYGTTDANVSKDFQPPIPTPSQNDRPQTDSSAKKTLICYNCKGPGHYSRDCLQPRQSRSPHYRQFTRSRHPNRIVVTGANAVPVSLKGSKPKDLIVPRSVRNPH

SEQ ID NO: 26073 - protein, 1609 aa, Oryza sativa
  unsure (1)..(1609): unsure at all Xaa locations
  Clone ID: TF_OsC1458_2.pep
MALRLAAVPESAAADLSAAANTLPCISYRDSIRSVAAVVSGGRGPLFQSEDSASTWSSSSYASDCSGHSSGVSAAAAAGFRALTAHELREVARRMVADGYAQRMVQAFDDAATVEVLEGEMLADCRLDDDIAKDYEARAAVREARAAREEAEARLQVATRAARLVAAEAEAARTAEAARQAAAAAATLRAEEEEERRDLELTDAARVRRDADRDRHIGRRDRDFSPHRRGSDLHRGEEERRDPWRDPRINRALETQRLREQAAAIEAQLDFDREQGGRDVGARSPRRQRASPSPDRRRGRRGRSGSPPVVQIVVKDVGGAWPMLTKTNYAEWAMVMKVKLQARHMWDAVRYGDVDYGEDRRALERLAQLGDTTIDEERAVEKLLCVVPEKYTQLALSIETLLDFTELTNEEVTGRLKAVDNRKQLPPSEPITIGGKLFFTKEKWLARQQERKKGEATSSSASGSSSSRKRRPRKWEKARSGALGGADGERKGSRNDTCHNCGKTGHWAKDCRQAKHGGQAHVAQAQEGDEVALFFVHGSIEPHFTPTPDATAPLHLDELWAHVFLSNGSCDDKIDGWCLDTGATHHMTGRREFFSKLDSSVQGSVKFEDASAVEIKGVGSILFTTKTGEHRLLTGVYYIPALRNSIISLGQLDENGLLVEIEDGVLRVWDRHRRLLVKVNRGANRLYVLHVQVAQPVCLAARRDDDAWRWHERFGHLNFEALKQLSNKEMVQGMPRVEHVEQFCDTCVLTKQRRLPFPRQASFCAKEKLELVHGDLCGPVTPATPGGRRFFLLLVDDVSCYMWVVLLDSKAVAADAIKHHQVAAEKECGRKLRVLHTDNGGEFTTAEFAAYCADERIQRHFSAPYTPQQNGVVERRNQTVVATARALLKQRGMPAIYWGEAVMTAVHLLNRSPTKALDGKTSYEAWHGRKPVVSHLRVFGCLAFAKELNHVGKLNDRSSPGVFIGYAEGVKAYRILDPSTQHVRISRDVVFDEGRGWASYKAVDDGSTSTLRDFVVDYVHFRAAGGASSSSSPSSSTSAPGSPSAPASPLPPTPPATPPSPATPRSPTPAPTPPVEFATPLSNDEDRVDAYHDDEPLRYRTMDNIFGDQPVPGLETRDFEAELHLAHEDGEPCSFAEANGDVAWRTAMQHEMDAVERNWTWVLADLPASHRAITLKWVYKLKKDEAGAVIKHKARLVARGFVQQEGVDFDDAFAPVARMESVRLLLALAAQEGWRVHHMDVKSAFLNGDLKEEVYVHQPPGFVIPGKENKVLRLRKALYGLRQALYAKLDSTLKQMGFQQNSHEAAVYQRGKDGNALLVGVYVDDLVITGTKEAEVEAFKEEMKATFQMSDLGLLSFYLGIEVHQDSSGISLRQTAYAKCIVELGGLTGCNPAYTPMEERLKLSRDSTAEXEVDATQYRHIVGSLRYLVHTRPDLAFAVGYVSRFMQRPTTEHQQAVXVEGTTDYGFHYPRCPXCLISWQSVKQQVVALSSCEAEYIATTTASTQALWLARLLGDLLGRNTEAVELRMDSKSALALAKNPVFHERSKHIRIKYHFIRSCLEEGSIKASYINTQDQLADLLTKSLGRVKFQEFRARIGMVQIPQKAPHMT

SEQ ID NO: 26074 - protein, 557 aa, Oryza sativa
  unsure (1)..(557): unsure at all Xaa locations
  Clone ID: TF_OsC1528_1632.pep
MLLLSAVIRGGRCIIAGDCDADRAGSEIDVHDPDAEIWVTRDVQRSSEADVQRRGCAVLRISDRRQSRGGPTAGGGVRRAGGWGGAIWMGRTERWCSRTGTGTATEDRDEEAEAEAEGERRRRRPPIPSPSSYRCGFSHKGYPFYCPWAEPHSEHSVQPIEKEASSRIKLTSRSHLRRTWALPASTVRWPPLPSWRQAPGLPRFIKFDFNIAQTYPEADYSISLAGVHRRSGEQVSGTSAFDVLHREKAAIRVTLWLTAMKCFWVSTGKPEGVLTAEQQKQFEEATTLFVGCILSVLGDRLVEVYMHMTDAKELWDALNTKFGATDASNDLYIMEQFHDYKMADNRSVVEQAHEIQTMAKELELLKCVLLDKFVAGCIIAKLPPSWRSFGTALKHKRQEYSVEGLIASLDVEEKAREKDAASKGDGGQSSSNVVHKAQNKSKGKYKAQQTTNFKKQKKNNNNPNQDERTCFVCGQVGHLARKCPQRKGMKAPAGQTSKSANVTIGNTGDGSGYGNLPTXRTGFHRPNGEWVTCFCSWCWHGRSEVYFGKDRAAEERV

SEQ ID NO: 26075 - protein, 1935 aa, Oryza sativa; identical to SEQ ID NO: 19962
  Clone ID: TF_OsC1528_1674.pep

SEQ ID NO: 26076 - protein, 1218 aa, Oryza sativa; identical to SEQ ID NO: 19973
  Clone ID: TF_OsC1528_1689.pep

SEQ ID NO: 26077 - protein, 1441 aa, Oryza sativa; identical to SEQ ID NO: 19894
  Clone ID: TF_OsC1528_1718.pep

SEQ ID NO: 26078 - protein, 1409 aa, Oryza sativa; identical to SEQ ID NO: 19958
  Clone ID: TF_OsC1528_1730.pep

SEQ ID NO: 26079 - protein, 1308 aa, Oryza sativa
  unsure (1)..(1308): unsure at all Xaa locations
  Clone ID: TF_OsC1528_1831.pep
MAGFADALRPDKLTGVHFKRWQIRVTLWLTAMKCFWVSTGKPEGVLTAEQQKQFEEATTLFVGCILSVLGDRLVEVYMHMTDAKELWDALNTKFGATDASNDLYIMEQFHDYKMADNRSVVEQAHEIQTMARELELLKCVLPDKFVAGCIIAKLPPSWRSFGTALKHKRQEYSVEGLIASLDVEEKAREKDAASKGDGGQSSANVVHKAQNKSKGKYKAQQTTNFKKQKKNNNNPNQNERTCFVCGQVGHLARKCPQRKGMKAPAGQTSKSANVTIGNTGHGSGYGNLPTVFSVNQSTNWWVDTGANVHVCADISLFSSYQVARGSTVLIGNGSHASVHGVGTVDLKFTSGKIVQLKNMQHVPSIDRNLVSGSRLTRDGFKLVFESNKVVVSKHVYFIGKGYECGGLFRFSLSDFCNKSVNHICGSVDDEANVWHSRLCHINFGLMSRLSSMCLIPKFSIVKGSKCHSCVQSKQPRKPHKAAEERNLAPLELLHSDLCEMNGVLTKGGKRYFMTLIDDATRFCYVYLLKTKDEALDYFKIYKAEVENQLDRKIKRLRSDRGGEFFSNEFDLFCEEHGIIHERTPPYSPESNGIAERKNRTLTDLVNAMLDTAGLPKAWWGEALLTSNHVLNIVPNRNKDKTPYEIWIGKKPPLSYLRTWGCLAKVNVPITKKRKLGPKTVDCVFLGYAHHSIAYRFLIVKSEVPDMHVGTIMESRDSIFFESFFPMKDTHSGSNQPSEIIPSPITPPEQTEHTHELVSEEDVSEAPRRSKRQRTAKSFDDDFTVYLVDDTPKSISEAYASPDADYWKEAVRSEMDSIIANGTWEVTERPYGCKPVGCKWVFKKKLRPDGTIEKYKARLVAKGYTQKEGEYFFDTYSPVARLTTIRVLLSLAASHGLLVHQMDVKTAFLNGELDEEIYMDQPDGFVVEGQEGKVCKLLKSLYGLKQAPKQWHEKFDKTLTSAGFAVNEADKCVYYRHGGGEGVILCLYVDDILIFGTNLEVINEVKSFLSQNFDMKDLGVADVILNIKLIRGENGITLLQSHYVEKILNRFGYIDSKPSPTPYDPSLLLRKNKRIARNQLEYSQIIGSLMYLASATRPDISFAVSKLSRFTSNPGDDHWRALERVMRYLKGTVELGLHYTGYPAVLEGYSDSNWISDVDEIKATSGYVFTLGGGAVSWRSSKQTILTRSTMEAELTALDTATVEAEWMRDLLMDLPIVEKPTCEKTIEVCQEIEKLRSYNVGLHPNSXKPGRSLHEGTITKCDRQCIEGDGFETHSILERTHLCELDCWSQSMEILGESSRKLTKDLGV

SEQ ID NO: 26080 - protein, 1443 aa, Oryza sativa
  unsure (1)..(1443): unsure at all Xaa locations
  Clone ID: TF_OsC1528_1835.pep
MDGRGRGRREVDLAAATGGEELGVSSGSGVSKAGPQAMRNRQRELREDGSRCGRPRMEERWEPESASSSSSATPPASMLDLTLLAALELRLIFLSRSGQSSTKPTRPSWPSSRHSSMRRWCSSIGELEPAARCRAEEDAEHVLRQVRPAAGCVRCSVFMCAPPWGKPPRSNDAFMLVFICNVMIYLWNKLNPYMPIISTIQKPYYRHCDFTMAGFADALRPDKFTGVHFKRWQIRVTLWLTAMKCFWVSTGKPEGVLTAEQQKQFEEATTLFVGCILSVLGDRLVEVYMHMTDAKELWDALNTKFGATDASNDLYIMEQFHDYKMADNRSVVEQAHEIQTMAKELELLKCVLPNKFVAGCIIAKLPPSWRSFGTALKHKRQEYSVEGLIASLDVEEKAREKDAASKGDGGQSSANVVHKAQNKSKGKYKAQQTTNFKKQKKNNNNPNQDERTCFVCGQVGHLARKCPQRKGMKAPAGQTSKSANVTIGNTGDGSGYGNLPTVFSVNQSTNWWVDTGANVARGSTVLMGNGSHASVHGVGTVDLKFTSGKIVQLKNVQHVPSIDRNLVSGSRLTRDGFKLVFESNKVVVSKHGYFIGKGYECGGLFRFSLSDFCNKSVNHICGSVDDEANVWHSRLCHINFGLMSRLSSMCLIPKFSIVKGSKCHSCVQSKQPRKPHKAAEERNLAPLELLHSDLCEMNGVLTKGGKRYFMTLIDDATRFCYVYLLKTKDEALDYFKIYKAEVENQLDRKIKRLRSDRGGEFFSNEFDLFCEEHGIIHERTPPYSPESNGIAERKNRTLTDLVNAMLDTAGLPKAWWGEALLTSNHVLNRVPNRNKDKTPYEIWIGRKPSLSYLRTWGCLAKVNVPITKKRKLGPKTVDCVFLGYAHHSIAYRFLIVKSEDVSEAPRRSKRQRTAKSFGDDFTVYLVDDTPKSISEAYASPDADYWKEAVRSEMDSIIANGTWEVTERPYGCKPVGCKWVFKKKLRPDGTIEKYKARLVAKGYTQKEDEDFFDTYSPVARLTTIRVLLSLAASHGLLVHQMDVKTVFLNGELDEEIYMDQPDGFVVEGQEGKVCKLLKSLYGLKQAPKQWHEKFDKTLTSAGFAVNEADKCVYYRHGGGEGVILCLYVDDILIFGTNLEVINEVKSFLSQNFDMKDLGVADVILNIKLIRGENGITLLQSHYVEKILNRFGYIDSKPSPTPYDPSLLLRKNKRIARNQLEYSQIIGSLMYLASATRPDISFAVSKLSRFTSNPGDDHWRALERVMRYLKGTVELGLHYTGYPAVLEGYSDSNWISDVDEIKATSGYVFTLGGGAVSWRSCKQTILTRSTMEAELTALDTATVEAEWLRDLLMDLPVVEKPVPAILMNCDNQXRHVKRRLKSVRKLRNSGVITLDYIQTARNLADPFTKGLSRNVIDNASKEMGLRPIAFLKELTFVSLTVGRSL

SEQ ID NO: 26081 - protein, 1810 aa, Oryza sativa; identical to SEQ ID NO: 19928
  Clone ID: TF_OsC1528_1869.pep

SEQ ID NO: 26082 - protein, 1468 aa, Oryza sativa
  Clone ID: TF_OsC1528_2006.pep
MGDPNDLKTSVEALTTAMKEMQASIAANAKAIAALSSGRTSSSGATTDSGEPRTVRPPRFQKMDFPRYDGKSDPLTFLNWCESYFHQQRIMDEEKVWMASYNLEDGAQLWYMQVQADEGKPSWRRFRELLVLRYGPPLRSAPLFELADCRRTTTVEDYQDHFQALLPRAGRLTKAQRVQLFTGGLLPPLSLKVQMQNPQSLVTAMSLARQFELMEQCTATLAKAPGHGILPTLGPRQAPPQPPAPRAASPPVLIDGRPVKRLSQAEQDERRRLGLCFNYYSIPLAGVHQRSGEQVSGTSAFDVLHREKAAIRHCDFTMAGFADALRPDKFTGVHFKRWQIRVTLWLTAMKCFWVSTGKPEGILTAEQQKQFEEATTLFVGCILSVLGDRLVEVYMHMTDAKELWDALNTKFGATDASNDLYIMEQFHDYKMADNRSVVEQAQEIQTMAKELELLKCVLPDKFVAGCIIAKLPPSWRSFGTALKHKRQEYSVEGLIASLDVEEKAREKDAASKGDGGQSSANVVHKAQNKSKGKYKAQQTTNFKKQKKNNNNPNQDERTCFVCGQVGHLARKCPQRKGMKAPAGQTSKSANVTIGNTGDGSGYGNLPTVARGSTVLMGNGSHASVHGVGTVDLKFTSGKIVQLKNVQHVPSIDRNLVSGSRLTRDGFKLVFESNKVVVSKHGYFIGKGYECGGLFRFSLSDFCNNMCLIPKFSIVKGSKCHSCVQSKQPRKPHKAAEERNLAPLELLHSDLCEMNGVLTKEVENQLDRKIKRLRSDRGGEFFSNEFDLFCEEHGIIHERTPPYSPESNGIAERKNRTLTDLVNAMLDTAGLPKACEAPRRSKRQRTAKSFGDDFTVYLVDDTPKSISEAYASPDADYWKEAVHSEMDSIIANGTWEVTERPYGCKPVGCKWVFKKKLRPDASHGLLVHQMDVKTAFLNGELDEEIYMDQPDGFVVEVNEADKCVYYRHGGGEGVILCLYVDDILIFGTNLEVINESHYVEKILNRFGYIDSKPSPTPYDPSLLLRKNKRIARNQLEYSQIIGSLMYLASATRPDISFAVSKLSRFTSNPGDDHWRALERVMRYLKGTVELWLHYTGYPAVLEGYSDSNWISDVDEIKATSGYVFTLGGGAVSWSKDVVLQSILEGTHLCELDCWSQSMKILDYSIPLAGVHQRSGEQVSGTSAFDVLHREKAAISRGHNKICKHLFLLDCAMDDDDDTDAAEEPQDLESPVFSLHAIAGVPVADTMQVQVTVGATTLTALLDSGSTHSFIAEEAACRTGLPVQPRPRMTATVANGEKVACPGVIRQAVLSIDGSLFTVDLFVIPLAGYDMVLGTQWMASLGPIVWDFTERTMSFQYHGRTICWAGVPSSPAPRIRVTTAASESLLDELLADFGDVFAEPKGLPLQHARDHTIVLKPDAPPVAVRPYRYPAAHKDELERQCAAMIEQGIVRRSDSAFSSPVLLIKKADGS

SEQ ID NO: 26083 - protein, 1432 aa, Oryza sativa; identical to SEQ ID NO: 19970
  Clone ID: TF_OsC1528_2011.pep

SEQ ID NO: 26084 - protein, 1356 aa, Oryza sativa
  Clone ID: TF_OsC1528_2060.pep
MAGFADALRPDKFTGVHFKRWQIRVTLWLTAMKCFWVSTGKPEGVLTAEQQKQFEEATTLFVGCILSVLGDRLVEVYMHMTDAKELWDALNTKFGATDASNDLYIMEQFHDYKMADNRSVVEQAHEIQTMAKELELLKCVLPDKFVAGCIIAKLPPSWRSFGTALKHKRQEYSVEGLIASLDVEEKAREKDAASKGDGGQSSANVVHKAQNKSKGKYKAQQTTNFKKQKKNNNNPNQDERTCFVCGQVGHLARKCPQRKGMKAPAGQTSKSANVTIGNTGDGSGYGNLPTVFSVNQSTNWWVDTGANVHVCADISLFSSYQVARGSTVLMGNGSHASVHGVGTVDLKFTSGKIVQLKNVQHVPSIDRNLVSGSRLTRDGFKLVFESNKVVVSKHGYFIGKGYECGGLFRFSLSDFCNKSVNHICGSVDDEANVWHSRLCHINFGLMSRLSSMCLIPKFSIVKGSKCHSCVQSKQPRKPHKAAEERNLAPLELLHSDLCEMNGVLTKGGKRYFMTFIDDATRFCYVYLLKTKDEALDYFKIYKAEVENQLDRKIKRLRSDRGGEFFSNEFDLFCEEHGIIHERTPPYSPESNGIAERKNRTLTDLVNAMLDTAGLPKAWWGEALLTSNHVLNRVPNRNKDKTPYEIWIGRKPSLSYLRTWGCLAKVNVPITKKRKLGPKTVDCVFLGYAHHSIAYRFLIVKSEVLDMHVGTIMESRDATFFESFFPMKDTHSGSNQPSEIIPSSITPPEQTEHTHELVSEEDVSEAPRRSKRQRTAKSFGDDFTVYLVDDTPKSISEAYASPDADYWKEAVRSEMDSIIANGTWEVTERPYGCKPVGCKWVFKKKLRPDGTIEKYKARLVAKGYTQKEGEDFFDTYSPVARLTTIRVLLSLAASHGLLVHQMDVKTAFLNGELDEEIYMDQPDGFVVEGQEGKVCKLLKSLYGLKQAPKQWHEKFDKTLTSAGFAVNEADKCVYYRHGGGEGVILCLYVDDILIFGTNLEVINEVKSFLSQNFDMKDLGVADVILNIKLIRGENGITLLQSHYVEKILNRFGYIDSKPSPTPYDPSLLLRKNKRIARNQLEYSQIIGSLMYLASATRPDISFAVSKLSRFTSNPGDDHWRALERVMRYLKGTVELGLHYTGYPAVLEGYSDSNWISDVDEIKATSGYVFTLGGGAVSWRSCKQTILTRSTMEAELTALDTATVEAEWLRDLLMDLPVVEKPVPAILMNCDNQTTCEKTIEVCQEIKKLRSYNVGLHPNSEKPGRSLHEGTITKCDRQCIEGDGFETHIQNGYYSISLVETTIEPNKVGYDLCVGITSLGYTQKDMYSQKVTTCVVFTFGSTTSPIAKIPPPFVESRQ

SEQ ID NO: 26085 - protein, 1281 aa, Oryza sativa
  Clone ID: TF_OsC1528_2066.pep
MAGFADALRPDKFTGVHFKRWQIRVTLWLTAMKCFWVSTGKPEGVLTAEQQKQFEEATTLFVGCILSVLGDRLVEVYMHMTDAKELWDALNTKFGATDASNDLYIMEQFHDYKMADNRSVVEQAHEIQTMAKELELLKCVLPDKFVAGCIIAKLPPSWRSFGTALKHKRQEYSVEGLIASLDVEEKAREKDAASKGDGGQSSANIVHKAQNKSKGKYKAQQTTNFKKQKKNNNNPNQDERTCFVCGQVGHLARKCPQRKGMKAPAGQTSKSANVTIGNTGDGSGYGNLPTVFSVNQSTNWWVDTGANVHVCADISLFSSYQVARGSTVLMGNGSHASVHGVGTVDLKFTSGKIVQLKNVQHVPSINRNLVSGSRLTRDGFKLVFESNKVVVSKHGYFIGKGYECGGLFRFSLSDFCNKSVNHICGSVDDEANVWHSRLCHINFGLMSRLSSMCLIPKFSIVKGSKCHSCVQSKQPRKPHKAAEERNLAPLELLHSDLCEMNGVLTKGGKRYFMTLIDDATRFCYVYLLKTKDEALDYFKIYKAEVENQLDRKIKRLRSDRGGEFFSNEFDLFCEEHGIIHERTPPYSPESNGIAERKNRTLTDLVNAMLDTAGLPKAWWGEALLTSNHVLNRVPNRNKDKTPYEIWIGRKPSLSYLRTWGCLAKVNVPITKKRKLGPKTVDCVFLGYAHHSIAYRFLIVKSEVPDMHVGTIMESRDATFFESFFPMKDTHSGSNQPSEIIPSSITPPEQTEHTHELVSEEDVSEAPRRSKRQRTAKSFGDDFTVYLVDDTPKSISEAYASPDADYWKEAVRSEMDSIIANGTWEVTEQPYGCKPVGCKWVFKKKLRPDGTIEKYKARLVAKGYTQKEGEDFFDTYSPVARLTTIRVLLSLAASHGLLVHQMDVKTAFLNGELDEEIYMDQPDGFAVNEADKCMYYRHGGGEGVILCLYVDDILIFGTNLEVINEVKSFLSQNFDMKDLGVADVILNIKLIRGENGITLLQSHYVEKILNRFGYIDSKPSPTPYDPSLLLRKNKRIARNQLEYSQIIGSLMYLASATRPDISFAVSKLSRFTSNPGDDHWRALERVMRYLKGTVELGLHYTGYPVVLEGYSDSNWISDVDEIKATSGYVFTLVGGAVSWRSCKQTILTRSTMEAELTALDTATVEAEWLRDLLMDLPVVEKPVPAILMNCDNQTTCEKTIEVYQEIKKLRSYNVGLHPNSEKPGRSLHEGTITKCDRQCIEGDGFETHSILEGTHLCELDCWSQSMKILGESSRKLTKDLGV

SEQ ID NO: 26086 - protein, 1000 aa, Oryza sativa
  unsure (1)..(1000): unsure at all Xaa locations
  Clone ID: TF_OsC1528_2076.pep
MMSNENISAKAGMAGIGWSSIWWLPLADGVCLLDSCWIGVGDRIRYPLFLSSSSSSAMSTAAASETSSASAWWAALDSVPCAERRIGQRRHGQQPPPSTRVSCCWAEAAAVAEQAGLRWSSAHEAGSGSGSARGGGERERQAATGNKQIHDERVSDKADTRLTTRMTRWRRAAGNWQLPNSTVYALAKLAPLVASLFLSFSSCTINQSIDGSAHRSNYSIPLAGVHQRSGEQVSGTSAFNVLHREKAAIRHCDFTMAGFADALRPDKFTGVHFKRWQIRVTLWLTAMKCFWVSTGKPEGVLTAEQQKQFEEATTLFVGCILSVLGDRLVEVYMHMTDAKELWDALNTKFGATDASNDLYIIEQFHDYKMADNRSVIEQAHEIQTMAKELELRKCVLPDKFVAGCIIAKLPSSWRSFGTALKHKRQEYSVEGLIASLDVEEKAREKDAASKGDGGQSSANVVHKAQNKSKGKYKAQQTTNFKKQKKNNNNPNQDERTCFVCGQVGHLARKCPQRKGMKAPAGQTSKSANVTIGNTGDGSGYGNLPTVARGSTVLMGNGSQASVHGVGTVDLKFTSGKIVQLKNVQHVPSIDRNLVSGSRLTRDGFKLVFESNKVVVSKHGYFIGKGYECGGLFRFSLSDFCNKSVNHICGSVDDEANVWHSHYWKEAVRSEMDSIIANGTWEVTERPYGCKPVGCKWVFKKKLRPDGFAVNEADKCVYYRHGGGEGVILCLYVDDILIFGTNLEVINESHYVEKILNRFGYIDSKPSPTPYDPSLLLRKNKRIARNQLEYSQIIGSLMYLASATRPDISFAVSKLSRFTSNPGDDHWRALERVMRYLKGTVELGLHYTGYPAVLEGYSDSNWISDVDEIKATSGYVFTLGGGAVSWRSCKQTILTRSTMEAELTALDTATVEAEWLRDLLMDLPVVEKPVPAILMNCDNQTXLRNSGVITLDYIQTARNLADPFTKGLSRNVINNASKEMGLRPMSPEPLPLTSCTGRRRQ

SEQ ID NO: 26087 - protein, 1017 aa, Oryza sativa
  unsure (1)..(1017): unsure at all Xaa locations
  Clone ID: TF_OsC1528_2095.pep
MAGFADALRPDKFTGVHFKRWQIRVTLWLTAIKCFWVYMHMTDAKELWDALNTKFGATDGSNDLYIMEQFHDYKMADNRSVVEQAHEIQTMAKELELLKCVLPDKFVAGCIIAKLPPSWRSFGTALKHKRQEYSVEGLIASLDVEEKAREKDAASKGDGGQSSANVVHKAQNKSKGKYKAQQTTNFKKQKKNNNNPNQDERTCFVCGQVGHLARKCPQRKGMKAPAGQTSKSANVTIGNTGDGSGYGNLPTVFSVNQSTNWWVDTGANVARGSTVLMGNGSHASVHGVGTVDLKFTSGKIVQLKNVQHVPSIDRNLVSGSRLTRDGFKLVFESNKVVVSKHGYFIGKGYECGGLFRFSLSDFCNKSVNHICGSVDDEANVWHSRLCHINFGLMSRLSSMCLIPKFSIVKGSKCHSCVQSKQPRKPHKAAEERNLAPLELLHSDLCEMNGVLTKGGKRYFMTLIDDATRFCYVYLLKTKDEALDYFKIYKAEVENQLDRKIKRLRSDRGGEFFSNEFDLFCEEHGIIHERTPPYSPESNGIAERKNRTLTDLWVFKKKLRPDGTIEKYKARLVAKGYTQKEGEDFFDTYSPVARLTTIRVLLSLAASHGLLVHQMDVKTAFLNGELDEEIYMDQPDGFVVEGQEGKVCKLLKSLYGLKQAPKQWHEKFDKTLTSAGFAVNEADKCVYYRHGGGEGVILCLYVDDILIFGTNLEVINEVKSFLSQNFDMKDLGVADVILNIKLIRGENEITLLQSHYVEKILNRFGYIDSKPSPTPYDPSLLLRKNKRIARNHLEYSQIIGSLMYLASATRPDISFAVSKLSRFTSNPGDDHWRALERVMRYLKGTVELGLHYTGYLAVLEGYSDSNWISDVDEIKATSGYVFTLGGGAVSWRFCKQTILTRSTMEAELTALDTATVEAERLRDLLMDLPVVEKPVPAILMNCDNQTTCEKTIEVCXEIKKLRSYNVGLHPNSEKPGRSLHEGTITKCDRQCIEGDGFETHSILERTHLCELDCWSQSM

SEQ ID NO: 26088 - protein, 884 aa, Oryza sativa; identical to SEQ ID NO: 19906
  Clone ID: TF_OsC1528_2104.pep

SEQ ID NO: 26089 - protein, 1137 aa, Oryza sativa
  Clone ID: TF_OsC1528_2131.pep
MISTKKRIPRTPPARERAPLAGGAPTAKGRAPPLGGKAPLAWWRMPRLRHRAPSAGRSPWLRGRKSGAADYSIPLAGVHRRLGEQVSGTSAFDVLHREKAAIRHCDFTMAGFADALRPDKFTGVHFKRWQIRVTLWLTAMKCFWVSTGKPEGVLTAEQQKQFEEATTLFVGCILSVLGDRLVEVYMHMTDAKELWDALNTKFGATDASNDLYIMEQFHDYKMADNRSVVEQAHEIQTMAKELELLKCVLPDKFVAGCIIAKLPPSWRSFGTALKHKRQEYSVEGLIASLDVEEKAREKDAASKGDGGQSSANVVHKAQNKSKGKYKAQQTTNFKKQKKNNNNPNQDERTCFVCGQVGHLARKCPQRKGMKAPAGQTSKSANVTIGNTGDGSGYGNLPTVARGSTVLMGNGSHASVHGVGTVDLKFTSGKIVQLKNVQHVPSIDRNLVSGSRLTRDGFKLVFESNKVVVSKHGYFIGKGYECGGLFRFSLSDFCNNMCLIPKFSIVKGSKCHSCVQSKQPRKPHKAAEERNLAPLELLHSDLCEMNGVLTKEVENQLDRKIKRLRSNRGGEFFSNEFDLFCEEHGIIHERTPPYSPESNGIAERKNRTLTDLVNAMLDTAGLPKACEAPRRSKRQRTAKSFGDDFTVYLVDDTPKSISEAYASPDADYWKEAVRSEMDSIIANGTWEVTERPYGCKPVGCKWVFKKKLRPDASHGLLVHQMDVKTAFLNGELDEEIYMDQPDGFVVEGFAVNEADKCVYYRHGGGEGVILCLYVDDILIFGTNLEVINESHYVEKILNRFGYIDSKPSPTPYDPSLLLRKNKRIARNQLEYSQIIGSLMYLASATRPDISFAVSKLSRFTSNPGDDHWRALERVMRYLKGTVELGLHYTGYPAVLEGYSDSNWISDVDEIKATSGYVFTLGGGAVSWSKDVVLQSILERTHLCELDCWSQSMKILDYSIPLAGVHRRSGEQVSGTSAFDVLHREKAAIRVLTWNDGFYNGEIKTRKIENNLVTELTAEQLLLQRSEQLRELYNSLLSGESADQQRRRPVTALSPEDLGNVEWYYVVCMTYAFRPGQCVPGKSFASNGCAWLCNAQSADSKAFPRKLLAKNASIQTIVCVPFMTGVLELGTTDPKTDTF

SEQ ID NO: 26090 - protein, 1394 aa, Oryza sativa
  Clone ID: TF_OsC1528_2144.pep
MQPPFAVLFCCKFGFVFVLETFRKIRSNDAFMLVFICNVMIYLWNRLNHYMSIISTIQKPYYRHCDFTLAGFADALRPDKFTGVHFKRWQIRVTLWLTAMKCFWVSTGKPEGVLTAEQQKQFEEATTLFVGCILSVLGNRLVEVYMHMTDAKELWDALNTKFGATDGSNDLYIMEQFHDYKMADNRSVVEQAHEIQTMAKELELLKCVLPDKFVAGCIIAKLPPSWRSFGTALKHKRQEYSVEGLIASLDVEEKAREKDAASKGDGGQSSANVVHKAQNKSKGKYKAQQTTNFKKQKKNNNNPNQDERTCFVCGQVGHLARKCPQRKGMKAPAGQTSKSANVTIGNTGDGSGYGNLPTVFSVNQSTNWWVDTGANVHVCADISLFSSYQVARGSTVLMGNGSHASVHGVGTVDLKFTSGKIVQLKNVQHVPSIDRNLVSGSRLTRDGFKLVFESNKVVVSKHGYFIGKGYECGGLFRFSLSDFCNKSVNHICGSVDDEANVWHSRLCHINFGLMSRLSSMCLIPKFSIVKGSKCHSCVQSKQPRKPHKAAEERNLAPLELLHSDLCEMNGVLTKGGKRYFMTFIDDATRFCYVYLLKTKDEALDYFKIYKAEVENQLDRKIKRLRSDRGGEFFSNEFDLFCEEHGIIYEMTPPYSPESNGIAERKNRTLTDLVNAMLDTAGLPKAWWGEALLTSNHVLNRVPNRNKDKTPYEIWIGRKPSLSYLRTWGCLAKVNVPITKKRKLGPKTVDCVFLGYAHHSIAYRFLIVKSEVPDMHVGTIMESRDAIFFESFFPMKDTHSGSNQPFEIIPSSITPPEQTEHTHELVSEEDVSEAPRRSKRQRTAKSFGDDFTVYLVDDTPKSISEAYASPDADYWKEAVRSEMDSIIANGTWEVIERPYGCKPVGCKWVFKKKLRPDGTIEKYKARLVAKGYTQKEGEDFFDTYSPVARLTTIRVLLSLAASHGLLVHQMDVKTAFLNGELDEEIYMDQPDGFVVEGQERKVCKLLKSLYGLKQAPKQWHEKFDKTLTSAGFAVNEADKCVYYRHGGGEGVILCLYVDDILIFGTNLEVINEVKSFLSQNFDMKDLGVADVILNIKLIRGENGITLLQSHYVEKILNRFGYIDSKPSPTPYDPSLLLRKNKRIARNQLEYSQIIGSLMYLASATRPDISFAVSKLSRFTSNPGDDHWRALERVMRYLKGTVELGLHYTGYPAVLEGYSDSNWISDVDEIKATSGYVFTLGGGAVSWRSCKQTILTRSTMEAELTALDTATVEAEWLRDLLMDLPVVEKPVPAILMNCDNQTTCEKTIEVCQEIKKLRSYNVGLHPNSEKPGRSLHEGTITKCDRQCIEGDGFETHMSYTMVSILERTHLCELDCWSQSMKILGESSRKLTKDLGV

SEQ ID NO: 26091 - protein, 1028 aa, Oryza sativa; identical to SEQ ID NO: 19977
  Clone ID: TF_OsC1528_2147.pep

SEQ ID NO: 26092 - protein, 1440 aa, Oryza sativa
  Clone ID: TF_OsC1528_2189.pep
MAAAAACTKLPLLLLLVAVAVAASSASSLTPQHAACRRRDLAPAAAALPCTSTTARYWDVVWNFPGSNNPRGMIDMLDSTEFKVVSSSEDQVELSFRSTYNPSRPNSVRLNIDKRHCDFTMAGFADALRPDKFTGVHFKRWQIRVTLWLTAMKCFWVSTGKPEGVLTAEQQKQFEEATTLFVGCILSVLGDRLVEVYMHMTDAKELWDALNTKFGATDASNDLYIMEQFHDYKMADNRSVVEQAHEIQTMAKELELLKCVLPDKFVAGCIIAKLPPSWRSFGTALKHKRQEYSVEGLIASLDVEEKAREKDAASKGDGGQSSANVVHKAQNKSKEKYKAQQTTNFKKQKKNNNNPNQDERTCFVCGQVGHLARKCPQHKGMKAPAGQTSKSANVTIGNTGDGSGYGNLPTVFSVNQSTNWWVDTGANVHVCADISLFSSYQVARGSTVLMGNGSHASVHGVGTVDLKFTSGKIVQLKNVQHVPSIDRNLVSGSRLTRDGFKLVFESNKVVVSKHGYFIGKGYECGGLFRFSLSDFCNKSVNHICGSVDDEANVWHSRLCHINFGLMSRLSSMCLISKFSIVKGSKCHSCVQSKQPRKPHKAAEERNLAPLELLHSDLCEMNGVLTKGGKRYFMTLIDDVTRFCYVYLLKTKDEALDYFKIYKAEVENQLDRKIKRLRSDRGGEFFSNEFDLFCEEHGIIHERTPPYSPESNGIAERKNRTLTDLVNAMLDTAGLPKAWWGEALLTLNHVLNRVPNRNKNKTPYEIWIGRKPSLSYLRTWGCLAKVNVPITKKRKLGPKTVDCVFLGYAHHSIAYRFLIVKSEVPDMHVGTIMESRDGTFFESFCPMKDTHSGSNQPSEIIPSSITPPEQTEHTHELVSEEDVSEAPRRSKRQRTAKSFGDDFTVYLVDDTPKSISEAYASPDADYWKEAVRSEMDSIIANGTWEVTERPYGCKPVGCKWVFKKKLRPDGTIEKYKARLVAKGYTQKEGEDFFDTYSPVARLTTIRVLLSLVASHGLLVHQMNVKTAFLNGELDEEIYMDQPDGFVVEGQEGKVCKLLKSLYGLKQAPKQWHEKFDKTLTSAGFAVNEADKCVYYRHGGGEGVILCLYVDDILIFGTNLEVINEVKSFLSQNFDMKDLGVADVILNIKLIRGENGITLLQSHYVEKILNRFGYIDSKPSPTPYDPSLLLHKNKRIARSQLEYSQIIGSLMYLASATRPDISFAVSKLSRFTSNPGDDHWRALERVMRYLKGTVELGLHYTGYPAVLEGYSDSNWISDVDEIKATSGYVFTLGGGAVSWRSCKQTILTRSTMEAELTALDTATVEAEWLRDLLMDLPVVEKPVPAILMNCDNQTTCEKTIEVCQEIKKLRSYNVGLHSNSEKSGRSLHEGTITKCDRQCIEGDGFETHSILERTHLCELDCWSQSMKILGESSRKLTKDLGV

SEQ ID NO: 26093 - protein, 1561 aa, Oryza sativa
  Clone ID: TF_OsC1528_2233.pep
TPAKSFDQAAGLSVTSVSTGKPEGVLTAEQQKQFEEATTLFVGCILSVLGDRLVEVYMHMTDAKELWDALNTKFGATDASNDLYIMEQFHDYKMADNRSVVEQAHEIQTMAKELELLKCVLPDKFVAGCIIAKLPSSWRSFGTALKHKRQEYFVEGLIASLDVEEKAREKDAASKGDGGQSSANVVHKAQNKSKGKYKAQQTTNFKKQKNNNNNPNQDERTCFVCGQVGHLARKCPQRKGMKAPAGQTSKSANVTIGNTGDGSGYGNLPTVFLVNQSTNWWVDTGANVHVCADISLFSSYQVARGSTDLMGNGSHASVHGVGTVDLKFTSGKIVQLKNVQHVPSIDRNLVSGSRLTRDGFKLVFESNKVVVSKHGYFIGKGYECGGLFCFSLSDFCNKSVNHICGSVDDEANVWHSRLCHINFGLMSRLSSMCLIPKFSIVKGSKCHSCVQSKQPRKPHKAAKERNLAPLELLHSDLCEMNGVLTNGGKRYFMTLIDDATRFCYVYLLKTKDEALDYFKIYKAEVENQLDRKIKRLRSDRGGEFFSNEFDLFCEEHGIIHERTPPYSPESNGIAERKNRTLTDLVNAMLDTAGLPKAWWGEALLTSNHVLNRVPNRNKDKTPYEIWIGRKPSLSYLRTWGCLAKVNVPITKKRKLGPKTVDCVFLGYAHHSIAYRFLIVKSEVPDMHVGTIMESRDSIFFESFFPMKDTHSGSNQPFEIIPSSITPPKQTEHTHELVSEEDVSEAPRRSKRQRTAKSFGDDFTVFLVDDTPKSISEAYASPDADYWKEAVRSEMDSIIANGTWEVIELPYGCKPMGCKWVFKKKLRPDGTIEKYKARLVAKGYTQKEGEDFFDTYSPVARLTTIRVLLSLAASHGLLVHQMDVKTAFLNGELDEEIYMDQPDGFVVEGQEGKVCKLLKSLYGLKQAPKQWHEKFDKTLTSAGFAVNEADKCVYYRHGGGEGVILCLYVDDILIFGTNLEVINEVKSFLSQNFDMKDLGVADVILNIKLIRGENGITLLQSHYVEKILNRFGYIDSKPSPTPYDPSLLLRKNKRIARNQLEYSQIIGSLMYLASATRPDISFAVSKLSRFTSNPGDDHWRALERVMRYLKGTVELGLHYTGYPAVLEGYSDSNWISDVDEIKATSGYVFTLGGGAVSWRSCKQTILTRSTMEAELTALDTATVEAEWLRDLLMDLPVVEKPVPAILMNCDNQTTCEKTIEVCQEIKKLRSYNVGLHPNSEKPGRSLHEGTITKCDRQCIEGDGFETHKEEANKRLQGVQITTTAPIISHLLFADDSLLLFKATSVCADAVSRVLTNYCAASGQLVNFSKSCIFFSKKCDMAIREDIKRKVGMTNESITDRYLGLPTDVGRAKEGKFKYLKDRVWKRVQGWMEKTLSVGGKEVLIKSIVQAIPTYSMSCFRLPMGLCNHINSLIRKFWWASKQGSRKTNWVAWDKMTVPKFLGGMGFRDINIFNLVLLAKQGWRILQYPNSLAARVLKAVYFSNGDFLNAGLGSRPSHTWRAIIEGREILKLGIIRRIGSGKDTFIWDDNWIPRDWMLRPIRA

SEQ ID NO: 26094 - protein, 1210 aa, Oryza sativa; identical to SEQ ID NO: 19935
  Clone ID: TF_OsC1528_2246.pep

SEQ ID NO: 26095 - protein, 1509 aa, Oryza sativa
  unsure (1)..(1509): unsure at all Xaa locations
  Clone ID: TF_OsC1528_2253.pep
MAAICGETISVDELWREILLRAPTKDVARSCCVSTQWRGIVRDPSFRKLHHDRHAVPSKDDVPDALLVITVNADGQSVSTVVPAMVSPVSTSQRAPMYRVIKNGISYSLANVCNGFLCFASWSRAKVVVCNPITGEKLAIPRAPPIGPDYKSSRARIDVYTLPTSGGKICVMTATGTPSWHPPEIPTLGPVLVVDVASEKHRMYSPPDNGCPAADETSFTAFELHGRLCLAIRISMTNTVQFWTLSVEEDDDDDDDLPWQLLYTIKINMKDGYNNGFQELEPMNDWFNGGNNGFIQVPEPMDAWLDGETHTLATERAAHCTLDYSIPLAGVHQRSGEQVSGTSAFDVLHREKAAIRSNDAFMLVFICDVMIYLWNKLNPYMPIISTIQKPYYRHCDFTMAGFADALRPDKFTGVHFKRWQIRVTLWLTAMKCFWVSTGKPEGVLTAEQQKQFEEATTLFVGCILSVLGDRLVEVYMHMTDAKELWDALNTKFGATDASNDLYIMEQFHDYKMADNRSVVEQAHEIQTMAKELELLKCVLPDKFVAGCIIAKLPPSWRSFGTALKHKRQEYSVEGLIASLDVEEKAREKDAASKGDGGQSSANVVHKAQNKSKGKYKAQQTTNFKKQKKNNNNPNQDERTCFVCGQVGHLARKCPQRKGMKAPAGQTSKSANVTIGNTGDGSGYGNLPTVFSVNQSTNWWVDTGANVHVCADISLFSSYQVARGSTVLMGNGSHASVHGVGTVDLKFTSGKIVQLKNVQHVPSIDRNLVSGSRLTRDGFKLVFESNKVVVSKHGYFIGKGYECGGLFRFSLSDFCNKSVNHICGSVDDEANVWHSRLCHINFGLMSRLSSMCLIPKFSIVKGSKCHSCVQSKQPRKPHKAAEERNLAPLELLHSDLCEMNGVLTKGGKRYFMTLIDDATRFCYVYLLKTKDEALDYFKIYKAEVENQLDRKIKRLRSDRGGEFFSNEFDLFCEEHGIIHERTPPYSPESNGIAERKNRTLTDLVNAMLDTAGLPKACIAYRFLIVKSEVPDMHVGTIMESRDATFFESFFPMKDTHSGLNQPSEIIPSSITPPEQTEHTHELVSEEDVSEAPRRSKRQRTAKSFGDDFTVYLVDDTPKSISEAYASPDADYWKEAVRSEMDSIIANGTWEVTERPYGCKPVGCKWVFKKKLRPDGTIEKYKARLVAKGYTQKEGEDFFDTYSPVARLTTIRVLLSLAASHGLLIHQMDVKTAFLNGELDEEIYMDQPDGFVLEGQEGKVCKLLKSLYGLKQAPKQWHEKFDKTLTSAGFAVNEADKCVYYRHGGGEGVILCLYVDDILIFGTNLEVINEVKSFLFQNFDMKDLGVADVILNIKLIRGENGITLLQSHYVEKILNRFGYIDSKPSPTPYDPSLLLRKNKRIARNQLEYSQIIGSLMYLASATRPDISFAVSKLSRFTSNPGDDHWRALERVMRYLKGTVELGLHYXGILRYWRVIVILTGSLMWMRSKPLVDMFSHWVVVLFHGGLANRQF

SEQ ID NO: 26096 - protein, 947 aa, Oryza sativa
  Clone ID: TF_OsC1528_2265.pep
MAGFADALRPDKFTGVHFKRWQIRVTLWLTAMKCFWVSTGKPEGVLTAEQQKQFEEATTLFVGCILSVLGDRLVEVYMHMTDAKELWDALNTKFGATDASNDLYIMEQFHDYKMADNRSVVEQAHEIQTMAKELELLKCVLPDKFMAGCIIAKLPPSWRSFGTALKHKRQEYSVEGLIASLDVEEKAREKDAASKGDGGQSSANVVHKAQNKSKGKYKAQQTTNFKKQKKNNNNPNQDERTCFVCGQVGHLARKCPQRKGMKAPAGQTSKSANVTIGNTGDGSGYGNLPTVARGSTVLMGNGSHASVHVVGTVDLKFTSGKIVQLKNVQHVPSIDRNLVSDSRLIRDGFKLVFESNKVVVSKHGYFIGKGYECGGLFRFSLSDFCNKSVNHICGSVDDEANVWHSQVENQLDRKIKRLRSDRGGEFFSNEFDLFFEEHGIIHERTPPYSPESNGIAERKNRTLTDLVNAMLDTAGLPKACEAPRRSKRQRTAKSFGDDFTVYLVDDTPKSISEAYASPDADYWKEAVRSEMDSIIANGTWEVTERPYGCKPVGCKWVFKKKLRPDASHGLLVHQMDVKTAFLNGELDEEIYMDQPDGFVVEGFAVNEADKCVYYRHGGGEGVILCLYVDDILIFGTNLEVINESHYVEKILNRFGYIDSKPSPTPYDPSLLLRKNKRIARNQLEYSQIIGSLMYLASATRPDISFASILERTHLCELDCWSQSMKILDYSIPLAGVHQRSGEQVSGTSAFDVLHREKAAIRGWKQQQQQQQMPWQRRDLRPIHAEGTSMVHVHEQKPADSCGNSGDIFHDIRRVRRRGGEPEHRRRGDVPGDLRRVGARRHGASLHCQPHLRCPLQPRRHRRLRHVRTLPVEAGAIVRGGPGAGIHHGKPDAARGVRRRRRRRARGALVLRDDAGGVDGAGGGAGVRHLLLPHVRRLRRRHGQQSNR

SEQ ID NO: 26097 - protein, 3330 aa, Oryza sativa
  Clone ID: TF_OsC1528_2274.pep
MEYGFTANYKVWTYHGEFANPEDDDEELSFEMNEAENFIIEDMSRERMVVDVSTDSDDFDGGFDLEDMLRHVEPEVLAGRSRGLENWQALEKASKDLLYDETKGCDKDFTVLRSVLELLRLKAKHGWSDTKCTDPDSDKGKRGKIPSMVMWYLPIKDRLKRLYSNPTDAELMRWHQESWKIDGMIRHPADARQWKTFDAKHPEFAKDPRNVRFALSTDGMNPFVENDTAPVARGGTYVYEITKKIKVVYGKGKKKTVKRKKADGDNGTASPFKKHSIFFKYLDYWKDLEIRHAIDVMHLEKNVFDSTVGTLLDIPSPLQTFAVETVCQLEMYFPPSFLDMMEHLIVHIVPQIIELGPLYLHQMWAYERYMSILKGYVRNRAHPEGSMIEGYTTEEAVECCMDYIKDANAIGIPVHRHEGRLSRRGTVGRKQFFDNDYKKVSAAYNSVLQQLAIVEPFIERHLEEIKACFPGRSNDWISREHKRRFPLWLKDLNLPVGDSVEELTLQRLACGPSSIVNSWQGYDINGFTLSTTTKDMKSTTQNSGIRVEAIDTSGEKRSYYGTIQEIWELDYGLNIQIPVLRCEWVKDTIGVSVDDYGLTIVDHSKTGHKDDPWVLAERVAQVFYVKDPSDERKTIVISGKQQIVGIDNIEDPNDYNQFDDVPLFTDLPMRIKKVERTIDEANMSYVRADGVAKDLSPLAVAVAAARTSPPSPSPSPPPGRRRHRTELSPLAVAIAAARSSPPPSRPRYRQAPPRSRPAPRRRRRHCQDLSPLAVAVAAARSPSPPHGPLPPRRCHRCRQVVAAARSSPPSLGGSGKKRRGERSKNKLTKETYNVIALDQDGKPIEPPIVRSKFSNACGTLVRTRCPINVKLWETVDDNIKTLLWNELQKYFVFPPGSEVRGRDYALKKMGDRWRQWKSDLNRDYVQKNLPPFTDYGHISQADWDTFVADRTTAEALALRKKMSELAKKNKYPHRLGSSGYAGHVDQWREIEQRFAAAGKPLLVDPMVERSKNWVWARSTGQVSDEGDILFETPDIEEVTTNLQQIVEKERSGQFVPRRERDQLTAALGTAEHSGRVRGLSSKTSWKVGFPQDAPSYKKRDKYKEQLSDKIYAQVKEHFYSLAAENPTAFPRLFPDSQQPTQSAQQTTNVPSSVGSVQTSTFPVDSITGPTPCSLVVPIGRAGKTKEVATGLAIPGRQFHNTAIPEDYARVQVAKVHSDHVSLELDIPAPEGIELLGDAVNQFILWHRRDIILSAAVLAAGSSTPSSSQAMTAAAPAPPSPPKPPSPRHPPSPPPLRSPPRQPTPPPSPSQQPPLPTPQPVQASPTSPTKQHAPPAPPSVQTSPPTPQSALVEEVHIPDGTTSEPKSNTLEPRRIIPKLISTYDPKEIDKDKEKFMFSAFRNSEKRKELAHVLSDSQKSVLAAQDEVQSWLSADVPETYEYGKPFLPTYLMNKLPWEMRVMHEWYMKASRKGLGFISVAVPEGAFMSGPNGIFFISFQDLYALYKLDKMDVNLVAAFCLMQFHEADRTGAKVGYVDPTRICKTQHTVELRQDCEQLVGKTPEEKEEYVKTLHKRKKLEVATYLAIAMLAHADKDVLMVPYQFTDHYILFLVYPKDQLIISLDPAHYDKETFMEFLTILNLAHKYYRKRGGPVHIPSQKKLSVRTGWPCYKQPPGTNLCGYYVCEMLRVNGRYKTTSNRIPEIPYIAQRFNHTTILNVAADLCRFIRRDVCNARGVTPESASFADTGYDPPPKKWKGICQVGPSFEAISCNRKFIGARWYIDDEILSSISDNEVLSPRDVEGHGTHTASTAGGNIIHNVSFLGLAAGTVRGGAPRARLAIYKACWSGYGCSGATVLKAMDDAVYDGVDVLSLSIGGTKEDVGTLHVVANGISVVYAGGNDGPIAQTVENQSPWLVTVAATTIDRSLPVVITLGNGEKLVAQSFVLLETASQFSEIQKYTDEECNANNIMNSTVKGKIAFCFMGEMLNNKQQTSYPDVTTAVAAKGGRAPDIAAPGVSILAAAQIPYYKGVSYHFDSGTSMACPHVAGIIAVLKSIHPKWSPAALKSAIMTTDYSIPLAGVHQRSGEQVSGTSAFDVLHREKAAIRHCDFTMADFADALRPDKFTGVHFKRWQIRVTLWLTAMKCFWVSTGKPEGVLTAEQQKQFEEATTLFVGCILSVLGDRLVEVYMHMTDAKELWDALNTKFGATDASNDLYIMEQFHDYKMADNRSVVEQAHEIQTMAKSFGTALKHKRQEYSVEGLIASLDVEEKAREKDAASKGDGGQSSANVVHKAQNKSKGKYKAQQTTNFKKQKKNNNNPNQDERTCFVCGQVGHLARKCPQRKGMKAPAGQTSKSANVTIGNTGDGSGYGNLPTVFSVNQSTNWWVDTGANVARGSTVLMGNGSHASVHGVGTVDLKFTSGKIVQLKNVQHVPSIDRNLVSGSRLTRDGFKLVFESNKVVVSKHGYFIGKGYECGGLFRFSLSDFCNKSVNHICGSVDDEANVWHSRLCHINFGLMSRLSSMCLIPKFSIVKGSKCHSCVQSKQPRKPHKAAEERNLAPLELLHSDLCEMNGVLTKGGKRYFMTFIDDATRFCYVYLLKKKDEALDYFKIYKAEVENQLDRKIKRLRSDRGGEFFSNEFDLFCEEHGIIHERTPPYSPESNGIAERKNCTLTDLVNAMLDTAGLPKAWWGEVLLTSNHVLNRVPNRNKDKTPYEIWIGRKPSLSYLRTWGCLAKVNVPITKKRKLGPKTVDCVFLGYAHHSIAYRFLIVKSEVLDMHVGIIMESRDATFFESFFPMKDTHSGSNQPSEIIPSSIIPPEQTEHTHELVSEEDVSEAPRRSKRQRTAKSFGDDFTVYLVDDTPKSISEAYASPDADYWKEAVRSEMDSIIANGTWEVTEQPYGCKPVGCKWVFKKKLRPDGTIEKYKARLVAKGYTQKEGEDFFDTYSPVARLTTIRVLLSLAASHGLLVHQMDVKTAFLNGELDEEIYMDQPDGFVVEGFGVNYAYPCVYYRHGGGQGVILCLYVDDILIFGTNLEVINEVKSFLSQNFDMKDLGVADVILNIKLIRGENGITLLQSHYVEKILNRFGYIDSKPFPTPYDPSLLLRKNKRIARNQLEYSQIIGSLMYLASATRPDISFAVSKLSRFTSNPGDDHWRALERVMRYLKGTVELGLHYTGYPAVLEGYSDSNWISDVDEIKATSGYVFTLGGGAVSWRSCKQTILTRSTMEAELTALDTATVEAEWLRDLLMDLPVVEKPVPAILMNCDNQTTCEKTIEVCQEIKKLRSYNVGLHPNSEKPGRSLHEGTITKCDRQCIEGDGFETHVSYTMVVTQSM

SEQ ID NO: 26098 - protein, 1322 aa, Oryza sativa
  Clone ID: TF_OsC1528_2320.pep
MGGSGRFGRMQPPERSGEQGRTTCGSRHPSHHEASSAARQGDAMEASSTAAARVTRARRLGQAGDERGDELGDGRGDELGDEKGDEPATTGSGRAPARASDGGRGERIRGGEGGPEGNIPPRCRMGGSGRFGRMQPPERSGEQGRTTCGSRHPSHHEASSAARQGDAMEASSTAAARVTRARRLGQAGDERGDELGDGRGDELGDEKGDEPATTGSGRAPARASDGGRGERIRGGESTSYAVRRVAGSHYSIPLAGVHRRSGEQVSGTSAFDVLHREKAAIRVTLWLTAMKCFWVSTGKPEGVLTAEQQKQFEEATTLFVGCILSVLGDRLVEVYMHMTDAKELWDALNTKFGATDASNDLYIMEQFHDYKMADNRSVVEQAHEIQTMAKELELLKCVLPDKFVAGCIIAKLPPSWRSFGTALKHKRQEYSVEGLIASLDVEEKAREKDAASKGDGGQSSANVVHKAQNKSKGKYKAQQTTNFKKQKKNNNNPNQDERTCFVCGQVGHLARKCPQRKGMKAPAGQTSKSANVTIGNTGDGSGYGNLPTVFSVNQSTNWWVDTGANVHVCADISLFSSYQVARGSTVLMGNGSHASVHGVGMVDLKFTSGKIVQLKNVQHVPSIDRNLVSGSRLTRDGFKLVFESNKVVVSKHGYFIGKGYECGGLFRFSLSDFCNKSVNHICGKVENQLDRKIKRLRSDRGGEFFSNEFDLFCEEHGIIHERTPPYSPESNGIAERKNRTLTDLVNAMLDTAGLPKACEAPRRSKRQRTAKSFGDDFTVYLVDDTPKSISEAYASPDADYWKEAVRSEMDSIIANGTWEVTERPYGCKPVGCKWVFKKKLRPDGTIEKYKARLVAKGYTQKEGEDFFDTYSPVARLTTIRVLLSLAASHGLLVHQMDVKTAFLNRELDEEIYMDQPDGFVVEGQEGKVCKLLKSLYGLKQAPKQCHEKFDKTLTSAGFAVNEADKCVYYRHGGDEGVILCLYVDDILIFGTNLEVINEAKSFLSQNFDMKDLGVADVILNIKLIRGENGITLLQSHYVEKILNRFGYIDSKPSPTPYDPSLLLRKNKRIARNQLEYSQIIGSLMYLASATRPDISFAVSKLSRFTSNPGDDHWRALERVMRYLKGTVELGLHYTGYPAVLEGYSDSNWISDVDEIKATSGYVFTLGGGAVSWRSCKQTILTRSIMEAELTALDTATVEAEWLRDLLMDLPVVEKPVPAILMNCDNQTTCEKTIEVCQEIKKLRSYNVGLHPNSEKPGRSLHEGTITKCDRQCIEGDGFETHIKSLYVYNLNRSSLVTLRSCRLLDGLEELPSDLSEKIVEKA

SEQ ID NO: 26099 - protein, 1377 aa, Oryza sativa; identical to SEQ ID NO: 19959
  Clone ID: TF_OsC1528_2345.pep

SEQ ID NO: 26100 - protein, 2127 aa, Oryza sativa
  Clone ID: TF_OsC1528_2357.pep
MADSTARTVKDVNPHEFVKAYSAHLKRSGKMELPEWVDIVKTARFKELPPYDPDWYYTRAASIARKIYLRQGIGVGGFQKIYGGRQRNGSRPPHFCKSSGAISRNILQQLQKMGIIDVDPKGGRLITSQGRRDLDQVAGRVDESIRDRKVEATGQQSQTLDSTWTAKMHPNALPSNDAFMLVFICNVMIYLWNKLNHYMPIISTIQKPYYRHCDFTMAGFADALRPDKFTGVHFKRWQIRVTLWLTAMKCFWVSTGKPEGVLTAEQQKQFEEATTLFVGCILSVLGDRLVEVYMHMTDAKELWDALNTKFGATDASNDLYIMEQFHDYKMADNRSVVEQAHEIQTMAKELELLKCVLPDKFVAGCIIAKLPPSWRSFGTALKHKRQEYSVEGLIASLDVEEKAREKDAASKGDGGQSSANVVHKAQNKSKGKYKAQQTTNFKKQKKNNNNPNQDERTCFVCGQVGHLARKCPQRKGMKAPAGQTSKSANVTIGNTGDGSGYGNLPTVFSVNQSTNWWVDTGANVHVCADISLFSSYQVARGSTVLMGNGSHASVHGVGTVDLKFTSGKIVQLKNVQHVPSIDRNLVSGSRLTRDGFKLVFESNKVVVSKHGYFIGKGYECGGLFRFSLSDFCNKSVNHICGSVDDEANVWHSRLCHINFGLMSRLSSMCLIPKFSIVKGSKCHSCVQSKQPRKPHKAAEERNLAPLELLHSDLCEMNGVLTKGGKRYFMTLIDDATRFCYVYLLKTKDEALDYFKIYKAEVENQLDRKIKRLRSDRGGEFFSNEFDLFCEEHGIIHERTPPYSPESNGIAERKNRTLTDLVNAMLDTAGLPKAWWGEALLTSNHVLNRVPNRNKDKTPYEIWIGRKPSLSYLRTWGCLAKVNVPITKKRKLGPKTVDCVFLGYAHHSIAYRFLIVKSEVPDMHVGTIMESRDATFFESFFPMKDTHSGSNQPSEIIPSSITPPEQTEHTHELVSEEDVSEAPRRSKRQRTAKSFGDDFTVYLVDDTPKSISEAYASPDADYWKEAVRSEMDSIIANGTWEVTERPYGCKPVGCKWVFKKKLRPDGTIEKYKARLVAKGYTQKEGEDFFDTYSPVARLTTIRVLLSLAASHGLLVHQMDVKTAFLNGELDEEIYMDQPDGFVVEGQEGKVCKLLKSLYGLKQAPKQWHEKFDKTLTSAGFAVNEADKCVYYRHGGGEGVILCLYVDDILIFGTNLEVINEVKSFLSQNFDMKDLGVADVILNIKLIRGENGITLLQSHYVEKILNRFGYIDSKPSPTPYDPSLLLRKNKRIARNQLEYSQIIGSLMYLASATRPDISFAVSKLSRFTSNPGDDHWRALERVMRYLKGTVELGLHYTGYPAVLEGYSDSNWISDVDEIKATSGYVFTLGGGAVSWRSCKQTILTRSTMEAELTALDTATVEAEWLRDLLMDLPVVEKPVPAILMNCDNQTVIVKVNSSKDNMKSSRHVKRRLKSVRKLRNSGVITLDYIQTARNLADPFTKGLSRNVIDNASKEMGLRPISNDAFMLVFICNVMTYLWNKLNHYMPIISTVLSHDKTCGYQSSGHLQKNKESGDTETDPLMPIPADIDLPILENMPKTKRGGDDLARSLHKNRKTCNGGRTDSLASGCLHGDPNEDVWTELNDVVKSNLSKSVASLSLRNGVAVDRQGRLTKFLTSASLVELLVRALNDTNKNHGDLELEVYHEGNEVCQGYLTDFDLDHNLAIVEIWTDFDVHVGLLQHAVEFLPHCKVIAIGREITGKLMARRVQLMDDLSVSEDSEDLDCKIKEAWEGAPLFSFDGNFVGMNLFLAMGRAFFLPWGTIQKHWASLQNKTGLPESNSLKVYRFGTSSTAEKSNSHPEVNNDILDPEQIHIDSMGYPKFPTHMFAAFCTTNNYAIMYLSPDGMILVNTFEETFGDLRGEGVWSKLSKKSCSNIDRSVVALASFSGERRFFACTGFFVEWNGSTVILTSASLVRSSGDENKIVDNLRIEVLLPNKQRVEGMLQHCNLHYNVALVSVGYRALRPAHGQLDWWGKSSKVVAVGRCFKSGALMAASGTVTPWTGTLDCDFLERSSCKITKAGIGGPVVTLDGDCIGMNFYDTRIGTPFLSWEVIVDIVASFEEKRWPVPMPY

SEQ ID NO: 26101 - protein, 1843 aa, Oryza sativa
  Clone ID: TF_OsC1528_2368.pep
MRLLVLMCLVIAAAMQMQAASGAPPTAAKLAHCLKSCGGANISYPYGVGAGCFRPGFELTCDHSTKPPKLLLLGVATNTNTTTTKIVDQYRDGYVQAYVSFNIATTPGVLGTYNRTWESPGRILSIGPDYYALVAVGCGIEVYLVDPDTEDMLGYCFSMCTDMAMMHKEAEGKACSGMGCCVVTFRRPVRAFRVSITQREATQPFQVANASTIKVFLSEESTTYHYNFTIGDLLSDEINETTVASTSAYLSTFIADQPNCTIAQKDPERYACGDNKCLDADDENGGYRCACIKYTNSNPYLDGDCDQDYSIPLAGVHQRSGEQVSGTSAFDVLHREKAAIRSNDAFMLVFICNVMTYLWNKLNHYMPIISTIQKPYYRHCDFTMAGFADALRPDKFTGVHFKRWQIRVTLWLTAMKCFWVSTGKPEGVLTAEQQKQFEEATTLFVGCILSVLGDRLVEVYMHMTDAKELWDALNTKFGATDASNDLYIMEQFHDYKMADNRSVVEQAHEIQTMAKELELLKCVLPDKFVAGCIIAKLPPSWRSFGTALKHKRQEYSVEGLIASLDVEEKAREKDAASKGDGGQSSANVVHKAQNKSKGKYKAQQTTNFKKQKKNNNNPNQDERTCFVCGQVGHLARKCPQRKGMKAPAGQTSKSANVTIGNTGDGSGYGNLPTVFSVNQSTNWWVDTGANVHVCADISLFSSYQVARGSTVLMGNGSHASVHGVGTVDLKFTSEKIVQLKNVQHVPSIDRNLVSGSRLTRDGFKLVFESNKVVVSKHGYFIGKGYECGGLFRFSLSDFCNKSVNHICGSVDDEANVWHSRLCHINFGLMSRLSSMCLIPKFSIVKGSKCHSCVQSKQPRKPHKAAEERNLAPLELLHSDLCEMNGVLTKGGKRYFMTLIDDATRFCYVYLLKTKDEALDYFKIYKAEVENQLDRKIKRLRSDRGGEFFSNEFDLFCEEHGIIHERTPPYSPESNGIAERKNRTLTDLVNAMLDTAGLPKAWWGEALLTSNHVLNRVPNRNKDKTPYEIWIGRKPSLSYLRTWGCLAKVNVPITKKRKLGPKTVDCVFLGYAHHSIAYRFLIVKSEVPDMHVGTIMESRDATFFESFFPMKDTHSGSNQPSEIIPSSITPPEQTEHTHELVSEEDVSEAPRRSKRQRTAKSFGDDFTVYLVDDTPKSISEAYASPDADYWKEAVRSEMDSIIANGTWEVTERPYGCKPVGCKWVFKKKLRPDGTIEKYKARLVAKGYTQKEGEDFFDTYSPVARLTTIRVLLSLAASHGLLVHQMDVKTAFLNGELDEEIYMDQPDGFVVEGQEGKVCKLLKSLYGLKQAPKQWHEKFDKTLTSAGFAVNEADKCVYYRHGGGEGVILCLYVDDILIFGTNIEVINEVKSFLSQNFDMKDLGVADVILNIKLIRGENGITLLQSHYVEKILNRFGYIDSKPSPTPYDPSLSLRKNKRIARNQLEYSQIIGSLMYLASATRPDISFAVSKLSRFTSNPGDDHWRALERVMRYLKGTVELGLHYTGYPAVLEGYSDSNWISDVDEIKATSGYVFTLGGGAVSWRSCKQTILTRSTMEAELTALDTATVEAEWLRDLLMDLPVVEKPVPAILMNCDNQTTCEKTIEVCQEIKKLRSYNVGLHPNSEKPGRSLHEGTITKCDRQCIEGDGFETHSILEGTHLCELDCWSQSMKILGESSRKLTKDLGRQHQPRIEQQQSNQQRSKQQWWWRPAGGDGFGGGSSKSAAGGRFGCGSARNSARTPGGGEDSKTAVRSIPILLEDDDGGGTDSVVAQANPPPVVVWQSREHIQWWRRGRGELIAAVDGGSGCGSARSSARMPSGGEDSKTR

SEQ ID NO: 26102 - protein, 1157 aa, Oryza sativa; identical to SEQ ID NO: 19991
  Clone ID: TF_OsC1528_2073.pep

SEQ ID NO: 26103 - protein, 606 aa, Oryza sativa
  unsure (1)..(606): unsure at all Xaa locations
  Clone ID: TF_OsC359_7340.pep
MDEVGGRWTFSRANEGYTSCGPVVEMSWHRVGALLLGGSVPPACPGGSGRRGIGSVLLSMARMGWKLCHVFRLYTVVMFNREKGKNVSGYASSNSSFQLNPPLASRELTRAHPWSIPSMLLSPQLPLVGSQDQNQYVFDRAFATQVDELPIPEEDVPFCHDCREQGHYALNCPWVYAKEAPSLGLTVQTSLNQPLRTKSSLQPSVQSREPNEENPLNPGNCFPPSPSYHVGSRTKQAKGKKSKNQRRKAPMRTEEEVRKMTITSTEWPPPGMTKRQRRNTFRGAPQLTEHLLANGGRVSDSEDSDQVSSDDEDQKSPQGFNQNKMERKACSRCGEIGHVASSCATTCVHCEEDHPPDRCPMSRITCFFCQGTDHVPKDCQFSFLLTKRMASQPASSNGEQHQGNTNPRQDYSFSLTSVPGQRNQNEERKCRVREDICCFNCQGMGHFADKWPKPRNIAAGTSVHATPCNQKLAPQRIVIHASRSSPIAPVATAPTPASTLPQGVNAQFQPQPPVDKTAALYLWMFQHSSQKKNQVQDEEPEXNNTFSTNHSLRRQPQQRIVVDGRSCFSPRPTPGRAKGNQPPEGDTKQKTVLRFKQQSDGSFSCE

SEQ ID NO: 26104 - protein, 584 aa, Oryza sativa
  unsure (1)..(584): unsure at all Xaa locations
  Clone ID: TF_OsC1713_4956.pep
MDISRTNEGYTSCGPVVEMSWHRVGALLLGAQSYRPVPEVPAVGLKCLCNNVNIIDIIKMCLLYHVCVVYPGFSWDXINTLAFGKRQFSRSRQAVLDGQVSEEEDIVSCLPKLRKTAGSASEVEEAVKPAVKQDKRLRSVKVLSLVSNLSLPFVFPLSLSKPLQQMADNEKGNKVRSQDIGTSSSRVNEAPDTSCVTLVQHLINQNRLLIEILQQHQTPILNLSQIQPQVQLEAVQALTPQVSMPPASRRTQGDVPHVDSKEASIICFMCDEQGHYARECPQQKRKTSMRTEDEVRKMIITSTEWPPPGMTKRQRRNTFRGAPQLTEHLLANGGRVSDSEDSDQVSSDDEDEMDXKACSRCGEIGHVASSCATTCIHCEEDHPPDRCPTSRITCFFCEGTDHVPKDCQFSFLLTKKMANQPASSNGEKHQGNTNPRQDFSFSLTPVPGQRNQNEKRKCRVREDICCFNCQGMGHFADKCPKPRNIAASTSVHATPCNQKLAPQRIVIHASRSNPIARVATAPTPASALPQGVNAQFQPXPSVDKTEASIGIVPLDVPAQQPRNQVQDEEPERKKVIVCYNCSTC

SEQ ID NO: 26105 - protein, 739 aa, Oryza sativa
  unsure (1)..(739): unsure at all Xaa locations
  Clone ID: TF_OsC359_6495.pep
RNTIPEITDASVIRAFKSVAPPPPRIPPHPVVSARIKERGITPRDSLSRFPRFPLSLSLGFVRIVPAFVAGAINGGRNPRGRFPSSSAAFSPFRRYKIVARAPLFRFRRSPLALAVGSVLAPCSALSAIAAELRSAAAAAPDFLLTRRPLRPLRRVAVDPVRRSASPVDRRSAAVIVIPNRAAVFFRSGRRSRRRRCPGVSRRPPFAFPLPSSLSGAAPPRRWSPAVTIGARARRSRRPCRRGRPWARPRGCQVGPAVSRPRPRVRLTRGTHGADRRQPRAPGPPWTERLTRGPXPPWTRANEGYTSCGPMADNEKGNKVRSQDIGTSSSRVNEAPDTSCVTLVQHLINQNRLLIEILQQHQTPILNLSQIQPQVQLEAVQALTPQVSAPPTSQKAPHAMPHVDPKEASIICFMCDEQGHYARNCPQQKRKAPMRTEDEVRKMVITSTEWPPPGMTKRQRRNSFRGAQQLTEHLLANGGRVSGSEDSDQVSSDEEDEKELKACSRCGEIGHVASSCASTCVHCEEDHPPNRCPTSRITCFFCEGTDHVPKDCRFSFLLTKKMANQHARSNGEKHQGNTNPRQDYSFSLTPVPGQRKQNEKRKCRVREDICCFNCQGMGHFADKCPKPRNIAAGTSVHATPCNQKLAPQRIVIHTSRSSPIARVATAPTPMSALPQGVNAQFQPQQRIVVDGRSCVSPRPTPGRAKGNQHPEGDTKQKTVIRFNQQSEGSFSCGPARRPR

SEQ ID NO: 26106 - protein, 679 aa, Oryza sativa
  Clone ID: TF_OsC359_8282.pep
MDEVVATMDISEANEGYASCGSVIEMSRQMKTTRVGARAQPWPACPGIPAVGRVGSVLLFTARMGEWLCHIFTTGSKAMECGVKMCLVGWPGLAWDELGPRSGCQFGPNHRRPWVKAVLDGQVSEEEDIVSCSPKLRKTAGSASEVEEAVKPAVKQDKRLRSVKVLSLVSNLSLPFVFPLSLSKPLQQMADNEKGNKVRSQDIGTSSSRVNEAPDTSCVAVVQHLINQNKLLIEILQQHRMPILNPSQIQPQVQLEAVQALTPQVSAPPTSQKAPHAMPHVDPKEASIICFMCDEQGHYARNCPQQKRKAPMRTEDEVRKMIITSTEWPPPGMTKCQRRNSSRGAQQLTEHLLANGGRVSGSEDSDQVSSDDEDEKSPQGFNQNKIELKACSRCGEIGHVASSCASTCVHCEEDHPPDRCPTSRITCFFCEGTDHVPKDCRFSFLLTKKMANQPVSSNGEKHQGNTNPRQDYSFSLTPVPGQRKQNEKRKCRVREDICCFNCQGMGHFADKCPKPRNVAASTSVHANPRNQKLAPQRIVIHASRSSPIARVATAPIPMSALPQGVNAQFQPQPPADKTEASICVVPLEVPIQQLRNQVQDEEPECKKVIVCYNCTEEGHYSKNCPQPRQNRPPHYRQFTRSRHSNRIVVTGANAVPKSEIFNSVSDATRSEKCKHRLPG

SEQ ID NO: 26107 - protein, 750 aa, Oryza sativa
  unsure (1)..(750): unsure at all Xaa locations
  Clone ID: TF_OsC359_7790.pep
IERVVDVSISPPNDKELSFEEEEKCMHINAQATIVLFGVLSEDVFKTVMPFEDAHLIWTTLKERYDKSKCDDSKCDDVLFLEEPFEKCSTSSPNCEEPQVTTFDDQDNHPTTTLSSTHDYIEGNELVSKVDDHPILPLDSNNTDNEIVILHCVVDSCISPSPKYMCEDDMDKCSTSYSTCGTNLLKEEVNERXWTSEESTSPRCSSSISEDYACFMGVDGDSEFDHLSKKDVTMVIKFMEAIQKQQACTIKKNEEIMSLTEEHKKLKDFHSSLTMRYEKLENEFACATNSIACVASLKKQNQELKFQLDEITNKYVDLQERHDELLCSHVNLVDSHAMLEVSHEVIIATVKSYEPHVQVNLTCANPCFPQANMSLSTICDLDCVGKREKQMDHGLVCIAQXPSQENREGLVNKLEKGXSTVACTKIHQRDIKSINDHTRERNQKMIKSSITCFKCKKVGHHVRDCPWKKGNKLSKKKDIPHIKCFKCTEAGHFASRSPCTLDEQCKTSSERQTGNKQTEKQYRSKSRLXXNCRAKGHIGKNCPMGNIPKPSLSFDHNLLRNAKNDICATRVICSPHTSTKAISVSKSLVTNLYGPNVVGDQNVLKFYCGIKGFDKTARFVIKLIYHHAIEPEGSGWIPRRLQEDSLVTRRIXAEGSKLTRTCILKGYPSVQESRVRPQEAHDDQGGLLDQPQSTQFNLPQLTMKNILSVQVKEDGANAKPDRVMALQEEHKHYQDADCDQGVKHVRDGKA

SEQ ID NO: 26108 - protein, 265 aa, Oryza sativa
  unsure (1)..(265): unsure at all Xaa locations
  Clone ID: TF_OsC12782_3.pep
SCQKPVDSQHEKGKTIEKPANPKVSRGQKGKLKKXKEKYGEQDEEEREIRMALLAFSGRASQKDKPSXRCRWSHCSLXKPSTGEDDRSKICYKCKKSGHLSRDCPESTSEVDPADVNVGRAKDGMDRSSAPAGSSVTMDEDDIHELGDEEKEKLIDLDYLTGNPLPSDILLYAVPVCAPYNALQAYKYRVKITPGTAKKGKAAKTAMSLFLHTADATNREKELMKACTDPELVAAIVGNAKITAPGLTQLKQKQKQKGKKSAKEN

SEQ ID NO: 26109 - protein, 458 aa, Oryza sativa
  Clone ID: TF_OsC1713_5550.pep
SRVPNIGTEDPCQNAVKIPEDNDSQVNVRPKESHYVRNCPWKVFARSPEKDEKQCPGSNQAPSQSTDKKDGTLQRNSGANRTVIWKMDNGRTIIITSSEFTPEDAARIPKRERFSADDDDDNDDDNDDNDDATLDSFRERELKFKACARCGIVGHTASLCLPTCRCDHVPKDCQLNAVIAKTKKEQGTTVQPIRQPMTIDNSGHNPSALSLTPAPVEANHGRSNVTKDVHKPLLVPVSAAKVHNQKPAPQDQASRLCRNCRKPGHRFSDCPLPRAAKAVRRDSQVTSTAHDTKRHLNVQPPPQRIIVKGTVKGRIVPPAIVSSLQHQRQQGKQCQENNSSLQLQRGGTLLRQHPQQVLSAPGRPTVVSSSNAPGIAPIWRPIDKSPLGNPTGKKILPVTADKIVAPPPSKINKQSNVPETLGNSLTLEAVTGWTRSSGRRINELQMPDASLRNNFTLL

SEQ ID NO: 26110 - protein, 1541 aa, Oryza sativa
  Clone ID: TF_OsC359_8424.pep
MAGDYPDFQKLVDKAIRQEDKYNRMEQKKRRIAQFKTQPGNNQRPRLTLGPQSMPHGGSSSVVRPRRQFFNNNAGNNIRNLAPRPVAVSTQQQPAKREQGSKPVVCFNCGDPGHYADKCPKPRRVKVVPAQSNSTAPASKARINHVAAAEAQDAPDVILVREYPDVFPDDLPERIHQTEFITMGSSGYYRRFIENFSKIAKPMTRLLQKDVKYKWSEECEQSFQELKSRLISAPILILPDPKKGFQVYCDASKLGLGCLLMQDGKVVAYASRQLRPHEKNYPTHDLELAVVVHALKIWRHYLFGTRTEVYTDHKSLKYIFTQPDLNMRQRRWLELIKDYDIGIHYHPGKANVVADALSRKGYCNATEGRQLPLELCKEFERLNLGIVSRGFVAALEAKPTLIDQVREAQINDPDIQEIKKNMRRGKAIGFLEDEHGTVWLGERICVPDNKDLKDAILKEAHDTLYSIHPGSTKMYQDLKERFWWASMKREIAEYVAVCDVCQRVKAEHQKPAGLLQPLKIPEWKWEEIGMDFITGLPRTSSETTYSGSRLAELYMARIVCLHGVPKKIVSDRGSQFTSNFWKKLQEEMGSKLNFSTAYHPQTDGQTERVNQILEDMLRACALDFDGSWDKNLPYAEFSYNNSYQASLQMAPYEALYGRKCRTPLLWDQTGERQVFGTDILREAEEKVKIIQERLRVAQSRHKSYADNRRRDLSFEGDYVYLRVTPLRGVHRFHTKGKLAPRFVGPYKIVSKRGEVAYQLELPQSLAGVHNVFHVSQLKKCLRVPTEEANLEQIEVQEDLTYVEKPILAPAVRRRRSRRRRRSGRPPSWSPSMPRYKPEYLFGVEGFVQELRTMSFVIGFGTAPFYAQIPHDRHEEKCRVKVTLNSNSEDIPSVMFKAGGRNYIHACQEVARIAIGELRDRYSDQLADTEYRYHPRQPQGSDRGSYLETEGIENDATTRHLVEMLWAMDESRAEIVLAAQDREDRNRGKICKLEDKVDRLEKELAVLKGEAPPQKARIRLTARKRALFVPRYQLAPKVRVVEKEVAPTLADPPVIIMVNTRSNGNGPSNNNNGENPTLAQVLAQQTQLMNMMMQQLQNQQNQGNNHAPPQNKLAEFLRVRPPVFSSTTNPVEAGDWLHAIEKKLDLLQCTDQEKVSFASHQLHGPASEWWDHFRLNRTTAEPITWLEFTAAFRKTHIPSGVVSLKKKEFRSLTQGSRSVTEYLHEFNRLARYAPEDVRNDEERQEKFLEGLNDELSYPLMTGDYHDFQKLVDKAIRQEENAGNNIRNQAPHPVAAPAQQQPAKREQGSKPVVCFNCGDPGHYANKCPKPRRVKVVPVQSNSTVPASKARVNHVAAAEAQDAPDVILGTFLVNLVPATVLFDSGATHSFLSMSFAGNHGMEVEDLRRPLMVSTPSNQALSLQRSPSVRIEIQGVPFLANLILLESKDLDVILGMDWLARHKGVIDCANRKVTLTSNDGRVVTVHALSSESLRSRLNQITLEEISIVREYPDVFPYDLPGDPLESTCRHASLDDCQYGLHRGTA

SEQ ID NO: 26111 - protein, 175 aa, Oryza sativa
  Clone ID: TF_OsC1713_4880.pep
MPRYDDRDRYDDRYGGNTRLYVGRLSSRTRTRDLEDLFGRYGRVRYVDMKHEFAFVEFSDARDADEARYNLDGRDFDGSRMIVEFAKGVPRGPGGSREYMGRGPPPGSGRCFNCGIDGHWARDCKAGDWKNRCYRCGDRGHIERDCRETALKKSPKRWERSLLKNPPSPLRSRWG

SEQ ID NO: 26112 - protein, 543 aa, Oryza sativa; identical to SEQ ID NO: 19837
  Clone ID: TF_OsC359_7855.pep

SEQ ID NO: 26113 - protein, 156 aa, Oryza sativa
  Clone ID: TF_uC-osflcyp173f05b1.pep
RVIHGFHRRPQGPPARHPPQAAPRRRRAARRHREARRRRSRRLREARDRPRRRDRHQRRLPPPVQHRGRAAPPLRRRRRVRHRQRRRVRRHRYGGDRGYGGGGGGYGGGDRGYGGGGGYGGGGGGSRACYMCGEEGHMARDCSQGGGGGGGYRGGG

SEQ ID NO: 26114 - protein, 1563 aa, Oryza sativa; identical to SEQ ID NO: 20159
  Clone ID: TF_OsC359_6303.pep

SEQ ID NO: 26115 - protein, 1061 aa, Oryza sativa
  unsure (1)..(1061): unsure at all Xaa locations
  Clone ID: TF_OsC359_6670.pep
MGKNQGLEQVMGKLVDMLAKKLSEAPTTSNAVVPHTETMQKIELMQNDIKLEGVKNYLSWSKRALLILKTKGLEEYVTREIKEPESTSNVEWKTWSTTNSSVVAWLLTSLIPAIATTVETISSASEMWKTLTNLYSGEGNVMLMVEAQEKISAMRQGERSVAEYVAELKHLWSDLDHYDPLGRVIEFLKGLNSEFEGRRDAMFHQTTLPTLDEAIAAMAQEELKKKVLPSVTPSSPSATYVVAQSKETRECFNCGEMGHLMRDCRAPRKPSYGRGRFGDRGGARGGRSYAGRGNRGRGYEYRGDHRANVVTLEEGSSGPTNVDVANLVHSTSXSHSNWILDSGASRHVTXSLDRENCLIQERQIGKKLGIGVRRDGLWYLDQKETSEDVCLALMASTSEEEAKFIRTDNGGEYMNNEFSSFLSSEGILHQTSCPDTPPQNGVAERKNRHLLETARSLMYTMNVPKFLWSEAVMTATYLINRTPSRILGMKTPCEMIFGKNKFGVPPKVFGCTCFVRDHRPSIGKLDPRAVKCIFVGYSSCQKGYKCWSPLERRTFVSMDVTFREYVPFYGEKTDLSSLFIDLDDSTSGYDGQQMEGEILGPKGDEQSKKEKLVIGSIPCPIGGPVAQEQEWRKPHEEENLQVYTRRARCPVIQQVEEDNQVEEDVSHEQGSLESGGEDEEVREKGSDMPIAVRKGVRSNAGKKVVNCKWVYTIKQNPDGKVERYKARLVVKGYSQTYGIDYDETFAPVAKMSTLDVKNAFLHGDLQEEGCHTTILAVYVDDMIITWDDSIEIARLKENLSKEFEVKDLGMLSCRPASTPIEQNLKLCAESGDPVNKERYQRLVGRLIYLCHTRPDITYAVSVVSRYMHDPRSGHMDAVYRILRYLKGSPGKGLWFKRSGHLSLEGYCDADWASSLDDRRSTSGYCVFVGGNLVSWRSKKQPVVSRSTAEAEYRAMSVGLSEMLWLRNLLCELKLLKNTCMKLWCDNKSAINIANNPVQHDRTKHIEIDRFFIKEKLDEGMLKLDFVISGEQIADCLTKALGVAECLSMCNKMGMIDIYRPS

SEQ ID NO: 26116 - protein, 746 aa, Oryza sativa; identical to SEQ ID NO: 20163
  Clone ID: TF_OsC359_6534.pep

SEQ ID NO: 26117 - protein, 656 aa, Oryza sativa
  unsure (1)..(656): unsure at all Xaa locations
  Clone ID: TF_OsC359_7816.pep
MDEVGRRWTFSRANEGYTSCGPVVEMSYGGGLVPNARGSFLPACPGXIPAVGRIGSVLLFTARMGEGLCHMFTMGFKAMECGVKMCFVGWPGLAWDELGPRSGCQFGPNHRRPWVKAVLGGQLCEEEDVVSCLPKLRKTAGSASEAKEAVKPAVKQDKRLRSVKVLSLVSNLALPFVFPLSLSKPLQQMADNEKGNKVRSQDIGTSSSRVNEAPDTSRVTLVQHLINQNRLLIEILQQHQTPMLNLNQIQPQVQLEAVQALTPQVSMPPASRRTHDDVPPVDPKEASNICFTCDEQVHYARERPQQKRKTPMRTEDEVRKMIITSTEWPPPGMTRRQRRNTFRGAPQLTEHLLANGGRVSDSEDSDQVSSDDEDEMERKACSRCGEIGHVASSCATICVHCEEDHPPDRCPTSRITCFFCEGTDHVPKDCQFSFLLTKKMANQPASSNGEKHQGNTNPRQDYSFSLTPVPGQRNRNEKRKCRVREDICCFNCQGMGHFADKCPKPRNIAAGTSVHATPCNQKLAPQRIVIHASXRSSPIARVATAPIPMNALPQGVNAQFQPQPPADKTEASICVVPLEIPIQQLRNQVQDEEPECKKVIVCYNCSEEGHYSENCPQPRQNRPPHYRQFTRSRHSNRIVVTGANAVPVRPRDNQNP

SEQ ID NO: 26118 - protein, 1016 aa, Oryza sativa; identical to SEQ ID NO: 20168
  Clone ID: TF_OsC30033_1.pep

SEQ ID NO: 26119 - protein, 275 aa, Oryza sativa
  unsure (1)..(275): unsure at all Xaa locations
  Clone ID: TF_OsC1528_1764.pep
MSIEEALGRLKVVDGDEPRPLSGPITIGGKLHLTREQWEASXGDGRKGESSSPTGGHKPRKARGGVQLRGAQGVATGNHKPARDDTCRNCGKLGHWAKDCRQPRRGQAHVARVEEEEPALLLAHASIELPPAAPAAAAFLHLDEPKVLVSLCDGSSNDKADGWYLDTGATHHMTGRREFFTEFDSSVRGTVKFGDASGVEIKGVGSVTFTAKSGEHRLLTGVYYIPALRNSIISVGQLDENGSRVLVEDGLMRIWDRRRRLLAKVTRGTNRLYIC

SEQ ID NO: 26120 - protein, 1587 aa, Oryza sativa
  unsure (1)..(1587): unsure at all Xaa locations
  Clone ID: TF_OsC1528_2096.pep
MSDARSQRSVASSTRRQQDAKLAAAEERRRATAQTAAAAAKAARLAAAELAAARAEAEAEAAEDAARAAEVEVETLRSSINGSIAGDITADRELEELARGRARERAERWAAAHLHGGGGGPRDRAPADGNPDGRGRAGGSPEPARGPRRRHGSLSPDRRHGHHGVQTVVRDFGPGGGWXPTLTKTNYIEWAAVMRVRLQVRHMWEAVRYGDVDYDEDRRALDALIAAVPPEMQFSLSQKRTAKEAWDAIAAARIGSDRARKSTLQALRKEWENLAFKPGEDVDDFALRLNTLLQKMVQYGDDTYDEERAVEKLFRCVPEKYRQIARSIESLLDLSTMSIEEALGRLKVVDGDEPRPLSGPITIGGKLHLTREQWEASQGDGRKGESSSPTGGRKPRKARGGVQLRWARRRAEGGARRGAQGVATGNHKPARDDTCRNCGKLGHWAKDCRQPRRGQAHVARVEEEEPALLLAHASIELPPAAPAAAAFLHLDEPKVLVSLCDGSSNDKADGWYLDTGATHHMTGRREFFTEFDSSVRGTVKFGDASGVEIKGVGSVTFTAKSGEHRLLTGVYYIPALRNSIISVGQLDENGSRVLVEDGLMRIWDRRRRLLAKVTRGTNRLYILSAQVAHPVCLAARRDDEAWQWHERFGHLHFEALKQLSAKEMVRGMPCLDHVEQLCDVCVVTKQRRLPFPQQTSFRAKERLGLVHGDLCGPVTPATPGGRRYFLLLVDDLSRYMWVMVLGSKGEAADAIRHAQAAAEAECGRKLRVLRTDNGGEFTAAEFASYCADEGIQRHYTAPYSPQQNGVVERRNQTVVGMARALLKQRGMPAIFWGEAVVTAAYILNRSPTKALDGRTPYEAWHGRKPAVSHLRVFGCLAFAKELGHIGKLDDRSTPGVFIGYAEGSKAYRILDPETQRVRITRDVVFDEGRGWVWDKAVDDGSTPTYDDFTIEYVHFEGAGGVGSSSSPSVSTPVPEPPPTPTPTHPRATTSTTTSSSSTPPQPVSPHAPAPTATPPGTSTPTPARVERSPVEFVTPLSHDGERIDAYHDGEQLRYRTMEDLLGDQPVPGLVPRNLEAQLHLACDDGEPRSFAEAEKHAAWRAAMQSEMDAVQENRTWELADLPRGHRAITLKWVFKLKRDEAGAIVKHKARLVARGFVQQEGIDYDDAFAPVARMESVRLLALAAQEGWGVHHMDVKSAFLNGDLKEEVYVHQPPGFVIPGKEGKVLRLHKALYGLRQAPRAWNAKLDSTLKGMGFEQSPHEAAIYRRGNGGNALLVGVYVDDLVITGTKDAEVAAFKEEMKATFQMSDLGPLSFYLGIEVHQDNSGITLRQTAYAKRVVELAGLTDCNPALTPMEERLKLSRDSTAEEVDATQYRRLVGSLRYLTHTRPDLAFSVGYAVKRIIRYVAGTLDHGLYYPRCPGKAHFVGYSDSDHAGDIDTSKSTSGILFFLGECLVSWQSIKQQVVALSSCEAEYMAASAASTQALWLARLLSDLLGRDTGAVELRVDSKSALALAKNPVFHERSKHIRVRYHFIRSYLEEGSIKASYINTKDQLADLLTKPLRRIKFLELCSRIGMAQLSHKTAHKT

SEQ ID NO: 26121 - protein, 1573 aa, Oryza sativa
  Clone ID: TF_OsC1528_2299.pep
ALSQQQQQQHRLPLLPLSLPPLHTAAPRRCAMSDARSRRSVASSTRRQQDAELAAAEERRRATAQTAAAAARAARLAAAELAAARAEAEAEAAEDAARAAEVEVETLRSSINGSIAGDITADRELEELARGRARERAERWAAAHLHGGGGGPRDRAPADGNPDGRGRAGGSPEPARGPRRRHGSLSPDRRYGHHGVQTVVRDFGPGGGWPTLTKTNYIEWAAVMRVRLQVRHMWEAVRYGDVDYDEDRRALDALIVAVPPEMQFSLSQKRTAKEAWDAIAAARIGSDRARKSTLQALRKEWENLAFKPGEDVDDFALRLNTLLQKMVQYGDDTYDEERAVEKLFRCVPEKYRRIARSIESLLDLSTMSIEEALGRLKVVDGDEPQPLSGPITIGGKLHLTREQWEASQGDGRKGESSSPTGGRKPRKARGGVQLRWARRRAEGGARRGAQGVATGNHKPARDDTCRNCGKLGHWAKDCRQPRRGQAHVARVEEEEPALLLAHASIELPPAAPAAAAFLHLDEPKVLVSLCDGSSNDKADGWYLDTGATHHMTGRREFFTEFDSSVRGSVKFGDTSGVEIKGVGSVTFTAKSGEHRLLTRVYYIPALRNSIISVGQLDENGSRVLVEDGLMRIWDRRRRLLAKVTRGTNRLYILSAQVAQPVCLAARRDDEAWQWHERFGHLHFEALKQLSAKEMVRGMPCLDHVEQLCDVCVVTKQRRLPFPQQTSFRAKERLELVHGDLCGPVTPATPGGRRYFLLLVDDLSRYMWVMVLGSKGEAADAIRHAQAAAEAECGRKLRVLRTDNGGEFTAAEFVSYCADEGIQRHYTAPYSPQQNGVVERRNQTVVGMARALLKQRGMLAIFWGEAVDTVRGLAWRKPAVSHLRVFGCLAFAKELGHIGKLDDRSTPGVFIGYAEGSKTYRILDPETQRVRIARDVVFDEGRGWVWDKAVDDGSTPTYDDFTIEYVHFEGAGGPVSPHAPAPTATPPGTSTPTPARVERSPVGFVTPLSHDEERIDAYHDGEQLRYRTMEDLLGDQPVPGLVPRNLEAQLHLACDDGEPRSFAKAEKHAAWRATMQSEMDAVQENRTWELADLPRGHRAITLKWVFKLKRDEAGAIVKHKARLVARGFVQQEGIDYDDAFAPVARMESVRLLLALAAQEGWGVHHMDVKSAFLNGDLKEEVYVHQPPGFVILGKEGKVLRLHKALYGLRQAPRAWNAKLDSTLKGMGFEQSPHEAAIYRRGNGGNALLVGVYVDDLVITGTKDAEVAAFKEEMKATFQMSDLGPLSFYLGIEVHQDNSGITLRQTAYAKRVVELAGLTDCNPALTPMEERLKLSRDSTAEEVDATQYRRLVGSLRYLTHTRPDLAFSVGYVSRFMQRPTTEHQQAVKRIIRYVAGTLDHGLYYPRCPDKAHFVGYSDSDHAGDIDTSKSTSGILFFLGECLVSWQSIKQQVVALSSCEAEYMAASAASTQALWLARLLSDLLGRDTGAVELRVDNKSALALAKNPVFHERSKHIRVRYHFIRSYLEEGSIKASYINTKDQLADLLTKPLGRIKFLELCSRIGMAQLSHKTAHKT

SEQ ID NO: 26122 - protein, 1756 aa, Oryza sativa
  Clone ID: TF_OsC1528_2355.pep
MDNLSEPLLAEIIKRIAKTSDRNSLSLVSKQLYTIDAEQRDAIHVGCGLHPATEALASLCSRFPNLWKVVIDYSGWISIHGKQLDNQGLLVLSSHCSSLTDLTLNFCSYIDDSGIGYLAYCKKLRSFRLNFAPAISSRGLLSVAVGCKSLCTFHLVDCMKVGSVEWLEYLGRAGSLEELVVKDSAPRRCAMSDARSRRSVASSTRRQQDAELAAAEERRRATAQTAAAAARAARLAAAELAAARAEAEAEAAEDAARAAEVEVETLRSSINGSIAGDITADRELEELARGRARERAERWAAAHLHGGGGGPRDRAPADGNPDGRGRAGGSPEPARGPRRRHGSLSPDRRHGHHGVQTVVRDFGPGGGWPTLTKTNYIEWAAVMRVRLQVRHMWEAVRYGDVDYDEDRRALDALIAAVPPEMQFSLSQKRTAKEAWDAIAAARIGSDRARKSTLQALRKEWENLAFKPGEDVDDFALRLNTLLQKMVQYGDDTYDEERAVEKLFRCVPEKYRQIARSIESLLDLSTMSIEEALGRLKVVDGDEPRPLSGPITIGGKLHLTREQWEASQGDRRKGESSSPTGGHKPRKARGGVQLRWARRRAEGGARRGAQGVATGNHKPARDDTCRNCGKLGHWAKDCRQPRRGQAHVARVEEEEPALLLAHASIELPPAAPAAAAFLHLDEPKVLVSLCDGSSNDKADGWYLDTGATHHMTGRREFFTEFDSSVRGTVKFGDASGVEIKGVGSVTFTAKSGEHRLLTGVYYIPALRNSIISVGQLDENGSRVLVEDGLMRIWDRRRRLLAKVTRGTNRLYILSAQVAHPVCLAARRDDEAWQWHERFGHLHFEALKQLSAKEMVRGMPCLDHVEQLCDVCVVTKQRRLPFPQQTSFRAKERLGLVHGDLCGPVTPATPGGRRYFLLLVDDLSRYMWVMVLGSKGEAADAIRHAQAAAEAECGRKLRVLRTDNGGEFTAAEFASYCADEGIQRHYTAPYSPQQNGVVERRNQTVVGMARALLKQRGMPAIFWGEAVVTAAYILNRSPTKALDGRTPYEAWHGRKPAVSHLRVFGCLAFAKELGHIGKLDDRSTPGVFIGYAEGSKAYRILDPETQRVRITRDVVFDEGRGWVWDKAVDDGSTPTYDDFTIEYVHFEGAGGVGSSSSPSVSTPVPEPPPTPTPTHPRATTSTTTSSSSTPPQPVSPHAPAPTATPPGTSTPTPARVERSPVEFVTPLSHDGERIDAYHDGEQLRYRTMEDLLGDQPVPGLVPRNLEAQLHLACDDGEPRSFAEAEKHAAWRAAMQSEMDAVQENRTWELADLPRGHRAITLKWVFKLKRDEAGAIVKHKARLVARGFVQQEGIDYDDAFAPVARMESVRLLLALAAQEGWGVHHMDVKSAFLNGDLKEEVYVHQPPGFVIPGKEGKVLRLHKALYGLRQAPRAWNAKLDSTLKGMGFEQSPHEAAIYRRGNGGNALLVGVYVDDLVITGTKDAEVAAFKEEMKATFQMSDLGPLSFYLGIEVHQDNSGITLRQTAYAKRVVELAGLTDCNPALTPMEERLKLSRDSTAEEVDATQYRRLVGSLRYLTHTRPDLAFSVGYVSRFMQRPTTEHQQAVKRIIRYVAGTLDHGLYYPRCPGKAHFVGYSDSDHAGDIDTSKSTSGILFFLGECLVSWQSIKQQVVALSSCEAEYMAASAASTQALWLARLLSDLLGRDTGAVELRVDSKSALALAKNPVFHERSKHIRVRLMSLHTVHSSMDIAWQVRWMKQ

SEQ ID NO: 26123 - protein, 1485 aa, Oryza sativa
  Clone ID: TF_OsC359_8265.pep
MAGERKEKVGFGGYASNSKAYRVYNKNKGIVEETADVQFDETNGSQEGHENLDDVGDEGLMRAMKNMSIGDVKPIEVEDKPSTSTQDEPSTSATPSQAQVEVEEEKAQNPPMPPRIHTALSKDHPIDQVLGDISKGVQTRSRVASICEHYSFVSCLEQKQVDEALCDPDWMNAMHEELNNFARNKVWTLVERPRDHNVIGTKWVFRNKQDENGLVVRNKARLVAQGFTQVEGLDFGETFAPVARLEAIRILLAFASCFDIKLFQMDVKSAFLNGEIAELVFVEQLPGFEDPKNPNHVYKLSKALYGLKQAPRAWYERLRDFLLSKVFKIGKVDTTLFTKIIGDDFFVCQIYVDDIIFGFTNEVFCKKFGDMMSRKFEMSMIGELSFFLGLQIKQLKDGTFVSQTKYIKDLLKRFSLEDAKPIKTPMTTNGHLDLHEGAMPPRTRRDRREPTPDPVSENEESSGDEYVQSEDENMENVEGDEVEEQQQFKRKKATLSLPDRRERNRLCRLDRAPAGRAVASSSVAATPSTPACPPFPAETPGATFPPSPFPFLRTGRLQPPLSPCLSAGQRRHHLPRLRDAALIPGITSSSPEARRSGLLAGVQWRRHHFSVSGRLLFVAGTPTDVAVSSVDVAASPSTPACPRFHRNVAANISVRLAGVVWPPVPPRPCTGRPHLHHLRHRSGKVVLGIVSPPSKPLRGPSSSSPIVLVVDVPSVARLVVSRRRLRRRHRSGVVLAVLVPVQPLPAVLVASSPVPVVVVVVVLSSFPVVVAPIIVFVLGSASSSLVPAVSRLRSRIAAEVVPSPSVSAAPFVVVVPTPRRVVLSSFRRFPKRGLRSSPKVRKAVLSEQGKANEGYTSCGPVVEMSWQRVGALLLGAQSCLPVPEVPAVGGIGSVLLFMARMGWELCHVFRPYTVVNKPNIHHNSKRLRSVKVLSLVSNLSLPFAFPLSLSKPLQQMADNEKDNKVRSQDIGTSSPRVNEAPDTSCVTLVQHLINQNRLLIEILQQHQTPILNLSQIQPQVQLEAVQALTPQVSMPPASRRTHGDVPHVDSKEASIICFRCDEQGHYARECPQQKRKTPMRTEDEVRKMIITSTEWPPLGMTKRQRRNTFRGAPQLTEHLLANGGRVSDSEDSDQVSSDDEDEMERKACSRCGEIGHVASSCATTCVHCEEDHPPDRCPTSRITCFFCEGTDHVPKDCQFSFLLTKKMANQPASSNGEKHQGNTNPRQDYSFSLTPVPGQRNQNEKRKCRVREDICCFNCQGMGHFADKCPKPRNIAAGTSVHATPCNQKLAPQRIVIHVSRSSPIARVATAPTPASALPQGVNAQFQPQPSVDKTEASIGIVPLDAPAQQPRNQVQDEEPEREKVIVCYNALTLLCTDGLSKELSSMEEVVSLPDLLQAKRRAINLRRAIPSRRPLFASNSTQKEASPVNNSNMQSYHIITEPIKDDAVTRTMPAISLQNQNEQPRLWFSVRYLSLCSRKFAAIM

SEQ ID NO: 26124 - protein, 952 aa, Oryza sativa
  Clone ID: TF_OsC359_7197.pep
MSWQRVGALLLGAQSCLPVPEVPAVGGIGSVLLSMARMGWKLCHVVRLYTVVNKPNIHHNSKRLRSVKVLSLVPNLSLPFVFPLSLSKPLQQMADNEKGNKVRSQDIGTSSSRVNEAPDTSCVTLVQHLINQNRLLIEILQQHQTPILNLSQIQPQVQLEAVQALTPQVSMPPASRRTHGDVPHVDSKEASIICFMCDEQGHYARECPQQKRKTPMRTEDEVRKMIITSTEWPPPGMTKRQRRNTFRGAPQLTEHLLANGGRVSDSEDSDQVSSDDEDEKSPQGFNQNKMERKACSRCGEIGTDHVPKDCQFSFLLTKKMANQPASSNGEKHQGNTNPRQDYSFSLTPVPGQRNQNEKRKCRVREDICCFNCQGMGHFADKCPKPRNIAASTSVHATPCNQKLAPQRIVIHASRSSPIARVAIAQTPASALPQGVNAQFQPQPPVDKIEANIGIVPLDVPAQQPRNQNWNHPAGATNVQVPTVQQQCKLSEFLKTEPPTFAIAVDPMEASDWLRIVEKKLGLIQCTDQERVVFATHQLVALASEWWDSYEASRPEGHTITWDEFSSVFKRSHVPAGMITLRKREFRYLKQEDLTVTEYLHEFHRLAHYAPEDVENDEDQQEKFLQGLKDEIAVQLLLEEYEDFEKLVDKAIQLESEHNRMKNCKRRIVSIPVFPCGNQRQRTEPLQITGSSIAHQEFPPQEDGPNADNNISNTNDDDDTTNNHASCPISDHSNRACNVNIIHQDVDDSINDGTQNDNPSSCDSEKDSDGDSNYGTTDANVSKDFQPPIPTPSQNDRPQTDSSAKKTLICYNCKELGHYSRDCLQPRQSRPPHYRQFTRSRHPNRIVVTGANAVPVRPRATTVSLAFDEPLEGSLKGSRLKYHIVTRSIHNSWSEEYLVDKVQKVIDRRYQQSDHRGAGAPPPIGCAGVAAFGRALRLPCGARPSAARALGCG

SEQ ID NO: 26125 - protein, 665 aa, Oryza sativa
  Clone ID: TF_OsC359_8051.pep
MDEVVATMDISEANEGYASCGSVIEMSRQMKTTRVGARAQPWPACPGIPAVGRVGSVLLFTARMGEGLCHIFTTGSKAMECGVKMCLVGWPGLAWDELEPRSGCQFGPNYRRPWVKAVLDGQLCEEEDVVSRLPKLRKTAGSASEAKEAVKPAVKQDKRLRSVKVLSLVSNLSLPFVFPLSLSKPLQQMADNEKGNKVRSQDIGTSSSRVNEAPDTSCVTLVQHLINQNRLLIEILQQHQTPILNLSQIQPQVQLEAVQALTPQVSAPPTSQKAPHAMPHVDPKEASIICFMCDEQGHYARNCPQQKRKAPMRTEDEVRKMIITSTEWPPPGMTKHQRRNSFRGAQQLTEHLLANGGRVSDSEDSDQVSSDDEDAKSPQDFNQNKIELKACSRCGEIGHVASSCAFTCVRCEEDHPPDRCPMSRITCFLCEGTDHVPKDCQLSFLLTKKMADQHAHSNGEKHQGSTNPRQDYSFSLTPVPGQRKQNEKRKCRVREDIRCFNCQGMGHFADKCPKPRNIAAGTSVHATPCNQQLAPQRIVIHASRSSPLARVATTPIPMSALPQGVNAQFQPQPPADKTEASICVVPLEVPIQQLRNQVQDEEPECKKVIVCYNCSEEGHYSKNCPQPRQNRPPHYRQFTRSRHSNRIVVTGANAVPVRPRVNQNP

SEQ ID NO: 26126 - protein, 1991 aa, Oryza sativa; identical to SEQ ID NO: 20200
  Clone ID: TF_OsC359_5604.pep

SEQ ID NO: 26127 - protein, 220 aa, Oryza sativa
  Clone ID: TF_OsC46300_1.pep
SPWLPEYDEWPFDIVNNDVVCSGFLPTAEPTLRDGIVAGESPSTQHLSNATTEAKTPTKSPIMPPPHGSGSPFTPRSNPCYRCGEDGHWSRNCPKPASSPLNSPCYNCGKLGHWRARGGLLRCLSIICFVNHFLHECKVQTCYCYNCYFAPFFFSMMNWKAIGCRSLNLSLKFFLESFFQRWSSPLPFIRSETETWDDDRCRDLTRTYEDKKKNTNRWMD

SEQ ID NO: 26128 - protein, 1793 aa, Oryza sativa
  Clone ID: TF_OsC1528_1763.pep
MKTLQGLIPHYSIPLAGVHRRSGEQVSGTSAFDVLHWEKAAIRFLGSASRDCSLFVRDGSPSSPLACFAPSSTLATASSSCRATGLSATSKQFEEATTLFVRCILSVLGDRLVEVYMHMIDVKELWDALNTKFGATDASNDLYIIEQFHDYKMADNRSVVEQAHEIQTMAKKLELLKCVLPDKFVAGCIIAKLPPSWRSFGTALKHKRHEYSVEGLIASLDVEEKAREKDAASKGDGGQSSANVVHKAQNKSKEKYKTQQTTNFKKQKKNNNNPNQDERTCFVCGQPGYLARKFPRRKGMKAPAGQTSKSANVTIGNTGDGSGYGNLPTVARGSTVLMGNGSHASAHGVGTVDLKFTSGKIVQLKNVQHVPSIDRNLISGSRLTRDGFKLVFESNKLVVSKHGYFIGKGYECGGMFRFSLSDFCNKSVNHICGSVDDEANDWHSHYWKEAVRSEMDSIIANGTWEVTERPYGCKPVGCKWVFKKKLRPDASYGLLVHQMYVKTTFLNGELDEEIYMDQPDGFVVEGFAVNEANKCVYYRHGGGEGVILYLDVDDILIFGTNLEVINESHYVEKILNRFGYIDNYSIPLAGVHRRSGEQVSGTSAFDVLHREKAAIRVTLWLTAMKCFWVSTGKPEGVLTAEQQKQFEEATTLFVGCILSVLGDRLVEVYMHMTDAKELWDALNTKFGTTDASNDLYIMEQFHDYKMADNRSVVEQAHEIQTMAKELELLKCVLPDKFVAGCIIAKLPPSWRSFGTALKHKRQEYSVEGLIASLDVEEKAREKDAASKGDGGQSSANVVHKAQNKSKGKYKAQQTTNFKKQKKNNNNPNQDERTCFVCGQVGHLARKCPQRKGMKAPAGQTSKSANVTIGNTGDGSGYGNLPTVARGSTVLMGNGSHASVHGVGTVDLKFTSEKIVQLKNMQHVPSIDRNLVSGSRLTRDGFKLVFESNKVVVSKHGYFIGKGYECGGLFRFSLSDFCNKSVNHICGSVDDEANVWHSQVENQLDRKIKRLRSDRGGEFFSNEFDLFCEEHGIIHERTPPYSPKSNGIAERKNRTLTDLVNAMLDTAGLPKACEAPRRSKRQRTAKSFGDDFTVYLVDDTPKSISEAYASPDADYWKEAVRSEMDSIIANGTWEVTERPYGCKPVGCKWVFKKKLRPDASHGLLVHQMDVKTAFLNGELDEEIYMYQPDGFVVEGFAVNEADKCVYYRHGGGEGVILCLYVDDILIFGTNLEVINESHYVEKILNRFGYIDNKPSPTPYDPSLLLRKNKRIARNQLEYSQIIGLLMYLASATRPDISFAVSKLSRFTSNPGDDHWRALERVMRYLKGTVELGLHYTGYPAVLEGYSDSNWISDVDEIKATSGYVFTLGGGAVSWSSQRRQRLVLASRRHRACTCFLPLRLPAPTRSSRLAAINKPTPTPAFPRLPAVMAPVLERPHGVAVLTAFLPPRRHRQADVGFVLGRSSPASPRLCHASPLRRRRPPPPPLSRRRPPPLPSRVGYLADKRIYHGGYRVSSLHFRYSPPTSSSWICQAVTWSPRRWMAEQTMNKALLGGDSLRTASRMSKGRMDNGGDDSASTGKLSPRRLHPHLPPVAAVSVFRSSLALDGSFVEAAPSSSTSPPPFPSSSPFALPLWSCHRRPSPLACADLVDRGDFNRAHHVAACRARRRRPLGRGYKEGHSGDEGMTKTKEAMAAPDRDSDMCDTCGSHAESAVTSDNTGVKTTEWPKVNGAAAAAHFARGRSEEAHGRAFGEWAYRCRVQELKAPLGSLVVALKSSNESTSVLFPAIVVQRMLPVP

SEQ ID NO: 26129 - protein, 1255 aa, Oryza sativa
  Clone ID: TF_OsC1713_5306.pep
MSGVAAAAAGGDGGGGAPPTGAGAGAPGGAVNDNNNGGNSASPSSGEPFSGTFSVVGFAAALKPHAFDGSNYKRWKARALLWLTAMQCFYVSRGKRSEPPLSPEEEAKFEASDCLFRGALISVLADNIVDVYMHMPSGKDMWDALEAKFGVSDAGSELYVMEQFYDYKMVDDRSVVEQAHEIQMLAKELENNNCELPDKFVAGGIIAKLPPSWSDFATSLKHKRQEFSVSDLIGSLGVEEKARAKDVRGKKVEGGSSANMVQKKNPHASHNNKKVKLDVKPKAATNFKKKGKGKAKGDCFVCGKSEHWAKDCPERKDRKSANMVISEGGGTSGYGKILPTVLSVFHSPDWWVDTGANIHVGRGSSLLMGNGSLAAVHGVGTVDLKFTSGKTVQLKNVQHVPSIKKNLVSGSLLCREGFRLVFESNKCVVSKYGTFVGKGYDSGGLFRFSLNDMCNNHNAVNHISENDESNVWHSRLCHMNFGCMTRLANMSLIPKFTLVKGSKCHTCVQSKQPRKPHKASEARNLAPLELVHSDLCEMNGVLTKGGKKYFMTLIDDCTRFCYVYLLKTKDEALHYFKIYKAEVENQLERKIKRLRSDRGGEYFSNEFASFCKEFGIIHERTPPYSPQSNGVAERKNRTLTEMVNAMLDTAGLSKEWWGEAVLTACHVLNKIPMKYKEVTPFEEWERKKLNLSYLRTWGCLAKVNIPIAKKRKLGPNTVDCVSLGYAIHSVGYRFLIVNSGVPDMHVGTILESRDATFFENEFPMKHTPSTSSKETVMPHEHFAPIEHNDQTPEENPEEDNIVDTRKSKRQRVAKSFGDDYIVYLVDDTPRTIEEAYSSPDADYWKEAVRSEMDSIMSNGTWEVVERPYGCKPVGCKWVFKKKLRPDGTIEKYKARLVAKGYTQKEGEDFFDTYSPIARLTTIRVLLALAASHGLLVHQMDVKTAFLNGELEEEIYMDQPDGYVLECQEGMVCKLLKSLYGLKQAPKQWHEKFDTTLTSAGFVVNEADKCVYYRYGGGEGVILCLYVDDILIFGTSLNVIEEVKDYLSKSFEMKDLGEADVILNIKLQRGDEGGITLVQSHYVDKVLSRFGYSDCKPAPTPYDPSVLLRKTRRIARDQLRYSQIIGSLMYLASTTRPDISFVVSKLSRFVSNLGDDHWQALERVMRYLKGTMSYGIHYTGYPKVLEGYSDSNWISDADEIKATSGYVFTLGGGAVSALDTATVEAEWLRELLMDLPVVEKPVPAILMKAVQYQSRF

SEQ ID NO: 26130 - protein, 350 aa, Oryza sativa
  Clone ID: TF_OsC10527_1.pep
MSFPDEEEDEAFLLAVAATEEAALASSDSSKRRRLSMTSSTSSSPTSATPPPAAVPEGPYLAALKGSHSSAWKQQQETLSQARKRPGGSQTLATPGGAFGGSGGGGGGYGDAGGAVEEKACPCGAGSCLVLTSNTPRNPGRKFYRCPMRDNGGCNYFEWCDNPSPGPANVSGNTVFQSDTSVAHMLCPCGAGACLILTTKTGKNVGRQFYRCPANQGISYLFLNGGSSCGYFKWCDEQQLRTAAPLQASTQYHTDVASSGQIPSKRSSSACFKCGQENHWAKDCPNQSSDPYPDKGGRTFTSASSPDACFKCGKSGHWSRDCPTANCGSSTVSSHVKSSSTLGSWNSHRY

SEQ ID NO: 26131 - protein, 384 aa, Oryza sativa
  Clone ID: TF_OsC1713_3594.pep
MNYTHQISGNLVKMVNTRASGSGNNNNEENPTFAQVLAQQTQLINLLVQQMQNQQGNNNVNPPPPQNKLVDFLRVKPPTFSSTTNPVEAGDWLHAVEKKLELLQCTDQEKVVFASHQLQGSASEWWDHFRMNRAEGQPITWAEFTEAFKKTHIPAGVVALKKREFRALKQKDRTVTEYLHEFNRLARYAPEDVRTDEERQEKFLEGLKDELSVMLISHDYEDFQELVDKAIRLEDKKNRMDNRKRKMTVFQEAQGSRQRQRIEPLQIGESFSAGQGQSQQLNIGGEIESETNESNEVNIEQANQPVPVQQDQSQENNSSGREQQVCFNCYKPGHFARECPKSKHQQPQGQVNNIVVTGANAVPVASSRVAFSRDTAQPPVSKQQ

SEQ ID NO: 26132 - protein, 371 aa, Oryza sativa; identical to SEQ ID NO: 20235
  Clone ID: TF_OsC1713_4029.pep

SEQ ID NO: 26133 - protein, 511 aa, Oryza sativa
  Clone ID: TF_OsC1713_4126.pep
MDSSSNRIGFPLSKPSFPSPSPPPWAFAAASLHLFKDPRALLYPSPPSPSPLVVGRALAPCALASPSPPPLQPCAAVVSAVAVAREDRRRVRKVVAVLVRPFAVAGDRRSFIAVVNPKVSAASSSSPSPSVASPPLLWSPMVNTRANGSGNNNNEGNPTLAQVLAQQTQLMNMMIQQMQNQLNQGNNNAPPPQNKLTDFLRVRPPTFSSTTNPVEAGDWLHTIEKKLELLQCTDQEKVVFASHQLQGPASEWWDHFRMNKAEGQPITWAEFTEAFKKTHIPAGVVALKKREFRALKQKDRTVTEYLHEFNRLARYAPEDVRTDEERQEKFLEGLKDELSVMLISHDYEDFQELVDKAIRLEDKKNRMDNRKRRMTVFQEAQGSSQRQCIKPLQIGESSSAGQGQSQQLNIGGEIKSETNESNEVNIEQANQPVPVQQDQSQENNSSGRKQQVCFNCYKPGHFARECPKPKHQQPQGQVNNIVVTGANAVPVASSRVVSSSVTTQPPVSRQQ

SEQ ID NO: 26134 - protein, 343 aa, Oryza sativa; identical to SEQ ID NO: 20242
  Clone ID: TF_OsC1713_4695.pep

SEQ ID NO: 26135 - protein, 371 aa, Oryza sativa; identical to SEQ ID NO: 20248
  Clone ID: TF_OsC1713_4813.pep

SEQ ID NO: 26136 - protein, 493 aa, Oryza sativa
  Clone ID: TF_OsC1713_5276.pep
MGGGGGSVGAGFCGTSGENGGGRGGDRAHVVGCELGCGRAPDFAATWAAMAVGVGRREMVNTRASGSGNNNNEENPTLAQVLAQQTQLINMLVQQMQNQQGNNNVNPPPPQNKLADFLRVRPPTFSSTTNPVEAGDWLHAVEKKLELLQCTDQKKVVFASHQLQGSASEWWDHIRMNRAEGQPITWAEFTEAFKKTHIPAGVVALKKREFRALKQKDHTVAEYLHEFNRLARYAPEDVRTDEERQEKFLEGLKDELSVMLISHDYEDFQELVDKAIRLEDKKNRMDNRKRGRIVFQEAQDSSQRQRIKPLQIGESFSTGQGQSQQLNIGGEIKSETNESNEVNIEQANQPVPVQQDQSQENNSSGREQQVCFNCYKPGHFARECPKPKRQQPQGQLRAAVAAVAPAVRRRRSGRRCRSGRPPSGSPSRRRPRPPLRHRRRSPEHHRRRRPDLRRRFNLVAVAVRCSSAAPLVTAPPFASERAPSEPPSRRRRW

SEQ ID NO: 26137 - protein, 814 aa, Oryza sativa
  Clone ID: TF_OsC1713_5360.pep
MVATATDDGGCNGGAARLNRRQRRRRLGLRGGGARRDGRLRQRRRRINYLDFKDFGFRNIPIGPPPRISVWKGGMIKEYSKMDECKTGDFGKRPLIDDISTVCKWFTRELSDTTYGKNAQLAAKVLDCVYMSKASLFTQKDSTITREEKSREEKIKEGRKQGGSNVAHNGNAPPLEQNHPNNTDVCSQLPKTPQTKSTVEHETKSNINNTSTSKGAPPTENVICSQLQTTPPSKQTEQENSKSNSNKDNACKETQYADKKASSKDFVCSQQSNNSVASRTRAKILHSASPLSVVSISPSKKNSSDQKIRKAVRKQPLKATQPISTQPDKEESNKDGLFVEPICTIPAKKEEKQIDIVLENTSNFRKQMKLEHTGTNIMDIEHSSIQVTQGERYMNTPKTCINNKVGVQHLSANFTANMGNRRLEGQHCDENEYQDDFAEFLYEEEPSDNIDMVEQRAQPQINNEQSSPQTPLHINITSARTPATKKSSQSSPNIEERQYSMTRIIDSLNASGNCSGTRHNLYRPKRIVHPSKYKSSPYDNYTRHQTISAAELNHYNNILSIGETQQYKNKFAVLMDNVKVTWSSLSKYLSPRGVVDTYVLNAYAKKIANDQNNKENEYMNFYFFHRSSVYFLKNWEGAGKEEDYENCARQAFTLARNKKPLHYYDLLIFPCLYDNHWFVFTVDIKGHHFVFLDSIYDENSKYHKKIQGLLIPGFIAMWEEFSDVEKDFSKFDIQYPQITRQNNGHDCGIYAMKCMEWWNPRMHLKDMIRPEYIPNMRKQIANDLLFSEYNSQEEAKILARSFNPTKHGKYARQQ

SEQ ID NO: 26138 - protein, 212 aa, Oryza sativa; identical to SEQ ID NO: 20213
  Clone ID: TF_OsC359_7027.pep

SEQ ID NO: 26139 - protein, 324 aa, Oryza sativa; identical to SEQ ID NO: 20214
  Clone ID: TF_OsC8494_1.pep

SEQ ID NO: 26140 - protein, 355 aa, Oryza sativa; identical to SEQ ID NO: 20215
  Clone ID: TF_OsC359_5800.pep

SEQ ID NO: 26141 - protein, 337 aa, Oryza sativa
  unsure (1)..(337): unsure at all Xaa locations
  Clone ID: TF_OsC338397_1.pep
WTNRHRXNKNSSNLQDPQNMGINQPMLLFEDPPQASRNKGRVQASLKPEDYTINLNHLKQYSSNERCHLTPAKRRINVTCYRCGEEGHCALDCPKKKLGNGQVRNIPRHPKRKMRAGIPPKPMPHSLYPKPMYQQFRRQGTTPHWWKGKRKRKASSRITYAELDLSKMGIEIGDLPEDVEELQLWQRKRDGCCFSCGQFGHYAIGCTQDTNEEQETLPSQIGPEEHRVPDPSKEVSKIKACSRCGEIGHYGSNCITQCPYCDEDHPNGECPTTKITCFLCEKTDHVPQDCQLSPLLTKTAEVQRVSLRFAHRLMTSRSHEDPGFPTFDLHVCLSNNI

SEQ ID NO: 26142 - protein, 55 aa, Oryza sativa
  Clone ID: TF_LIB3432-017-P1-K1-C3.pep
MVETQGICTGHTLMDQGLKKWNSENPWSGYKPISVAWTVDVPNVLAFVKELLMAP

SEQ ID NO: 26143 - protein, 757 aa, Oryza sativa
  unsure (1)..(757): unsure at all Xaa locations
  Clone ID: TF_OsC11468_1.pep
MASLLTLPSLSLSNPSASAAAAGAGAAPSLRLRAAFRCWALRRAGGGRWAAAGAIASPNSVLSEHAFKRLQLSDEEEEEEEGAYGSDEEGVEAVGGGEGDEDELAIARLGLPEQLVSTLEKRGITHLFPIXVRAVLIPALDGRDLIARAKTGTGKTLAFGIPMIKQLMEEDDGRSVRRGRIPRVLVLAPTRELAKQVEKEIKESAPKLSTVCVYGGVSYNVQQNALSRGVDVVVGTPGRIIDLINGGSLQLGEVKYLVLDEADQMLAVGFEEDVETILQQLPAERQSMLFSATMPGWVKKLSRRYLNNPLTIDLVGDQDEKLAEGIKLYAIPLTSTSKRTVLSDLITVYAKGGKTIVFTKTKRDADEVSLALTNSIASEALHGDISQHQRERTLNGFRQGKFTVLVATDVAARGLDIPNVDLIIHYELPNDPETFVHRSGRTGRAGKAGTAILMFTNSQRRTVRSLERDVGCRFDFISPPAIEDVLESSAEHVIATLRGVHTESIQYFIPAAERLQEELGPNALASALAHLSGFSQPPSSRSLISHEQGWVTLQLTRDPGYGRGFFSPRSVTGFLSDVSSAGXSADEVGKIFLTADEKVXFDLPEERDICATDIHFKFGNKIKKKKLPALQDDGPATDSYGRFSNSDRGFRNRRSRGGGSRGGRGGWDSDGEDRFRRGGRSFRSDNDSWSDDDFGGGRRSNRSSSFGGRGSSYGSRSSSSFGGRSSSFGSRDSSRSFSGACFNCGESGHRASDCPNK

SEQ ID NO: 26144 - protein, 609 aa, Oryza sativa
  Clone ID: TF_OsC1713_4507.pep
RHHRRRRLGGSTARTAQAHRRTAVLRHERSPFRLLRSFSPLPGRPLARWADAAITVVVVVLPASGFNTQNSLEIWVKFLGVTKWYQSQLDFVKPWRINRQLRVCSEVKSSIKLHAAKSGKQMVSVRGNFNGSGSRQFHGSTQLNSISFPRQPLKDQPQSQVMANQTQTVEELLQQMRRRYQIYLMQQMQRQCQEPRQVHQPQMQVQVPARNLNQSQEFPISAPKTPVKMMSRSPKITSANSPSDQRKISATCYDCGEQGHYVRNCPWKVFARSPEKDEKQCPGSNQAPSQSTDKKDGTLQRNSGANRTVIWKMDNGRTMIITGSEFTPEDAARIPKRRRGRNTFRGARQLTRHLIKYGPPRPEDDESGERFSADDNDDNDDDNDDNDDATLDSFRERELKCKACARCGIVGHTASLCLPTCRCGEYTHYSDACPLRKVTCFLCEGTDHVPKDCQLNAVLAMTKKEQGATVQPIRQPMVVDNNSLNPSTLSPTTAPVEANLGRSNVARDVHESLCVPVSAAKVHNQKPAPRDPASRFCRNCRKPGHRFSDCPLPRAAKAVRRDSQVTSTAHDTNRHLNVQPPPQRIIVKGTVKGHIVPPAIVSSLQHQHQ

SEQ ID NO: 26145 - protein, 1539 aa, Oryza sativa
  unsure (1)..(1539): unsure at all Xaa locations
  Clone ID: TF_OsC1517_1418.pep
VPLVPSRQPIDVSSTEEPTTGARFGFEEGRVEPEANHESANQQSHHSNRSHRTASRNAEVEQPHRSNRSHHTASRNAEVEQSHCSHRAASHNSGEERIPSLPHVENNMQHLMAVQTQILQGLAAAIAGFQHNAHGNDHPHMGNNRSKLTDFLRSRPPEFSXTVEPVEADDWLKDVDRKLNLVQCTPVEKTLYASHQLRGPAADWWENYCNAHPKPTNIAWDEFATAFRAAHVPESTIDMKKEEFNRLKQGNNSVNEYLSQFNKLARYAPEEVDTDKKKIRKFLKGIAALLLEDARKETTEEYKKRRSNHQGNSSRGAPRPRFGQPMQYHQSVTQANCQPGYAPRPQMNRPAPRPQQRAPSGTTAPNSVTSFKSPQGPSAVQCFRCNQMGHYARECPQNPTNTNSGHANGSTARTPTPAAAQSRPSSQASGQGSRASNSFGRGRVNHIQAETAQDAPDIVMGMFSVNSIPAIVLFDSGASHSFISQAFVKRNGWKTQNLRVPMIVHSPGRNIRATQICPEVNLRTEEVDFLAKPIVLDSQNLDIILRMDWLAKHKGQIDCAEKSITLQGPGGKQVRFTSNTPTASRSILTCLQVTSLESVPVVCEYPDVFPEELTSMPPDREIEFAIELAPGTAPIAKRPYQMAANELAEVKRQIEELESKGYVRPSSSPWGAPVLLVKKKDGSERMVIDCRALNEVTINNKYPLPRIDDLFDQLKGARVFSKIDLRLGYHQLEIRSEDIPKTTFSTRYGLYEFTVMSFGLTNAPAFFMNLMNKIFMEYLDQFVVVFIDDILIYSKNEEEHAEHLRLIMEKLRDHQLLAKFSKCEFWLDRVAFLGHMISSNGVEVDPSKVKAVLAWNPPKNVSEIRSFLGLAGYYRRFIEGFSKLARPMTELLKKEKKFQWSAACEGSFQEMKKRLTTAPVLTLPDIRKDFEIFCDASRQGLGCVLMQERKVVAYASRQLRPHEVNYPTHDLELAAVVHALKIWRHYLIGNRCEVYTDHKSLKYIFTQTELNMRQRRWLELIKDYDLGIHYHPGKANVVADALSRKAYCNVAQIRPDQDRLCRELEKLRLTVVQSGVPASLTVQPTLESQIREAQKDDEGIKELIKRIQEKKDTNFSIDDQGTVWCGPRICVPAKKELRDLILKEAHESAYSIHPGSTKMYQDIKAYFWWAGMKRDVTEYVALCDICQRVKAEHQRPAGLLQPLPIPEWKWEEIGMDLITGLPRTPSGYDSIWVIVDRLTKSAHFVAVKTTFDGKKLAELYMTHVVCRFGCPKKIVSDRGTQFTSRFWKQLHEALGTDLNFSTAYHPQTDGQTERVNQILEDMLRACALDFEGTWDRCLPYAEFSYNNSYQASIQMSPNEAMFGRKCHTPLCWNEVGEALVFGPDILKAAKEQVKLIRERLKTAQNRQKNYADNRRRDLEFGKGDHVYLRVSPLRGMRRFGMSGKLAPRYIGPYLITARRGEVAYQLELPEEEQVSLGNIELEKNLTYKERLIKVLEEAERQTRRKTIKFYKVQWSNHSEDEATWEREDLLRAEFPELLP

SEQ ID NO: 26146 - protein, 338 aa, Oryza sativa; identical to SEQ ID NO: 20268
  Clone ID: TF_OsC82075_1.pep

SEQ ID NO: 26147 - protein, 599 aa, Oryza sativa
  unsure (1)..(599): unsure at all Xaa locations
  Clone ID: TF_OsC359_7473.pep
MFNREKGKNVSGYASSNSSFQLNPPLASRELTRAHPRSIPSMLLSSQLPLVGSQDQNQYVFDRAFATQVNELPMLEEDVPFCHDCREQGHYALNCPWVYVKEAPSFGSAGQTSLNQPPRTKSSLQPSVQSEEPNGDNPLNPRKCFPPSLSYHVGSRTKQAKGKKSKNQKRKAPMRTEEEVRKMTITSTEWPPPGMTRRQRRNTFRGAPQLTEHLLANGGRVSDSEDSDQVSSDDEDEMERKACSRCGEIGHVASSCATICVHCEEDHPPDRCPTSRITCFFCEGTDHVPKNCQFSFLLTKKMANQPASSNGEKPQGNTNPRQDYSLSLKPVPGQRNQNEKRKCRVREDICCFNCQGMGHFADKCPKLRNIAASTSVHTTPCNQKLAPQRIVIHASRSSPIARVATAPTPAGALPQGVNAQFQPQPAVDKTEAXSASYLWMFQHSSQXNQVQDEEPEQDHPPGECPTRKVTCFLCEGTNHVPKDCQLSVLLTKTAEIQRTTLRLSRQLVSSNNNIDDIIHSTNAPLAPPNSAINHGNNTYSTNHSLHRQPQQRIVVDGRSCVSPRPTPGQAKGNRPPEGDTKQKTVIRFNQQSEGSFSCE

SEQ ID NO: 26148 - protein, 665 aa, Oryza sativa; identical to SEQ ID NO: 20273
  Clone ID: TF_OsC359_7487.pep

SEQ ID NO: 26149 - protein, 2025 aa, Oryza sativa
  unsure (1)..(2025): unsure at all Xaa locations
  Clone ID: TF_OsC359_7990.pep
MEMDEVGGRWTFSRADEGYTSCGPVVEMSWHRAGVLLLGXSVLPACPGGSGRRXIGSVLLSMARMGWKLCHVFCLYTMVMAGSVTRRGLDMTGFVLELRGMCVVLGYPHGVDYQARPLPEQEGDDAEPHAGWEVTAVILSGSPERTSLAVTAGGDSFPAACQSAALLAIGTLHQRYPDELQHSPYRYHPRRGGARDYATFRDASSEDDATIVHLARMVEAYDAARIDFHQMVRRGMVENNLKILELRQENLQLQKDLDAVEAQLHQLKIAQGEVCRPKRRRVCRSQKITARKSTSRPELVRQSLAWTCFIETPRAEPAPVVPQEGETSGVGSTEDALLLTFRPGPSQRRSANTGDGNQLEGSNHNHQGNPPPPPPPPPPPPPDTNAILTQILAQQANMMTAFLHHLQNPPQHNAPPPPPQHSKLAEFLRIRPPTFSSSNNPVDALDWLHAVGKKLDIVQCSDEEKVIFAAHQLQGPASLWWDHFQATQPEGQPITWARFTAAFRRTHVPAGVVALKKREFRELKQGNRSVMEYLHEFNNLARYAPEDVREDEEKQENFLAGMDPELSVRLVSGDYPDFQRLVDKSICLEAKHKELESHKRRLANFRNQQGANQRVRYTNPYPGGSSSQQQQQQPRPAPRPQFVVRVPQPQQQQNQQGTRAPRPPTPTVQPGQGRRDAQGPQRLCFNCFEPGHFADKCPKPRRQQGQAPPRSNNGGKDVIRGRVNHVTAEDVLTTPDVIVGTFLIHSIPATILFDSGASHSFISVPFVGRNQLGVERLRNPLLITTPGGVMTAKYYSPAVPIEIQGIPFPSDLILLDTKNLDVILGMNWLAQFQGVVDCARRTVTLYRGPEQPVVFFASPTSVRSSELHQIGLSEIPIVREFRDVFPEELPGMLPKREIEFRIDLAPGTTPLYKRPYRMAANELAEVKKQLEELKEKGYIRPSTSPWGAPVIFVEKKDKTKRMCVDYRALNEVTIKNKYPLPRIDDLFDQLKGATVFSKIDLRSGYHQLRIREEDIPKTAFTTRYGLYEFTVMSFGLTNAPAFFMNLMNKVFMEYLDKFVVVFIDDILIYSQSEEDHQHHLRLVLGKLREHQLYAKLSKCEFWLSEVKFLGHVISAKGVAVDPETVTAVTDWKQPKTVTQVRSFLGLAGYYRRFIENFSKIARPMTQLLKKEEKFVWSPQCEKAFQTLKEKLVSSPVLILPDTRKDFVVYYDASRQGLGCVLMQDGHVVAYASRQLRPHEGNYPTHDLELAAVVHALKIWRHYLIGNRYEIYTDHKSLKYIFTQSDLNLRQRRWLELIKDYDVGSHYHPGKANVVADALSRKSHCNTLNIRGVPPELNQQMEALNLSIVGRGFLAALEAKPTLLDQIREAQKNDLDMHGLLRNMKQGKAAGFTEDEHGTLWNGNRVCVPDNRELKQLILQEAHESPYSIHPGSTKMYLDLKEKYWWVSMKREIAEFVALCDVCQRVKEEHQRPAGLLQPLQVPEWKWDEIGMDFITGLPKTQGGYDSIWVVVDRLTKVARFIPVKTTYGGNKLAELYFARIVSLHGVPKKIVSDRGSQFTSHFWKKLQEELGTRLNFSTAYHPQTDGQTERLNQILEDMLRACVLDFGKTWDKSLPYAEFSYNNSYQASIQMAPYEALYGRKCRTPLLWDQAGESQVFGTDILREAEAKVRTIRDNLKVAQSRQKSYADNRRRDLEFAVDDFVYLRVTPLRGVHRFQTKRKLAPRYVGPFRIIARRGEVAYRLELPASLGNVHDVFHVSQLKKCLRVPSEQADSEQIEVREDLTYVERPVKILDTMERGTRNRVIRFCKVQWSNHAEEEATWEREDELVPLRHRLLRLRRVLADLVHSSVSPADRRNTAVLVDPSRAAAFLHSGRRSRRPRRPGVSRGPPLSLPPSLPSLGRRSAACVMPGGDHRGAGAPPPVGRAARPPSGAPRGCQVGPGRQPPAPSGAAGPRAPPLGRSESQNPGLHLRSGAAAAAVDALLLLLRLSLLLVLAAAGLARSHLLLALHAAALALPPRPRPPPRH

SEQ ID NO: 26150 - protein, 1666 aa, Oryza sativa
  Clone ID: TF_OsC359_8313.pep
MPLVFEGVIMIQEAPGLEWLIPGLEVELCSRDGCSEWLGLYNRMPRYKHEYLFGVEGFVQELRTMSFVIGFGTAPFYAQIPHDRHEEKCRVKVTLNSNSEDVPSVMFEAGGRNYIHACQEVARIAIGELRDRYSDQLADTEYRYHPRQPQGSDRGSYLEIEGIENDATTRHLVEMLWAMDESRAETVLAAQDREDRNRGKICKLEDKVDRLEKELAALKGEAPPQKARIRLTARKRALFVPRYQLAPKMVNTRSNGNGPNHPNNNNNGENPTLAQVLAQQTQLMNMMMQQFQNQQNQGNNHVPPQNKLAEFLRVRPPVFSSTTNPVEAGDWLHAIEKKLDLLQCTDQEKVSFASHQLHGPASEWWDHFRLNRINAEPITWLEFAAAFRKTHIPSGVVSLKKKEFRSLTQGSRSVTEYLHEFNRLARYAPEDVRNDEERQEKFLGGLNDELSYPLMGGSSSVVRPQRQFFNNNAGNNIRNQAPRPVAAPTQQQPTKREQGSKPVVCFNCGDPGHYADKCPKPRRVKVVPAQNNSAVPASKARVNHVAAAEAQDAPDVILGTFPVNSVPATVLFDSGATHSFLSMSFAGNNGMEVEDLRRPLMVSTPSNQALSLQCSPSVRIEIQGIPFLANLILLESKDLDVILGMDWLARHRGVIDCANRKVTLTSNDGRVVTVHALSSESLRSRLNQITLEEIPIVREYPDVFPDDLPGMPPKRDIEFRIDLVPGTTPIHKRPYRMAANELAEVKRQVDDLLQKGYIRPSSSPWGAPVIFVEKKDHTQRMCVDYRALNDVTIKNKYPLPRIDDLFDQLKGATVFSKIDLRSGYHQLRIKEEDIPKTAFTTRYGLFECTVMSFGLTNAPAFFMNLMNKVFMEYLDKFVVVFIDDILIYSRTKEEHEEHLRLALEKLREHQLYAKFSKCEFWLSEVKFLGHVISAGGVAVDPSNVESVTNWKQPKTVSEIRSFLGLAGYYRRFIENFSKIAKPMTRLLQKDVKYKWSEECEQSFQELKSRLISAPILILPDPKKGFQVYCDASKFGLGCVLMQDGKVVAYASRQLRPHEKNYPTHDLELAAVVHAFKIWRHYLFGTRTEVYTDHKSLKYIFTQPDLNMRQRRWLELIKDYDMGIHYHPGKANVVADALSRKSYCNATEGRQLPLELCKEFERLNLGIVSRGFVTALEAKPTLIDQVREAQINDPDIQEIKKNMRRGKAIGFLEDEQGTIWLGERICVPDNKDLKDAILKEAHDTLYSIHPGSTKMYQDLKERFWWASMKREIAEYVAVCDVCQRVKAEHQKPAGLLQPLKIPEWKWEEIGMDFITGLPRTSSGHDSIWVIVDRLTKVAHFIPVKTTYSESRLAELYMARIVCSHGVPKKIVSDRGSQFTSNFWKKLQEEMGSKLNFSTAYHPQTDGQTERVNQILEDMLRACALDFGGNWDKNLPYAEFSYNNSYQASIQMAPYEALYGRKCRTPLLWDQTGERQVFGTDILREAEEKVKIIQERLRVAQSRHKSYADNRRRDLSFEEGDYVYLRVTPFRGVHRFHTKGKLAPRFVGPYKNVSRRGEVAYQLELPQSLAGVHNVFHVSQLKKCLRVPTEEANLEQIEVQEDLTYVEKPIRILETNERRTRNRVIRFCKVQWSNHSEEESTWEREDELKSAHPHLFASSSESRGRDSV

SEQ ID NO: 26151 - protein, 910 aa, Oryza sativa; identical to SEQ ID NO: 20285
  Clone ID: TF_OsC1528_1709.pep

SEQ ID NO: 26152 - protein, 605 aa, Oryza sativa; identical to SEQ ID NO: 20278
  Clone ID: TF_OsC359_5999.pep

SEQ ID NO: 26153 - protein, 1048 aa, Oryza sativa
  unsure (1)..(1048): unsure at all Xaa locations
  Clone ID: TF_OsC359_8126.pep
TPPNSKLSIEAPRGPALSVPHSPGGADMDLADIAQSLAPIKTTIAPPPPRIPPHPAVPARIKEGEIIPRVSLPRFPRFPLSLSLGSVRIHPVILAGDIYGARDPRAXFPSSPAAFSPSRCYIIAPRAPLFRFXRRSPLALAVGSVLAPCSSLSAVAADLRFAADVAPVLRPTRRHLHPLRRIAVDLVRASVSLADRRSAAVIVIPSRAAAFLHSVRRLRRXSCLGVSRGPXPFRFPLLSALSGAAPPRRWSPAVTIGARARRSRRPCRRGRLRARPRGCQVGPAVSRPRPRVRLTRGTHGADRRQPRAPGPPWTERLTRGPHFPWTRANEGYTSCGPMADNEKGNKVRSQDIGTSSSRVDEAPDTSCVTLVQHLINQNRLLIEILQQHQTPILNLSQTQPQVQLEAVQALTPQVSMPPASRRTHGDVPHVDPKGASNICFMCDEQGHYARERPQQKRKTPMRTEDEVRKMIITSTEWPPPGMTRRQRRNTFRGAPQLTEHLLANGGRVSDSEDSDQVSSDDEDEMERKACSRCGEIGHVASSCATICVHCEEDHPPDRCPTSRITCFFCEGTDHVPKDCQFSFLLTKKMANQPASSNGEKHQGNTNPRQDYSFSLTPVPGQRNQNEKRKCRVREDICCFNCQGMGHFADKCPKPRNIAAGTSVHAAPCNQKLAPQRIVIHASQSSPMARVATAPTPASALPQGVNAHFQPQQRIVVDGRSCVSPRPTPGQAKGDTKQKTVIRFNQQSEGSFSCEEKIPSATGGQAKQFRKVKICWKFVKTQRKKRARPPLSLTGGAHLSSPSSRRARRRARALAPPPPRIAPHPAVPARIKERGITPRVSLSRFPLFSLSLSLGFVRIHPAKFAGVFNGARDLRARFPLSPAALSPSRCYIFDPRASLFRFRRSPLALAVGFVLAPCSSLSAVAVDLRFAADVAPVLRPTRRHPHRLRRVVADPVRRSASPADCRSTVALGIPNRAVAFLRSGSPPPSLRSSSRLGATSLGIAASPSTSSAPPFRSPTVGAPPSSSSRAAPPSFSAPSAVSAAFAASG

SEQ ID NO: 26154 - protein, 847 aa, Oryza sativa
  unsure (1)..(847): unsure at all Xaa locations
  Clone ID: TF_OsC359_7561.pep
NLSCLFVRRRRRRFRRIPPSPRAIKWGESFPVIPSPFSPAFPSLSPSDSFGFNPASFTGVIDGAEISAADSSLSGRSLPLPTLYNCSPXSLLRFRHSPLALPVGFVLAPSSSLSAVAAELRFAAAVAPDFLPTRRHLHRLRRVVVDLVRSSVSPADRRSTVVLAVPNRAAAFLHSGRRFRRPRRPGVSRGPPLSLPSLLRSLGRRSAAPVVAGGDHRGAGAPPPVGRAGEAAFGRAPRLPSGARPSAARARGMFNREKGKNVSGYASSNSSFQLNPPLASRELTRAHPWSIPSMLLSSQLPLVGSQDQNQYVFDRAFATQVNELPMPEEDVPFCHDCREQGHYALNCPWVYVKEAPSFGLAGQTSLNQPPRTKSSLQPSVQSEEPNGDNPLNPRKCFPPSLSHHVGSRTKQAKGRKSKNQKRKAPMRTEEEVRKMTITSTEWPPPGMTKRQRRNTFRGAPQLTEQLLANGGRVSDSEDSDQVSSDDEDEKSPQGFNQNKMEHKACSRCREIGHVASSCATTCVHCEEDHPPDRCPTSRITCFFCEGTDHVPKDCQFSFLLTKKMANQPASSNGEKHQGNTNPRQDYSFSLTPVPGQRNQNEKRKCRVREDICCFNCQGMGHFADKCPKPRNIAAGTSVHVTPCTQKLAPQRIVIHASRSSPIARVATAPTPARALPQGVNAQFQPQPSVDKTEAXSALYLWMFQHSSQXNQVQDEEPEQDHPPGECLTRXVTCFLCEGTNHVPKDCQLSVLLTKTAEIQRTTLRLSHQLVSSNNNIDDIIHRTNAPLAPPNFAINHGNNTFSTNHSLHRQPQQRIVVDGRSCVSPRREMGNLYEVDSKDMNYTKFWN

SEQ ID NO: 26155 - protein, 590 aa, Oryza sativa
  Clone ID: TF_OsC1713_3496.pep
MEEKPSTSCLFGSQVKSSLKLHARSEKISSKSSFREDQESRQCHPPQVPDQMPARNPNQSQSQEFPISAPKTPVKMLSRSPKITTAKSSSDQRKVSATCYDCGEQGHYVRNCPWKVFARSPEKDEKQCPGSNQAPSQSTDKKDGTLQPNSGANRKVTWKMDNGRTMIITSSEFTPEDAARIPKRQRGRNTFRGARQLTRHLIKYGSPRPEDDESGEQFSADDDDDDTDDDDDTTLNSFMERGLEFKAYHVPKDCQLNAVIAKTKKEQGTTVQPIRQPMTIDNSGHNPSALPPTLVPVEANHGRSNVTKDVHKSLLVPVSAAKVHNQKPAPRDQASRFCHNCRKPGHRFSDCPLPRAAKAVRRDSQVTSTAHDTNRHLNVQPPPQRIIVKGTVKGHIVPPAIVSSLQHQRQQRKQCQENNSSLQLQRGGTPLRQHPRQVLSAPGRPTVVSSSNAPRIAPIWRPIDKSPFGNPTGKKILPVTADKTVAPPPSKINKQSNVPGHTYPHSARDRGDVGARPPVQSDVTGNRPVTDWSPPIDVAWVPSPFAPPATWQLGEGLGARQCEGPRGTTWHPEALRPLLRLARCGSRARL

SEQ ID NO: 26156 - protein, 1346 aa, Oryza sativa
  unsure (1)..(1346): unsure at all Xaa locations
  Clone ID: TF_OsC1713_4665.pep
MLVAILLRSWYVHDAYYTLSMLLVMLHFITRSPHIVHAMIIILTFWIKICRYMTIFPTIQKPDGSFSVVGFAATLKPHAFDGSNYKRWKARALLWLTAMQCFYVSWGKRSEPPLSPKEDVKFEASNCLFRGALISVLADNIVDVYIHMPSGKDMWDALEAKFGVSDAGSELYVMEQFYDYKMVDDRSVVEQAHEIQMLAKELENNNCELPDKFVAGGIIAKLPPSWSDFATSLKHKQEFSVSDLIGSLGVEEKARAKDNRGKKVEGGSSANMVQKKNPHASHNNKKVKLDGKPKATTNFKKKGKGKAKEDCFVCGKSGHWAKDCPERKERKSANMVISEGGETSGXGKILPTVLSVFHSPDWWVDTGANIHVCDDGRGSSLLMGNGSLAAVHGVGTVDLKFTSGKTVQLKNVQHVASTKKNLVSGSLLCREGFRVVXFESYKCVVSKYGTFIGKGYDSRGLFHFSLDDMCNNHNVVNHISENDESNVWHSRLCHVNFGCTTRLANMSLIPKFTLVKVSKCHTCVQSKQPRKPHKAFEARNLALLELVHSDLCEMNGVLTKGGKKYFMTLIDDCTRFCYVYLLKTKDEALHYFKTYKAEVENQLERKXKRLRSDRGGEYFSNEFASFCEEFGIIHERTPPYPPQSNGVAERKNCTLTEMVNAMLDTAELSKEWWGEAVLTACYILNKIPMKYKEVTPFEEWERKKLNLSYLRTWGCLAKVSVPIAKKRKLRPNTVDCMFLGYAIYSVGYRFLIVNSGVPDMRVGTIIESRDAIFFDNEFPMKHTPSTSSQETVIPHEHFAPIEHNDQTPEGNPEDNIVDTLKSKRQRVAKSFGDDYIVYLVDNTPRTIEEAYLSPDADYWKEAVRSEMDSIMSNDTWEVVEYPYGCKPVGCKWVFKKKLRPDGTIEKYKVRLVAKDYTQKEGEDFFDTYSLVARLTTIRLLLALAASHGLLVHQMDVKTAFLNGELEEEIYMDQPDGYVLEGQEGMVCKLFKSLYGLKQAPKQWHEKFDTTLTSAGFVDNEADKCVYYRHGGGEGVILCLYVDDILIFWTSLNVIEEVKDYLSKSFEMKDLGEADVILNIKLPRGYEGGITLVQSHYVDKVLTPTPYDPSVLLRKNRRIARDQLRYSQIIGSLMYLASATRPNISFAVSKLSRFVSNPGDDHWQALERVMRYLKGTMSYGIHYTGYPKVLEGYSDSNWISDADEIKATSGYVFTLGGGAVSXKSYKQTILTRSTMEAELTALDTATVEAEWLRELLMDLPVVEKPVSAILMNCDNQIVIITVNSSKDNMKSSRHIKRRLKSVRKXKNSGVIALDYVQTANNLADQFTKGLPRNVIDSASRKMGLIPT

SEQ ID NO: 26157 - protein, 1569 aa, Oryza sativa
  unsure (1)..(1569): unsure at all Xaa locations
  Clone ID: TF_OsC22235_2.pep
MDTTSLPCHELIEGTPSHPLHMCSYLLDATGWGEGQQGRRRSSASQNMTGERLTHRVESVMRVSEFSSLPASCAGSSDHVVWLWGWTQLEHGVRSGLGGLATRSLGKFLTIGIRARFRKWTRDRALEGVFMPRRRSSSPIVRTPHDSGGRATGSGGGDRGLVIHRVVKEGGGSVNYPLLTKTNYNDWALLMKIKLQARCLWAAIEPDGVDVPLHEDRMALDAICSAVPPEMIGTLATKASAREAWECIKTMRVGNDRIRKASAQKVRAEYESLAFRGDETVEDFALRLTTIVNQLATLGDPEPADKVVEKYLRVARPRFNQLILSIETLLDISTLSMEEVTGRLKAAEDSGQSSSHTAGGKLYLTEEEWAERQKKKDQEAKRGDSGGSGGRGKRRGGRGRTGGGGTASPESTNSGSARKGDKCRNCGKLGHWAKDCRSKSKREEQAHVAQEDEEEHTLMLLTGGRVDTVDAAAPEGDTPTPPHQAVVELVEMKVFAALDDAADHDPGRWIMDSGASNHMTGSRMAFADLDTNITGNVRLGDGSVVRIAGRGTILFACKNGEHRTLSNTYYLPRLAANIISIGQLDETGFKVLAEDGIMRVWDEQRRLLARIPRTPGRLYMLDINLARPVCLAAHADEDAWRWHARLGHINFRALCKMGKEELVRGLPCLSQVDQVCEACLAGKHRRSPFPRQALCRSDEPLALLHGDLCGPITPATPSGNRYFLLLVDDYSRYMWVALLSTKDAAPAAIKRIQAAAERKSGRKLRALRTDRGGEFTSTQFAEYCAELGMRRELTAPYSPQQNGVVERRNQSVVGTARSMLKAKGLPGMFWGEAINTAVYLLNRSSSKGIGGKTPYALWNGVPPAVHHLRTFGCVAHVKTTTPNLKKLDDRSRPMIFVGYEPGSKAYRAYDPATRRVHISRDIVFDEAAQWDWDAEAAADLDTDFVVEYTTVYHPGSLSGTRQDAGEPPARSSSSPRTPSDSPTAGRTPSVHGDAPAVDFVSPPTGAAANLDADHDDAPLRFRTMDNVLGPAMLPGLANREVQEELMMVSGEEPATFAQAERDEDWRRAMLDEISSIEENKTWRLVDLPSGHRPIGLKWVYKLKKDAQGVVVKHKARLVAKGYVQRAGIDFDEVFAPVARLDSVRLLLALAAQEGWMVHHMDVKSAFLNGELIEEVYVVQPPGFEIDGQENKVYRLDKALYGLRQAPRAWNTKLDCTLKKLGFKQSPLEHGLYARGDGSGRLLVGVYVDDLVIVGGDSGMIKGFKEQMKAEFKMSDLGPLSFYLGIEVHQEAGIITLKQAAYASRIVEKAGLTGCNPCATPMEPRLKLSKESAGSLVDATEYRSLVGSLRYLVNTRPDLAYSVGYVSRFMEKPTDEHLAAVKRIIRYVAGTIHLGCRYVKEGEGGLQGYSDSDMAGDIDTRKSTTGVIFFLGKNPVSWQSQKQRVVALSSCESEYIAAATAACQGIWLARLLGDLRNAATEVVDLRVDNQSALALMKNPVFHDRSKHIQTKFHFIREAVENGEITPSYIGTEGQLADILTKPLSRIKFQELREQIGLATVRMRCXRLVSC

SEQ ID NO: 26158 - protein, 1533 aa, Oryza sativa
  Clone ID: TF_OsC22235_3.pep
MFPFFFRINAWEKNFWARHHGTPEHAPSAAAADIVVVPTTVDQTKPSRRANVFSVSSNLVCHGLATRSLGKFLTIGIRARFRKWTRDRALEGVFMPRRRSSSPIVRTPHDSGGRATGSGGGDRGLVIHRVVKEGGGSVNYPLLTKTNYNDWALLMKIKLQARCLWAAIEPDGVDVPLHEDRMALDAICSAVPPEMIGTLATKASAREAWECIKTMRVGNDRIRKASAQKVRAEYESLAFRGDETVEDFALRLTTIVNQLATLGDPEPADKVVEKYLRVARPRFNQLILSIETLLDISTLSMEEVTGRLKAAEDSGQSSSHTAGGKLYLTEEEWAERQKKKDQEAKRGDSGGSGGRGKRRGGRGRTGGGGIASPESTNSGSARKGDKCRNCGKLGHWAKDCRSKSKREEQAHVAQEDEEEHTLMLLTGGCVDTVDAAAPEGDTPTPPHQAVVELVEMKVFAALDDAADHDPGRWIMDSGASNHMTGSRMAFADLDTNITGNVRLGDGSVVRIAGRGTILFACKNGEHRTLSNTYYLPRLAANIISIGQLDETGFKVLAEDGIMRVWDEQRRLLARIPRTPGRLYMLDINLARPVCLAAHADEDAWRWHARLGHINFRALCKMGKEELVRGLPCLSQVDQVCEACLAGKHRRSPFPRQALCRSDVPLALLHGDLCGPITPATPSGNRYFLLLVDDYSRYMWVALLSTKDAAPAAIKRTQAAAERKSGRKLRALRTDRGGEFTSTQFAEYCAELGMRRELTAPYSPQQNGVVERRNQSVVGTARSMLKAKGLPGMFWGEAINTAVYLLNRSSSKGIGGKTPYALWNGVPPAVHHLRTFGCVAHVKTTTPNLKKLDDRSRPMIFVGYEPGSKAYRAYDPATRRVHISRDIVFDEAAQWDWDAEAAADLDTDFVVEYTTVYHPGSLSGTRQDAWEPPARSSSSPRTPSDSPTAGRTPSVHGDAPAVEFVSPPTGAAANLDADHDDAPLRFRTMDNVLGPAMLPGLANREVQEELMMVSGEEPATFAQAERDEDWRRAMLDEISSIEENKTWRLVDLPSGHRPIGLKWVYKLKKDAQGVVVKHKARLVAKGYVQRAGIDFDEVFAPVARLDSVRLLLALAAQEGWMVHHMDVKSAFLNGELIEEVYVVQPPGFEIDGQENKVYRLDKALYGLRQAPRAWNTKLDCTLKKLGFKQSPLEHGLYARGDGSGRLLVGVYVDDLVIVGGDSGMIKGFKEQMKAEFKMSDLGPLSFYLGIEVHQEAGIITLKQAAYASRIVEKAGLTGCNPCATPMEPRLKLSKESAGSLVDATEYRSLVGSLHYLVNTRPDLAYSVGYVSRFMEKPTDEHLAAVKRIIRYVAGTIHLGCRYVKEGEGGLQGYSDSDMAGDIDTRKSTTGVIFFLGKNPVSWQSQKQRVVALSSCESEYIAAATAACQGIWLARLLGDLRNAATEVVDLRVDNQSALALMKNPVFHDRSKHIQTKFHFIREAVENGEITPSYIGTEGQLADILTKPLSRIKFQELREQIGLATVRVRCVRLVSC

SEQ ID NO: 26159 - protein, 81 aa, Oryza sativa
  unsure (1)..(81): unsure at all Xaa locations
  Clone ID: TF_rsicem_14574.y1.abd.pep
VEGGSSANLVXKKNPHASHNNNNNVKPDIKPKATTNFKKKGKRKAKGNCFVCGKPGHXAKDCPERKDKKSANMVIIEGGGT

SEQ ID NO: 26160 - protein, 1824 aa, Oryza sativa
  Clone ID: TF_OsC1517_1130.pep
MKRILQMRSSSRSKPATMAVNASFSSHGFGEGHHIAQLRDLARFLGFSCPEYTGYSVDRVPPRCELSVYLYPRGGIHGAGLRPHHFTVARPPLQIEYQDLSWTALRRLAHDYSHRLGGSAFRQLPRLPSGHVVARYPCPYSESQPVLTRMVELSEAQATQHDLLLEAYRSLARRYAALEARLAEEGVTSVDTVSWDSGRLCHAIHLSSHSSRGSARTPSGPLSPSSRAPYSPVYSPYPNPVSPSYTPGHTPVASSRRGPRFIRTARKRVVGSSTVFRFDYPAPPPPVALAAVGPRQMASRPRRAARAPARFVFEEGRVEPEENHESANERSHHSNRSHRTASRNAEVEQPRRINRSHRTASRNAEMEQSHRSHRTASHNSGEERLPSPPHVENNMQHLMAVQTQILQGLAAAVAGFQHNAHGNGHPHMSNNRSKLTDFLRSRPPEFSQTIEPVEADDWLKDVDRKLNLVQCTPVEKTLYTSHQLRGPAADWWENYCNAHPEPTNIAWDEFATAFRAAHVPESTIDMKKEEFNRLKQGNSSVNEYLSMFNKLARYAPEEVDTDKKKIRKFLKGIAVGMRLQLLAHDFPTFQHMINKALLLEDARKEATEEYKKRKSNHQGNSSRGAPRPRYGQPMQYHQSVTQANRQPGYAPRPQMNRPAPQPQQRAPSGNTAPNSVTSFKSPQGPSAVQCFRCNQMGHYARQCPQNPTNTSSGHANGSTARTPTPAAAQSRPSSQASGQGSRASNNFGRGRMNHIQAETAQDAPDVVMGMFSVNSVPAIVLFDSGASHSFISQAFVKRNGWKTQNLRVPMIVHSPRSNIRATQICPEVNLRIEEVDFLAKPIVLDSQSLDIILGMDWLAKHKGQIDCAEKSITLQGPGGKQARFTSNTPTASRSILTCLQVTSLESVPIVCEYPDVEFAIELAPSTAPIAKRPYRMAANELAEVKRQIEELESKGYVRPSSSPWGAPVLLVKKKDGSERMVIDYRALNEVTIKNKYPLPRIDDLFDQLKGARVFSKIDLRSGYHQLKIRSEDIPKTAFSTRYGLYEFTVMSFGLTNAPAFFMNLMNKIFMEYLDQFVVVFIDDILIYSKNEEEHAEHMRLIMEKLRDHRLFAKFSKCEFWLDRVAFLGHVISSNGVEVDPSKVEAVLAWNPPKNVSEIRSFLGLAGYYRRFIEGFSKLARPMTELLKKEKKFQWSAACEDSFQEMKKRLTTAPVLTLPDIRKHFEIFCDASRQGLGCVLMQERKVVAYASRQLRPHEVNYPTHDLELAAVVHALKIWRHYLIGNRCEDYDLGIHYHPSKANVVADALSRKVYCNVAQIWPDQDRLCRELEKLRLTVVQSGVPASLTVQPTLESQIREAQKDDEGIKELIKRIQEKKDTDFSIDDQGTVWCGPCICVPAKKELRDLILKEAHESAYSIHPGSTKMYQDIKAYFWWAGMKRDVAEYVALCDICQRVKAEHQRPAGLLQPLPIPEWKWEEIGMDFITGLPRTPGGYDSIWVIVDRLTKSAHFVPVKTTFDGKKLAELYMTHVVCRFGCPKKIVSDRGTQFTSRFWKQLHEALGTDLNFSTAYHPQTDGQTERVNQILEDMLRACALDFEGTWDHCLPYAEFSYNNSYQASIQMSPNEAMFGRKCRTPLCWNEVGEALVFGPDILKSAEEQVKLIRERLKTAQNRQKNYADNRRRDLEFEKGDHVYLRVSPLRGMRFGMSGKLAPRYIGPYLVTARRGEVAYQLELPEGLADVHNVFHVSQLKKCLRVLEEQVPLGNIELEKNLTYKERPIKVLEEAERQTRRKTVKFYKVQWSNHSEDEATWEREDLLRAEFPELLP

SEQ ID NO: 26161 - protein, 1199 aa, Oryza sativa
  unsure (1)..(1199): unsure at all Xaa locations
  Clone ID: TF_OsC1517_1149.pep
MGNNRSKLTDFLRSRPPEFSQTVEPVEADDWLKDVDRKLNLVQCTPVEKTLYASHQLSGPAADWWENYCNAHPEPTNIAWDEFATAFRAAHVPEITIDMKKEEFNRLKQGNSSVNEYLSQFNKLARYAPEEVDTDKKKIRKFLKGIAVGMRLQLLAHDFPTFQHMINKALLLEDARKEATEEYKKRKSNHQGNSSRGAPRPRYGQPMQYHQSVTQANRQPGYAPRPQINRPAPQPQQRAPSSDTAPNSVTSFKSPQGPSAVQCFRCNQMGHYARQCPQNPTNTNSGHANGSTARTPTPAAAQSRPSSQASGQGSRASNNFGRGRVNHIQAETAQDAPDVVMGPGGKQVRFTPNTPTASRSILTCLQVTSLESVPIVCEYPDVFPEELTRMPPDREIEFAIELAPGTAPIAKRPYQMAANELAEVKRQIEELESKGYVRPSSSPWGAPVLLVKKKDGSERMVIDYRALNEVTIKNKYPLPRIDDLFDQLKGARVFSKIDLRSGYHQLKIRSEDIPKTTFSTRYGLYEFTVMSFGLTNAPAFFMNLMNKIFMEYLDQFVVVFIDDILIYSKNEEEHAEHLRLIMEKLRDHQLFAKFSKCEFWLDRVAFLGHVISSNACEDSFQELKKKLTTAPVLTLPDIRKYFEIFCDASRQGLGCVLMQEQKVVAYASRQLRPHEANYPTHDLELAAVVHALKIWRHYLIGNRCEVYTDHKSLKYIFTQTELNMRQRRWLELIKDYDLGIHYHPGKANVVADALSRKAYCNVAQIRPDQDHLCRELEKLRLTVIQSGVPASLTVQPTLESQIREAQKDDEGIKELIKRIQEKKDTNFSIDDQGTVWCGPRICVPAKKELRDLILKEAHESAYSIHPGSTKMYQDIKAYFWWAGMKRDVAEYVALCDICQRVKAEHQRPAGLLQPLPIPEWKWEEIGMDFITGLPRTPNGYDSIWXGCPKKIVSDRGTQFTSRFXNFSTAYHPQTDGQTERVNQILEDMLRACALDFEGTWDRCLPYAEFSYNNSYQASIQMSPNEAMFGRKCRTPLCWNEVGKALVFGPDILKSAEEQVKLIRERLKTAQNRQKNYADNRRRDLEFEKGDHVYLRVSPLRGMRRFGMSGKLAPRYIGPYLITARRCEVAYQLELPEGLANVHNVFHVSQLKKCLRVPEEQVPLGNIELEKNLTYKERPIKVLEEAERQTRRKTIKLYKV

SEQ ID NO: 26162 - protein, 1504 aa, Oryza sativa; identical to SEQ ID NO: 20394
  Clone ID: TF_OsC1517_1275.pep

SEQ ID NO: 26163 - protein, 1848 aa, Oryza sativa; identical to SEQ ID NO: 20417
  Clone ID: TF_OsC1517_1307.pep

SEQ ID NO: 26164 - protein, 1736 aa, Oryza sativa
  unsure (1)..(1736): unsure at all Xaa locations
  Clone ID: TF_OsC1517_1333.pep
MAVNSSFSSHGFGEGHHVAQLRDLARFLGFSCPEYTGYSVDRVPPHCELSVYLYPRGGIHGAGLRPHHFTVARPTLQIAYQDLSWTALRRLAHDYSHRLGGSAFRQLPRLPSGHSDARYPCPYSESQPVLTRMVELSEAQATQHDLLLEAYRSLARRYAALEARLAEEGVTSVDTISWDSGRLCHASHLSSHSSRGSARTPSGPRSPSSRAPYSPVYSPYPHPVSPSYTPGHTPVASSRRGPRFIRTARKRVVGSSTVFRFHYPAPPPPAARAAAGPRQTQILQGLAAAIAGFQHNTHGNGHPHMSNNRSKLTDFLRSRPPEFSQTVEPVEADDWLKDVDRKLNLVQCTPVEKTLYASHQLRGPAADWWENYCNAHPEPTNIAWDEFATAFRAAHMPESTIDMKKEEFNRLKQGNSSVNEYLSMFNKLARYAPEEVDTDKKKIRKFLKGIAVGMRLQLLAHDFPTFQHMINKALLLEDARKEAIEEYKKRKSNHQGNSSRGAPRPRYGQPMQYHQSVTQANRQPGYAPRPQMNHPAPQPQQRAPSGNTAPNSVTSFKSPQGPSAVQCFRCNQMGHYARQCPQNPTNTNSVHANGSTARTPTPATAQSRPSSQASGQGSRASNHFGRGRVNHIQAETAQDAPDVVMGMFSVNSVPAIVLFDSGASHSFISQAFVKRNGWKTQNLRVPMIVHSPGRNIRATQICPEVNLKIEEVDFLAKPIVLDSQSLDIILGMDWLAKHKGQIDCAEKSITLQGPGGKQVRFTPNTPTASRSILTCLQVTSLESVPIVCEYPDVFPEELTSMPPDREIEFAIELAPGTAPIAKRPYRMAANELAEVKRQIEELESKGYVRPSSSPWGAPVLLVKKKDGSERMVIDYRALNEVTIKNKYPLPRIDDLFDQLKGARVFSKIDLRSGYHQLKIRSEDIPKTAFSTRYGLYEFTVMSFGLTNAPAFFMNLMNKIFMEYLDQFVVVFIDDILIYSKNEEEHAEHLRLIMEKLRDHQLFAKFSKCKFWLDRVAFLGHVISSHGVEVDPSKVEAVLAWNPPKNVSEIRSFLGLAGYYRRFIEVFSKLARPMTELLKKENKFHWSASCEDSFQEMKKRLTTAPVLTLPDIRKDFEIFCDASRQGLGCVLMQERKVVAYASRQLRPHEVNYPTHDLELAAVVHALKIWRHYLIGNRCEVYTDHKSLKYIFTQTELNMRQRRWLELIKDYDLGIHYHPGKANVVADALSRKAYCNVAQIRPDHDHLCRELEKLRLTVVQSGVPASLTVQPTLESQIREAQKDNEGIKELIKRXIQEKKDTNFSIDDQGTVXKELRDLILKEAHESAYSIHPGSTKMYQDIKAYFWWAGMKRDVAEYVALCDICQRVKAEHQRPAGLLQPLPIPEWKWEEIGMDFITDLPRTPSGYDSIWVIVDRLTKSAHFVPVKTTFDGKKLAELYMTHVVCRFGCPKKIVSDRGTQFTSRFWKQLHEALGTDLNFSTAYHPHTDGQTERVNQILEDMLRACALDFEGTWDRCLPYAEFSYNNSYQASIKMSPNEAMFGRKCRTPLCWNEVGEALVFGPDILKSAEEQVKLIRERLKTAQSRQKNYADNRRRDLEFEKGDHVYLRVSPLRGMRRFGMSSKLAPRYIGPYLITARRGEVAYQLELPEGLADVHNVFHVSQLKKCLRVPEEQVPLGNIELERNLTYKERPIKVLEETERQTRRKTIKFYKVQWSNHSEDEATWEREDLLRAEFPELLP

SEQ ID NO: 26165 - protein, 1822 aa, Oryza sativa
  Clone ID: TF_OsC1517_1376.pep
MAVNASFSSHGFGEGHHVAQLRDLARFLGFSCPEYTGYSVDRVPPHCELSVYLYPRGGIHGAGLRPHHFTVARPTLQIAHRLGGSAFRQLPRLPSGHSDARYPCPYSESQPVLTRMVELSEAQATQHDLLLEAYRSLARRYAALEARLAEEGVTSVDTVSWDSGRLCHASHLSSHSSRGSARTPSGPRSPSSRAPYSPVYSPYPHPVSPSYTPGHTPVASSRRGPRFIRTARKRVVGSSTVFRFHYPAPPPPAARAAAGPRQVPPVPSRQPIDVSSTEEPTTGARFGFENGRVEPEENHESANEQSHHSNRSHRTASRNAEVEQPRRSSRSHRTVSRNAEMEQSHRSHRTASHNSGEERLPSPPHVENNMQHLMAVQTQILQGLAAAVAGFQHNAHGNGHPHMSNNRSKLTDFLRSRPPEFSQTVEPVEADDWLKDVDRKLNLVQCTPVEKTLYASHQLRGPAADWWENYCNAHPEPTNIAWDEFATAFRAAHVPESTIDMKKEEFNRLKQGNSSVNEYLSMFNKLARYAPEEVGTDKKKIRKFLKGIAALLLEDARKEATEEYKKRKSNHQGNSSRGAPCPRYGQPMQYHQSVTQANRQPGYAPRPQMNRPAPQPQQRAPSGNTAPNSVTSFKSPQGPSAVQCFRCNQMGHYARQCPQNPTNTNSGHANGSTARTPTPAAAQSRPSSQASGQGSRASNNFGRGRVNHIQAETAQDAPDVVMGMFSVNSVPAIVLFDSGASHSFISQAFVKRNGWKTQNLRVPMIVHSPGRNIRATQICPEVNLRIEEVDFLAKPIVLDSQSLDIILGMDWLAKHKGQIDCAEKSITLQGPGGKQVRFTSNTPTASRSILTCLQVTSLESVPIVCEYPDVFPEELTSIPPDREIEFAIELAPGTAPIAKRPYRMAANELAEVKRQIKELESKSYVRPSSSPWGAPVLLVKKKDGSERMVIDYRALNEVTIKNKYPLPRIDDLLDQLKGARVFSKIDLRSGYHQLKIRSEDIPKTAFSTRYGLYEFTVMSFGLTNAPAFFMNLMNKIFMEYLDQFVMVFIDDILIYSKNEEEHAEHLRLIMEKLRDHQLFAKFLKCEFWLDRVAFLGHVISSNGVEVDPSKVRAVLAWNPPKNVSEIRSFLGLARYYRRFIEGFSKLARPMTELLKKEKKFQWSAACEESFQEMKKRLTTAPVLTLPDIRKDFEIFCDASRQGLGCVLMQERKVVAYASRQLRPHEVNYPTHDLELAAMVHALKIWRHYLIGNRCEVYTDHKSLKYIFTQTELNMRQRRWLELIKDYDLGIHYHPGKANVVADALSRKAYCNVAQIRPDQDRLCRELEKLRLTVVQSGVPASLTVQPTLESQIREAQKDDEGIKELIKRIQEKKDINFSIDDQGTVWCGPRICVPAKKELRDLILKEAHESAYSIHPGSTKMYQDIKAYFWWAGMKRDVAEYVALCDICQRVKAEHQRPAGLLQPLPIPEWKWEEIGMDFITGLPRTPSGYDSIWVIVDRLTKSAHFVPVKTTFDGKKLAELYMTHVVCRFGCPNKIVSDRGTQFTSRFWKQLHEALGTDLNFSTAYHPQTDGQTERVNQILEDMLRACALDFEGTWDRCLPYEEFSYNNSYQASIQMSPNEAMFGRKCRTPLCWNEVGEALVFGPDILKAVEEQVKLIRERLKTAQNRQKSYADNRRRDLEFEKGDHVYLRVSPLHGMRRFGMSGKLAPRYIGPYLITARRGEVAYQLELPEGLADVHNVFHVSQLKKCLRVPEEQVPLGNIELEKNLTYKERPIKVLEEAERQTRRKTVKFYKVQWSNHSEDEATWEREDLLRAEFPELLP

SEQ ID NO: 26166 - protein, 1694 aa, Oryza sativa; identical to SEQ ID NO: 20402
  Clone ID: TF_OsC1517_1403.pep

SEQ ID NO: 26167 - protein, 1851 aa, Oryza sativa
  unsure (1)..(1851): unsure at all Xaa locations
  Clone ID: TF_OsC1517_1411.pep
MAVNASFSSHGFGEGHHVAQLRDLSRFLGFSCPEYTGYSVDRVPPHCELSVYLYPRGGIHGAGLRPHHFTVARPTLQIAYQDLSWTALRRLAHDYSHRLGGSAFRQLPRLPSGHSDARYPCPYSESQPVLTRMVELSEAQATQHDLLLEAYRSLARRYAALEARLAEEGVTSVDTISWDSGRLCHASHLSSHSSRGSARTPSGPRSPSSRAPYSPVYSPYPHPVSPSYTPGHTPVASSRRGPRFIRTARKRVVGSATVFRFHYPAPPPPAARAAAGPRQMASRPRRAARAPARFGVEDGRVEPEENHESANEQSHHSNRSHRTVSRNAEVEQPRRSSRSHRTVSRDAEMEQSHRSHRTASHNSGEERLPSPPHVETNMQHLMAVQTQILQGLTTAIASFQHNAHGNGHPHMGNNRSKLTDFLRSRPPEFSQTVEPVEADDWLKDVDRKLNLVQCTPVEKTLYASHQLRGPAADWWENYCNAHPEPTNIAWDEFATAFRAAHVPESTIDMKKEEFNRLKQGNSSINEYLSQFNKLARYAPEEVDTDKKKIRKFLKGIAVGMRLQLLAHDFPTFQHMINNALLLEDARKEATEEYKKRKSNHQGNSSRGAPRPRYGQPMQYHQSVTQANRQPGYAPRPQINRPAPQPQQRAPSGNTAPNSVTSFKSPXGPSAVQCFRCNQMGHYARQCPQNPTNTNSGHANGSTARTPTPAATQSRPSSQASGQGSRASNNFGRGRVNHIQAETAQDAPDVVMGMFSVNSVPAIVLFDSGASHSFISQAFVKRNGWKTQNLRVPMIVHSPGRNIRATQICPEVNLRIEEVDFLAKPIVLDSQSLDIILGMDWLAKHKGQIECAEKSITLQGPRGKQVRFTPNTPTASRSILTCLQVTSLESVPIVCEYPDVFPEELTRMPPDREIEFAIELAPGTAPIAKRPYRMAANELAEVKRQIEELESKGYVRPSSSPWGAPVLLVKKKDGSERMVIDYRALNEVTIKNKYPLPRIDDLFDQLKGARVFSKIDLRSGYHQLKIRSEDIPKTAFSTRYGLYEFTVMSFGLTNAPAFFMNLMNKIFMEYLDQFVVVFIDDILIYSKNEEEHAEHLRLIMEKLRDHQLFAKFSKCEFWLDRVAFLGHVISSNGVEVDPSKVEAVLAWNPPKNVSEIRSFLGLAGYYRRFIEGFSKLARPMTELLKKEKKFQWSAACEDSFQELKKRLTTAPVLTLLDIQKDFEIFCDASRQGLGCVLMQEQKVVAYASRQLRPHEANYPTHDLELAAVVHALKIWRHYLIGNRCEVYTDHKSLKYIFTQTELNMRQRRWLELIKDYDLGIHYHPGKANVVADALSRKAYCNVAQIRPDQDHLCGELEKLRLTVVQSGVPASLTVQPTLESRIREAQKDDEGIKELIKRIQEKKDTNFSIDDQGTVWCGPRICVPAKKELRDLILKEAHESAYSIHPGSTKMYQDIKAYFWWAGMKRDVAEYVALSDICQRVKAEHQRPAGLLQPLPIPEWKWEEIGMDFITGLPRTPNGYDSIWVIVDRLTKSAHFVPVKTTYDGKKLAELYMTHVVCRFGCPKKIVSDRGTQFTSRFWKQLHEALGTDLNFSTAYHPQTDGQTERVNQILEDMLRAYALDFEGTWDRCLPYAEFSYNNSYQASIQMSPNEAMFGRKCRTPLCWNEVGKALVFGPDILKSAEEQVKLIRERLKTAQNRQKNYADNRRRDLEFEKGDHVYLRVSPLRGMRRFGMSGKLAPRYIGPYLITARRGEVAYQLELPEGLADVHNVFHVSQLKKCLRVPEEQVPLGNIELEKNLTYKERPIKVLEEAERQTRRKTIKFYKVQWSNHSEDEATWEREDLLRAEFPDLLP

SEQ ID NO: 26168 - protein, 1851 aa, Oryza sativa; identical to SEQ ID NO: 20390
  Clone ID: TF_OsC1517_1425.pep

SEQ ID NO: 26169 - protein, 1487 aa, Oryza sativa
  unsure (1)..(1487): unsure at all Xaa locations
  Clone ID: TF_OsC1517_1433.pep
VLGFRPHVENNMQHIMAVQTQILQGITTAIAGFQHNAHGNGHPHVGNNRSKLTDFLRSRPPEFSQTVEPVEADDWLKDVDRKLNLVQCTPVEKTLYASHQLRGPAADWWENYCNAHPEPTNIAWDEFAMAFHAAHVPESTIDMKKEEFNRLKQGNSSVNEYLSQFNKLARYAPEEVDTDKKKIRKFLKGIAVGMRLQLLAHDFPTFQHMINKALLLEDARKEATEEYKKRKSQXNHQGNSSRGAPRPRYGQPMQYHQSVTQANRQPGYAPRPQMNRPAPPPQQRAPSGNTAPNSVTSFKSPQGPSAVQCFRCNQMGHYARQCPQNPTNTNSGHANGSTARTPTPAAAQSRPSSQASGXGSRASNHFGRGRVNHIQAETAQDAPDVVMGMFSVNSVPAIVLFDSGASHSFISQAFVKRNGWKTQNLRVPMIVHSPGRNIRATQICPEVNLRIEEVDFLAKPIILDSQSLDIILGMDWLAKHKGQIDCAEKSITLQGPGGKQVRFTPNTPTASRSILTCLQVTSLESVPIVCEYPDVFPEELTSMPPDREIEFAIELAPGTAPIAKRPYRMAANELAEVKRQIEELESKGYVRPSSSPWGALVLLVKKKDGSERMVIDYRALNEVTIKNKYPLPRIDDLFDQLKGARVFSKIDLRSGYHQLKIRSEDIPKTAFSTRYGLYEFTVMSFGLTNAPAFFMNLMNQIFLEYLDQFVVVFIDDILIYSKNEEEHTEHLRLIMEKLRDHQLFAKFSKCEFWLDRVAFLGHVISSNGVEVDPSKVEAVLAWNPPKNVSEIRSFLGLAGYYRRFIEGFSKLARPMTELLKKEKKFQWSAACEDSFQEMKKRLTTAPVLTLPDIRKDFEIFCDASRQGLGCVLMQERKVVAYASRQLRPHEVNYPTHDLELAAVVHALKIWRHYLIGNRCEVYTDHKSLKYIFTQTELNMRQRRWLELIKDYDLGIHYHPGKANVVADALSRKAYCNVAQIRPDQEHLCRELEKLRLTVVQSGVPASLTVQPTLESQIREAQKDDEGIKELIKRIQEKKDTNFSIDDQGTVWCGPRICVPAKKELRDLILKEAHESAYSIHPGSTKMYQDIKAYFWWAGMKRDVAEYVALCDICQRVKAEHQRPAGMLQPLPIPEWKWEEIGMDFITGLPRTPNGYDSIWVIVDRLTKSAHFVPVKTTYDGKKLAELYMTHVXCRFGCPKKIVSDRGTQFTSRFWKQLHEALGTDLNFSTAYHPXTDGQTERVNQILEDMLRACALDFEGTWDRCLPYAEFSYNNSYQASIQMSPNEAMFGRKCRTPLCWNEVGEALVFGPDILKSAEEQVKLIRERLKTAQNRXKNYADNRRRDLEFEKGDHVYLRVSPLRGMRRFGMSGKLAPRYIGPYLITARRGEVAYQLELPEGLADVHNVFHVSQLKKCLRVPEEQVPLGNIELEKNLTYKERPIKVLEEAEHQTRRKTIKFYKVQWSNHSEDEATWEREDLLRAEFPELFP

SEQ ID NO: 26170 - protein, 1851 aa, Oryza sativa; identical to SEQ ID NO: 20419
  Clone ID: TF_OsC1517_1463.pep

SEQ ID NO: 26171 - protein, 1363 aa, Oryza sativa; identical to SEQ ID NO: 20431
  Clone ID: TF_OsC1517_1473.pep

SEQ ID NO: 26172 - protein, 1658 aa, Oryza sativa
  unsure (1)..(1658): unsure at all Xaa locations
  Clone ID: TF_OsC1517_1474.pep
MAVNASFSSHGFGEGHHVAQLRDLAHFLGFSCPEYTGYSVDRVPPHCELSVYLYPRGGIHGAGLRPHHFTVARPTLQIAYQDLSWTALRRLAHDYSHRLGGSAFRQLPRLPSGHSDARYPCPYSEPQPVLTRMVELSEAQATQHDLLLEAYRSLARRYAALEARLAEEGVTSVDTISWDSGRLCHASHLSSHSSRGSTRTPSGPRSPSSRAPYSPVYSPYPHPVSPSYTPGHTPVASSRRGPRFIRTARKRVVGSATVFRFHYPAPLPPAARAAAGPRQMASRPRRAARAPAHFGFEDGRVEPEENHESANEQSHRSNRSHRTASRNAEMEQSHRSHHTVSHNSGEERLPSPPHVENNMQHLMAVQTQILQGLAAAVAGFQHNAHGNGHPHMSNNRSKLTNFLRSRPPEFSQTVEPVEADDWLKDVDRKLNLVQCTPVEKTLYASHQLRGPAADWWENYCNAHPEPTNIAWDEFATAFRAAHVPESTIDMKKEEFNRLKQGNSSVNEYLSMFNKLARYAPEEVDTDKKKIRKFLKGIAVGMRLQLLAHDFPTFQHMINKALLLEDARKEATEEYKKRKSNHQGNSFRGAPRPRYGQPMQYHQSVTQANRQPGYAPRPQMNHPAPQPQQRAPSGNTAPNSVTSFKSPQGPSAVQCFRCNQMGHYARQCPQNPTNNNSGHANGSTARTPTPAAAQSRPSSQASGQGSRASNNFGRGRVNHIQAETAQDALDVVMGPGGKQVRFTPNTPTASRSILTCLQVTSLESVPIVCEYPDVFPEELTRMPPDREIEFAIELAPGTAPIAKRPYRMAANELAEVKXQIEELESKGYVRPSSSPWGAPVLLVKKKDGSERMVXGYHQLKIRSEDIPKTAFSTRYGLYEFTVMSFGLTNAPAFFMNLMNKIFMEYLDQFVVVFIDDILIYSKNKEEHAEHLRLIMEKLRDHQLFAKFSKCEFWLDRVAFLGHVISSNGVEVDPSKVEAVLAWNPPKNVSEIRSFLGLAGYYRRFIEGFSKLARPMTELLKKEKKFQWSAACEDSFQEMKKRLTTAPVLTLPDIRKDFEIFCNASRQGLGCVLMQERKVVAYASRQLRPHEVNYPTHDLELAAVVHALKIWRHYLIGNRCEVYTDHKSLKYIFTQTELNMRQRRWLELIKDYDLGIHYHPGKANVVADALSRKAYCNVAQIRPDQDHLYRELDKLRLTVVQSGVPASLTVQPTLESQIREAQKDDEGIKELIKRIQEKKDANFSIDDQGTVWCGPRICVPAKKELRDLILKEAHESAYSIHPGSTKMYQDIKAYFWWAGMKRDVAEYIALCDICQRVKAEHQRPAGLLQPLPIPGWKWEEIGMDFITGLPRTPSGYDSIWVIVDRLTKSAHFVPVKTTYDGRKLAELYITHVVCRFGCPKKIVSDRGTQFTSRFWKQLHEALGTDLNFSTAYHPQTDGQTERVNQILEDMLRACALDFEGTWDRCLPYAEFSYNNSYQASIQMSPNEAMFGRKCRTPLCWNEVGEALVFGPDILKRDLEFEKGDHVYLRVSPLRGMKRFGMSGKLAPRYIGPYLITARRGEVAYQLELPEGLADVHNVFHVSQLKKCLRVPEEQVPLGNIELEKNLTYKERPIKVLEEAERQTRRKTIKFYKVQWSNHSEDEATWEREDLLRAEFPELLP

SEQ ID NO: 26173 - protein, 1347 aa, Oryza sativa; identical to SEQ ID NO: 20427
  Clone ID: TF_OsC1517_1486.pep

SEQ ID NO: 26174 - protein, 637 aa, Oryza sativa
  unsure (1)..(637): unsure at all Xaa locations
  Clone ID: TF_OsC1517_1505.pep
MASRPRRAARAPARFGVEDGRVEPEENHESANEQSHHSNRSHRTVSRNAEVEQPRRSSRSHRTVSRDAEMEQSHRSHRTASHNSGEERLPSPPHVETNMQHLMAVQTQILQGLTTAIASFQHNAHGNGHPHMGNNRSKLTDFLRSRPPEFSQTVEPVEADDWLKDVDRKLNLVQCTPVEKTLYASHQLRGPAADWWENYCNAHPEPTNIAWDEFATAFRAAHVPESTIDMKKEEFNRLKQGNSSXNEYLXSQFNKLARYAPEEVDTDKKKIRKFLKGIAVGMRLQXLAHDFPTFQHMINNALLLEDARKEATEEYKKRKSNHQGNSSRGAPXPRYGQPMQYHQSVTQANRKPGYAPRPQINRXAPQPQQRAPSGNTAPNSVTSFKSPXGPSAVQCFRCNQMGHYARQCPQNPTNTNSGHANGSTARTPTPAATQSRPSSQASGQGSRASNNFGRGRVNHIQAETAQDAPDVVMGMFSVNSVPAIVLFDSGASHSFISQAFVKRNGWKTQNLRVPMIVHSPGRNIRATQICPEVNLRIEEVDFLAKPIVLDSQSLDIILGMDWLAKHKGQIECAEKSITLQGPRGKQVRFTPNTPTASRSILTCLQNPPDREIEFAIELAPGTAPIAKRPYRMAANEL

SEQ ID NO: 26175 - protein, 1629 aa, Oryza sativa
  unsure (1)..(1629): unsure at all Xaa locations
  Clone ID: TF_OsC1517_1525.pep
MVELSEAQATQHDLLLEAYRSLARRYAALEACLAEEGVTSVDTISWDSGRLCHASHLSSHSSRGSALTPSGPRSPSSRAPYSPVYSPYPHPVSPSYTPGHTPVASSRRGPRFIRTARKRVVGSSNVFRFHYPAPPPPAARAAAGPRQMASRPRRAARAPARFGFEDGRVEPEENHESANEQSHHSNRSHRTVSRNAEVEQPRHSSRSHRTVSRDAEMEQSHRSHRTASHNSGEERLPSPPHVETNMQHLMAVQTQILQGLTTAIASFQHNAHGNGHPHMGNNRSKLTDFLRSRPPEFSQTVEPVEADDWLKDVDRKLNLVQCTPVEKTLYASHQLRGPAADWWENYCNAHPEPTNIAWDEFATAFRAAHVPESTIDMKKEEFNRLKQGNSSVNEYLSQFNKLARYAPEEVDTDKKKIRKFLKGIAVGMRLQLLAHDFPTFQHMINKALLLEDARKEATEEYKKRKSNHQGNSSRGAPRPRYGQPMQYHQSVTQANRQPGYAPRPQINRPAPQPQQRAPSSDTAPNSVTSFKSPQGPSAVQCFRCNQMGHYARQCPQNPTNTNSGHANGSTARTPTLAAAQSRPSSQASGQGSRASNNFGRGRVNHIQAETTQDAPDVVMGMFSVNSVPAIVLFDSGASHSFISQAFVKRNGWKTQNLRVPMIVHSPGRNIRATQICPEVNLRIEEVDFLAKPIVLDSQSLDIILGMDWLAKHKGQIDCAEKSITLQGPGGKQVRFTPNTPTASRSILTCLQVTSLESVPIVYEYPDKKDGSERMVIDYRALNEVTIKNKYPLPRIDDLFDQLKGARVFSKIDLRSGYHQLKIRSEDIPKTAFSTRYGLYEFTVMSFGLTNAPAFFMNLMNKIFMEYLDQFVMVFIDDILIYSKNKEEHAEHLRLIMEKLRDHQLFAKFSKCEFWLDRVAFLGHVISSNGVEVDPNKVEAVLAWNPPKNVSEIRSFLGLAGYYRRFIEGFSKLARPMTELLKKEKKFQWSAACEDSFQELKKRLTTAPVLTLPDIRKDFEIFCDASRQGLGCVLMQEQKVVAYASRQLRPHEANYPTHDLELAAVVHALKIWRHYLIGNRCEVYTDHKSLKYIFTQTELNMRQRRWLELIKDYDLGIHYHPGKANVVADALSRKAYCNVAQIRPDQDHLCRELEKLRLTVVQSGVPASLTIQPTLESQIREAQKDDEGIKELIKRIQEKKDTNFSIDDQGTVWCGPRICVPAKKELRDLILKEAHESAYSIHPGSTKMYQDIKAYFWWAGMKRDVAEYVALCDICQRVKAEHQRPAGLLQPLPIPEWKWEEIGMDFITGLPRTPNGYDSIWVIVDRLTKSAHFVPVKTSYDGKKLAELYMTHVVCRFGCPKKIVSDRGTQFTSRFWKQLHEALGTDLNFSTAYHPQTDGQTERVNQILEDMLRACALDFEGTWDRCLPYAEFSYNNSYQASIQMSPNEAMFGRKCRTPLCWNEVGKXTAQNRQKNYADNRRRDLEFEKGDHVWRSXYLRVSPLRGMRRFGMSGKLAPRYIGPYLITARRGEVAYQLELPEGLADVHNVFHVSQLKKCLRVPEEQVPLGNIELEKNLTYKERPIKVLEEAERQTRRKTIKFYKVQWSNHSEDEATWEREDLLRAEFPDLLP

SEQ ID NO: 26176 - protein, 1382 aa, Oryza sativa; identical to SEQ ID NO: 20389
  Clone ID: TF_OsC1517_1552.pep

SEQ ID NO: 26177 - protein, 1680 aa, Oryza sativa
  unsure (1)..(1680): unsure at all Xaa locations
  Clone ID: TF_OsC1517_1556.pep
MTVLLLYNKETSVAVIFYLPVIPALFPGTGIDXQMAVNASFSSHGFGEGHHVAQLRDLARFLGFSCPEYTGYSVDRVPPHCELSVYLYPRGGIHGAGLRPHHFTVARPTLQIAHRLGGSAFRQLPRLPSGHSDARYPCPYSESQPVLTRMVELSEAQATQHDLLLEAYRSLARRYAALEARLAEEGVTSVDTISWDSGRLCHASHLSSHSSRGSARTPSGPRSPSSRAPYSPVYSPYPHPVSPSYTPGHTPVASSRRGPRFIRTARKRVVGSSTVFRFHYPAPPPPAARAAAGPRQVPPVPSRQPIDVSSTEEPTTGARFGFEDGRVEAEANHESANEQSHHSNRSHRTISRNAEVEQPRRSNRSHRTASRDAEMEQSHRSHRTASHNSGEERLPSPPHVENNMQHLMAVQTQILQGIAAAVAGYQHNAHGNGHPHMGNNRSKLTDFLRSRPPEFSQTVEPVEADDWLKDVNRKLNLVQCTPVEKTLYASHQLRGPAADWWENYCNAHPEPTNIAWDEFATAFCAAHVPESTIDMKKEEFNRLKQGNSSVNEYLSMFNKLARYAPEEVDSDKKKIRKFLKGIAALLLEDARKEATEEYKKRKSNHQGNSSQGAPRPRYGQPMQYHQSVTQANRQPGYAPRPQMNRPAPQPQQRAPSGNIAPNSVTSFKSPQGPSAVQCFRCNQMGHYARQCPQNPTNTNSGHANGSTARTPTPAAAQSRPSTQASGQGSRASNHFGRGRVNHIQAETAQDAPDVVMGMFSVNSVPAIVLFDSGASHSFISQAFVKRNGWKTQNLRVPMIVHSPGRNIRATQICPEVNLRIEEIDFLAKPIVLDSQSLDNILGMDWLAKHKGQIDCAEKSITLQGPGGKQVRFTPNTPTASRSILTCLQVTSLESVPIVCEYPDVFPEELTRMPPDREIEFAIELAPGTAPIAKKPYRMAANELAEIKRQIEELESKGYVRPSSSPWGAPVLLVKKKDGSERMLKIRSEDIPKTAFSTRYGLYEFTVMSFRLTNAPAFFMNLMNKIFMEYLDQFVVVFIDDILIYSKNEEEHAEHLRLIMEKLRDHQLFAKFSKCEFWLVRVAFLGHVISSNGVEVDPSKVEAVLAWNPPKNVSEIRSFLGLAGYYRRFIEGFSKLARPMTELLKKEKKFQWSAACEDSFQEMKKRLTTAPVLTLPDIRKDFEIFCDASRQGLGCVLMQERKVVAYASRQLRPHEVNYPTHDLELAAVVHALKIWRHYLIGNRCEVYTDHQSLKYIFTQTELNMRQRRWLELIKDYDLGIHYHPGKAKVVADALSRKAYHNVAQIRPDQDHLCRELEKLRLTVVQSGVPASLTVXPTLESQIREAQKDDEGIKELIKGIQEKKDTNFSIDNQGTVWCGPRICVPAKKELRDLILKEAHESAYSIHPGSTKMYQDIKAYFWWAGMKRDVTEYVALCDICQRVKAEHQRPVGLLQPLPTPEWKWEEIGMDFITGLPRTPNGYDSIWVIVDRLTKSAHFVPVKITYDGKKLAELYMTYVVCRFGCPKKIVSDRGTQFTSSYQASIQMSPNEAMFGRKCRTPLCWNEVGEALVFGPDILKSAEEQVKLIRERLKTAHRQKNYADNRRCDLEFEKGDHVYLRVSPLRALASKGQTGSGRPRSVPPRARDPPRAVRPGPRAVSLVHRSPLSSPPVRALGRLLGRPAH

SEQ ID NO: 26178 - protein, 1595 aa, Oryza sativa
  Clone ID: TF_OsC1517_1561.pep
MAVNASFSSHGFGEGHHVAQLRDLARFLGFSCPEYTGYSVDRVPPHCELSVYLYPRGDARYPCPYSESQPVLTRMVELSEAQATQHDLLLEAYRSLARRYAALEACLAEEGVTSVDTISWDSGRLCHASHLSSHSSRGSARTPSGPRSPSSRAPYSPVYSPYPHPVSPSYTPGHTPVASSRRGPRFIRTARKRVVGSSTVFRFHYPAPPPLAMASRPRRTARAPARFGFEDGRVEPEANHESANEQSHHSNRSHRTVSRNAEVEQPRRSSRSHRTVSRDAEMEQSHRSHHTASHNSGEERLPSPPHVENNMQHLMAVQTQILQGLTTAIASFQHNAHGNGHPHMGNNRSKLTDFLRSRPPEFSQTVEPVEADDWLKDVDRKLNLVQCTPVEKTLYASHQLRGPAADWWENYCNAHLEPTNIAWDEFATAFRAAHVPESTIDMKKEEFNRLKQGNSSVNEYLSQFNKLARYAPEEVDTDKKKIRKFLKGIAVGMRLQLLAHDFPTFQHMINKALLLEDARKEATEEYKKRKSNHQGNSSRGAPRPRYGQPMQYHQSVTQANRQPGYAPRPQMNRPAPPPQQRAPSGNTAPNSVTSFKSPQGPSAVQCFRCNQMGHYARQCPQNPTNTNSGHANGSTARTPTPAAAQSRPSSQASGQGSRASNNFGRGRVNHIQAETAQDAPDVVMGPGGKQIRFTPNTPTASRSILTCLQVTSLESVPIVCAYPDVFPEELTRMPPDREIEFAIELALGTAPIAKRPYRMAANELAEVKRQIEELESKGYVRPSSSPWGAPVLLVKKKDGSERMVIDYRALNEVTIKNKYPLPRIDDLFDQLKGARVFSKIDLRSGYHQLKIRSEDIPKTAFSTRYGLYEFTFVVVFIDDILIYPKNVSEIRSFLGLAGYYRRFIKGFSKLARPMTELLKKEKKFQWSAACEDSFQEMKKRLTTAPVLTLPDIRKDFEIFCDASRQGLGCVLMQERKVVAYASRQLRPHEVNYPTHDLELAAVVHALKIWRHYLIGNRCEVYTDHKSLKYIFTQTELNMRQRRWLELIKDYDLGIHYHPGKANVVADALSRKAYCNVAQIRPDQDHLCRELEKLRLTMVQSGVPASLTVQPTLESQIREAQKDDEGIKELIKRIQEKKDTNFSIDDQGTVWCGPRIYVPAKKELRDLILKEAHESAYSIHPGSTKMYQDIKAYFWWAGMKRDVAEYVALCDICQRVKAEHQRPAGLLQPLPIPEWKWEEIGMDFITGLPRTPSGYDSIWVIVDRLTKSAHFVLVKTTYDGKKLAELYMTHVVCRFGCPKKIVSDRGTQFTSRFWKQLHEALGTDLNFSTAYHPQTDGQTERVNQILEDMLRACALDFEGTWDRCLPYAEFSYNNSYQASIQMSPNEAMFGRKCRTPLCWNEVGEALVFGPDILKSAEEQVKLIRERLKTAQNRQKNYADNRRRDLEFEKGDHVYLRVSPLHGMRRFGMSGKLAPRYIGPYLITARRGEVAYQLELPEGLADVHNVFHVSQLKKCLRIPEEQVPLVSEPEDPQCEDFEDQAPDLEQGKPPLNILSLLLVWDPSRRHMVNLCRLSKCLVMKAWRSPDVADPHGLDDPG

SEQ ID NO: 26179 - protein, 1598 aa, Oryza sativa
  Clone ID: TF_OsC1517_1568.pep
MAANSIRAQELAWVVELSMMANSVQYMASRPRRAARAPARFGFEDGRVEPEENHESANEQSHHSNRSHRTVSRNAEVEQPRRSSRSHRTVSRDAEMEQSHRSHRTASHNSGEERLPSPPHVETNMQHLMAVQTQILQGLTTAIASFQHNAHGNGHPHMGNNRSKLTDFLRSRPLEFSQTVEPVEADDWLKDVDRKLNLVQCTPVEKTLYASHQLRGPTADWWENYCNAHPEPTNIAWDEFATAFRAAHVPESTIDMKKEEFNRLKQGNSSVNEYLSQFNKLARYAPEEVDTDKKKIRKFLKEIAVGMRLQLLAHDFPTFQHMINKALLLEDARKEATEEYKKRKSNHQGNSSRGAPRPRYGQPMQYHQSVTQANRQPGYAPRPQINRPAPQPQQRAPSSDTAPNSVTSFKSPQGPSAVQCFRCNQMGHYARQCPQNPTNTNSGHANGSTSRTPTPAAAQSRPSSQASGQGSRASNNFGRGRVNHIQAETAQDAPDVVMGMFSVNSVPAIVLFDSGASHSFISQAFVKRNGWKTQNLRVPMIVHSPGSNIRATQICPEVNLRIEEVDFLAKPIVLDSQSLDIILGMDWLAKHKGQIDCAEKSITLQGPGGKQVRFTPNTPTASRSILTCLQVTSLESVPIVCEYPDVFPEELTRMPPDQEIEFAIELAPGTAPIAKRPYRMAANELAEVKRQIEELESKGYVRPSSSPWGAPVLLVKKKDGSERMVIDYRALNEVTIKNKYPLPRIDDLFDQLKGARVFSKIDLRSGYHQLKIRSEDIPKTAFSTRYGLYEFTVMSFGLTNAPAFFMNLMNKIFMEYLDQFVVVFIDDILIYSKNEEEHAEHLRLIMEKLRDHRLFAKFSKCEFWLDRVAFLGHMISSNGVEVDPSKVEAVLAWNPPKNVSEIRSFLGLAGYYRRFIEGFSKLARPMTELLKKEKKFQWSAACEDSFQELKKRLTTAPVLTLPDIRKDFEIFCDASRQGLGCVLMQEQKVVAYASRQLRPHEANYPTHDLELAAVVHALKIWRHYLIGNRCEVYTDHKSLKYIFTQTELNMRQRRWLELIKDYDLGIHYHPGKANVVADALSRKAYCNVAQIRPDQDHLCRELVKLRLTMVQSGVPASLTVQPTLESQIREAQKDDEGIKELIKRIQEKKDTNFSTDDQGTVWCGPRICVPAKKELRDLILKEAHESAYSIHPGSTKMYQDIKAYFWWAGMKRDVAEYVALCDICQRVKPEHQRPAGLLQPLPIPEWKWEEIGMDFITGLPRTPNGYDSIWVIVDRLTKSAHFVPVKTTYDGKKLADLYMTHVVCRFGCPKKIVSDRGTQFTSRFWNQLHEALGTDLNFSTAYHPQTDGQTERVNQILEDMLRACALDFEGTWDRCLPYAKFSYNNSYQASIQMSPNEAMFGRKCRTPLCWNEVGEALIFGPDILKSAEVQVKLIRERLKTAQNRQKNYADNRRHDLEFEKGDHVYLRVSPLRGMRRFGMSGKLAPRYIGPYLITARRGEVAYQLELPEGLADMHNVFHVSQLKKCLRVPEEQVPLGNIELEKNLTYKERPIKVLEETERQTRRKTIKFYKVQWSNHSEDETTWEREDLLRAEFPDLLP

SEQ ID NO: 26180 - protein, 1792 aa, Oryza sativa
  Clone ID: TF_OsC1517_1573.pep
MMAVNASFSSHGFGEGHHVAQLRDLARFLGFSCPEYTGYSVDRVPPHCELSVYLYPRGGIHGAGLCPHHFTVARPTLQIAYQDLSWTALRRLAHDYSHRLGGSAFRQLPHLPSGHSDARYPCPYSESQPVLTRMVELSEAQATQHDLLLEAYRSLARRYAALEARLAEEGVTSVDTISWDSGRLCHASHLSSHSSRGSARTPSGPRSPSSRAPYSPVYSPYPHPVSPSYTPGHTPVASSRRGPRFIRTARKRVVGSSTVFRFHYPAPPPPAARAAAGPRQMASRPRRAARAPARFGFEDGRVEPEENHESANEQSHHSNRSHRTVSRNTEVEQPRRSSRSHRTVSRDAEMEQSHRSHRTASHNSGEERLPSPPHVETNMQHLMAVQTQILQGLTTAIASFQHNAHGNGHPHMGNNRSKLTDFLRSRPPEFSQTVEPVEADDWLKDVDRKLNLVQCTPVEKMLYAFHQLRGPAADWWENYCNAHPEPTNIAWDEFATAFRAAHVPESTIDMKKEEFNRLKQGNSSVNEYLSQFNKLARYAPEEVDTDKKKIRKFLKGIAVGMRLQLLAHDFPTFQHMINKALLLEDARKEATEEYKKRKSNHQGNSSRGTPRPRYGQPMQYHQSVTQANRQPGYTPRPQMNRPAPPPQQCAPSGNTAPNSVTSFKSPQGPSAVQCFRCNQMGHYARQCPQNPTNTNSGHANGSTARTPTPAAAQSRPSSQASRQGSRASNHFGRGRVNHIQAETAQDAPDAVMGMFSVDSVPAIVLFDSGASHSFISQAFVKRNGWKTQKLRVPMIVHSPGRNIRATQICPEVNLRIEEVDFLAKPIVLDSQSLDIILGMDWLAKHKGQIDCAEKSITLQGPAGKQVRFTPNTPTASRSILTCLQVTSLESVPIVYEYPDVFLEELTRMPPDREIEFAIELAPGTAPIAKRPYRMAANELAEVKRQIEELESKGYVRPSSSPWGAPVLLVKKKDGSERMVIDYRALNEVTIKNKYPLPRIDDLFDQLKGARVFSKIDLRSGYHQLKIRSEDIPKTAFSTRYGLYEFTVMSFGLTNAPAFFMNLMSKIFMEYLDQFVVVFIDDILIYSKNEEEHAEHLRLIMEKLRDHQLFAKFSKCEFWLDRVAFLGHVISPNGVEVDPSKVEAVLAWNPPKNVSEIRSFLGLAGYYRRFIEGFSKLARPMTELLKKEKKFQWSAACEDSFQEMKKRLTTAPVLTLPDIRKDFEIFCDASRQGLGCVVMQERKVVAYASRQLRPHEVNYPTHDLELAAVVHALKIWRHYLIGNRCEVYTDHKSLKYIFTQTELNMRQRRWLELIKDYDLGIHYHPGKANVVADALSRKAYCNVAQIRPDQDHLCRELEKLRLTVVQSGVPASLTVQPTLESQIREAQKDDEGIKELIKRIQEKKDTNFSIDDQGTVWCGPRICVPAKKELRDLILKEAHESAYSIHPGSTKMYQDIKAYFWWAGMKRDVAEYVALCDICQRVKAEHQRPAGLLQPLPIPEWKWEEIGMDFITGLPRTPNGYDSIWVIVDRLTKSAHFVPVKTTYDGKKLAELYMTHVVCRFGCPKKIVSDRGTQFTSRFWKQLHEALGTDLNFSTAYHPQTDGQTERVGEALIFGPDILKSAEEQVKLIRERLKTAQNRQKNYADNRRHDLEFEKGDHVYLRVSPLRGMRRFGMSGKLAPRYIGPYLITARRGEVAYQLELPEGLADVHNVFHVSQLKKCLRVPEEQVPLGNIELEKNLTYKERPIKVLEEAKRQTRRKTIKFYKVQWSNHSEDEATWEREDLLRAEFPELLP

SEQ ID NO: 26181 - protein, 1621 aa, Oryza sativa
  unsure (1)..(1621): unsure at all Xaa locations
  Clone ID: TF_OsC1517_1576.pep
MGYSVDVFPLAVSSLCTFTLAEVYTELAFAHTTSLWLGPPSRSRTRTSPGLRFVAWPTTTATVSGALPSGSSHVFLLATQMPARFSFEEGRVEPEANHESANEQSHHSIRSHHTASRNAEVEQPHRSNRSHHTASRNAEVEQSHRSHRTASHNSGEERIPSPPHVENNMQHLMTVQTQILQGLAAAIAGFQHNAHGNGHPHMGNNRSKLTDFLRSRPPEFSQTVEPVEADDWLKDVDRKLNLVQCTPVEKMLYASHQLRGHAADWWENYCNAHPEPTNIAWDEFATAFRGAHVPESTIDTKKEEFNRLKQGNNSVNEYLSQFNKLARYAPKEVDTDKKKIRKFLKGIAVGMRLQLLAHDFPTFQHMINKALLLEDARKEATEEYKKRKFNHQGNSSRGAPRPRYGQPMQYHQSVTQANRQPGYAPRPQMNRPAPQPQQHAPSGNTAPNSVTSFKSPLGLSAVQCFRCNQMGHYARQCPQNPTNTNSGHANGSTARTPTPAAAQSRPSSQASGQGSRASNNFGRGRVNHIQAETAQDAPDVVMVHSPGRNIRATQICPEVNLRIEEVDFLAKPIVLDSQSLDIILGMDWLAKHKGQIDYAERSITLQGPRGKQVCFTTNTPTASRSILTYLQVTSLESVPIVCEYPDVFPEELTSMPPDREIEFAIELAPGTAPIAKRPYQMAANELAEVKRQIEELESKGYVRPSSSPWGAPVLLVKKKDGSERMVIDYRALNEVTIKNKYALPRIDDLFDQLKGARVFSKIDLRSGYHQLKIRSEDIPKTAFSTRYGLYEFTVMSFGITNAPAFFMNLMNKIFMEYLDQFVVVFIDDILIYSKNEEEHAEHLRLIMGKLRDHQLFAKFSKCEFWLDRVAFLGHVISFNGVEVDPSKVGAVLAWNPPKNVSEIHSFLGLAGYYRRFIEGFSKLARPMTELLKNEKKFQWSTACEDSFQEMKKRLTTAPVLTLPDIRKDFEIFCDASRQGVGCVLMQERKVVAYASRQLRPHEVNYPTHDLELAAVVHALKIWRHYLIGNRCEVYTDHKSLKYIFTQTELNMRQRRWLELIKDYDLGIHYHPGKANVVADALSRKTYYNVAQIWPDQDRLCGELEKLRLTVVQSGVPASLTVQPTLESQIREAQKDDEGIKELIKRIQEKKDTDFSXIDDQGTVXKELRDPILKEAHESAYSIHPGSTKMYQDIKAYFWWAGMKRDVAEYVALCNICQRVKAENQRPAGLLQPLPIPEWKWEEIGMDFITGLPRTPSGYDSIWVIVDRLTKSAHFVPVKTTFDGKKLAELYMTHVVCRFGCPKKIVSDRGTQFTSRFWKQLHEALGTDLNFSTAYHPQTDGQTERVNQILEDMLPLVTSLTSRQSDLVTGLGLVAASAHAPASVSNSVGPSKLQNGSLRSEVTTSFADPSLYPLPLQIHRCHLSVPPDLAYLRSEAAVGTTKSLAILMKALILLVPARVAQGLGDTGVASLPSRPIISSHLYLIAAQASHQKTVPFFSSLKVLRLEPVARSTMGQPPRHRVESRWRSFREGTGDQRHARRSLRVASMQAERRASSQRSRNYYVACGKLGNDNTCGGDGILTGIWGEARVTKKSPHLSGNEWKNTNIYISYRNVGNNLTIEKK

SEQ ID NO: 26182 - protein, 1851 aa, Oryza sativa; identical to SEQ ID NO: 20420
  Clone ID: TF_OsC1517_1586.pep

SEQ ID NO: 26183 - protein, 1522 aa, Oryza sativa
  Clone ID: TF_OsC1517_1607.pep
MASRPRRAARAPARFGFEEGRVEPEENHESANERSHHSNRSHRTASRNAEVEQPRRSNRSHHTASRNAEMEQSHRSHRTASHNSGEERLPSPPHVENNMQHLMAVQTQILQGLAAAIAGFQHSAHGNGHPHMGNNRSKLTDFLRSRPPEFSQTVEPVEADDWLKDVDRKLNLVQCTPVEKTLYASHQLRGPAADWWENYCNAHPEPTNIAWAEFATAFRAAHVPESAIDMKKEEFNKLKQGNNSVNEYLSLFNKLARKEATEEYKKRKSNHQGNSSRGAPRPRYGQPMQYHQSVTQANRQPGYAPRPQMNRQAPQPQQRAPSGNTAPNNVTSFKSSLGPSAVQCFRCNQMGHYARQCPQNPTNTNSGHANGSTARTPTPAAAQSRPSSQASGQGSRVSNNFGRGRVNHIQAETAQDAPDVVMGMFSVNSVPAIVLFDSGASHSFISQAFVKRNGWKTQNLRVPMIVHFPGRNIRATQICPEVNLRIEEVDFLAKPIVLDSQSLDIILGMDWLAKHKGQIDCAEKSITLQGPGGKQVRFTSNTPTASRSILTCLQVTSLESVPIVCEYPNVFPEELTSMPPDREIEFAIELAPGTAPIAKRPYRMAANELAEVKRQIEELESKGYVRPSSSPWGAPVLLVKKKDGSERMVIDYRALNEVTIKNKYPLPRIDDLFDQLKGARVFSKIDLRSGYHQLKIRSEDIPKTAFSTRYGLYEFTVMSFGLTNAPAFFMNLMNKIFMEYLDQFVVVFINDILIYSKNEEEHAEHLRLIMEKLRDHQLFAKFSKYEFWLDRVAFLGHVISPNGVEVDPSKVEAVLAWNPPKNVSEIRSFLGLAGYYRRFIEGFSKLARPMTELLKKEKKFQWSTACEDSFQEMKKRLTTAPVLTLPDIRKDFEIFCDASRQGLGCVLMQERKVVAYASRQLRPHEVNYPTHDLELAAVVHALKIWRHYLIGNRCEVYTDHKSLKYIFTQTELNMRQRRWLELIKDYDLGIHYHPGKANVVADALSRKTYCNVDQIRPDQDRLCRDLEKLRLTVVQSGVAASLTVQPTLESQIRKAQKDDEGIKELIKRIQEKKDTDFSIDDQGTVWYGPRICVPAKKELRDLILKEAHESAYSIHPGSTKMYQDIKAYFWWAGMKRDVAEYVALCDICQRVKAEHQRPAGLLQPLPIPEWKWEEIGMDFITGLPRTPSGYDSIWVIVDRLTKSAHFVPMKTTFDGKKLAELYMTHVVCRFGCPKKIVSDRGTQFTSRFWKQLHEALGTDLNFSTAYHPQTDGQTERVNQILEDMLRACALDFEGTWDRCLPYAEFSYNNSYQASIQMSSNEEMFGRKCRTPLCWNEVGEALVFGPDILKAAEEQVKLIRERLKAAQNRQKNYVDNRRRDLEFEKGDHVYLRVSPLRGIRRFGMSGKLAPRYIGPYLITARRGEVAYHLELPEGLADVHNVFHVSQLKKCLRVPEEQVPLGNIELEKNLTYKERPIKVLEEAERQTRRKTIKFYKVQWSNHSEDEATWEQEDLLRAEFPELLP

SEQ ID NO: 26184 - protein, 1530 aa, Oryza sativa
  unsure (1)..(1530): unsure at all Xaa locations
  Clone ID: TF_OsC1517_1610.pep
APRRRHLGRDRVKQTPVRRFPPPPRARGPPRAVRLRVGLPHRVLREPRASVAVIFCLPVIPALFPGTGIDXQMAVNASFSSHGFGEGHHVAQLRDLARFLGFSCPEYTGYSVDRVPPHCELSVYLYPRGGIHGAGLRPHHFTVARPTLQIAHHLGGFAFRQLPRLPSGHSDARYPCPYSESQPVLTRMVELSEAQATQHDLLLEAYRSLARRYAXRLCHGSHLSSHSSRGSARTPSGPRSPSSRAPYSPVYSPYPHPVSPSYTPGHTPVASSRRGPRFIRTARKRVVGSSTVFRFHYPAPPPPAARAAVGPRQVPPVPSRQPIDISSTEEPTTGARFGFEDGRAEPEANHEQSHHSNRSHRTASRNAEVEQPRRSNRSHRTASCDVEMEQSHRSHRTASHNSGEERLPSPPHVENNMQHLMAVXTQILQGLAAAVAGFQHTAHGNGHRHMSNNRSKLTDFLRSRPPEFSQTVEPVEADDWLKDVDRKLNLVQCTPVEKTLYASHQLRGPAADWWENYCNAHPEPTNIAWDEFATSFRAAHVPESTIDMKKVEFNRLKQGNSSVNEYLSMFNNLARYAPEEVDTDKKKIRKFVKGIAALLLEDARKEATEEYKKRNSNHQGNSSRGAPRPHYGQPMQYHQSVTQANRQPGYAPRPQMNCPAPQPQQRAPSGNTAPNSVTSFKSPQGPSAVQCFRCNQMGHYARQCPQNPTNTSSGHANGSTARTPTPAAAQSRPSSQASGQGSRVSNNLGRGRVNHIQAETAQDAPDVVMGMFSVNSIPAIVLFDSGASHSFISQAFVKRNGWKTQNLRVPMIVHSPGRDIRATQICLEVNLRIEEVDFLAKPIVLDSQSLDIILGMDWLAKHKGQIDCAEKSITLQGPGGKQVRFTPNTPTASRSILTCLQVTSLESVPIVCEYPDVFPEELTSMPPDREIEFAIELAPGTAPIAKRPYRMAANELVEVKRQIEELESKGYVRPSSSPWGAPVLLVKKKDGSERMLKIRSEDIPKTAFSTRYGLYEFTEMSFGLTNAPAFFMNLMNKIFMEYLDQFVVVFIDDILIYSKNEEEHAEHLRLIMEKLRDHQLFAKFSKCEFWLDRVAFLGHVISSNGVEVDPSKVEAVLAWNPPKNVSEIRSFLGLVGYYRRFIEEFSKLARPMTELLKKEKKFQWSAACEDSFQEMKKRLTTAPVLTLPDIRKDFEIFCDASRQGLGCVLMQERKVVAYASRQLRPHEVNYPTHDLELAAVVHALKIWRHYLIGNRCEVYTDHKSLKYIFTQTELNMRQRRWLELIKDYDLGIHYHPGKANVVADALSRKAYCNVAQIRPDQDRLCRELEKLRLTVVQSGVPASLTVQPTLESQIREAQKDDEGIKELIKRIQEKKDTNFSIDDQGTVWCGPRICVPAKKELRDLILKEAHESAYSIHPGSTKMYQDIKAYFWWAGMKRDVAEYVALCDICQRVKAEHQRPAGLLQPLPIPEWKWEEIGMDFITGLPRTPSGYDSIWVIVDRLTKLAHFVPVKTTWEREDLLRAEFPELLP

SEQ ID NO: 26185 - protein, 1771 aa, Oryza sativa
  Clone ID: TF_OsC1517_1625.pep
MTVLLLCNKETSVAMIFCLPVIPALFPGTGIDEQMAVNASFSSHGFGEGHHVAQLRDLARFLGFSCPEYTGYSVDRVPSRYELSVYLYPRGGIHGAGLRPHHFTVARPTLQIAHRLGGSAFRQLLRLPSGRTDTRYPCPYSESQPVLTRMVELSEAQATQHDLLLEAYRSLARRYAALEARLAEEGVTSVDTASWDLGRLCHASHLSSHSSRGSVRTPSGPRTPSSRVPYSPVHSPYPHPVSPSYTPGHTPVASSCRGPRFIRTVRKRVVGSSTVFRFDHPARPPPAARAAAGPRQVPPISSRQPIDVSSTEEPTTGAHFGFEEGRVEPEANHESANEQSHHSNRSHHTASRNAEVEQPHRSNRSHRTVSRNAEVEQSHRSPRAAIHNSREERIPSPPHVENNMQHLMAVQTQILQGLATAIAGIQHNAHGNGHPHTGNNRSKLTDFLRSRPPEFSQTVEPVEADDWLKDVERKLNLVQCTPVEKTLYASHQLRGPAADWWENYCNAHPEPTNIPWDEFAAAFRAAHVPESTIDMKKEEFNRLKQGNTSVNEYMSQFNKLARYAPEEVDTDKKKIRKFLKGVTHMINKRLLLEDARKEATEEYKKRKSTHQGNSSRGEPRPRFGQPMQYHQSVTQANRQPSYAPRPQMNRLAPQPQQRAPSGNTAPNSVTSFKSPPGLSAVQCFRCNQMGHYARQCPQNLTNSNSGHTNGSTARTPTPAAAQSRPSTQASGQGSRASNNFGRDRVNHIQAETAQDAPDVVMGMFSVNSAPAIVLFDSGASHSFISQAFVKRNGWKTQNLRVPMIVHSPGRDIRATKICSEVNLRIEEVDFLAKPIVLDSQSLDIILGMDWLAKHKGQIDCAERSITLQGPGGKQVRFTPNTLTASRSILTSLQATSLESVPIVCEYPDVFPKELTEMPPNREIEFAIELALGTAPIAKSPYRMAANELAEVKKQIEELESKGYVRPSSSPWGAPVLLVKKKDGSERMLKIRYEDIPKTAFSTRYGLYEFTVMSFGLTNAPAFFMNLMNKIFMEYLDQFVVVFIDDILIYSKNEEEHVEHLRLIMEKLRDHQLFAKFSKCEFWLDRVAFLGHVISSNGVEVDPSKVEAVLAWYPPKNESEIRSFLGLAGYYRRFIEGFSKLARPMTELLKKEKKFEWSAACEDSFQEMKKRLTTAPVLTLPDIRKDFEIFCDASRQGLGCVLMQERKVVAYASRQLRPHEVNYPTHDLELAAVVHALKIWRHYLIGNRCEVYTDHKSLKYIFTQTELNMRQRRWLELIKDYDLGIHYHPGKANVVADTLSRKTYCNAAQIWPDQDRLCRELEKLRLTVVQSGVPASLTVQPTLESQIREAQKDDEGIKELIKRIQKMKDTDFSIDDQGTVWCGPRICVPAKKELRDLILKEAHESAYSIYPGSTKMYQDIKAYFWWVGMKRDVAEYVALCDICQRVKAEHQRPAGLLQPLPIPEWKWEEIGMDFITGLPRTPSGYDSIWVIVDRLTKSAHFVPAKTTFDGKKLAELYMTHVVCRFGCPKKIVSDRGTQFTSSYQASIQMSPNEAMFGRKCRTPLCWNEVGKALVFGPDILKSAEEQVKLIRERLKTAQNRQKNYADNRRRDLEFEKGDHVYLRVSPLRGMRRFGMSGKLAPRYIGPYLITARRGEVAYQLELPEGLADVHNVFHVSQLKKCLRVPEEQVPLGNIELEKNLTYKERPIKVLEEAEPAHPLVLASQRVRARADAARCFPRARAVVADRPVAAAVSLCTRLSPVSPLRSKPPRRH

SEQ ID NO: 26186 - protein, 1759 aa, Oryza sativa; identical to SEQ ID NO: 20442
  Clone ID: TF_OsC1517_1640.pep

SEQ ID NO: 26187 - protein, 1852 aa, Oryza sativa; identical to SEQ ID NO: 20426
  Clone ID: TF_OsC1517_1674.pep

SEQ ID NO: 26188 - protein, 1761 aa, Oryza sativa
  Clone ID: TF_OsC1517_1687.pep
MTVPLLYNKETSVAVIICLPMIPALFPGSGINLQMAVNASVSSHGFGEGHHVAQLRDLARFLGFSCPEYTGYSVDRVPPRCELSVYLYPRGGIHGAGLRPHHFTVARPTLQIAYQDLSWTALRRLAHDYSHRLGGSAFRQLPRLPSGHADARYPCPYSESQPVLTRMVELSEAQATQHDLLLEAYRSLARRYAALEAHMAEEGVTSVDTVSWDSGRLCHASHLSSHSSRGSARTPSGPRSPSSRAPYSPVYSPYPHPVSPSYTPGHTPVASSRRGPRFIRTARKRVVGSSTVFRFHYPAPPPPAACAAAGPRQHLMAVQIQILQGLAAAVAGYQHNAHGNGHPHMGNNRSKLTDFLRSRPPEFSQTVEPVEADDWLKDVDRKLNLVQCTPVEKTLYASHQLRGPTADWWENYCNAYPEPTNIAWDEFATAFRAAHVPESTIDMKKEEFNKLKQGNSSVNEYLSMFNKLARYAPEEVDTDKKKIRKFLKGIAVGMRLQLLAHDFPTFQHMINKALLLEDARKEATEEYKKRKSNHQGNSSRGAPRPRYGQPMQYHQSVTQANRQPGYAPCPQMNRPAPQPQQRAPSGNTAPNSVTSFKSPQGPSAVQCFRCNQMGHYARQCPQNPTNTSSRHANGSTARTPTPAAAQSRPSSQASGQGTCASNNFGRGRVNHIQAETAQDAPDVVMGMFSVNSVPAIVLFDSGASHSFISQAFVKRNGWKTQNLRVPMIVHSPGRNIRATQICPEVNLRIEEVDFLAKPIVLDSQSLDIILGMDWLAKHKGQIDCAEKSITLQGPGGKQVRFTSNTPTASRSILTCLQVTSLESVPVVCEYPDVFPEELTSMPPDREIEFAIELAPGTAPIAKRPYRMVANELAEVKRQIEELKSKGYVRPSSSPWGAPVLLVKKKDGSERMIIDYRALNEVTIKNKYPLPRIDDLFDQLKGARVFSKIDLRSGYHQLKIRSEDIPKTAFSTRYGLYEFTLDQFVVVFIDDILIYSKNEEEHAEHLRLIMEKLRDHQLFAKFSKCEFWLDREAFLGHVISSNGVDVDPSKVEAVLAWNPPKNVLEIRSLLGLAGYYRRFIEGFSKLVRPMTELLKKEKKFHWSAACEDSFQEMKKRLTTAPVLTLPDIRKDFEIFCDASRQGLGCVLMQERKVVAYAFRQLRPHEVNYPTHDLELAAVFHALKIWRHYLIGNRCEVYTDHKSLKYIFTQTKLNMRQRRWLELIKDYDLGIHYHPGKANVVADALSRKAYCNVAQIRPDQDRLCRELEKLRLTVVQSGVPASLTVQPTLESQIREAQKDDEGIKELIKRIQEKKDTNFSIDDQGTVWCGPRICVPAKKELRDLILKEAHESAYSIHPGSTKMYQDIKAYFWWTGMKRDVAEYVALCDICQRVKAEHQRPAGLLQPLPIPEWKWEEIGMYFITGLPRTPSGYDSIWVIVDRLTKSAHFVPVKTIFDGKKLAELYMTHVVCRFGCPKKIVSDRGTQFTSRFWKQLHEALGTDLNFSTAYHPQTDGQTERVNQILEDMLRACALDFEGTWDRCLPYAEFSYNNSYQASIQMSPNEAMFGRKCRTPLCWNEVGEALVFGPDILKAAEEQVKLIRERLKTAQNRQKNYADNRRRDLEFEKGDHVYLRVSPLRGMRRFGMSGKLAPRYIGPYLITARRGEVAYQLELPEGLADVHNVFHVSQLKKCLRVPEEQVPLGNIELEKNLTYKERPIKVLEEAVRQTRRKTIKFYKVQWSNHSEDEATWEREDLLRAEFPELLP

SEQ ID NO: 26189 - protein, 1542 aa, Oryza sativa
  Clone ID: TF_OsC1517_1697.pep
MAVNASFSSHGFGEGHHVAQLRDLARFLGFSCPEYTGYSVGRVPPHCELSVYLYPRGGIHGAGLAHTTSLWPGPLSRSRTRTSPGLRFVAWHTTTATVSGAPPSGSFHAFLLATQTPARAPARFGFEDGRAEPEVNHEQSPHSNRSHRTASRNAEVEQPRRSNRSHRTASCDAEMEQSHRSHHTASHNSGEELLPSPPHVENNMQHLMAVQTQILQGLAAAVAGFQHNAHGNGHPHMSNNRSKLTDFLRSRPPEFSQTVEPVEADDWLKDVDRKFNLVQCTPVEKTLYASHQLRGPAADWWENYCNAHPEPTNIAWDEFATAFRAAHVPESTIDMKKEEFNRLKQGNSNVNEYLSQFNKLARYAPEEVDTDKKKIRKFLKGIAVGMGLQLLAHDFPTFQHMINKALLLEDARKEATEEYKKRKSNHQGNSSRGAPRPRYGQPMQYHQSVTQANRQPGYAPRPQMNRPAPQPQQRAPSGNTVPNSFTSFKSPQGPSAVQCFRCNQMGHYARQCPQNPTNTSSGHANGSTARTPTPAAAQSRPSSQASGQGSHASNNFGRGGANHIQAETAQDAPDVVMGMFSVNSIPAIVLFDSGASHSFISQAFVKRNGWKTQNLRVPMIVHSPGRDIRATQICPEVNLRIEEVDFLAKPIVLDSQSLDIILGMDWLAKHKGQIDCAEKSITLQGPGGKQVRFTSNSPTASRSILTCLQVTSLESVPIVCEYPDVFPEELTSMPPDREIEFAIELAPGTAPIAKRPYRMAANELAEVKRQIEELESKGYVRPSSSPWGAPVLLVKKKDGSERMFVVVFIDDILIYSKNEEEHAEHLRLIMEKLRDHQLFAKFLKCEFWLDRVAFLGHVISSNGVEVDPSKVEAVLAWNPPKNVSEIRSFLGLAGYYRRFIEGFSKLARPMTELLKKEKKFQWSAACEDSFQEMKKRLTTAPVLTLPDIRKDFEIFCDASRQGLECVLMQERKVVAYASRQLRPHEVNYPTHDLELAAVVHALKIWRHYLIGNRCEVYTDHKSLKYIFTQTELNMRQRRWLELIKDYDLGIHYHPCKANVVADALSRKAYCNVARIRPDQDRLCRELEKLRLTVVQSGVPASLTVQPTLESQIREAQKNDEGIKELIKRIQEKKDTNFSIDDQGTVWCGPRICVPAKKELRDLILKEAHESAYSIHPGSTKMYQDIKAYFWWAGMKRDVAEYVALCDICQRVKAEHQRPAGLLQPLPIPEWKWEEIGMDFITGLPRTPSGYDSIWVIVDQLTKPAHFVPVKTTYDGKKLAELYMTHVVCRFGCPKKIVSDRGTQFTSRFWKQLHEALGTDLNFSTAYHPQTDGQTERMSPNEAMFGRKCRTPLCWNEVGEALVFGPDILKAAEEQVKLIREHLKTAQNRQKNYADNRRRDLKFEKGDHVYLRVSPLRGMRRFGMSGKLAPRYIGPYLITARRGEVAYQLELPEGLADVHNVFHVSQLKKCLRVPEEQVPLGNIELEKNLTYKGRPIKVLEEAERQTRRKTIKFYKVQWSNHSEDEATWEREDLLHAEFPELLP

SEQ ID NO: 26190 - protein, 537 aa, Oryza sativa
  Clone ID: TF_OsC2559_1.pep
MAVFGAAVLVALAVTCGLIWSRSRRLSKEMRDIPGTMGWPVVGETFSFISGFSSPAGILSFMRDRQKRFGKVFKTYVLGRMTVFMTGREAAKILLSGKDGVVSLNLFYTGKQVLGPTSLLTTNGDEHKKLRRLIGEPLSIDALKKHFDFINDLAVQTLDTWLDRRVLVLEEASSVIIKLFTLKVIANMLISLEPEGEEQEKFRANFKIISSSFASLPLKIPGTAFHRGLKKARNRMYAMLDSVIARRRDGGEVRNDFLQTLLRKHAKDGTAADEDDGGGGGDRDADKLTDAQLKDNILTLLVAGHDTTTAGLTWLIKFLGENPEALQKLRVMNETLRRATILPWFSRKAAQDFSIDGYEIKKGTSVNLDVVSIHHDPSVFADPYKFDPNRFDGTLKPYSFLGFGSGPRMCPGMSLARLEICVFIHHLVCRYSTPAGSQEIKQQELLRGKVTRNSYFSGKCDKEQQPRSIAQIFRSLKHDHSRAVTRNGTIQEATQQQQLRKGQGQWNNNQVAKPIRVTKKHYARQQWPSHAKPHMID

SEQ ID NO: 26191 - protein, 508 aa, Oryza sativa
  unsure (1)..(508): unsure at all Xaa locations
  Clone ID: TF_OsC359_6058.pep
MSWHKAGVLLLGGSILPACPGGSGRRWGWMFNREKEKNVRGYASSNSSFQLNPPLASRELTRAHPWSIPSMLLGSQLPLVGSQDQNQYVFDQAFATQVNELPMPEEHVPFCHDCREQGHYALNCPWVYAKEAPSFGLAGQTSLNPPPRTKSSLQPSVQGREPNGENPLNPENCFPPSLSYHVGSRTKQAKGKKSKSQKRKAPMRTKEEVRKMTITSAEWPPAGITIPRRQRGNTFRGARRLTQHLLSHGGRVSDQVSSDDEDESPRHLGEEEMESKACTRCGEIGHVASMCLTLCLHCEEDHPPDRCPTSRITCFFCEGTDHVPKDCQSSFLLTKKMANQPASSNGEKHQGNTNPRQDYSFSLTPVPGQRNQNEKRKCRVREDICCFNCQGMGHFADKCPKPRNIAASTSVHATPCNQKLAPQRIVIHASRSSPIARVATAPTPASALPQGVNAQFQPQPSVDKTEAXSALYLWMFQHSSQRNQVQDEEPEQKHEIMNELDKLMKDPC

SEQ ID NO: 26192 - protein, 526 aa, Oryza sativa; identical to SEQ ID NO: 20453
  Clone ID: TF_OsC359_7004.pep

SEQ ID NO: 26193 - protein, 1232 aa, Oryza sativa
  unsure (1)..(1232): unsure at all Xaa locations
  Clone ID: TF_OsC1713_3645.pep
IANSAIKEVSHSRSGGGRFTVQTDKDGLNLWSDRPCEGNPSLSKLWQFSPISSIGAKFGCKQLAKELENNNCELLDKFVAGGIIAKLPPSCSDFATCLKHKRXEFSVSDLIGSLGVEEKARAKDVQGKKIEGGSSANMVQKKNPQASHNNKKVKPDVKPKAATNFKKKGKGKAKGDCFVCGKSGHWAKDCPERKDRKSANMVISEGGGTSGYGKILPTVLSVFHSPDWWVDTXANIHVCADISLFSSYQVGRGSSLLMGNGSLAAVHGVGTIDLKFTSGNTVQLKNVQHVPSYIKKNLVSGSLLCREGFRLVFESNKCVVSKYETFVGKGYDSGGLFRFALNDMCNNHNAVNHISENDESNVWHSRLCHVNFGCMTRLANMSLIPKFTLVKGSKCHTCVQSKQPRKPHKASEARNLAPLELVHSDLCEMNSVLTKGGKKYFMTLTDDCTRFCYVYLLKRKDEALHYFKIYKAEVENQLERKIKRLRSDRGREYFSNEFASFCEEFGIIHERTPPYLPQSNGVAERKNRTLAEIVNAMLDTTGLCKEWWGEAVLTACYVLNKIPMKHKKVTPFEEWERKKLNLSYLRTWGCLAKVNVPIAKKRKLGPNTVDCVFLGYAIHSVGYRFLIVNSGVPDMHVGTIFESRDAIFFENEFPMKHTPSTSSQETVMPHEHFAPIEHNDQTPKKNPEEDNIVDTRKSKRQRVAKSFGDDYIVYLVDDTPRTIEEAYSSPDADYWKEAVRSEMDPIMSNGSWEVVERPYGCKPIGCKWVFKKKFRPNGTIEKYKARLVPKGYTQKEGEDFFDIYSPVARLTTIRVLLALAASHGLLVHQMDVKTAFLNGELEEEIYMDQLDGYVLEGREGMVCKLLKSLYGIKQAPKQWHEKFDTTLTSVGFVVNVVDKCMYYRYGGGEGVILCLYVDDILIFGISLNVIEEVKDYLSKSFEMKDLGEADVILNIKLQRGDEGGITLVQSHYVDKVLSRFGYSDCKPAPTPYDPSVLLRKNRRIVRDQLRYSQIIGSLIYLASATRPDISFAVSKLSRFVSNPGDDHWQALERVMRYLKGTMSYGIHYTGYPKVLEGYSDSNWISDADEIKVTSGYVFTLGGGAVSWKSCKQTILTRSTMEVELTALDTATVEAEWLRELLMDLSVVEKPVPAILMNCDNQTVIIKLNSSKDNMKLSRHIKRRLKSVRKXKNSGVIALDYVQTARNLADQFTKGLPRNVIDSASREMGMIPT

SEQ ID NO: 26194 - protein, 693 aa, Oryza sativa
  unsure (1)..(693): unsure at all Xaa locations
  Clone ID: TF_OsC1713_3689.pep
MSAPGAGAAAAAAAAGAGDGVPGAGAGAVANVNTNRGNSASQSSGGPFSGYILLLLLTHSFIALLVLLVASQLQLLGSASRTIARPPCMRLEPELPPVPLLLELEMARLELEPELLRTSTPTEAILPHNPTEGHSRVGFAAALKPHAFDGSNYKRWKARALLWLTAMQCFYVSRGKQSEPPLSPEEEAKFEASDCLFRGALISVLADNIVDVYMHMPSGKDMWDALEAKFGVSDAGSELYVMEQFYDYKIVDDRSVVEQAHEIQMLAKELENNNCELPDKFVAGGIIAKLPPSWSDLATSLKHKRQEFSVSDLIGSLGVEEKARTKDVRGKKVEGGSSANMVQKKNPHASHNNKKVKPDVKPKAATNFKNKGKGKAKGDCFVCGKSGHWAKDCPERKDRKSANMVISEGGGTSGYGXRGSSLLMGNGSLAAVHGVXFCYVYLLKTKDEALHFFKTYKAEVENQLERKIKRLRSDRGGEYFSNEFASFCEEFGIIHERTPPYSPQSNGVAERKNRTLTEMVNAMLDTAGLSKEWWGEAVLTACHVLNKIPMKHKEVTPFEEWERKKLNLSYLRTWGCLAKVNVPIAKKRKLGPNTVDCVFLGYAIHSVGYKFLIVNSRVPDMHVGTIIESRDATFFENEFPMKHTPSTSSQETIMPHEHFAPIEHNDQTPEENPEEDNIVDTRKSKRQRVAKWR

SEQ ID NO: 26195 - protein, 1361 aa, Oryza sativa; identical to SEQ ID NO: 20343
  Clone ID: TF_OsC1713_3856.pep

SEQ ID NO: 26196 - protein, 1137 aa, Oryza sativa
  Clone ID: TF_OsC1713_3861.pep
MSNTGDKEKETPVNTNGGNTASNSSGGPFLGSFSVVGFAATLKPHAFDGSNYKRWKARALLWLTAMQCFYVSRGKRSEPPLSPEEEAKFEASDCLFRGALISVLADNIVDVYMYMPSGKEMWDALEAKFGVSDAGSELYVMEQFYDYKMVDDRSIVEQAHEIQMLAKELENNNCELPDKFVAGGIIAKLPPSWSDFATSLKHKRQEFSVPDLIGSLGVEEKARAKDVRGKKVEGGSSANMVQKKNPHASHNNKKVKPDVKPKAATNFKKKSKGKAKGDCFVCGKSGHWAKDCPERKDRKSANMIISEGGGTSGYGKILPTVLSVFHSLDWWVDTGANIHVGRGSSLLMGNGSLAAVHGVGTVDLKFTSGKTVQLKNVQHVPSIKKNLVSGSLLCREGFRLVFESNKCVVSKYGTFVGKDYDSGGLFRFSLNDMCNNHNAVNHISENDESNVWHSRLCHVNFGCMTRLANMSLIPKFTLVKGSKCHTCVQSKQPRKPHKASEARNLAPLELVHSDLCEMNGVLTKGGKKYFMTLIDDCTRFCYVYLLKTKDEALHFFKIYKAEVENQLERKIKRLRSDRGGEYFSNEFASFCEEFGIIHEMTPPYSPQSNGVAERKNRTLTEMVNAMLDTAGLSKEWWGEAVLTACHVLNKIPMKHKEITPFEEWERKKLNLSYLRTWGCLAKVNVPIAKKRKLGPKTVDCVFLGYAIHSVGYRFLIVNSGVPDMHVGTILESRDATFFENEFPMKYTPSTSSKETVMPHEHFAPIEHNDQTPEENPEEDNIVDTRKSKRQRVAKSFGDDYIVYLVDDTPRTIEEAYSSPNADYWKEAVRSEMDSIMSNGTWEVVERPYGCKPVGCKWVFKKKLRLDGTIEKYKARLVAKGYTQKEGEDFFDTYSLVARLTTIRVLLALAASHGLLVHQMDVKTAFLNGELEEEIYMDQPDGYVLEGQEGMVCKLLKSLYGLKQAPKQCHEKFDTTLTSAGFVVNEADKCVCYRYGGGEGVILCLYVDDILIFGTSLNVIEEVKDYLSKSFEMKDLGEADVILNIKLQRGDEGGITLVQSHYVDKVLSRFGYSDCKPAPTPYDPSVLLRKNRRIARDQLRYSQIIGSLMYLASATRPDISFAVSKLSRFVSNPGDDHW

SEQ ID NO: 26197 - protein, 1101 aa, Oryza sativa
  Clone ID: TF_OsC1713_4039.pep
MSAPGAGAAGVAVGGDGVPGAGAGGGALGARAGATNNNINGGNFASQSSGGPFSGYILLLFLLLALYRYVPVPDIHDAFSMLALYCYVPVPDIHDAFSVLLRYCYVIHDAFSMLLVMLSLDYPTLRWKAHALLWLTAMQCFFVSRGKRSEPPLSPEEEAKFEASDCLFRGALISVLADNIVDVYMHMPSGKDMWDALEAKFGVSDAGSELYVMEQFYDYKMVDDRSVVEQAHEIQMLAKELENNNCELPDKFVHKRQEFSVSDLIGSLGVEEKARAKDNRGKKKKNPHASHNNKKIKLDVKSKAATKFKKKCKGKAKGDCFVCGKSGHWAKDCPECKDRKSANMVISEGGGTSGYGKILPTVLSVFHSPDWWVDTGANIHACADISLFSSYQVGRGSSLLMGNRSLAAIHGVGTVDLKFTSGKTMQLKNVQHVPSIKKNLVSGSLLCREGFRLVFESNKCVISKYGTFVGKGYDSGGLFRFSLNDMCNNHNVVNHISENDESNVWHSRLCHVNFGCMTLLANMSLIPKFTLVKGSKCHTCVQSKQPCKPHKTSEARNLAPLELVHSDLCEMNGVLTKGGKKYFMTLIDDCTRFCYVYLLKTKDEALHFFKTYKAEVENQLERKIKLLRSDRGGEYFFNEFASFCEEFGIIHERTPPYSPQSNGVAERKNRTLTEMVNAMLDTAGLSKEWWGEAVLTACHVLNKILMKHKEVIPFEEWERKKLNLSYLRTWGCLAKVNVPIAKKRKLGPNTVDCMFLGYAIHSVGYRFLIVNSGVPDMYVGTIIESRDATFFENEFPMKHTPSTSSQETVMPHEHFAPIEHNDQTPEENPEEDNIVDTRKTSHGVLVHQMNVKTAFLNGELEEEIYMDQPDGYVLEGFVVNGADKCVYYRYGGGEGVILCLYVDDILIFGTNLNVIEGVKDYLSKSFEMKDLGEADVILNIKLQRGDEGEITLVQSHYVDKILSHFGYSGCKPASTPYDPSVLLRKNRRIARDQLRYSQIIGSLMYLASATRPDISFAVSKLSRFVLNPGDDHWQALERVMRYLKGIMSYGIHYTRYPKVLEGYSDSNWISDADKIKATSGYVFALEGGTVSWKPCKQTGIL

SEQ ID NO: 26198 - protein, 1438 aa, Oryza sativa
  unsure (1)..(1438): unsure at all Xaa locations
  Clone ID: TF_OsC1713_4055.pep
MSGVAAATAGGGGTPPTGAGSGAGAPGGAVNDNNNGVNSASPSSGGPFSGYTLLLLLLLLALFLFPLLALSLYYVRYVLVPVLHDASSMLSRYWYVPVPDIHDAHSMLLVMLRSPYTAYAMIIALTFWIKICRLMTIFPTIQKPDRSFSVVGFAAALKPHAFDGSNYKRWKARALLWLTAMQCFYVSRGKRSEPPLSPEEEAKFEASDCLFRGALISVLADNIVDVYMHMPSGKDMWDALEAKFGVSDAGSELYVMEQFYDYKMVDDRSVVEQAHEIQMLAKELENNNCELPDKFVAGGIIAKLPPSWSDFATSLKHKRQEFSVPDLIGSLGVEEKARAKDVRGKKVEGGSSANMVQKKNPHASHNNKKVKPDVKPKAATNFKKKGKGKAKGDCFVCGKSGHWAKDCPERKDRKSTNMVISEGRGTSGYGKILPTVLSVFHSPDWWVDTGANIHVCADISLFSSYQVGRGSSLLMGNGSLAAVHGVGTVDLKFTSGKTVQLKNVQHVPSIKKNLVSCSLLCREGFRLVFESNKCVVSKYGTFVGKGYDSGGLFRFSLNDMYNNHNAVNHISENDESNVWHSRLCHVNFGCMTRLANMSLIPKFTLVKGSKCHTYVQSKQPRKPHKASEARNLAPLELVHSDLCEMNGVLTKGGKKYFMTLIDDCTRFCYVYLLKTKDETLHYFKIYKAEVENQLQRKIKLLRSDRGGEYFSNEFASFCQEFGIIHEMTPPYSPLSNGVAERKNRTLTEMVNAMLDTAGLSKELWGEAVLTACHILNKIPMKHKEVTPFEEWERKKLNLSYLRTWGCLAKVNVPIAKRRKLGPKTVDCVFLGYAIHSVGYRFLIVNSGVPDMHAGTIFESRDATFFENEFPMKYTPSTSSKETVMPHEHFAPIEHNDQTPEENPEEDNIVDARKSKRQRVAKSFGDDYIVYLVDDTPRTIEEAYSSPDADYWKEAVRSEMDSIMSNGTWEVVERPYGCKPVGCKWVFKKKLRPDGTIEKYKARLVAKGYTQKEGEDFFDTYSPVARLTTIRVLLALAASHGLLVHQMDVKTAFLNGELEEKIYMDQPDGYVLEGQEGMVCKLLKSLYGLKQAPKQWHEKFDTTLTSAGFVVIEADKCVYYRYGGGEGVILCLYVDDILIFGTSLNVIEEVKDYLSKSFEMKDLGEADVILNIKLQRGDEGGITLVQSHYVDKVLTPTPYDPSVLLRKNRRIVRDQLRYSQIIGSLMYLASATRPDISFAVSKLSRFVXNPGDDHWQALERVMRYLKGTMSYGIHYTGYPKVLEGYSDSNWISNADEIKATSGXVFTLGGGAVSWKSCKQTILTRSTMEAELTALDTATVEAEWLRELLMDLPVVEKPVPAILMNCDNXTVIIKVNNSKDNMKSSRHIMRRLKSVRKQKNSGVIALDYVQTARNLADQFTKGLPRNVIDSASREMGLIPT

SEQ ID NO: 26199 - protein, 1126 aa, Oryza sativa; identical to SEQ ID NO: 20323
  Clone ID: TF_OsC1713_4266.pep

SEQ ID NO: 26200 - protein, 1371 aa, Oryza sativa; identical to SEQ ID NO: 20332
  Clone ID: TF_OsC1713_4346.pep

SEQ ID NO: 26201 - protein, 1084 aa, Oryza sativa; identical to SEQ ID NO: 20373
  Clone ID: TF_OsC1713_4393.pep

SEQ ID NO: 26202 - protein, 1187 aa, Oryza sativa
  unsure (1)..(1187): unsure at all Xaa locations
  Clone ID: TF_OsC1713_4437.pep
MSAPGAGASDGAPGAGAGDGAPGAANVNTNGGNFASQSSGGPFSGEPPLSPEEEAKFEASDCLFRGALISVLADNIVDVYMHMPSGKDMWDALEAKFGVSDAGSELYVMEQFYDYKMVDDRSVVEQTHEIRMLAKELENNNYELPDKFVAGGIIAKLPPSWSDFATSLKHKRQEFSVSDFIGSLGVEEKARAKDVRGKKVEGGSSANMVQKKNPHASHNNKKVKHDVKPKAATNFKKKGKGKAKGDCFVCGKSGHWAKDCPERKDKKSANMVISEGGGISGYGKILPTVLFVFHSPDWWVDTSANIHVGRGSSLLMGNGSLAAVHGVGMVDLKFTSGKTVQLKNVQHVPSIKKNLVSGSLLCREGFRLVFKSNKCVVSKYGTFVGKGYDSGGLFRFSLNDMCNNHNVVNHISENDESNVWHSRLCHVNFGCMTRLANMSLIPKFTLVKGSKCHTCVQSKQPLKPHKASEARNLAPLELVHSNLCEMNGVLTKGGKKYFMTPIDDCTRFCCVYLLKTKDEALHFFKTYKAEVENQLERKIKRLRSDRGGEYFSNEFSSFCEEFGIIHERTPPYSPQSNGVAERKNRTLTEMVNAMLDIVELSKEWWGKAVLTACHVLNKIPMKHKEVNVPIAKKWKLGPNTVDCVFLGYAIHSVGYRFLIVNSGVPGMHLGTIIECRDATFFENEFPMKHTPSTSSQETVMPHEHFAPIEHNDQTPEENPEEDNIVDTRKKEAYSSPDADYWKEAVRSEMDSIMSNGTWEVIEHPYGCKPVGCKWVFKKKLRLDGTIEKYKARLVXKGYTQKEGEDFFXDTYSPVARLTTIRVLLALAASHGLLVHQMDVKTAFVNRELEEEIYMDQPYGYVLEGQEGMVCKLLKSLYGLKQAPKQCHEKFDTTLTSAGFVVNETDKCVYYHYSGGEGVILCLYVDDILIFGTSLNVIEEVKDYLSKSFEMKDLGEADVILNIKLQRGDEGGITLVQSHYVDKVLSRFGYSDCKPAPTPYDPSVLLRKNRRIARDQLRYSQIIGSLMYLASATRPDISFAVSKLSRFVSNPGDDHWQALERVMRYLKGTVSYGIHYTGYPKVLEGYSDSNWISDADEIKATGGYVFTLGGGAVSWKSCKQTILTSSKDNMKSSRHIKRRLKSVRKQKNSGVIALDYVQTARNLADQFTKRLPRNVIDSASREMGLIPT

SEQ ID NO: 26203 - protein, 1126 aa, Oryza sativa; identical to SEQ ID NO: 20363
  Clone ID: TF_OsC1713_4451.pep

SEQ ID NO: 26204 - protein, 1382 aa, Oryza sativa
  Clone ID: TF_OsC1713_4689.pep
MSNTGDKEKETPVNTNGGNTASNSSGRPFLGYNLITLFQLEVLLLMFIAMSTLCHYVIVDAYSMLSMLMLITFTTITGSNPIVNIMFIILLFWIKICRIMTKFLTIQKPDRSFSVVGFAATLKPHAFDGSNYKRWKARALLWLTAMQCFYVSRGKRSEPPLSPEEEAKFEASDCLFRGALISVLADNIVDVYMHMPSGKEMWDALEAKFGVSDAGSELYVMEQFYDYKMVDDRSVVEQAHEIQMLAKELENNNCELPDKFVAGGIIAKLPPSWSDFATSLKHKRQEFSVPDLIGSLGVEEKARAKDVRGKKVEGGSSANMVQKKNPHASHNNKKVKPDVKPKAATNFKKKSKGKAKGDCFVCGKSGHWAKDCPERKDRKSANMIISEGGGTSGYGKILPTVLSVFHSPDWWVDTGANIHVGRGSSLLMGNGSLAAVHGVGTVDLKFTSGKTVQLKNVQHVPSIKKNLVSGSLLCREGFRLVFESNKCVVSKYGTFVGKGYDSGGLFRFSLNDMCNNHNAVNHISENDESNVWHSRLCHVNFGCMTRLANMSLIPKFTLVKGSKCHTCVQSKQPRKPHKASEARNLAPLELVHSDLCEMNGVLTKGGKKYFMTLIDDCTRFCYVYLLKTKDEALHFFKIYKAEVENQLERKIKRLRSDRGGEYFSNEFASFCEEFGIIHEMTPPYSPQSNGVAERKNRTLTEMVNAMLDTAGLSKECIRKTPFEEWERKKLNLSYLRTWGCLAKVNVPIAKKRKLGPKTVDCVFLGYAIHSVGYRFLIVNSGVPDMHVGTILESRDAIFFENEFPMKYTPSTSSKETVMPHEHFAPIEHNDQTPEENPEEDNIVDTRKSKRQRVAKSFGDDYIVYLVDDTPRTIEEAYSSPDADYWKEAVRSEMDSIMSNGTWEVVERPYGCKPVGCKWVFKKKLRPDGTIEKYKARLVAKGYTQKEGEDFFDTYSPVARLTTIRVLLALAASHGLLVHQMDIKTAFLNGELEEEIYMDQPDGYVLEGQEGMVCKLLKSLYGLKQAPKQWHEKFDTTLTSAGFVVNEADKYVYYRYGGGEGVILCLYVDDILIFGTSLNVIEEVKDYLSKSFEMKDLGEADVILNIKLQRGDEGGITLVQSHYVDKVLSRFGYSDCKPAPTPYDPSVLLRKNRRIARDQLRYSQIIGSLMYLASATRPDISFAVSKLSRFVSNPGDDHWQALERVMRYLKGTMSYGIHYTGYPKVLEGYSDSNWISDADEIKATSGYVFTLGGGAVSWKSCKQTILTRSTMEAELTALDTATVEAEWLRELLMDLPVVEKPVPAILMNCDNQTVIIKVNSSKDNMKSSRHIKRRLKSVRKQKNSGVIALDYVQTARNLADQFTKGLPRNVIDSASREMGLIPT

SEQ ID NO: 26205 - protein, 1504 aa, Oryza sativa
  Clone ID: TF_OsC1713_4708.pep
RLRAAAPPAACRLPRLRPPLFALTRHQTASYGAAARGLELLRLASASAAPAATSCQRQLPPGGGGTPPPTGAGAPPPTGAGAPGGGAVNDYNNGGNSASPSSGGPFSGYNLLLLLLLLALFLFPLLALYCVRYVLVPILRDASSMLSRYWYVPVSDIHDAHSMLLVMLRLPYTAYAMIIVSISWIKICRIMTIFPTIQKPDRSFSVVGFAAALKPHAFDGSNYKRWKARALLWLTAMQCFYVSRGKRSEPPLSPEEEAKFEASDCLFRGALISVLADNIVDVYMHMPSGKDMWDALEAKFGVSDAGSELYIMEQFYDYKMVDDRSVVEQAHEIQMLAKELENNNCELPDKFVAGGIIAKLPPSWSDFATSLKHKRQEFSVPDLIGSLGVEEKARAKDVRGKKVEGGSSANMVQKKNPHASHNNKKVKPDVKPKAATNFKKKGKGKAKGDCFVCGKSGHWAKDCPERKDRKSANMIISEGGGTSGYGKILPTVLSVFHSPDWWVDTGANIHVCADISLFSSYQVERGSSLLMGNGSLAAVHGVGTVDLKFTSGKTVQLKNVQHVPSIKKNLVSGSLLCREGFRLVFESNKCVVSKYGTFVGKGYDSGGLFRFSLNDMCNNHNAVNHISKNDESNVWHSRLCHVNFGCMTRLANMSLIPKFTLVKGSKCHTCVQSKQPRKPHKASEARNLAPLELVHSDLCEMNGMLTKGGKKYFMTLIDDCTRFCYVYLLKTKDEALHYFKIYKAEVENQLERKIKRLRSDRGGEYFSNEFASFCEEFGIIHEMTPPYSPQSNGVAERKNRILTEMVNAMLDTAGLSKEWWGEAVLTACHVLNKIPMKHKEVTPFEEWERKKLNLSYLRTWGCLAKVNVPIVKKRKLGPKTVDCVFLGYAIHSVGYRFLIVNFGVPDMHAATIFESRDATFFENEFLMKYTPSTSSKETVMLHEHFAPIEHNDETPEENPEEDNIVDTRKSKRQRVAKSFGDDYIVYLVDDTPRTIEEAYSSPDADYWKEAVRSEIDSIISNGTWEVVERPYGCKPVGCKWVFKKKLRPDGTIEKYKARLVAKGYTQKEGEDFFDTYSPVARLTTIRVLLALAASHGLLVHQMDVKTAFLNGELEEEIYMDQPDGYVLEGQEGMVCKLLKSLYGLKQAPKQWHEKFDTTLTAAGFVVNEADKCVYYRYGGGEGVILCLYVDDILIFGTSLNVIEEVKDYLSKSFEMKDLGEADVILNIKLQRGDEGGITLVQSHYVDKVLSRFGYSDCKPAPTPYDPSVLLRKNRRIARDQLRYSQIIGSLMYLASATRPDISFAVSKLSWFVSNPGDDHWQALERVMRYLKGTMSYGIHYTGYPKVLEGYSDSNWISDADEIKATSGYVFTLGGGAVSWKSCKQTILTRSTMEAELTALDTATVEAEWLRELLMDLPVVEKPVPAILMNCDNQTVIIKVNSSKDNMKSSRHIKRRLKSVRKQKNSGVIALDYVQTARNLADQFTKGLPRNVIDSASREMGLIPT

SEQ ID NO: 26206 - protein, 1456 aa, Oryza sativa
  Clone ID: TF_OsC1713_4762.pep
MSGVAAAAIGGGGAAPPPTPTGAGSGAGAPGGGAVNDYNNGGNSASPSSGGPFSGYNLLLLLLMLSHYWYVPVSDIHDAHSMLLVMLRSPYTAYAMIIVSISWIKICRIMTIFPTIQKPDRSFSVVGFAAALKPHAFDGSNYKRWKARALLWLTAMQCFYVSRGKRSEPPLSPEEEAKFEASDCLFRGALISVLADNIVDVYMHMPSGKDMWDALEAKFGVSDAGSELYVMEQFYDYKMVDDRSVVEQAHEIQMLAKELENNNCELPDKFVAGGIIAKLPPSWSDFATSLKHKRQEFSVPDLIGSLGVEEKARAKDVRGKRVEGGSSANMVQKKNPHASHNNKKVKPDVKPKAATNFKKKGKGKAKGDCFVCGKSGHWAKDCPERKDRKSANIVISEGGGTSGTVGRGSFLLMGNGSLAAVHGIAKKRKLGPKTVDCVFLGYAIHSVGYRFLIVNSGVPDMHAGTILESRDATFFENEFPMKYTPSTSSKETVMPHEHFAPIEHDDQTPEENPEEDNIVDTRKSKRQRVAKSFGDDYIVYLVDDTPRTIEEAYSSPDADYWKEAVRSEMDSIMSNGTWEVVERPYGCKPVGCKWVFKKKLRPDGTIEKYKARLVAKGYTQKEGEDFFNTYSPVARLTTIRVLLALAASHGLLVHQMDVKTAFLNGELEEEIYMDQPDGYVLEGQEGMVCKLLKSLYGLKQAPKQWHEKFDTTLTSAGFVVNEADKCVYYRYGGGEGVILCLYVDDILIFGTSLNVIEEVKDYLSKSFEMKDLGEADVILNIKLQRGDEGGITLVQSHYVDKVLSRFGYSDCKPAPTPYDPSVLLRKNRRIARDQLRYSQIIGSLMYLASATRPDISFAVSKLSRFVSNPGDDHWQALERVMRYLKGTMSYGIHYTGYPKVLEGYGDSNWISDADEIKATSGYVFTLGGGAVSWKSCKQTILTRSTMEAELTALDTATVEAEWLRELLMDLPVVEKPVPAILMNCDNQTVIIKVNSSKDNMKSSRHIKRRLKSVRKQKNSGVIALDYVQTARNLADQFTKGLPRFWGVPPARLLIAMSGVAAAATGPPTGAGGTPPPTGAGSGAGAPGGGAVNDYNNGGNSASPSSGGPFSGDGYAFASTENSMVIYNINVAPLIKSNKYTLLAERTRKWEEEKRQERREGKAPAAPAGNRRGEAKQKATAEDIDDGDEDLGFQEPEATVATVDGGACAHASRWSLKAMKRELLAAAPTHEATRRARWSEVALTFDQTDHPPCVARGGQIAMVVSPTVCNVKLGRVLIDGGAALNILSPVAFDAIKALGMVLRPSQPIIGVTLGHTWPLGHIDLPVTFGGSANFRTERVDFDVADLSLPYNAVLGRPALVKFMAAVHYAYLQMKMPGPGGPITVHGDLKVALACMEQHADHLAAASKPAGGDERLSASVPAAPRQRMVTCDEVPVKEVALGDGPSKTTRIGGLLDDK

SEQ ID NO: 26207 - protein, 1638 aa, Oryza sativa
  Clone ID: TF_OsC1713_4807.pep
MQCFYVSRGKRSEPPLSPEEEAKFEASDCLFRGALISVLADNIVDVYMHMPSGKDMWDALEAKFGVSDAGSELYVMEQFYDYKMVDDRSVVEQAHEIQMLAKELENNNCELPDKFVAGGIIAKLPPSWSDFATSLKHKRQEFSVPDLIGSLGVEEKARAKDVRGKKVEGGSSANMVQKKNPHASHNNKKVKPDVKPKAATNFKKKSKGKAKGDCFVCGKSGHWAKDCPERKDRKSANMIISEGGGTSGDATFFENEFPMKYTPSTSSKETVMPHEHFAPIEHNDQTPEENPEEDNIVDTRKSKRQRVAKSFGDDYIVYLVDDTPRTIEEAYSSPDADYWKEAVRSEMDSIMSNGTWEVVERPYGCKPVGCKWVFKKKLRPDGTIEKYKARLVAKGYTQKEGEDFFDTYSPVARLTTIRVLLALAASHGLLIHQMDVKTAFLNGELEEEIYMDQPDGYVLEGQEGMVCKLLKSLYGLKQAPKQWHEKFDTTLTSAGFVVNEADKCVYYRYGGGEGVILCLYVDDILIFGTSLNVIEEVKDYLSKSFEMKDLGEADVILNIKLQRGDEDGRAIRFLGSARRDYSLFVNIYFIFTNMSNTGDKEKETPVNTNGGNTTSNSSGGPFLGTIHFHLFESGFMPSYNCWTSHGEQGVEMEEDEVEDDNIPDFAQYVGFEGNQTGEEEIAADGNDVADDLGQMLQDAREDSESEKEAHKLDKMLEDHRTSLYPGCEQGHKKLDTTLDLLQWKAKNGDGILRHPADGSQWRNIDRKFKEFGKDARNIRFGPKQPGNDIDVYLRPLVEDLKQLWKKEGVPVWDEDKQEEFNLRALLFVTINDWPALSNLSGQSNKGYKACTHCMDETESTYLKHCRKVVYMGHRRFLAANHPVRKKDKHFEHKADHRTKPKHRSGKTVFAMVKDLKVVFGKGPGSQHIESEDGHAAMWKKNSIFWELPYWEFLDVRHAIDVMHLTKNLCVNLLGFLGVYGKSKDTLEARNDLKHMEQRSDLHPEPKEKGSHYLSPASYTLSKAEKESMFECLESIKVPSGYSTNIKRIISTKEKKFTNLKSHDCHVLMTQLLPVVIRGILPDNVRATITKLCAFMNAISQKVIDPDRLEALQNEVVQCLVSFELIFPPSFFNIMTHLLCHLVKEIRILGPMYLHNMFPFERYMGVLKKYVRNRARPEASIAKGYGTEEVIEFCVEFIEDLRPIGVPKSRHEGRLQGKGTLGRKAITTVDNNLFRKAHFTVLQHSSLVAPYIEEHLALVRARNIGKSDAWITRHHIDTFPAWLRQHLMGNESINQQLAFLAWGPSGSIATFQGYEINGYTFYTRAQDMKSTNQNSAVRVDAMGHDGTTATYYGSIEDIWELDYGPLKVPLFRCQWVRLTGGGVMIDDSGMTTVDLNKVGYSDEPFVLANDVTQVFFVKDMSSKGKKGRGPDEPKRQVVLPGKRKIVGVEDKTDEDYDQLDGQPPFTVTIDPSILLSNEDTPYSRSDHKEGTIGASPRRRRRHISPSSRARRRRRLLRHRRISGVRAAARRLPLDLSLRSRSLSLSRLPPAAEFQTPTLTSSRHDAAPRRRRATRRHDAARRRRATPMPRAAPRRRRPAPPPLRCRHTENVNERTNVNENKVNECERERANERERANERE

SEQ ID NO: 26208 - protein, 1276 aa, Oryza sativa
  Clone ID: TF_OsC1713_4916.pep
MSGVAGGGGAPPPTGAGSGAGAPPPTGAGSGAGAPGGGAVNDYNNGGNSASPSSGGPFSGYNLLLLLLLLALYCVSYVLVPVLHDASSMLSHYWYVPVSDIHDAHSMLLVMLRSPYTAYAMIIVSISWIKICRIMTIFPTIQKPDRSFSVVGFAAALKPHAFDGSNYKRWKARALLWLTAMQCFYVSRGKRSEPPLSPEEEAKFEASDCLFRGALISVLADNIVDVYMHMPSGKDMWDALEAKFGVSDAGSELYVMEQFYDYKMVDDRSVVEQAHEIQMLAKELENNNCELPDKFVAGGIIAKLPPSWSDFATSLKHKRQEFSVPDLIGSLGVEEKARAKDVRGKKVEGGSSANMVQKKNPHASHNNKKVKPDVKPKAATNFKKKGKGKAKGDCFVCGKSGHWAKDCPERKDRKSANMIISEGGGTSGYGKILPTVLSVFHSPDWWVDTGANIHVGRGSSLLMGNGSLAAVHGVGTVDLKFTSGKTVQLKNVQHVPSIKKNLVSGSLLCREGFRLVFESNKCVVSKYGTFVGKGYDSGGLFRFSLNDMCNNHNAVNHISENDESNVWHSRLCHVNFGCMTRLANMSLIPKFTLVKGSKCHTCVQSKQPRKPHKASEARNLAPLELVHSDLCEMNGVLTKGGKKYFMTLIDDCTRFCYVYLLKTKDEALHYFKIYKAEVENQLERKIKRLRSDRGGEYFSNEFASFCEEFGIIHEMTPPYSPQSNGVPERKNRTLTEMVNAMLDTAGLSKEWWGEAVLTASHVLNKIPMKHKEVTPFEEWERKKLNLSYLRTWGCLAKINVPIAKKRKLGPNTVDCVFLGYAIHSVGYRFLIVNSGVPDMNAGTILESRDATFFENEFPMKHSPSTSSKETVMPHEHFAPTEHNDQTPEENPDEDNIVDTRKSKRQRVAKSFGDDYIVYLVDDTPRTIEEAYSSPDADCWKEAVRSEMDSIMSNGTWEVVERPYGCKPVGCKWVFKKKLRPDGTIEKYKARLVAKGYTQKEGEDFFDTYSLVARLTTIRVLLALAASHGLLVHQMDVKTVFLNGELEEEIYMDQPDGYVLEGFVVNEADKCVYYRYGGGEGVILCLYVDDILIFGTSLNVIEEVKDYLSKSFEMKDLGEADVILNIKLQRGDEGGITLMQSHYVDKVLSLFGYSDCKPAPTPYDPSVLLRKNRRIARDQLRYSQIIGSLMHLASATRPDISFVVSKLSRFVSNPGDYHWQALERVMRYLKGTMSYGIHYTGYPKVLEGYSDSNWISDANEIKATSGYVFTLGGGAIS

SEQ ID NO: 26209 - protein, 1504 aa, Oryza sativa; identical to SEQ ID NO: 20371
  Clone ID: TF_OsC1713_4934.pep

SEQ ID NO: 26210 - protein, 1457 aa, Oryza sativa; identical to SEQ ID NO: 20353
  Clone ID: TF_OsC1713_4959.pep

SEQ ID NO: 26211 - protein, 1419 aa, Oryza sativa; identical to SEQ ID NO: 20374
  Clone ID: TF_OsC1713_4998.pep

SEQ ID NO: 26212 - protein, 494 aa, Oryza sativa
  unsure (1)..(494): unsure at all Xaa locations
  Clone ID: TF_OsC1713_5057.pep
MAAAAGPSLSITVEKNPPEARLLQLGIKSWPKWGCPPGKFPLKFDARLTCYLLKGRVRASVKGTGRCVEFGAGDLVVFPKGLSCTWDVVVGIDKHYNFDSYGLEPSFGPGGRVVTDGRAIRFLGSARRDYSLFVNIYFIFTNISNTGDKEKETPVNTNGGNTASNSSGGTFLGVLADNIVKVYMHMPSGKDMRDALEAKFGVSDAGSELYVMEQFYDYKMVDDRSVVEQAHEIQMLAKELENNNCELPDKFVAGGIIAKLPPSWSDFATSLKHKRQEFSVPDLIGSLGVEEKARAKDVRGKKVEGGSSANMVQKKNPHASHNNKKVKPDVKPKAATNFKKKSKGKAKGDCFVCGKSGHWAKDCPERKDRKSANMIISEGGGTSGYGXRGSSLLMGNGSLAAVHGVGTVDLKFTSGKTVQLKNVQHVPSIKKNLVSGSLLCREGFRLVFESNKCVVSKYGTFVGKGYDSGGLFRFSLNDMCNNHNVVNQKKKKKK

SEQ ID NO: 26213 - protein, 1236 aa, Oryza sativa
  Clone ID: TF_OsC1713_5171.pep
MSGVAAAATGGGGAPPPTGAGAPPPTGAGSGAGAPGGGAVNDYNNGGNSASPSSGGPFSGYNLLLLLLLLALFLFPLLALYCVRYVLVPVLHDASSMLSRYWYVPVSDIHDAHSMLLVMLRSPYTAYAMIIVSISWIKICRIMTIFPTIQKPDRSFSVVGFAAALKPHAFDGSNYKRWKARALLWLTAMQCFYVSRGKRSEPPLSPEEEAKFEASDCLFRGALISVLADNIVDVYMHMPSGKDMWDALEAKFGVSDAGSELYVMEQFYDYKMVDDRSVVEQAHEIQMLAKELENNNCELPDKFVAGGIIAKLPPSWSDFATSLKHKRQEFSVPDLIGSLGVEEKARAKDVRGKKVEGGSSANMVQKKNPHASHNNKKVKPDVKPKVATNFKKKGKGKAKGDCFVCGKSGHWAKDCPERKDRKSANMIISEGGGTSGYGKILPTVLSIFHSPDWWVDTGANIHVGRGSSLLMGNGSLAAVHGVGTVDLKFTSGKTVQLKNVQHVPSIKKNLVSGSLLCREGFRLVFESNKCVVSKYGTFVGKGYDSGGLFRFSLNDMCNNHNAVNHISKNDESNVWHSRLCHVNFGCMTRLANMSLIPKFTLVKGSKCHTCVQSKQPRKPHKASEARNLAPLELVHSDLCEMNGVLTKGGKKYFMTLIDDCTRFCYVYLLKTKDEALHYFKIYKAEVENQLERKIKRLRSDRGGEYFSNEFASFCEEFGIIHEMTPPYSPQSNGVAERKNRTLTEMVNAMLDTAGLSKEWWGEAVLTACHVLNKIPMKHKEVTPFEEWERKKLNLSYLRTWCCMAKSRDATFFENEFPMKYTPSTSSKETVMPHEHFAPIEHNDQTPEENPEEDNIVDTRKSKRQRVAKSFGDDYIVYLVDDTPRTIEEAYSSPDADYWKEAVRSEMDSIMSNGTWEVVERPYGCKPVGCKWVFKKKLRPDGTIEKYKARLVAKGYTQKESEDFFDTYSPVARLTTIRQAPKQWHEKFDTTLTSAGFVVNEADKCVYYRYGGGEGVILCLYVDDILIFGTSLNVIEEVKDYLSKSFEMKDLGEADVILNIKLQRGDEGGITLVQSHYVDKVLSRFGYSDCKPAPTPYDPSMLLRKNRRIARDQLRYSQIIGSLMYLASATRPDISFAVSKLSRFVSNPGDDHWQALERVMRYLKGTMSYGIHYTGYPKVLEGYSDSNWISDADEIKATSGYVFTLGVEAELTALDTATVEAEWLRELLMDLPVVEKP

SEQ ID NO: 26214 - protein, 1447 aa, Oryza sativa
  Clone ID: TF_OsC1713_5234.pep
MSGVAAAAIGGGGAPPPTGAGSGAGAPGGGAVNDYNNGGNSASPSSGGPFSGYNLLLLLLLALLLFPLLALYCVRYVLVPVLHDASSMLSHYWYVPVSDIHDAHSMLLVMLRSPYTAYAMIIVLISRIKICRIMTIFPTIQKPDRSFSVVGFAAALKPHAFDGSNYKRWKARALLWLTAMQCFYVSRGKRSEPPLSPEEEAKFEASDCLFRGALISVLADNIVDVYMHMPSGKDMWDALEAKFGVSDAGSELYVMEQFYDYKMVDDRSVVEQAHEIQMLAKELENNNCELPDKFVAGGIIAKLPPSWSDFATSLKHKRQEFSVPDLIGSLGVEEKARAKDIRGKKVEGGSSANMVQKKNPHASHNNKKVKPDVKPKAATNFKKKGKGKAKGDCFVCGKSGHWAKDCPERKDRKSANMIISEGGGTSGYGKILPTVLSVFHSPDWWVDTGANIHVCADISLFSSYQVGRGSSLLMGNGSLAAVHGVGTVDLKFTSGKTVQLKNVQHVPSIKKNLVSGSLLCREGFRLVFESNKCVVSKYGTFVGKGYDSGGLFRFSLNDMCNNHNAVNHISENDESNVWHSRLCHVNFGCMMRLANMSLIPKFTLVKGSKCHTCVQSKQPRKPHKASEARNLAPLELVHSDLCEMNGVLTKGGKKYFMTLIDDCTRFCYAYLLKTKDEALHYFKIYKAEVENQLERKIKRLRSDRGGEYFSNEFASFCEEFGIIHEMMPPYSPQSNGVAEKKNRTLTEMVNAMLDTAGLSKEWWGEAVLTACHVLNKIPMKHKEVTPFEEWERKKLNLSYLRTWGCLAKVNVPIVKKRKLGPKTVDCVFLGYAIHSVGYRFLIVNSGVPDMHAGTIFESRDATFFENEFPMKYTSSTSSKETVMPHEHFAPIEHNDQTSEENPEEDNIVDTRKSKRQRVAKSFGDDYIVYLVDDTPRTIEEAYSSPDADYWKEAVRSEMDSIMSNGTWEVVERPYGCKPVGCKWVFKKKLRPDGTIEKYKARLVAKGYTQKEGEDFFDTYSPVARLTTIRVLLALAASHGLLVHQMDVKTAFLNGELEEEIYMDQPDGYVLEGQEGMVCKLLKYLYGLKQAPKQWHEKFDTTLTSAGFVVNEADKCVYYRYGGGEGVILCLYVDDILIFGTSLNVIEEVKDYLSKSFEMKDLGEADVILNIKLQRGDEGGITLVQSHYVDKVLSRFGYSDCKPAPTPYDPSVLLRKNRRIARDQLRYSQIIGSLMYLASATRPDISFAVSKLSRFVSNPGDDHWQALERVMRYLKGTMSYGIHYTGYPKVLEGYSDSNWISDADEIKATSGYAFTLGGGAVSWKSCKQTILTRSTMEAELTALDTATVEAEWLRELLMDLPVVEKPVPAILMNCDNQTVIIKVNSSKDNMKSSRHIKRRLKSVRKQKNSGVIALDYVQTARNLADQFTKGLPRNVIDSASREMGLIPT

SEQ ID NO: 26215 - protein, 1234 aa, Oryza sativa
  Clone ID: TF_OsC1713_5259.pep
MSNTGDKEKETPVNTNGGNTASNSSGGPFLGYNLITLFQLEVLLLMFIAMSTLCHYVIVDAYSTLSMLMLITFTTITGSNPIVNIMFIILLFWIKICRIMTKFPTIQKPDRSFSVVGFAAALKPHAFDGPNYKRWKTRALLWLTAMQCFYVSRGKRSDPPLSPEEEAKFEASDCLFRGALISVLADNIVDVYMHMPSGKDMWDALEAKFGVSDAGSELYVMEQFYDYKMVDDRSVVEQAHEIQMLAKELENNNCELPDKFVAGGIIAKLPPSWSDFATSLKHKRQEFSVPDLIGSLGVEEKARAKDVRGKKVEGGSSANMVQKKNPHASHNNKKVKPDVKPKAATNFKKKSKGKAKGDCFVCGKSGHWAKDCPERKDRKSANMIISEDGGTSGYGKILPTVLSVFHSPDWWVDTGANIHVGRGSSLLMGNGSLAAVHGVGTVDLKFTSGKTVQLKNVQHVLSIKKNLVSGSLLCREDFRLVFESNKCVVSKYGTFVGKGYDSGGLFRFSLNDMSNNHNAVNHISENDESNENQTVGSDRGGEYFSNEFASFCEEFGIIHEMTPPYSPQSNGVAERKNRTLTEMVNAMLDTAGLSKEWWGEAVLTACHVLNKIPMKHKEVTPFEEWERKKLNLSYLRTWGCLAKVNVPIAKKRKLGPKTVDCVFLGYAIHSVGYRFLIVNSGVPDMHVGTILESRDATFFENEFPMKYTPSTSSKETVMPHEHFAPIEHNDQTPEENPEEGNIVDTRKSKRQRVAKSFGDDYIVYLVDDTPRTIEEAYSSPDADYWKEAVRSEMDSIMSNGTWEVVERPYGCKPVGCKWVFKKKLRPDGTIEKYKARLVAKGYTQKEGEDFFDTYSPVARLTTIRVLLALAASHGLLVHQMDVKTAFLNGELEEEIYMDQPDGYVLEGQEGMVCKLLKSLYGLKQAPKQWHEKFDTTLTSAGFVVNEADKCVYYRYGGGEGVILCLYVDDILIFGTSLNVIEEVKDYLSKSFEMKDLGEADVIINIKLQRGDEGGIHLCNPTMWTSATRPDISFAVSKLSRFVSNPGDDHWQALERVMRYLKGTMSYGIHYTGYPKVLEGYSDSNWISDADEIKATSGYVFTLGGGVVSWKSCKQTILTRSTMEAELTALDTATVEAEWLRELLIDLPVVEKPVPAILMNCDNQTVIIKVNSSKDNMKSSRHIKRRLKSVRKQKNSGVIALDYVQTARNLADQFTKGLPRNVIDSASREIGLIPT

SEQ ID NO: 26216 - protein, 1253 aa, Oryza sativa
  Clone ID: TF_OsC1713_5387.pep
MLLRYCNVPVSDIHDAHSMLLHDASSMLLRYCNIPVPDIHDTHSMLLVMLRSPYTAYAMIIVLTFWIKICRFMTIFPTIQKPDRSFSVVGFAAALKPHAFDGSNYKRWKACALLWLTAMQYFYVSRGKRSEPPLSPEEEAKFEALDCLFRGALISVLADNIVDVYMHMPSGKDMWDALEAKFGVSDAGSELYVMEQFYDYKMVDDRSVVDQPHEIQMLAKKLENNNCELPDKFVAGGIIAKLPTSWSDFATSLKHKRQEFSVSDLIGSLGVEKKARAKDVRGKKVEGGSSANMVQKKNPHASHNNKKVKPDVKPKAATNFKKKGKGKAKGDCFVCGKSGHWAKDCPERKDRKSANMVISEGGGTSGYGKILPTVLSVLHLPDWWVDTGANIHVGRGSSLLMGNGSLAAVHGVGSKCHTCIQSKQPRKPHKSSEARNLAPLELVHSDLCEMNDVLTKGGKKYFMTLIDDCTRFCYVYLLKTKDKALHYFKIYKAEAENQLERKIKRLRSDRSGEYFSNEFASFCEEFGIIHERTPPYSPQSNGVAERKNRTLTEMVNAMLDTSGLSKEWWGEAVLTTYHVLNKIPMKHKEVTPFEEWERKKLNLSYLRTWGCLAKVNVPIAKKRKLGPNTVDCVFLGYAIHSVGYRFLIVNFGVPDMHVGTILESRDATFFENEFPMKHTPSTSSKETVMPHEHFAPVEHNDQTPEENPEEDNIVDTRKSKRQRVAKSFGDDYIVYLVDDTSRTIEEAYSSPDADYWKEAVRSEMDSIMSNGTWEVVELSYGCKPVGCKWVFKKKLIPDGTIEKYKARLAAKGYTQKEGEDFFDTYSPVARLTTIRVLLALAASHGLLVYQMDVKTAFLNGELEEEIYMDQLDGYVLEGQEGMVCKLLKSLYGLKQAPKQWHEKFDTTLTSAGFVVNETDKCVYYRYGGGEGVILCLYVDDILIFGTSLNVIEEVKDYLSKSFEIKDLGEADVILNIKLQIGDEGGITLVQSHYVDKVLSRFGYSDCKPAPTPYDPSVLLRKNRRIARDQLRYSQIIGSLMYLASATRPDISFAVSKLSRFVSNPGHDHWQALERVMRYLKGTMSYGIHYTGYPKVLEGYSDSNWISDADEIKATSGYVFTLGGGAVSWKSCKQTILTRSTMEAELTALDTATVEAEWLHELLMDLPVVEKSVPAILMNCDNQTVIIKVNSSKDNTKSSRHIKRRLKSVRKQKNSGVIALDYVQTARNLADQFTKGLPRNVIDNASREMGLIPT

SEQ ID NO: 26217 - protein, 591 aa, Oryza sativa
  unsure (1)..(591): unsure at all Xaa locations
  Clone ID: TF_OsC1713_5421.pep
MGLGGGGRPVEVSLEGLRSLAVTSRPRQNLPWFGKVSGIDKWRMDRQWMYADRRSKEFIDGVHYFLRVAKANRQRGFICCPCNKCKNQKEYSAFRTIHFHLFESGFMPSYNCWTSHGEQGVEMEEDEVEDDNIPDFAQYVGFEGNQTGEEEIAADGNDVADDLGQMLQDAREDCESEKEAHKLDKMLEDHRTSLYPGCEQGHKKLDTTLELLQWKAKNGVSDKAFGDLLKLVKNILPGGNKLPEKTYEAKKIVCPLGLEVHKIHACPNDCILYRGEEYENLEACHVCKALRYKIRRDDPGEVDGQLTKKRIPAKVMWYFPIIPRLRRLFRNKGNARMLRWHAEERQQDGMLRHPADGSQWRNIDRKFKEFGKDARNIRFGLSTDGMNPFGEMSSGHSTWPVTMCIYNLPPWLCMKRKYIMMPIIIQGPKQPGNDIDVYLRPLVEDLKQLWKKEGVPVWDEDKQEEFNLRALLFVTINAXPALSNLSGQSNKGYKACTHSNHPVRKKGKHFEHKADHCVYGKSKDTLEARNDLKHMEQRGDLHPEPKEKGSHYLSPASYTLSKGYPSRQCPGNNNKAMCIHERNFAEGHRSG

SEQ ID NO: 26218 - protein, 1397 aa, Oryza sativa
  Clone ID: TF_OsC1713_5483.pep
VALASPLLISCAHERLEGAVPPKPHLCLRSAPGRRVIRFLGSASRTTAHHHVWSCHRHCWRRWYAADRSSIRSWCARRCRERQQQRRQFATAGGGGTPPTGAGSGAGAPGGAVNDNNNGGNSASPSSGGPFSGYNLLLLLLLLALSLYYVRYVLVPVLHGASSMLSRYCYVPVPDIQDAHSMLLVMLRSPYTAYAMIIALTFWIKICRLMTIFPTIQKPDRSFSVVGFAAALKPHAFDGSNYKRWKARALLWLTAMQCFYVSRGKRSEPPLSPEEEAKFEASDCLFRGALISVLADNIVDVYMHMPSGKDMWDALEAKFGVSDAGSELYVMEQFYDYKMVDDRSVVEQAHEIQMLAKELENNNCELPDKFVAGGIIAKLPPSWSDFATSLKHKRQEFSVPDLIGSLGVEKKARAKDVQGKKVEGGSSANMVQKKNPHASHNNKKVKPDVKPKTATNFKKKGKGKAKGDCFVCGKSGHWAKDCPERKDRKSANMIISEGGGTSGYGKILPTVLSVFHSPDWWVDTGANIHVCADISLFSSYQVGRGSSLLIGNGSLAAVHGVGTVDLKFTSGKTVQLKNVQHVPSIKKNLVSGSLLCREGFRLVFESNKCVVSKYGTFVGKGYDSGGLFRFSLNDMCNNHNAVNHISENDESNVWHSRLCHVNFGCMTRLANMSLISKFTLVKGSKYHTCVQSKQPRKPHKASEARNLAPLEHVHSDLCEMNGVLTKGGKKYFMTLIDDCTRFCYVYLLKTKDETLHYFKIYKAEVENQLERKIKRLRSDRGGEYFSNEFASFCEEFGIIHEMTPPYSPQSNGVAERKNRTLTEMVNTMLDTAGLSKEWWGEAVLTACHVLNKIPMKHKEVTPFEEWERKKLNLSYLRTWGCLAKVNVPIAKKRKLGPKTVDCVFLGYAIHSVDYRFLIVNSGVPDMHVGTILESRDATFFENEFPMKYTPSTSSKETVMPHEHFAPIEHNDQTPKENPEEDNIVDTRKSKRQRVAKSFGDDYIVYLVDDTPRTIEEAYSSPDADYWKEAVRSEMDSIMSNGTWEVVERPYGCKPVGCKWVFKKKLRPDGTIEKYKARLVAKGYTQKEGEDFFDTYSPVARLTTIRVLLALAASHGLLVHQMDVKTAFLNGELEEEIYMDQPDGYVLEGQEGMVCKLLKSLYGLKQAPKQWHEKFDTTLTSAGFVVNEADKCVYYRYGGGEGVILCLYVDDILIFGTSLNVIEEVKDYLSKSFEMKDLGEADVILNIKLQRGDEGGITLMQSHYVDKVLNHFGYSDCKPAPTPYDPSVLLRKNQRIVRDQLRYSQIIGSLMYLASATRPDISFAVSKLSRFVSNPGDDHWQALERVMRYLKGTMSYGIHYTGYPKVLEGYSDSNWISDADEIKATSRYVVILGGGAVS

SEQ ID NO: 26219 - protein, 1540 aa, Oryza sativa
  unsure (1)..(1540): unsure at all Xaa locations
  Clone ID: TF_OsC1713_5486.pep
MASLGANPSVFVAWLRPSASPYCFAPSALLWTQSTPSGFGGFSSPTSCNRSSACLWSLQKDRGDADMCENEMKREPPQRQVVLPTVITVLQPCQHCHWRRAGDQVFGSSRRDYSLFVNIYFTFTNMSNTGDKEKETPVNTNGGNTASNSSGGPFLGYNLITLFQLEVLLLMFIAMSTLCHYVIVDAYSTLSMLMLITFTTITGSNPIVNIMIIILLFWIKICRIMTKFPTIQKPDRSFSVVGFAAALKPHAFDGSNYKRWKARALLWLTAMQCFYVSRGKRSEPPLSPEEEAKFEASDCLFRGALISVLADNIVDVYMHMPSGKDMWDALEAKFGVSDAGSELYVMEQFYDYKMVDDRSVVEQAHEIQMLAKELENNNCELPDKFVAGGIIAKLPPSWSDFATSLKHKRQEFSVPDLIGSLGVEEKARAKDVRGKKVEGGSSANMVQKKNPHASHNNKKVKPDVKPKAATNFKKKSKGKAKGDCFVCGKSGHWAKDCPERKDRKSANMIISEGGGTSGYGKILPTVLSVFHSPDWWVDTGANIHVCADISLFSSYQVGRGSSLLMGNGSLAAVHGVGTVDLKFTSGKTVQLKNVQHVPSIKKNLVSGSLLCREGFRLVFESNKCVVSKYGTFVGKGYDSGGLFRFSLNDMCNNHNAVNHISENDESNVWHSRLCHVNFGCMTRLANMSLIPKFTLVKGSKCHTCVQSKQPRKPHKASEARNLAPLELVHSDLCEMNGVLTKGGKKYFMTLIDDCTRFCYVYLLKTKDEALHFFKIYKAEVENQLERKIKRLRSDRGGEYFSNEFASFCEEFGIIHEMTPPYSPQSNGVAERKNRTLTEMVNAMLDSAGLSKEWWGEAVLTACHVLNKIPMKHKEVTPFEEWERKKLNLSYLRTWGCLAKVNVPIAKKRKLGPKTVDCVFLGYAIHSVGYRFLIVNSRVPDMHVGTILESRDATFFENEFPMKYTPSTSSKETVMPHEHFAPIEHNDQTPEENPEEDNIVDTRKSKRQRVAKSFGDDYIVYLVDDTPRTIEEAYSSPDADYWKEAVRSEMDSIMSNGTWEVVERPYGCKPVGCKWVFKKKLRPDGTIEKYKARLVAKGYTQKEGEDFFDTYSPVARLTTIRVLLALAASHGLLVHLXQMDVKTAFLNGELEEEIYMDQPDGYVLEGQEGMVCKLLKSLYGLKQAPKQWHEKFDTTLTSAGFVVNEADKCVYYRYGGGEGVILCLYVDDILIFGTSLNVIEEVKDYLSKSFEMKDLGEADVILNIKLQRGDEGGITLVQSHYVDKVLSRFGYSDCKPAPTPYDPSVLLRKNRRIARDQLRYSQIIGSLMYLASATRPDISFAVSKLSRFVSNPGDDHWQALERVMRYLKGTMSYGIHYTGYPKVLEGYSDSNWISDADEIKATSGYVFTLGGGAVSWKSCKQTILTRSTMEAELTALDTATVEAEWLRELLMDLPVVEKPVPAILMNCDNQTVIIKVNSSKDNMKSSRHIKRRLKSVRKQKNSGVIALDYVQTARNLADQFTKGLPRNVIDSASREMGLIPT

SEQ ID NO: 26220 - protein, 1259 aa, Oryza sativa
  unsure (1)..(1259): unsure at all Xaa locations
  Clone ID: TF_OsC1528_2046.pep
MSMQCARHSRSGHCGHLARSARGVKRLLGPLMMVEPLILMHRCYHLPQTRVAKVCCLALNPKQRWDSGSGNIKEIKIRGELGLRDEQSSSDAALTWQSTRTLRKHLLIRRGECWSEYSSIVNTDDEAKATCNSFCETCWKILRFRSNQTFHQLNPFLNLRNRCNRVKHGNPMVVLQFHLEIISLSFGKLENRGRNVLRGRLRYLQGKDFRLPVKEGRRPSTSIPEHDIGKISVLIKSLYAYNLNNPKTYYRHCDFTMAGFADALRPDKFTGVHFKRWQIRVTLWLTAMKCFWVSTGKPEGVLTAEQQKQFEEATTLCVGCILSVLGDRLVEVYMHMTDAKELWDALNTKFGATDASNDLYIMEQFHDYKMADNRSVVEQAHEIQTMAKELELLKCVLPDKFVARCIIAKLPPSWRSFGTALKHKRQEYSVEGLIASLDVEEKAREKDAASKGDGGQSSANVVHKAQNKSKGKYKAQQTTNFKKQKKNNNNPNQDERTCFVCGQLGHLARKCPQRKGMKAPTGQTSKSANVTISNTGDGSGYGNLPAIFSVNQSTNWWVDTRSNVARGSTVLMGNGSHVSVHGVGTVDLKFTSGKIVQLKNVQHVPSIDRNLVSGSRLTRAGFKLVFESNKVVVSKHGYFIGKGYECGGLFRFSLSDFCNKSVNHICGSVDDEANVWHSRLCHINFGLMSRLSSMCLIPKFSIVKGSKCHSCVQSKQPRKPHKVAEERNLAPLELLHSDLCEMNGVLTKGGKRYFMTLIDDATRFCYVYLLKTKDEALDYFKIYKAEVENQLDRKIKRLMSDRSGEFFSNEFDLFCEEQDIIHERTPPYSPESNGIAKRKNRTLTDLVNAMLDTAGLPKAWWGEALLTSNYVLNRVPNRNKDKTPYEIWIGRKPSLSYLRTWGCLAQVNVPITNKHKLGPKTVDCVFLGYAYHNIAYRFLIVKSEVPDMHVGXIMKSRDATFFESFFPMKDTHSSSSQPSEVIPSSITPPEQTEHTHEYVTEEDVSEAPRRSKRQRTAKSFGDDFIVYLVDDTPKSISEAYASPDADYXKEVVCSEMDSIIANGTWEVTERPYGCKPVGCKXVFKKKLRPDGTIEKYKVRLVTKGYTQKEGEYFFDTYSPVARLTTIRVLLSLAASHSLLVHQMDVKTAFLNGELDEEIYMDQPDGFVVEGQEGKMCKLLKSLYGLKHAPKQWHEKFDKTLTSTGFAVNEADKCVYYSHGGGEGVILCLYVDDILIFGTNLEVINEVTSTLSLHRPVSEA

SEQ ID NO: 26221 - protein, 319 aa, Oryza sativa; identical to SEQ ID NO: 20506
  Clone ID: TF_OsC108353_1.pep

SEQ ID NO: 26222 - protein, 2664 aa, Oryza sativa
  Clone ID: TF_OsC359_7779.pep
MPRYKPEYLFGVEGFVQELRTMSFVIGFGTAPFYAQIPHDRHEEKCRVKVTLNSNSEEVPSVMFEAGGRNYIHACQEVARIAIGELRDRYSDQLADTEYRYHPRQPQGSDRGSYLETEGIENDVTTKHLVEMLWAMDESRAETVLAAQDREDRNRGKICKLEDKVDRLEKELAALKGEAPPQKARIRLTARKRALFVPRYQLAPKVRVVEKEVAPAQADPPVIIISSDEEEESKRNHSKIEWVATQDDEDEPSIDLRCLEELDTTNPVEASDWLHAIEKKLDLLQCTDQEKVSFASHQLHGPASEWWDHFRLNRTTAEPITWLEFTAAFRKTHIPSGVVSLKKKEFRSLSQGSRSVTEYLHEFNRLARYAPEDVRNDEERQEKFLGGLNDELSYPLMVGDYPDFQKLVDKAIRQEDKYNRMEQKKRRIAQFKTQQGNNQKPRLTLGPQSMPQGGSSSVVRPQRQFFNNNAGNNIRNQAPRPVAAPAQQQPAKREQGNKPVVCFNCGDPGHYADKCPKPRRVKVVPAQNNSAVPASKARVNHVAAAEAQDAPDVILVREYPDVFPDDLPANELAEVKRQVDDLLQKGYIRPSSSPWGAPVIFVEKKDHTQRMCVDYRALNDVTIKNKYPLPRIDDLFDQLKGATVFSKIDLRSGYHQLRIKEEDIPKTAFTTRYGLFECTVMSFGLTNAPAFFMNLMNKVFMEYLDKFVVVFIDDILIYSRTKEEHEEHLRLALEKLREHQLYAKFSKCEFWLSEVKFLGHVISAGGVAVDPSNVESVTNWKQPKTVSEIRSFLGLAGYYRRFIENFSKIAKPMTRLLQKDVKYKWSEESLEAKPTLIDQVREAQINDPDIQEIKKNMRRGKAIGFLEDEQGTPCSAVAPAVAAAREDRRRHRQVAAVLVRPFAAVGTRRSFVAVDNPKVAAASFSSPSSSKIPSFPESPFSQKKSLKSSKASKATPGLEWYIPGLEIELCSRGGCSEWLGLYNRMPRYKPEYLFGVEGFVQELRTMSFVIGFGTAPFYAQIRHDRHEERCRVKVTLNSNSEDIPSVMFEAGGRNYIHACQEVARIAIGELRDRYSDQLADTEYRYHPRQPQGSDRGSYLETEGIENDATTRHLVEMLWAMDESRAETVLAAQDREDRNRGKICKLEDKVDRLEKELAALKGEAPPQKARIRLTARKRTLFVPRYQLAPKMVNTRSNGNGPNLNNPNNNNNGENPTLAQVLAQQTQLMNMMMQQFQNQQNQGNNHVPPQNKLAEFLRVRPPVFSSTTNPVEASDWLHAIEKKLDLLQCTDQEKVSFASHQLHGPASEWWDHFRLNRTTAEPITWLEFTAAFRKTHIPSGVVSLKKKEFRSLSQGSRSVTEYLHEFNRLARYAPEDVRNDEERQEKFLGGLNDELSYPLMVGDYPDFQKLVDKAIRQEDKYNRMEQKKRRIAQFKTQQGNNQKPRLTLGPQPMPQGGSSSVVRPQRQFFNNNAGNNIRNLAPRPVAVPAQQQPAKREQGNKPVVCFNCGDPGHYADKCPKPRRVKVVPAQNNSAVPTSKARVNHVAAAEAQDAPDVILGMFLVNSVPATVLFDSGATHSFLSMSFAGNHGMEVEDLRCPLMVSTPSNQALSLQRSPSVRIEIQGVPFLANLILLESKDLDVILGMDWLARHKGVIDCANRKVTLNSYDGRVVTVHALSSESLRSRLNQITLEEIPIVREYPDVFPDDLPGMPPKRDIEFRIDLVPGTTPIHKRPYRMAANELAEVKRQVDDLLQKGYIRPSSSPWGAPVIFVEKKDHTQRMCVDYRALNDVTIKNKYPLPRIDDLFDQLKGATVFSKIDLRSGYHQLRIKEEDIPKTAFTTRYGLFECTVMSFGLTNAPAFFMNLMNKVFMEYLDKFVVVFIDDILIYSRTKEEHEEHLRLALEKLREHQLYAKFSKCEFWLSEVKFLGHIISAGGVAVDPSNVESVTNWKQPKTVSEIRSFLGLAGYYRRFIENFSKIAKPMTRLLQKDVKYKWSEECEQSFQELKSRLISAPILILPDPKKGFQVYCDASKLGLGCVLMQDGKVVAYASRQLRPHEKNYPTHDIELAAVVHALKIWRHYLFGTRTEVYTDHKSLKYIFTQSDLNMRQRRWLELIKDYDMGIHYHPGKANVVADALSRKGYCNATEGRQLPLELCKEFERLNLGIVGRGFVAALEAKPTLIDQVREAQINDPDIQEIKKNMRRGKAIGFLEDEHGTVWLGERICVPDNKDLKDAILKEAHDTLYSIHPGSTKMYQDLKERFWWASMKREIAEYVAVCDVCQRVKAEHQKPAGLLQPLKIPEWKWEEIGMDFITGLPRTSSGHDSIWVIVDRLTKVAHFIPVKTTYSGSRLAELYMARIVCLHGVPKKIVSDRGSQFTSNFWKKLQEEMGSKLNFSTAYHPQTDGQTERVNQILEDMLRACALDFGGSWDKNLPYAEFSYNNSYQASLQMAPYEALYGRKCRTPLLWDQTGERQVFGTDILREAEEKVKIIQERLRVAQSRHKSYADNRRRDLSFEEGDYVYLRVTPLRGVHRFHTKGKLAPRFVGPYKIVSRRGEVAYQLELPQSLAGVHNVFHVSQLKKCLRVPTEEANIEQIEVQEDLTYVEKPIRILETNERRTRNRVIRFCKVQWSNHSEEESTWEREDELKSAHPHLFASSSESRGRDSV

SEQ ID NO: 26223 - protein, 1266 aa, Oryza sativa
  Clone ID: TF_OsC1713_4911.pep
MEGAVPPKPHLRLRSAPGRRVIRFLGSASRTTARLLIAMSGVAAATAGGGGTPPTGAGSGAGAPGGAVNDNNNGGNSASPSSGGPFSGYTLLLLLLLLALFLFPLLALSLYYVRYVLVPVLHNASSMLSCYWYVPVPDIHDAHSMLLVMLRSPYTAYAMIIALTFWIKICRLMTIFPTIQKPDRSFSVVGFAAALKPHAFDGSNYKRWKARALLWLTAMQCFYVSRGKRSEPPLSPEEEAKFEASDCLFRGALISVLADNIVDVYMHMPSGKDMWDALEAKFGVSDAGSELYVMEQFYDYKMVDDRSVVEQAHEIQMLAKELENNNCELPDKFVAGGIIAKLPPSWSDFATSLKHKRQEFSVPDLIGSLGVEEKARAKDVRGKKVEGGSSANMVQKKNPHASHNNKKVKPDVKPKAATNFKKKGKGKAKGDCFVCGKYGHWAKDCPERKDRKSANMVISEGGGTSGYGKILPTVLSVFHSPDWWVDTGANIHVGRGSSLLMGNGSLAAVHGVGTVDLKFTSGKTVQLKNVQHVPSIKKNLVSGSLLCREGFRLVFESNKCVVSKYGTFVGKGSKCHTCVQSKQPRKAHKASEARNLAPLELVHSDLCEMNGVLTKGGKKYFMTLIDDCTRFCYVYLLKTKDEALHYFKIYKAEVENQLERKIKRLRSDRGGEYFSNEFASFCEEFGIIHEMMPPYSPQSNGVAERKNRTLTEMVNAMLDTAGLSKEWWGEAVLTACHVLNKIPMKHKEVNVPIAKKRKLGPKTVDCVFFGYAIHSVGYRFLIVNSGVPDMHAGTILESRDATFFENEFPMKYTPSTSSKETVMPHEHFAPIEHNDQTPEENPEEDNIVDTRKRKRQRVAKSFGDDYIVYLVDDTPRTIEEAYSSPDADYWKEAVRSEMDSIMSNGTWEVVERPYGCKPVGCKWVFKKKLRPDGTIEKYKARLVAKGYTQKEGEDFFDTYSPVARLTTIRVLLALAASHGLLVHQMDVKTAFLNGELEEEIYMDQPDRYVLEGQEGMVCKLLKSLYGLKQAPKQWHEKFDTTLTSAGFVVNEADKCLYYRYGGGEGVILCLYVDDILIFGTSLNVIEEVKDYLSKSFEKKDLGEADVILNIKLQKGDEGGITLVQSHYVDKVLSRFGYSDCKPAPTPYDPSVLLRKNRRIVRDQLRYSQIIGSLMYLASATRPDISFAVSKLSRFVSNPGDDHWQALERVMRYLKGTTSYGIHYTGYPKVLEGYSDSNWISDADEIKATSGYVFTLGGGAVSWKSCK

SEQ ID NO: 26224 - protein, 936 aa, Oryza sativa
  Clone ID: TF_OsC1713_5111.pep
MSTTGDNNNTGDKEKEPPVNTNRGNTASNSSGGPLSGVLADNIVDVYMHMPSGKDMWDALEAKFGVFDAGSELYVMEQFYDYKMVDDRSVVEQAHEIQMLAKELENNNCELPDKFVAAGIIAKLPPSWSDFATSLKHKRQEFGVTDLIGSLGVEEKARAKDNRSKKIKGGSSANLVQKKNPHASHNNNKKVKPDVKPKATTNFKKKGKGKAKGDCFVCGKYGHWAKDCPECKDKKSASMVIGEGGGTLRYGKFLPTVLFVCHSPDWWVDTGANIHVGRCSSLLMGNGSLAAVHGVGYDSGGLFRFSLDDMCNKVVNHDEALHYFKIYKAEVENQTGKENQTVEYGIIHERTPPYSPQSNGVAERKNRTLTEMVNAMLDTAGLSKEWWGEAILTACHVLNRIPTKHKEVTQFEEWERKKLNLSHLRTWGYLAKVNVPIAKKRKLGPKTVDCVFLGYAIHSVGYRFLIVNSRVPDMRIGTITESRDATFFENEFPMKNAPSTSSQEPILSPEHFAPIEYIDQTLEENPVEDNIMDVKTAFLNGELEEEIYMDQPDGYVLESQEGMVCKLLKSLYGLKQAPKQWHEKFDNTLTSAGFVVNEADKCVYYRCGGGEGVILCLYVDDILIFGTSLNVIEEVKDFLSKSFEMTDLRVADVILNIKLLRGDEGGITLVQSHYVDKVLSRFGYSDCKAAPTPYDPRTMSYGIHYAGYPKVLEGYSDSNWISDADEIKATSGYVFTLGESFPGSVHLRAQVYGTSRCLRNSVRLRTCTGRRAIKFLGSASSATAPVLRDYYYCIDAFVNMSMEIGDKEVNDINGGNTASKSSGGTFLGEILLSGRKFTWANSMPSPTYKNAASASARAPPSLPRVQPSAAAAPVTAVAPEGHRQVRKVATVLIPSSVSAKDCRSAAAIDDPKTAAASTSLPSSSKPPVSCRVALYA

SEQ ID NO: 26225 - protein, 566 aa, Oryza sativa
  unsure (1)..(566): unsure at all Xaa locations
  Clone ID: TF_OsC359_7392.pep
MLFAKGFSVLPSSDFQLVLDGQLCEEEDVVNCLPKLRKTAXGSASEVEEAVKPAVKQDKRLRSVKVLSLVSNLSLPFVFPLSLSKPLQQMADNEKGNKVRSQDIGTSSSRVNEAPDTSCVAVVQHLINQNQLLIEILQQHRMPILNPSQMQHQVQLEAVQALTPQVSAPPTSQKAPHAMPHVDPKEASIICFMCDEQGHYARNCPQQKRKAPMRTEDEVRKMIITSTEWPPPGMTKHQRRNSSRGAQQLTEHLLANGGRVSGSEDSDQVSSDDEDAKSPQGFNQNKIELKACSRCGEIGHVASSCASTCVHCEEDHPPDRCPTSRITCFFCEGTDHVPKDCQFSFLLTKKMANQPASSNGEKHQGNTNPRQGHRFSLTPVPGQRNRNEKRKCRVREDICCFNCQGMGHFADKCPKPRNIAAGTSVHATPCNQKLAPQRIVIHASRSSPIARVATAPIPMNALPQGVNAQFQPQPPADKTGASICVVPLEVPIQQLRNQVQDEEPECKKVIVCYNCSEEGHYSKNCPQPRQNRPPHYRQFTRSRHSNRIVVTGANAVPVRPRVNQNP

SEQ ID NO: 26226 - protein, 645 aa, Oryza sativa
  Clone ID: TF_OsC359_7849.pep
MADNEKGNKVRSQDIGTSSSRVNEAPDTSCVAVVQHLINQNQLLIEILQQHRMPILNPSQMQPQVQLEAVQALTPQVSAPPTSQKAPHAMPHVDPKEASIICFMCDEQGHYARNCPQQKRKAPMRTEDEVRKMIITSTEWPPPGMTKHQRRDSFRGAQQLTEHLLASGGRVSDSEDSDQVSSDDEDEKSPQGFNQNKIELKACSRCGEIGHVASSCASTCVHCKEDHPPDRCPTSRITCFFCEGTDHVPKDCQFSFLLTKKMANQPASSNGEKHQGNTNPRQDHRFSLTPVPGQRNRNEKRKCRVREDICCFNCQGMGHFADKCPKPRNIAAGTSVHATPCNQKLAPQRIVIHASRSSPIARVATTPIPMSALTQGVNAQFQPQPPADKTEASICVVPLEVPIQQLRNQVQDEEPECKKVIVCYNCSEEGHYSKNCPQPRQNRPPHYRQFTRSRHSNRIVVTGANAVPAEPRAINLRRAIPSRRPSSASTSNQKEASPVNDSSMQSYHIITEPIEDAVTGTMPAISLQNQNEQPCLWFSVRYLSWCNRKFAAIIFMSINIDNLSEVDSEDMNHEKFWNGSITELPQPSLSQPKGAPWSKSGEEKIPSATGGQAKQFRVVKFCWKFVKTQRKKSDKKRSPPNLSSC

SEQ ID NO: 26227 - protein, 530 aa, Oryza sativa
  Clone ID: TF_OsC359_5515.pep
MRASKHSSLAGAGVLAPGDGTLVPVRYIPGFIRFMTGLTMVMSSADSHVPTSRLLPAEVETKSLEPHPGPPAEPAKGGLRGLPVRSPKLRQKVFARSPEKDEKQCPGSNQAPCQSTDKKDGTLQPNSGANRTVIWKMDNGRTMIITGSEFTPEDAARIPKRQRGRNTFRGARQLTRHLIKYGPPRPEDDESGERFSADDDDDNDDDNDDNDDATLDSFRERELKFKACARCGIVGHTASLCLPTCRCGEYTHYSNACPLRKVTCFLCEGTDHVPKDCQLNAVIAKTKKEQGTTVQPIRQPMTIDNSGHNPSALPPTPAPVEANHGRSNVTKDVHKSLLVPVSAAKVHNQKPAPRDQASRFCRNCHKPGHRFSDCPLPRAAKAVRRDSQVTSTAHDTNRHLNVQPPPQRIIVKGTVKGRIVPPAIVSSLQHQRQQGKQCQENNSSLQLQRGGTLPRQHPRQVLSATGRPTVVSSSNAPRIAPIWRPIDKSPLGNPTGKKILPVTADKTVAPPPSKINKQSNVPGETSGSRN

SEQ ID NO: 26228 - protein, 524 aa, Oryza sativa
  Clone ID: TF_OsC359_7154.pep
MVGLGWLGTSWDPGSGCQFGLNHRRPWVKAVLDGQLCEEEDVVSCLPKLRKTAGSASEAKEAVKPAVKQDKRLRSVKVLSLVSNLSLPFVFPLSLSKPLQQMAVNEKGNKVRSQDIGTLSSRVNEAPDTSCVTLVQHLINQNRLLIEILQQHQTPILNLSQIQPQVQLEAVQALTPQVSMPPASRRTQGDVPHVDPKEASNICFMCDEQGHYARERPQQKRKTPMRTEDEVRKMIITSTEWPPPGMTRRQRRNTFRGAPQLTEHLLANGGRVSDSEDSDQVSSDDEDEMECKACSRCGEIGHVASSCATICVHCEEDHPPDRCPTSRITCFFCEGIDHVPKDCQFSFLLTKKMANQPASSNGEKHQGNTNPRQDYSFSLTPVPGQRNQNERRKCRVREDICCFNCQGMGHFADKCPKPRNIAASTSVHAAPCNQKLAPQRIVIHASQSSPMARVATAPTPASALPQGVNAHFQPQQRIVVDGRSCVSPRPTPGQAKGNRPPEGDTKQKTVIRLNQQSEGNFSCE

SEQ ID NO: 26229 - protein, 859 aa, Oryza sativa
  Clone ID: TF_OsC359_6375.pep
MEMDEVGGRWTSVPEVPAVGGVGSVLLSMARMGWKLCHVFRPYAVVNKPNIHHNSKRLRSVKVLSLVSNLSLPFVFPLSLSKPLQQMADNEKGNKVRSQDIGTSSSRVNEAPDTSCVTLVQHLINQNRLLIEILQQHQTPILNLSQIQPQVQLEAVQALTPQVSMPPASRRTHGDVPHVDSKEASIICFMCDEQGHYARECPQQKRKTPMRTEDEVRKMIITSIEWPPPGMTKRQRRNTFRGAPQLTEHLLANGGRVSDSEDSDQVSSDDEDEKSPQGFNQNKMERKACSRCGEIGHVASSCATTCVHCEEDHPPDRCPTSRITCFFCEGTDHVPKDCQFSFLLTKKMANQPASSNGEKHQGNTNPRQDYSFSLTPVPGQRNQNEKRKCRVRKDICCFNCQGMGHFADKCPKPRNIAASTSVHATPCNQKLAPQRIVIHASRSSPIAPVATAPTPASALPQGVNAQLQPQPPVDNTEASIGIVPLDVPAQQPRNQNWNNPAGATNVQVPTVQQQCKLSEFLKTETPTFAIAVDPMEASDWLRTVEKKLGLVQCTDQERVVFATHQLISHVPAGMITLRKREFRYLNQEDLTVTEYLHEFHRLAHYAPEDVENDEDKQEKFLQALKDEIAVQLLLEEYEDFEKLVDKAIQLESEHNRMKNCKRRIVSIPVSSCGNQRQRTEPLQIIGSSVAHQEFPPQEDGHNADNNISNTNDDDTTNNHAPCPISDHSNQACNVNIIHQGVDDSIDDGTQNDNPSNCDSEKDSNGDSNYGTTDANVSKDFQPPIPTPSQNDRPQTDSSAKKTLICYNCKEPRHYSRDCLQPRQSRPPHYRQVTQSRHPNRIVVTGANTVPVRPRVNQNP

SEQ ID NO: 26230 - protein, 1933 aa, Oryza sativa
  unsure (1)..(1933): unsure at all Xaa locations
  Clone ID: TF_OsC359_6999.pep
MLDLGGKDGEIGNEDGASSKGTPSPKGATIPFDYRKLTIPSHNFVSVPSGRAPQFDGTHYAAWKHKMKLHLISLHPSIWKVVCTGIDVPHEDMELTSEKEQLIHRNAQASNAILSALSPEEFDKGSPAVREAKIELLEGRLGRFVMDDNETPQEMYDRMMILVNKIKGLGSEDMTNHFVVKRLLRAFGPRNPTLVSMIQERKDFKRLTPSDILGRIVSHKMQEEEAREVRQMVKNAAMIKNQEVALKAKQEEESSGEESEDEEMAFIVKRFKHFLRKSGYGKGRKVDDKGKRQSKRACFNCGEFGHFIADCPKSNEAKAKGGKKKLERAHVAEAHMAEVWYSGDEEDPEVKPKPKSKDKVEGEGGVATVTFKSSSSSKERLFNNLSDDDDDSYHYSCFMAQGRKVMTQKPSHTSLDVESSDEESDNELDDVLKSFSKPAMQHLAKLMRALDSTEQLLVRQEELLILEKKRNLALEESLAKESAKNKQLANELNFANGSLASLRDVNETLQEKFACLDKSHKVQIDTLWNSTSQPNVVSNSSNPSTSNGCARCYNIDLNSYATNIVAMQALKKENERLGTLVKYGCMKTYHSKDALYKTITAHPNKDGHGLGFSGGSPVSKRVMVNGKECLMFVREGKAPQASEVTNLVSSQGPGTSGQTGQNLRVGVSVSQKFPPGSSGQFARKFRANGRAQDITGSSEHNARRFWPDGLYYDSYVIFKNSEGKVVAYFNGNYNDEYRTCVWVPKALAYSSGGSSWVVDSGCTNHMTGERSMFTSLDEENGTRENIVFGDDGKGKLGYNCLFTDEDVTVFRRDDSSVAFKGKLKGDLYLVDFDVDRVNPEACLIAKSSMGWLWHRRLAHVGMRNLATLLKGEXSSGSLMSHLRKIRFAKQAQNLYDLTIKRVRSDNGGEFKNTQVEEFLDEVGIKHEFSAPYDPPQNGIVERKNRTLIEAARSMLDEYKTSDIFWAEAVSTACHAINRLYLHKILKKTSYELLSGKKPNVSYFRVFGSKCFILSKRPRSSKFSPKVDEGFLLGYESNAHAYRVFNKTSGIVEVTRDVTFDESNGFQGEQVVVHVVSDVDPSQAIGTKAIGDIRPVETQDDQEDRDQPSSSTSNSPKLSQVSVDPEVPGPDGRNLRTSPGQEVPGPSARKFRAEDSQGVPMAQVDGIDAEGTVEHPDQAQVPSVHHPRIHHTVQRDHPVDNILGDIRKGVTTRSRVASFCQHYSFVSSLESTRVEDALGDPDWVMAMLFQMDVKSAFLNGPISELVFVEQPPGFEDPKLPNHVYKLHKALYGLKQAPRAWYECLRDFLLKNGFEIGKADTTLFTKKFKSDLFICQIYVDDIIFGSTNASFCEEFSSIMTKRFEMSMMGELTFFLGLQVKQAQEGTFISQTKYVKDILKKFGMEDAKPIKTPMPTNGHLDLDDNGKCVDQKDVSGDESPPIRFPRGRLGKEKVVEGGSGSGTRTSPRFRRQTSNRPVQIRDVDSGQGSDAPSSRGRGRGGGRSSGAGRASHDFPVGSRENLVRLYKTIGFDTTPMHHIGRPKSNYLHQLAKCRRGRLIDPETQPEESQDPRFRTLTQLDWYNSVIMARDNLVVEMKWIDWTYMRKKNNEVFNQAMQVCHNKNLGDILALEYDWNEEVIAQFYATAFFGSTRKGTPYVKWMTEGVRHKISIAQFAEILGLEDEDLNRPNIHSEAPLPLIKTKFMYTKNAPRTCMGPTHGLHPNYKVLYSIFRWSLLPKVGDATALPSKHAHLLSRMRYNQPPFSVKLIWYEIANTILEPKRVAPRSIPSTSAGPSSSAPPPSSSSSPIKKALQAIFCMCAKTAKKVKKIERRQKEDRREAGKEVSDDSEDEVYVDPFEAYEAARNVAGEGPSTYFNEESSQSDDDDDDDDDEDDIDAAAEYVPTDVEEAVDTAAQSDESHLSGDTEIVPSDGDGDE

SEQ ID NO: 26231 - protein, 159 aa, Oryza sativa
  Clone ID: TF_LIB3434-029-P1-K1-D7.pep
VHQGAGATAGAEAEAEAGARARARARAGVAAGAGAEAEALGEKGCVVSVYHVAAAAAAVAVAQFVEENIAATGILYARIAGGLVTLLGIANLLLHATDAIFQDTSQQNALLKLFVGTASSLATLLPNARMTPCVTPAARQVIWHVIAQVQDLVSYATNV

SEQ ID NO: 26232 - protein, 231 aa, Oryza sativa
  unsure (1)..(231): unsure at all Xaa locations
  Clone ID: TF_OsC103556_1.pep
VHQGAGATAGAEAEAEAGARARARARAGVAAGAGAEAEALGEKGCVLFCQSPRLDPPQPPRDLICKNCRRPGHFARDCQSTATCNRCNLPGHFAAECTSETVCWNCKQSGHIATECKNDALCHTCSKTGHLARDCPSSXLPGHIARECTNEPVCNLCNVSGHLARNCQKTTISSEIQGGPFRDITCRLCGKPGHISRNCMTTMICGTCGGRGHMSYECPSARMFDRGLRRF

SEQ ID NO: 26233 - protein, 792 aa, Oryza sativa
  unsure (1)..(792): unsure at all Xaa locations
  Clone ID: TF_OsC1713_4732.pep
MDNTGNKGYGNDGSDDSRTQASGNEKSINKTSPELIQIVVNQTNMLATAFQLLQNWNNPAGTTNVQVPTVQQQCKLSEFLKTEPPTFAIAVDPMEASDWLRTIEKKLGLIQCTDQERVGFATPQLVGPASEWWDSYEASRPEGHTITWNEFSSVFRRSHVPAGMITLRKXEFRYLKQGDLTVTKYLHEFYRLAHYAPEDVETDEDKQEKFLQGLKDELAVQLLLEDYXDFEKLVDKAMQLESEHNRMTNCKRRIVNIPVFPCGNQRQRTEPLQITGSSVVHQEFLPQEDGRNADNNTSNTNDDDTTNNHGSCLISDHSNKACNVSSIHQDVNDSINVGIQNDNLSNFDTEKDSNGDSNYGTTDANVSKDFQPPIPTPSQNDRPQMDSSTKKTLICYNCKEPGHFSRDCPQPKRNLRHHSGHYARRRQVTRLVVTGANAIPVSLKGSKPKDLIVPRSVRNPXKEYHLLEISRKDSSRKKSIREIKNSVLEINSKTSSIRIRXQRLAPIFGGPQTSPASLMEPRSPAPASPSSSSTSPPAAPSTAPVHQPALPSPPSASPHRPPPRLLLGFAGTPSQRRPLHPLHRQCPFGRPFHLPGSSACCTSTIFGIAAATSSSASPPLXRTPPVSVVVFTVHPRRLAVSRRRLRRRHRSGVFHAILASVQPLPAALVVSSLAPVVVVVVLSSFPVVVAFVPPSSRSRXRPRFVKCAAAPSSSSSSPPRRQASCRPCLAFVPGSLPKSFPRRXAAPVRRCRSHASSRGGKDPSSRCPVLVLLVSPRTRCAVVDPGTRVPVS

SEQ ID NO: 26234 - protein, 803 aa, Oryza sativa
  unsure (1)..(803): unsure at all Xaa locations
  Clone ID: TF_OsC359_5625.pep
MDNTGNKGYGNDGSDDSKTQANGNEKSINETSPELIQIVVNQTNMLATAFQLLQNRNNPAGATNVQVPTVQQQCKLSEFLKTGPPTFAMAVDPMEASDWLRTVEKKLGLIQCTDQERVGFATHQLVGPASEWWDSYEASRPEGHTITWNEFSSVFKRSHVPAGMITLRKREFRYLKQGDLTVAEYLHEFYRLAHYAPEDVETDEDKQEKFLQGLKDELAVQLLLEDYEDFEKLVDKAMQLESEHNRMTNCKRRMVNNPVFPGGNQRQRTEPLQITGSSVVYPEFLPQEDGRNADNNTSNTNNDDTTNNHGSCPISDHSNKACNVGSIRQDVNDSINVGTQNDNLSNXFDTEKDSNGDSNDGTADANVSKGFQPPIPTPSHNDHPQMDSSAKKTLICYNCKEPGHFSRDCPQPKRNLRHHSGHYARRRQVTRLVVTGANAVPVSLKGSKPKDLIVTRSIHNSRSEEYLVDKVDXQRYELCKVLELKPHLQVPQPSRSQLKXNQGQVSCPLSLGQPSVSRGKHRRRVLAGVQXVATTSPPPAASATSPERRPTPPPPSSAPRRRSHPRHHLLLARTSPEHRRXAGFSFLLGGSTGRXTSTTSGIAAARSXLGIISPPSKPLRGPSSSSPIVLVVDVPSVARLVVSRRRLRHRHRSGVFHVILAAVQPLPAALVASSPAPVVVVLVLSSFSVVVAFVPPSSRSRSSSSLXSRSLQPPSSSSSSPPRRQASRRPRLAFVQGSPPKPSPRRSSPLRPSVSAAPVRRCRSHASSRGGKVPSXRCPVLVLSVSPXARCAVVGPGTRVSAS

SEQ ID NO: 26235 - protein, 482 aa, Oryza sativa
  unsure (1)..(482): unsure at all Xaa locations
  Clone ID: TF_OsC359_6528.pep
MDNTGNKGYGNDGSDDSRTQANGNEKSINETLPXLIQIVVNQTNMLATAFQLLQNRNNPAWATNVQVPIVQQQCKLSEFLKTGPPTFAIAVDPMEANDWLRTVEKNLGLIQCTDQERVVFATHQLVGLASEWWDSYEVSRPEGHTITWDEFLAVFKRSHVPAGMITLRKXEFRYLKQEYLTVIEYLHEFHRLAHYAPEDVETDEDKQEKFLQGLKDELAVQLLLEDYEDFEKLLDKAIQLESEHNQMKNCKRRIVNIPVIPCGNQRQRTEPLQITGSSVAHQEFLPQEDGYNADNNISNTNDDDTTTNHGSCPISDHSNQACNVNNIHQDVDDSINEGTQNDNPSNCDSEKESNGDSNYGTTDANVSKDFQPPIPTPSQNDRSQTDSSVKKKLICYNCKEPGHFSRDCPQPKRNLRHHSGHYARRRQVTRLVVTGANAIPVSLKGSKPKDHIATRSIHNSQSEEYLVEKVDTQDMNYEKFSN

SEQ ID NO: 26236 - protein, 527 aa, Oryza sativa
  unsure (1)..(527): unsure at all Xaa locations
  Clone ID: TF_OsC359_6849.pep
MDNTGNKGYGNDGSDDSRTQANGNEKSINETSPELIQIVVNQTNMLATAFQLLQNRNNPAGATNVQVPTVQQQCKLSEFLKTGPPTFAMAVDPMEASDWLRTVEKKLGLIQCTDQERVGFATHQLVEPASEWWDSYEASRPEGHTITWNEFSSVFKRSHVPAGMITLRKREFRYLKQGDLTVTEYLHEFYRLAHYAPEDVETDEDKQEKFLQGLKDELAVQLLLEDYEDFEKLVDKAMQLESEHNRMTNCKRRIVNIPVFPGGNQRQRTEPLQITGSSVAHQEFPPQEDGRNADNNTSNTNDDDTTNNHGSCPISDHSNKACHVSSIHQDVNDSINDGTQNDNPSNWDSGKDSNGDSNNGTTDANVSKDSQPPIPTPSQNDRPQMDSSVKKTLICYNCKEPGHFSRDCPQPKRNLRHHSGHYARRRQVTRLVVTGANAVPVSLKGSKPKDLIVTRSIHNSRSEEYLVDKVDAKDMNYEKXSGTEVPSSSATIQSKSARGATREKSGEEKIPSITGDRAKQSRVEKFC

SEQ ID NO: 26237 - protein, 501 aa, Oryza sativa; identical to SEQ ID NO: 20478
  Clone ID: TF_OsC359_6888.pep

SEQ ID NO: 26238 - protein, 449 aa, Oryza sativa; identical to SEQ ID NO: 20483
  Clone ID: TF_OsC359_7436.pep

SEQ ID NO: 26239 - protein, 482 aa, Oryza sativa
  Clone ID: TF_OsC359_7475.pep
MDNTGNKGYGNDGSDDSRTQANGNERSINETSPELIQIVVNQTNMLATAFQLLQNWNNPAGATNVQVPTVQQQCKLSEFLKTGPPTFAMAVDPMEASDWLRTVEKKLGLIQCTDQERVGFATHQLVGPASEWWDSYEASRPEGHTITWNEFSSVFRRSHVPAGMITLRKREFRYLKQGDLTVTEYLHEFYRLAHYAPEDVETDEDKQEKFLQGLKDELAVQLLLEDYEDFEKLVDKAMQLESEHNRMTNCKRRIVNIPVIPGGNQRQRTEPLQITGSSVVYQEFLPQEDERNADNNTSNTNADDTTNNHGSCPISDHSNKACNVSSIHQDVNDSINVGTQNDNLSNFDSEKDSNGDSNNGTTDANVSKDFQPPIPTPSQNDRSQTDNSAKKTLICYNCKEPGHFSRDCPQPKRNLRHHSGHYARRRQVTRLVVTGANAVPVSRKGSKPKDLIVTRSIHNSRSEEYLVDKVDSKDMNYAKFWN

SEQ ID NO: 26240 - protein, 473 aa, Oryza sativa
  Clone ID: TF_OsC359_7477.pep
MSWQRVGALLLGAQSRLPVPGVPAVGGIGSVLLSMARMGWKLCHVFRLYTVVMDNPGNQGYGNDGSDDSRTQANGNERSINATSPELIQVVVNQTNMLATAFQLLQNWNNPAGATNVQVPTVQQQCKLSEFLKTEPPTFAIAVDPMEASEWLRTIEKKLGLIQCTDQERVGFATHQLVGPASEWWDSYEASRPEGHTITWNEFSSVFRRSHVPAGMITLRKREFRYLKQGDLTVTEYLHEFYRLARHAPEDVETDEEKQEKFLQGLKDELAVQLLLEDYENFEKLVDKAMQLESEHNRMTNCKRRIVNIPVFPGGNQRQRTEPLQIIGSSVGYHEFLPQEDERNVDNNNIIHQDIDDSINEGTQNGNPSNFDSEKDSKGDSNNGTTDANVSKDFQPPIPTPSQDDRSQADNSAKKTLICYNCKEPGHFSRDCPQPKRNLRHHSGHYARRRQVTRLVVTGANVIPVRPRVNHNP

SEQ ID NO: 26241 - protein, 549 aa, Oryza sativa; identical to SEQ ID NO: 20467
  Clone ID: TF_OsC359_7569.pep

SEQ ID NO: 26242 - protein, 595 aa, Oryza sativa
  unsure (1)..(595): unsure at all Xaa locations
  Clone ID: TF_OsC359_7686.pep
MSNGANEGYTSCGPVVEMSYGGGLVXMLGAQFCLPVPGIPAVGRIGSVLLSKARMGWKLCHIFTTGSKAMDSTGNKGYGNDGSDDSRTQANGNEKSINETSPELIQVVVNQTNMLATAFQLLQNRNNPAGATDVQVPTVQQQCKLSEFLKTGPPTFAMAVDPMEASDWLRTVEKKLGLIQCTDQERVGFATHQLVGPASEWWDSYEASRPEGHTITWNEFSSVFRRSHVPAGMITLRKREFRYLKQGDLTVTEYLHEFYRSAHYAPEDVETDEDKQEKFLQGLKDELAVQLLLEDYEDFEKLVDKAMQLESEHSRMTNCKRRMVNNPVFPGGNQRQRTEPLQITGSSVVYQEFLPQGDERNADNHNSNTNADDTTNNHGSGPISDHSNKACNVSSIHQDVNDSINVGTQNDNLSNFDSEKDSNGDSNYGTTDANVSKDFQPPIPTPRHNDHPQMDSSAKKTLICYNCKEPGHFSRDCPQPKRNLRHHSGHYARRRQVTRLVVTGANAVPVSLKGSRPKDLIATRSIHNSRSEEYLVTKVDSKDMNYAKFWNXAPSSSAATQSKSAKGSTRDKSGEEKIPSATGDRAKQSRVKKFC

SEQ ID NO: 26243 - protein, 791 aa, Oryza sativa; identical to SEQ ID NO: 20491
  Clone ID: TF_OsC359_7766.pep

SEQ ID NO: 26244 - protein, 658 aa, Oryza sativa
  unsure (1)..(658): unsure at all Xaa locations
  Clone ID: TF_OsC359_7894.pep
MDNTGNKGYGNDGSDDSRTQANGNEKSINETSPELIQIVVNQTNMLATAFQLLQNRNNPAGATNVQVPTVQQQCKLSEFLKTGPPTFAIAVDPMEASDWLRTIEKKLGLIQCTDQERVGFAAHQLVGPASEWWYSYEASRPEGHTITWNEFSSVFKRSHVPAGMVTLRKQEFRYLKQGDLTVTEYLHEFYRLAHYAPEDVETDEDKQEKFLQGLKDELAVQLLLEDYEDFEKLVDKTMKLESEHNRRTNCKRRIVNIPVFPGGNQRQRTEPLQITGSSVAHQEFPPQEDGRNADNNTSNTNDDDTTNNHGSCPISDHSNKACNVSSIHQDVNDSINVGNQNDNLSNFDSEKDSNGDSNYGTTDANVSKDFQPPIPTPSHNDRPQMDSSVKKTLICYNCKEPGHFSRDCPQPKRNLRHHSGHYARRRRVTRLVVTGANAVPVSLKGSKPKDLIVTRSIHNSRSEEYLYEVDAKDMNYEKXSGTEVPSSSATIQSKSARGATREKSEWRSFASPRRKLAGTVPPPATSGIGATVLPPAGCCSSPVRRSTPPSPPSTPRHRLLPRHHLLLARISPERRRXRAGLTFLLVDISSGCPGRRARASADVAVSSLGDAASPSTPACPRFRRNVAANLSVRLAGVVRPPVPPRRVPVGHLHHHLRH

SEQ ID NO: 26245 - protein, 811 aa, Oryza sativa
  unsure (1)..(811): unsure at all Xaa locations
  Clone ID: TF_OsC359_7944.pep
MDNTGNKGYGNDGSDDSRTQANGNEKSINETSPELIQIVVNQTNMLATAFQLLQNWNNPAEATNVQVPTVQQQCKLSEFLKTEPPTFAIAVDPMEASDWLRTIEKKLGLIQCTDQERVGFATHQLVGPASEWWDSYEASRPEGHTITWNEFSSVFRRSHVPAGMITLRKREFRYLKQGDLTVTEYLHEFYRLAHYAPEDVETDEDKQEKFLQGLKDELAVQLLLEDYGNFEKLVDKAMQLESEHNRMTNCKRRIVNIPVFPCGNQRQRTEPLQITGPSVVHQEFPPQEDGRNADNNTSNTNDDDTTNNHGSCPISDHSNKACNVSSIHQDVNDSINVGTQNDNLSNVDTEKDSNGDSNYGTTDANVSKDFQPPIPTPSQNDRPQMDSSVQKTLICYNCKEPGHFSRDCPQPKRNLCHHSGHYARRRQVTRLVVTGANAVPVSLKGSRLKYHIVTKSIHNSRSEEYLVDKVDAKDMNYEKXSGTEVPSSSATTQSKSAKRCTLXKSATSSPSVSPPFRGESTGDAFSPAXSGVAATVPPPAATVAFPVRRPTSPPPPSAPRRRPPPRLLLGFAGTPSPRRPLHPLRRRRPFGHPFLLVGXVAPLHHHLLQHRSSAFHAVPSSAQPLLPAIIVSSSPFVLXIDVTSVAWLIVSRRRLRRRHRSGVVRAILASVQPLPAALIASSPAPVVAVVVLSSFPVVVAFVPPSSRSRPSSAFVKRTAAAPSSSSSSAPRRQASCRPRLAFVQGSPPKPSPRRSSPLCPSVSAAPVRRCRSHASSRGGKVPSXRCPVLVLSVSPVPVVRLSTPVPMYRCR

SEQ ID NO: 26246 - protein, 690 aa, Oryza sativa
  Clone ID: TF_OsC359_8145.pep
VIWQRVGALLLGAQFCLPVPGIPAAGGIGSVLLFMARMGWELCHVFRPYTVVMDNTGNKGYGNDGSDDSRTQANGNEKSINKTSPELIQKVVNQTNMLTTAFQLLQNWNNPAGATNVQVPTVQQQFKLSEFLKTEPPTFAIAVDPMEASDWLRTVEKKLGLIQCTDQERVGFATHQLVGPASEWWDSYEASRPEGHTITWNEFSSVFKRSHVPAGMITLRKREFRYLKQGDLTVTEYLHEFYRLARYAPEDVETDEDKQEKFLQGLKDELVVQLLLEDYEDFEKLVDKAMQLESEHNRMTNCKRRIVNIPVIPGGNQRQRTEPLQITGPSVVHQESPPQEDGRNADNNTSNTNDDDTTNNHGSCPISDHSNKACNVSSIHQDVNDSINVGTQNDNLSNFDTEKDSNGDSNYGTTDANVSKDFQPPIPTPSHNDHPQMDSSAKKTLICYNCKEPGHFSRDCPQPKRNLRHPSGHYARRRQVTRLVVTGANAVPAASQRTSSSPEASAIHIKEYHLLEISRKMIDKKRLAKMFSSIKEVGRKVIDKQKHALHRSRKTPDCNCPATVTLSLSKQDDLGKSVSMKARSEIFNSVSDATRSEKCKHRLPVDNLSEVDSEDMNHEKFWNGSITELPQPSLSQPKGAPWSKSGEEKIPSATGGQAKQFRVVKFCWKFVKTQRKKSDKKRRPPNLPSC

SEQ ID NO: 26247 - protein, 1947 aa, Oryza sativa
  Clone ID: TF_OsC1713_5408.pep
MKKLKKEGKKIEAFIGEWNSNEESSASSGSEEEGGDDASSKKKKMAVVAIKEAPSLFAPLCLMAKGSSKVASLSDSESDDDCDDVSYDELVSMFEKLHAYSEKEIVKFKALEKDHASLEVLYEELKTSHERLTISYEKIKEAHDNLLSTTQHGAHIDVGISCDLLDDSASSHIPHVASSSISTSCDDLMDMPSSSYSSCVSICDASLVVENNELKEQVAKLNKSLERCFKGKNTLDKIFSEQRCILNNKGLGYIPKKGKKPSHRVTRFVKSNGKYCSKCHEVGHLVNDCPGSKPSKTCMFDSHYMLKKAHDGSIVARYVGSPILGGKKNAIWVPKALVSNLQGPKQVWVNYRIGGSHWVLNSGCIQHMTGDRAMFTIFEVGGKEQEKVTFRDNSKGKEEIALLARRCFECGEKGHFASKCPSKDDDGDKSSKKKSGGYKLMKKLKKEGKNIEAFIGEWDSNEESSASSGSEEEGGDDASSKKKKMAVVAIKEAPSLFAPLCLMAKDSSKVAFLSDSESDDDCDDVSYDELVSMFKELYAYSEKEIVKFKARKKDHASLEVLYEELKTSHERLTISHEKLKEAHDNLLSTTQHGVLIDVGISCDLLDDSAICHIAHVVSSSISTSCDDLVDMPSSSSSTCVSICDASLVVENNELKEQVVKLNKSLEMCFKGRLMMVALLLDMWVPLYSVVNYRTGGSHCVLDSGCTQHMTGDRAMFTIFEVGGKEQEKVTFGDNSKGKVIGLVAKTSMGWLWHRRLAHVCVNQLSKLSKRDLVVGLKDVKFEKDKLCSACQAGKQVACSHPTKSIMSTSRPLELLHMDLFGPTTYKSIGVERKNRTLIEMAMTMLDEYGVSDSFWAEAINTACHATNWLYLHRLMKKTFYERIIGRKPNVAYFRVFGCKCYIYQKGVRLTKFESRCDEGFLLGYASNSKAYRVYNKNKGIVEETADVQFDETNGSQEGHKNLDDVGDEGLMRAMKNMSIGDVKPTEVEDKPSTSTQDEPSTSATPSQAQVEVEEEKAQDPPMPPRIHTALSKDHPIDQVLSDISKGVQTRSRVASICEHYSFVSCLEPKHVDEALCDPDWMNAMHEELNNFARNNVWTLVERLRDHNVIGTKWVFRNKQDENGLVVRNKARLVAQGFTQVEGLDFGETFAPVARLEAIRILLAFALCFDIKLFQMDVKSAFLNGEIAELVFVEQPPGFEDPKNPNHVYKLSKALYGLKQAPRAWYERLRDFLLSKDFKIGKVDTTLFTKIIGDDFFVCQIYVDDFIFGSTNKVFCKGFGDMMSREFEMSMIEELSFFLGLQIKQLKDGTFVSQTKYIKDLLKRFGLEDAKPIKTPMATNGHLDLDEGGKPVDLKLYRSMIGSLLYLTASRPDIMFSVCMCARFQAAPKECHLVAVKRILRYLKHSSTIGLWYLKGAKFKLVGYSDSDYAGCKVDRKSTFGSCQMLGRSLVSWSSKKQNSVALYRRGGICFGGNYILIFGQNEIFLQNEIEREFEKSFKTKLRWSDRARSAVDGLTELGRRSDRHVDGGLTGRYPPQMPPRTRHSRREPTPDPVSEESSGDEYAQSDEEVEANVEGASEEESGDDVSGSGEDEDEGSDDMHIDPSIQFVVNMRNPSQYTILRHHDQFLRPRDTRNPRFHTAFQKMWVAGDYSEMKWMSDTLQCSISRRQFWRLLSIRLDFGDDLHEEHTHNPLSIDYVSQFYEDGVWYTHGKVAGLRTIPCVVNRIVRVTILPRLGNNDDIRGVAWHVIDAIIQGHQFDIVSLMMQEIAISKATFTQGIYYAPYIMRLIQDKLGAVGQNLKKHKQYKPRLQLGAPRAPRAAPSSHPGASSSSAPPPPHGYDPNAFFYPQYAYFGMQPNEYFNPVLGAINTLSESIQRLSTGHEALHENVRGLRTDVGDLNASVGRLHTRVGTLDSRVQMLESSQAFVYHRRRDAPHPSTSARPPPLQE

SEQ ID NO: 26248 - protein, 839 aa, Oryza sativa
  unsure (1)..(839): unsure at all Xaa locations
  Clone ID: TF_OsC359_7994.pep
RRRRRGFRRIPPSPRTIKRGKSLPVIPSLFSPAFPSLSPSGSFGFAPAIFAGASMAPEMAAAVSFPSGLSLSLPALYNRSPXSLLRFRRSPLALPVGIKPAPSSSLSAVAAELRFAAVVAPDLLPLRRRLLRLRRVFVDLVRSFVSPADRRSAAVLVDPNRAAASRRFGRRFRHRRRPGVSRGPPLRFPLLSSLSAAAPPXPMAAAGDHRGAGAPPPVGRAGEAAFGRAPWLPGGARPSAARARXVRLTRGTHGAGRLCLINLQNKPNIHHNSKRLRSVKVLSLVSNLSLPFVFSLSLSKPLQQMANNEKGNKVRSQDIGTSSSRVNEAPDTSCVTLVQHLINQNRLLIEILQQHQTPILNLSQIQPQVQXRQSKHSHHESACRQHPERPMVTCHMLTQKKQARECPQQKRKTPMRTEDEVRKMIITSTEWPPPGMTKRQRRNTFRGAPQLTEHLLANGGRVFDSEDSDQVSSDDEDEMERKACSRCGEIGHVASSCATTCVHCEEDHPPDRCPTSRITCFFCEGTDHVLKDCQFSFLLTKKMANQPASSNGEKHQGNTNPRQDYSFSLTPVPGQRNQNEXRKCRVREDICCFNCQGMGHFADKCPKPRNIAAGPSVHATPCNQKLAPQRIVIHASRSSPIARVATAPTPASALPQGVNAQFQPQPSVDKTEAXSALYLWMFQHSSQXNQVQDEEPEQDHPPGECPTRKVTCFLCEETNHVPKDCQLSVLLTKTAEIQRTTLRLSHQLVSSNSNIDDIIHSTNAPPAPPNSATNHSTNTFSTNHSLHRQPQQRIVVDGRSCFSXPTPGRAKGNQPQEGDTKQKTVIRFNQQSEGSFSCE

SEQ ID NO: 26249 - protein, 896 aa, Oryza sativa
  Clone ID: TF_OsC359_7971.pep
MAPGGASPGAPGPPWTTLQLRKIRSSWKLKPTFGKASKASHIILEHIESQWTKSGSMDISRTNEGYTSCGPVVEMSWHRAGVLLLGAQSCLPVPEVPAVGGIGSVLLSMARMGWELCHVFRPYTVVNKPNIHHNSKRLRSVKVLSLVSNLSLPFVFPLSLSKPLQQMADNEKGNKVRSQDIGTSSSRVNEAPDTSCVTLVQHLINQNRLLIEILQQHQTPILNLSQIQPQVQLEAVQALTPQVSMPPASQKTDGGVPHVDSKEASIICFMCDEQGHYARNCPQQKGKTPMRTEDEVRKMIITSTEWPPPGMTKRQRRNTFRGAPQLTEHLLANGGRVSDSEDSDQVSSDDEDEKSPQDCQFSFLLTKKMANQPASSNGEKHQGNTNPRQDYSFSLTPVPGQRNQNEKRKCRVREDICCFNCQGMGHFADKCPKPRNIAASTSVHATPCNQKLAPQRIVIHASRSSPIARVTTAPTPASALPQGVNAQFQPQPPVDKTEASIGIVPLDVPAQQPRNQNWNNPAGATNVQVPTVQQQCKLSEFLKIETPTFAIAVEPMEASDWLRTVEKKLGLIQCTDQERVVFATHQLVGLASEWWDSYEASRPEGHTITWDEFSSVFKRSHVPAGMITLRKREFRYLKQEDLTVTEYLHEFHRLAHYAPEDVENDEDKQEKYLQGLKDEIAVQLLLEEYEDFEKLNCKRRIVSIPVFPCGNQRQRTEPLQITGSSVAHQEFPPQEDGHNADNNISNTNDDDTTNNHASCPISDHSNQACNVNIIHQGVDDSINDGTQNDNPSNCDSEKDSNGDSNYGTTDANVSKDFQPPIPTPSQNDRPQTDSSAKKTLICYNCKGPGHYSRDCLQPRQSRPPHYRQFTRSRHPNRIVVTGANAVPVRPRVNQNP

SEQ ID NO: 26250 - protein, 247 aa, Oryza sativa; identical to SEQ ID NO: 20574
  Clone ID: TF_OsC34615_1.pep

SEQ ID NO: 26251 - protein, 863 aa, Oryza sativa; identical to SEQ ID NO: 20577
  Clone ID: TF_OsC359_7184.pep

SEQ ID NO: 26252 - protein, 1235 aa, Oryza sativa
  unsure (1)..(1235): unsure at all Xaa locations
  Clone ID: TF_OsC1528_1980.pep
MAGFADALRPDKFTGVHFKRWQIRVTLWLTAMKCFWVSTGKPEGVLTAEQQKQFEEATTLFVGCILSVLGDRLVEVYMHMTDAKELWDALNTKFGATDASNDLYIMEQFHDYKMADNRSVVEQAHEIQTMAKELELLKCVLPDKFVAGCIIAKLPPSWRSFGTALKHKRQEYSVEGLIASLDVEEKAREKDAASKGDGGQSSANVVHKAQNKSKEKYKAQQTTNFKKQKKNNNNPNQDERTCFVCGQVGHLARKCPHRKGMKAPAGQTSKSANVTIGNTGDGSGYGXRGSTVLMGNGSHASVHGVGTVDLKFTSGKIVQLKNMQHVPSIDRNLXYECGGLFRFSLSDFCNKYVNHICGSVDDEANVWHSRLCHINFGLMSRLSSMCLIPKFFIVKGSKCHSCVQSKQPRKPHKAAEERNLAPLELLHSDLCEMNGVLTKGGKRYFMTLIDDATRFCYVYLLKTKDEALDYFKIYKAEVENQLDRKIKRLRSDRGGEFFSNEFDLFCEEHGIIHERTPPYSPESNGIAERKNRTLTDLVNAMLDTAGLPKAWWGEALLTSNHVLNRVPNRNKDKTPYEIWIGRKPSLSYLRTWGCLAKVNVPITKKRKLGPKTVDCVFLGYAHHSIAYRFLIVKSEVPDMHVGTIMESRDATFLESFFPMKDTHSGSNQPSEIIPSSITPPEQTEHTHELVSEEDVSEAPRRSKRQRTAKSFGDDFTVYLVDDTPKSISKAYASPDADYWKEAVRSEMDSIIANGTWEVTERPYGCKPVGCKWVFKKKLRPDGTIEKYKARLVAKGYTQKEGEDFFDTYSPVARLTTIRVLLSLAASHGLLVHQMDVKTAFLNGELDEEIYMDQPDGFVVEGQEGKVCKLLKSLYGLKQAPKQWHEKFDKTLTSAGFAVNEADKCVYYRHGGGEGVILCLYVDDILIFGTNLQVINEVKSFLSQNFDMKDLGVADVILNIKLIRGENGINLLQSHYVEKILNRFGYIDSKPSPTPYDPSLLLRKNKRIARNQLEYSQIIGSLMYLASATRPDISFAVSKLSRFTSNPGDDHWRALERVIRYLKGTVELGLHYTGYPAVLEGHSDSNWISDVDEIKATSGYVFTLGGGAVSWRSCKQTILTRSTMEAELTALDTATVEAEWLRDLLMDQPVVEKPVPAILMNCDNQTVIVKVNSSKDNMKSSRHVKRRLKSVRKLRNSGVITLDYIQTARNLADPFTKGLSRNVIDNASKEMGLRPM

SEQ ID NO: 26253 - protein, 559 aa, Oryza sativa
  unsure (1)..(559): unsure at all Xaa locations
  Clone ID: TF_OsC359_6691.pep
MSHLEGDEYLEEKGDASSTKETGSKGATIHFDYIKLNVPPHNFVSVPSGRAPHFDGTHYAAWKHKMKLHLISLHPSIWKVVCTGIDVPNDDMELTSEQEQLIHRNAQASNTILSALSPKEFNKFDGLEEAKEIWDTLQLAHEGSPAVREDKIELLEGRLGRFVMDDKETPQEMYDRMMILVNKIKGFGSEDMTNHFVVKRLLRAFGPRNPTLVSMIRERKDFKRLTPSDILGRIVSHEMQEEEAREVRQMVKNAAMIKNQEVALNAKQEEESSXKKRFKHFLLKSGYGXGRKDDDKGKRQSERACFNCGEYGHFIADCPKTNEAKAKGDKKKPERAHVVKAHMVEVWYSEDEEASEDKPKPKPKDKIEGEGGIATVAFKSSSSSKECLFNNLSDDDDDSYHYSCFMAQGRKVMTQKPSHTSLDDDSSDEETSLRDVNETLQEKFAILDKSHKDLEVQLDTLWSSTSQPNVVSNSSNPSTSNGCARCYNIDLTSYATNVDAMQALKKENERLGTLVKYGCMKTYHSKDALYKTITAHPNKDGHGLGFSGGMSRPDKFIPK

SEQ ID NO: 26254 - protein, 1450 aa, Oryza sativa
  Clone ID: TF_OsC359_7135.pep
MELTSEQEQLIYRNAQASNAILSALNPEEFNKVDGLEEAKEIWDTLQLAHEGCPAVREAKIELLEGRLGRFVMDDKETAQEMKDFKRLTPSDILGRIVSHEMQEEEAREVRQMMKNAAMIKNQEVALKAKQEEESSCEESEDEEMAFIVKRFKHFLYKSGYGKGRKDDDKGKRQSKRACFNCGEYGHFIADCPKSNEANAKGGKKKPERAHVAEAHMAEVWYFGDEEDPEVKPKPKSKDKVEGEGGVATVAFKSSSSSKERLFNNLSDDDDDSYHYSCFMAQGRKVMTQKPSQTSLDVDSSDEESDNELDDVLKSFSKPAMQHLAKLMRALDSKEQSLERQEELLILEKKRNLVLEESLAKECAKNKQLANELNLANGSLASLRDVNETLQEKFANLDKSHKDLEVQFDTLWNSTSQPNVVSNSSNPSTSNALKKENEKLCTLVKYGCIKTYHSKDALYKTITAHPNKDGHGFGFSGRSPVSKRVMVNGKECLMFVREGKAPQASEVTGLVSCQGPGTSGQTGRNLRVGVSVSQKFPPESSGRFAKKFRANGRAQDMTGSSGHNARRFRPDGLYYDSYVISKNLEGKVGAYFNGNYNDEYRTCVWVPKALAYSSGGSSWVVDSGCTNHMTGERSMFTSLDEENGTRENIVFGDDGKGKLQFIIRFSIMDDSSVAFKGKLKGDLYLVDFDVDRVNPEACLIAKSSMGWLWHHRLAHVGMQNLATLLKGEHILGLTNVTFEKDRVCSACQAGKQVGNPHPIKNIMTTTRPLELLHMDLFGPVAYISIGGNKYVFVIVDDFSRFTWVYFLHDKSKAQDVFKRFAKQAQNLYDLTIKRVRSDNGGEFKNTQVEEFLDEEGIKHEFSAPYDPPQNGIVERKNRTLIEAARAMLDEYKTSDVFWAEAVSTACHAINRLYLHKILKKTSYELLSGKKPNVSYFRVFGSKCFILSKRPCSSKFSPKVDEGFLLGYESNAHAYRVFNKTSGIVEVTRDVIFDESNGSQGEQVVVHVVGDVDPSQAIGTKAIGDIRPVETQDDQEDRDQPPSSTSNSPTSVVSAEPEVPGPIDRNLRTSPGPEVPGSTVRNLRTSGSEDVPTAQVDGIDAAGTLEVEDELGDPDWVMAMQEELNNFIRNQVWTLVERPDQNVIGTKWIFRNKQDEHGVVVRNKARLYQMDVKSAFLNGPISELVFVEQPPGFEDPKLPNHVYKLHKALYGLKQAPRAWYECLRDFLLKNGFEIGKADTTLFTKKFENNLFICQIYVDDIIFGSTNASFCEEFSSIMTKRFEMSMMGELTFFLGLQVKQAQEGTFISQTKYVKDIVKKFGMEDAKPIKTPMPTNGHLDLDENGKCVDQKVYRSIIGSLLYLCASRPDIMLSVCMCARFQAEPKECHLIAVKRILRYLVHTPNLGLWYPKGCDFELLGYSDSDYAGCKVDRKSTTGTCQFLGRSLVSWSSKK

SEQ ID NO: 26255 - protein, 1381 aa, Oryza sativa
  unsure (1)..(1381): unsure at all Xaa locations
  Clone ID: TF_OsC359_7430.pep
ASPCCNEEFGISSKXEHILGLSNVSFEKDRVCSACQAGKQVGSPHPIKNIMTTTRPLELLHMDLFGLVAYISIGGNKYGFIIVDDFSRFTWVYFLHDKSEAQDVFKRFAKQAQNLYDLTIKRVRSDNGGEFKNTQVEKFLDEEGIKHEFSAPYNPPQNGIVERKNRTLIEAARAMLDEYKTSDVFWAEAMSTACHAINRLYLHKILKKTSYELLSGKKPNVSYFHVFGSKCFILSKRPRSSKFSPKVDEGFLLGYESNAYAYRVFNKTSGIVEVTRDVTFDESNGSQGEQVVVHIVGDVDPNQAIGTKAIGDIRPVETQDDQEDRDQPPXSSTSNSPTSAVSAEPEVPGPIDWNLRTSPGPEVPGSTVXTSGSVAVKTCQWHKVEDALGDPDWVMAMQEELNNFTRNQVWTLVERPKQNVIGTKWIFRNKQDEHGVVVRNKARLFQMDVKSAFLNGPISELVYVEQPPGFEDPKLPNHVYKLHKALYGLKQAPRACFEIGKVDTTLFTKKFKSDLFICQIYVDDIIFGSTNASFCEEFSSIMTKRFEMSMMGELTFFLGLQVKQALVGIFISQTKYVKDILKKFGMEDAKPIKTPMPTNGYLDLDDNGKCVDQKVYRSMIGSLLYLCASRPDIMLSVCMCARFQAEPKECHLIAVKRILRYLVHTPNLGLWYPKGCGFELLGYSDSDYAGCKVDRKSTTGTCQFLGRSLVSWSSKKQNSIALSTAEAEYVAAGSCCAQLLWMRQTLKDFGYNFTKIPLLCDNESAIKIANNPIQHSRTKHIDIRHHFLRDHETKGDICLTHVRTESQLADIFTKPLDEKRFCELRSFHFQIFEFSSIPLNLGLTALCSVRPEVPVTPVRNFRGSGAGNSGVLGPELPVSVQPASNLDFATVSFNHCTPTLLILVAVVIMPREKRQKLSQDVPADSSPPVRGPRGRLGKEKVGDFYSGSQIPIHSRRASSIVIRDAPRSPSPAASDSDDGGNEDEPGSESNPLRLYKTRAVDPDPKRPRVNYLKNLLKCGRDRMVDWYNSVIMGRSHPVVEMKWLDWQYMSSKNNIVFNEVRKVCERKHVADLLALQYSWNEEVIGQFYSTAFFGTTKKGLDFVKWTIQGQQYRVSMAQFAAALGLDDDDLSRPHIFVEDALSPTSTTFMYEKDAPKDCLGTTRGLRPYYRVLYSIFRWSLLPKVGDATALPGRHALLLSRMRYNKPDFSIMKLIWSEIYETVCEPKRGFIYAPYIMKMIEAKTGICYFKDNQHKPFRPHAPTTSATPTTRVTRASTSAAPSFSAAPQRSESSSPIKKALRAIFCMCAKTAKSDEGPSGTSRFFNEESSHSEESSDDEESDAPTENAPTDPNEAVDAAGQDIDSPHSGDTEIIPSDGDNDEA

SEQ ID NO: 26256 - protein, 570 aa, Oryza sativa; identical to SEQ ID NO: 20683
  Clone ID: TF_OsC359_7882.pep

SEQ ID NO: 26257 - protein, 1978 aa, Oryza sativa
  unsure (1)..(1978): unsure at all Xaa locations
  Clone ID: TF_OsC359_8323.pep
MLDLGGKNGENGNEDEASSKGTPPPKGATIPFDYSKLTIPSHYFVSMPSGHTPQFDGTYYDAWKHKVKLHLISLHPSIWKVVCTGIDIPHDDMELTSGQEQFIHRNAQASNAILSALSPEEFNKVDGLEEAKEIWDTLQLAHEGSPAVREAKIELLEGRLGRFVMDVKETPQEMYDRMMILVNKIKGLGXRLLRAFGPRNPTLXSMIRERKHFKRLTPSDILGRIVSHEMQEEEAREVRQMVNNAAMIKNQEVALKAKQEEESSCEESEDEEMAFIVKRFKHFLRKSGYDKGRKDDDKGKRQSKRACFNCGEYGHFIADCPKSNEAKAKGGKKKPERAHVAEAHMAEVWHSGDEEDPEVKPKPKSKDKVEGEGGVATVAFKSSSSSKECLFNNLSDDDDDSYHYSCFMAQGRKSFSKPAMQHLAKLMRALDSKEQSLERQEELLILEKKRNLALEESLAKECAKNKQLANELNLANGSLASLRDVNETLQEKFANLDKSHKDLEVQFDTLWNSTSQPNVVSNSSNPFTSNGCARCYDIDLNSYATNIDAMQALKKENERLSTLVKYGCMKTYHSKDVLYKTITAHPNKDGHELGFSGGSPVPKRVMVNGKECLMFVREGKAPQASEVTGLVSCQGPGTSGQTGRNLWVGVSVSQKFPPGSSGRFARKFRANGRAQDMTGSSGHNARRFQPDGLYYDSYVISKNSEGKVVAYFNVNYNDEYRTCVWAYSSGGSSWVVDSGCTNHMTGERSMFTSLDKENGTRENIVFGDDGKGKLGYNCLFTDEDVTVFRRDDSSVAFKGKLKGDLYLVDFDVDRVNPETCLIAKSSMGWLWHRRLAHVGMRNLATLLKGEXSSGSLMSHLRKIRFAKQAQNLYDLTIKRVRSDNGGEFKNTQVEEFLDEVGIKHEFSAPYDPPKNGIVERKNRTLIEAARAMLDKYKTSDIFWAEAVSTACHAINCLYLHKILKKTSYELLSGKKPNVSYFRVFGSRCFILSKRPRSSKFSPKVDEGFLLGYESNAHAYRVFNKTFGIVEVIRDVTFDESNGSQGEQVVVHVVGDVDPSQAIGTKAIGDIRPVETQDDQEDRDQPSSSTSNSPTSSQESVDPEVPGPDDRILRTSPSQEVPGPSARKFRAEDSQGVPVDGIDAEGTVEHPDQAQVPSVHHPRIHHTVQRDHPVDNILGDIRKGITTRSRVANFCQHYSFVSSLEPTRVEDALGDTDWVMAMQEELNNFTRNQVWTLLERPDQNIIGTKWIFRNKQDEHRVVVRNKVRLVAQGFTQVEGLDFGETFAPVARLESIRILLAYAAHHDFRLFQMDVKSAFLNRPISELVYVEQPPGFEDPKLPNHVYKLHKALYGLKQAPRACSIMTKRFEMSMMGELTFFLGLQVKQAQEGTFISQTKYVKDILKKFGMEDAKPIKTPMPTNGHLDLDDNGKCVDQKVYRSKSVCMCAHFQAEPKECHLIAVKRILRYLVHTPNIGLWYPKGCDFELLGYSDSDYAECKVDRKSTTGTCQFLGRSLVSWSSKKQNSIALSTAEAEYVAAGSCCAQLLWMKQTLKDFGYNFTKIPLLCDNESTIKIANNPVQHSRTKHIDIRHHFLRDHETKGDICLTHVRTESQLADIFTKPLDEKRFCELRISTMPREKRQKASQDVSGDKSPPIRFPRGRLGKEKVVDXGSGSSTRTCPRFTXVIMARENPVVEMKWIDWAYMRKKNNEVFNQVMQVCHNKNLGDILALEYDWNEEVIAQFYATAFFGTTRKGTPYVKWLTEDDEDLNRPNIHSEASLPMIKTKFMYAKDAPRTCMGSTHGLHPNYKVLYSIFHWSLLPKVGDATALPSKHAHLLSRMRYNQPPFNVMKLICPFLAECLKEFHSTYDDELLQWNGAELMTRVIRNMSDKADDNSGHLDIKFEPSVAFYPISSTDITRYFSEADSTDERAQHDALFSRIVNDSTTFHLWNSITSSLVPEPNSLVERILNRYCLHCLDVL

SEQ ID NO: 26258 - protein, 449 aa, Oryza sativa
  Clone ID: TF_OsC9918_3.pep
MKDTESIDEFAGKISGLANKLSDLGVTMDDDEQVKKLLDSVPDKFLHVIAAIEQFSDLDSMPFDEAIGRLKAYEERIRKRDDKNGEHLLFTSGDTSGGRSRVKKPDRSKTMCYYCQELGHFAYECPEKKKKKEIALLAAASSFAQGSSVWQQRIRAKRRDSNNWYQSQFMPKILRFNKMAIVEHSASRSMREGGVSLPYPVLTSTNYSTWAIKMEANMEAQGIWDAIEPAADEAVEKKKDKQARACLFGAVPEEVLQQIAKKKTAKEAWESLKTRFLGVERVKKARVQTLKSEFKALRMKDTETIDEFAGKISGLANAMSGLGATMTDDELVKKLLDSVPEKFLHIIAAIEQFCDLDTMPFEEAIGRLKAFEERIRKHSDNYGEQLLLTTRNTDDGAGRARSKRFDKSKVMCYHCQELGHFAFECPAKKKNKEIALLATASSDDEPTLL

SEQ ID NO: 26259 - protein, 1475 aa, Oryza sativa; identical to SEQ ID NO: 20622
  Clone ID: TF_OsC1528_1921.pep

SEQ ID NO: 26260 - protein, 1484 aa, Oryza sativa
  unsure (1)..(1484): unsure at all Xaa locations
  Clone ID: TF_OsC1528_2034.pep
MSDARSRRSVASSTRRQQDAELAAAEERRRATAQTAAAAARAARLAAAELAAARAEAEAEAAEDAARAAEVEVETLRISINGSIAGDITADRELEELARGRARERAERWAAAHLHGGGGGPRDRAPANGNPDGRGRAGGSPEPARGPRRQCGSFSPDRRHGHHGVQTVVRDFGPGGGWPTLTKTNYIEWAAVMRVRLQVRHMWEAVRXPPEMQFSLSQKRTAKEAXDAITAACIGSDRARKSTLQAXRKEWENLAFKPGEDVDDFALRLNTLLQKMVQYGDDTYDEERAVEKLFRCVPEKYRQIARSIESLLDLSTMSIEEALGRLKVVDGDEPQPLSGPITIGGKLHLTREQWEASQGDGRKGESSSPTGGRKPRKARGGVQLRWARRRAEGGARRGAQGVATGNHKPARDDACRNCGKLGHWAKDCRQPRRGQAHVARVEEEPALLLAHASIELPPAAPAAAAFLHLDEPKVLVSLCNGSSNDKADGWYLDTGATHHMTGRREFFTEFDSSVRGSVKFGDASGVEIKGVGSVTFTAKSGEHRLLTGVYYIPALRNSIISVGQLDENGSRVLVEDGLMRIWDRRRRLLAKVTRGTNRLDILNVQVAQPVCLAAHRDDEAWQWHERFGHLHFEALKQLSAKEMVRGMPCLDHVEQLCDVCVVTKQRRLPFPQQTSFRAKERLELVHGDLCGPVTPATPGGRRYFLLLVDDLSRYMWVMVLGSKGEAADAIRHAQAAAKAECGRKLRVLRTDNGGEFTAAEFASYCADEGIQRHYTTPYSPQQNGVVERRNQTVVGMARALLKQRGMPAIFWGQAVVTAAYILNRSPTKALDGRTPYEAWHGRKPAVSHLRVFGCLAFAKELGHIGKLDDRSTPGVFIGYAEGSKAYRILDPETQRVRTARDVVFDEGRGWVWDKAVDDGSTPTYDDFTVEYVHFEGAGGVGSSSSPSVSTPAPESPPTPTPTHPRATTSTTTSSSSTQPQPVTPHAPAPTATPPSTSTPTPARVERSPVEFATPLSHDGERIDAYHDGEQLRYRTMEDLLGDQPVPGLVPRDLEAQLHLACDDGEPRSFVEAEKHAAWRAAMQSEMDAVQENRTWELADLPRGHRAITLKWVFKLKRDEAGAIIKHKARLVARGFVQQEGIDYDDAFAPVARMESVRLLALAAREGWGVHHMDVKSAFLNGDLKEEVYVHQPPGFVIPGKEGKVLRLHKALYGLRQAPRAWNAKLDSTLKGMGFEQSPHEAAIYRRGNGGNALLVGVYVDDLVITGTKDAEDNSGITLRQTAYAKRVVELAGLTDCNPALTPMEERLKLSRDSTAEEVDATQYRRLVGSLRYLTHTRPDLAFSVGYVSRFMQRPTTEHQQAVKRIIRYVAGTLDHGLYYPRCPGKAHFVGYSDSDHAGDIDTSKSTSGILFFLGKCLVSWQSVKQQVVALSSCEAEYMAASAASTQALWLARLLSDLLGRDTRTVELRVDSKSALALAKNPVFH

SEQ ID NO: 26261 - protein, 1355 aa, Oryza sativa
  Clone ID: TF_OsC1528_2045.pep
MRVRLQVRHMWEAVRYGDVDYDEDRQALDALIAAVPPEMQFSLSQKRTAKEAWDAITTARIDSDRARKSTLQALRKEWENLAFKPGEDVDDFALRLNTLLQKMVQYGDDTYDEERAVEKLFRCVPEKYRQIARSIESLLDLSTMSIEEALGRLKVVDGDEPQPLSGPITIGGKLHLTREQWEASQGDGRKGESSSSTGGRKPRKVRGGVQLRWARRRAEGGARRGAQGVATGNHKPARDDACRNCGKLGHWAKDCRQPRRGQAHVARVEEEEPALLLAHASIELPPAAPAAAAFLHLDEPKVLVSLCNGSSNDKADGWYLDTGATHHMTGRREFFTEFDSSVRGSVKFGDASGVEIKGVGSVTFTAKSGEHRLLTGVYYIPTLRNSIISVGQLDENGSRVLVEDGLMRIWDRRRQKNAKVTGGTNRLYILSAQVAQPVCLAARRDDEAWQWHERFGHLHFEALKQLSAKEMVRGMPCLDHVEQLCDVCVVTKQRRLPFPQQTSFRAKERLELMHGDLCGPVTPATPGGRCYFLLLVDDLSRYMWVMVLGSKGEAADAIRHAQAAAEVECGRKLRVLRTDNGGEFTAAEFTSYCADEGIQRHYTMPYSPQQNGVVERRNQTVVGMARALLKQRGMPAIFWGETVVTAAYILNRSPTKALDGRTPYEVWHGRKPAVSHLRVFSCLAFAKELGHIGKLDDRSTPRVFIGYAKGSKAFRILDPETQRVRTARDVVFDEGRGWVWDKAVDDGSTPTYDDFTVEYVYFEGAGGVGSSSSPSVSTPAPESPPTPTPTHPRATTSTTTSSSLTPPQPVTPHAPAPTATPPSTSTPTPARVERSPVEFATPLSHDGERIDAYHDGEQLRYRTMEDLLGDQPVPVPRDLEAQLHLACNDGEPRSFAEAEKHAAWRAAMQSEMDAVQENRTWELADLPRGHRAITLKWVFKLKRDEAGAIVKHKARLVARGFVQQEGIDYDDAFAPVARMESEGWGVHHMDVKSAFLNDNLKEEVYVHQPPGFVIPGKEGKRGNGGNALLVGVYVDDLVIAGTKDAEVAAFKEEMKATFQMSDLGPLSFYLGIEVHQDDSEITLRQTAYAKRVVELAGLTDCNPALTPMEERLKLSRDSTAEEVDATQYRCLVGSLRYLTHTRPDLAFSVGYVSRFMQRPTMEHQQAVKRIIRYIAGTLDHGLYYPRCPGKAHFVGYSDNDHAGDIDTNKSTSRILFFLGKCLVSWQSDKQQVVALSSYEAEYIAASAASTQALWLARLLSDLLGRDTGTVELRVDSKSALALAKNPVFHERSKHIRVRYHFIRSYLEEGSIKASYINTKDQLADLLTKPLGRIKFLELCSRIGMAQLAHKTTHKT

SEQ ID NO: 26262 - protein, 1600 aa, Oryza sativa; identical to SEQ ID NO: 20623
  Clone ID: TF_OsC1528_2070.pep

SEQ ID NO: 26263 - protein, 2605 aa, Oryza sativa
  Clone ID: TF_OsC1528_2158.pep
MALERRLAYAALIPFLLLALPILPSDSPSGGGGGGAGGGGGGGETLDPPAAKYVVRFVEYRPADEHREYLEDGLRGAARPPPAASWRWVERRNPAAAFPTDFAVLEIRDACRAAVVDAVSALGRVRDVHADASYSRGVLSADRPRQQGKLFTAMSFEGEEGGGDREVGCSTDSNNSSSAGWRRKLLVQRSQVTSLFGAERLWGRGFTGRKVKMAIFDTGIRADHPHFRNIKERTNWTNEDTLNDNLGHGTFVAGVIAGQDAECPGFAPDTEIYAFRVFTDAQISYTSWFLDAFNYAIATGMDVLNLSIGGPDYLDLPFVEKDAELAAAEERRRATAQTAAAAARAARLAAAELAAARAEAEAEAAKDAARAAEVEVETLRSSINGSIAGDITADRELEELARGRARERAERWAAAHLHGGGGGPRDRGPANGNPDGRGRAGGSPEPARGPRRQRGSFSPDRRHGHHGVQTVVRDFGPGGGWPTLTKTNYIEWAAVMRVRLQVRQMWEAVRYGDVDYDEDRRALDALIAAVPPEMQFSLSQKRTAKEAWDAIAAARIGSDRARKSTLQALRKEWENLAFKPGEDVDDFALRLNTLLQKMVQYGDDTYDEERAVEKLFRCVPEKYRQIARSIESLLDLSTMSIEEALGRLKVVDGDEPQPLSGPITIGGKLHLTREQWEASQGDGRKGESSSPTGGRKPRKARGGVQLRWARRRAEGGARRGAQGIATGNHKPARDDACRNCGKLGHWAKDCRQPRRGQAHVARVEEEEPALLLAHASIELPPAAPAAAAFLHLDEPKVLVSLCDGSSNDKADGWYLDTGATHHMTCRREFFTEFDSSVRGSVKFGDASGVEIKGVGSVTFTAKSGEHRLLTGVYYIPALRNSIISVGQLDENGSRVLVEDGLMRIWDRRRRLLAKVTRGTNRLYILSAQVAQPVCLAARRDDEAWQWHERFGHLHFEALKRLSAKEMVRGMPCLDHVEQLCDVCVVTKQRRLPFPQQTSFRAKERLKLVHGDLCGPVTPATPGGRRYFLLLVDDLSRYMWVMVLGSKGEAADAIRRAQAAAEAECGRKLRVLRTDNGGEFTAAEFASYCADEGIQRHYTAPYSPQQNGVVERRNQTVVGMARALLKQRGMPAIFWGEAVVTAVYILNRSPTKALDGRTPYEAWHGHKPAVSHLRVFGCLAFAKELGHIGKLDDRSTPGVFIGYAEGSKAYRILDPETQRVRTARDVVFDEGRGWVWDKAVDDGSTPTYDDFTIEYVHFEGAGGVGSSSSSVSTPAPESPPTPTPTHPRATTSTTTSSSSTPPQPVTPHAPAPTATPPSTSTPTPARVERSPVEFATPLSHDGERIDAYHDGEQLRYRTMEDLLGDQLVPGLVPRDLEAQLHLACDDGEPRSFAEAEKHAAWRAAMQSEMDAVQENRTWELADLPRGHRAITLKWVFKLKRDEAGAIVKHKARLVARGFVQQEGIDYDDAFAPVARMESVRLLFALAAQEGWGVHHMDVKSAFLNGDLKEEVYVHQPPGFVIPGKEGKVLRLHKALYGLRQAPRAWNAKLDSTLKGMGFEQSPHEAAIYRRGIGGNALLVGVYVDDLVITGTKDAEVAAFKEEMKATFQMSDLGPLSFYLGIEVHQDNSGITLRQTAYAKRVVELAGLTDCNPALTPMEERLKLSRDSTAEEVDATQYRRLVGSLRYLTHTRPDLAFSVGYVSRFMQRPTTEHQQAVKRIIRYVAGTLDHGLYYPRCPGKAHFVGYSDSDHAGDIDTSKSTSGILFFLGECLVSWQSIKQQVVALSSCEAEYMAASAASTQALWLARLLSDLLGRDTGAVELRVDSKSALALAKNPVFHERSKHIRVWELTANNIIMVSAIGNDGPLYGTLNNPADQSDVIGVGGIDYNNHIASFSSRGMTTWELPHGYGRVKPDVVAYSRDIMGSKISTGCKTLSGTSVASPVVAGVVCLLVSVIPEEHRKSILNPATMKQALVEGASRLSGPNMYEQGAGKIDLWQSYEILKSYQPRASIFPNTLDFTDCPYFWPFCRQPLYAGAMPVVFNATILNGMGVIGYVKDPPVWQPSEDVGNILSVHFTYSDVIWPWTGYLALHLQVKDEGSQFSGIISGKVTLSIYSPAAHGESSPRSSSCVLYLKVKVVPTPVRSRRILWDQFHNIKYPSGFVPRDSLNVHNDILDWHGDHLHTNFHILFNMLRDAGYYIETLGSPLTCFDASNYGTLLMVDLEDEYFSEEIQKLKDDVVHKGLGVVVFAEWYHVDTMVKMTFFDENTRSWWTPITGGANVPALNELLAPFGIAFGDKVLSGDFSINGEQTHYASGTDIVQFPAGGFLHSFQLQDNSKISQDNSRSADTQNTPDKSKCLLVCGSVHMLSSILGMMEAGKGRVAVYGDSNCLDSSHMVTNCYWLLRKLVEFTGNRIKDPVLFSESAQLKFPVFESIHQLSRRPDVNFSTYSTVVGNELICHQDSRFEVWGTKGYGTQQTGTTRKLPEYQKSEAYNISTPIASDSTPDEAGLQRNISTPIASKFDKRMDYFGFLGHEENSGSLYAVQFVHTLSNSKIDIGMLVASQWMVPCFAATACLMLYLSCRVQQKRRRRKKGSTAARLSSMDRMV

SEQ ID NO: 26264 - protein, 1441 aa, Oryza sativa
  unsure (1)..(1441): unsure at all Xaa locations
  Clone ID: TF_OsC1528_2206.pep
SSNIWELEELARGRARERAEXGGGGPRDRAPADGNPDGRGRAGGSPEPARGPRRQRGSPSPDRCHGHHGVQTVVRDFGLGGGWPTLTKTNYIERAAVMRVRLQVRHMWEAVRYGDVDYDEDRRALDALIAAVPLEMQFSLSHKWTAKEAWDAIAVARIGSDRARKSTLQALRKEWENLAFKPGEDVDDFALRLNTLLQKMVQYGDDTYDEERAVEKLFRCVPEKYRQIARSIESLLDLSTMSIEEALGRLKVVDGDEPQPLSGPITIGGKLHLTREQWEASQGDGRKGESSPSTGGRKPCKARGGVQLRWARRRAEGGARRGAQGGAAGNHKPARDDACRNCGKLGHWAKDCRQPRRGIELSPAAPAATAFLHLDEPKVHAFLGNSSSNDKADGWYLDTGATHHMTGRREFFTELDSSVRGSIKFGDASGMEIKGVGSVTFTAKSGEHRLLTGVYYIPVLRNSIISVGQLDENGSRVLVEHGVMTIWDRRRRLLAKVTRGTNRLYILSAQVAQPVCLAARRDDEAWQWHERFGHLHFEALKWLSAKEMVRGLPCLDHVEQLCDVCVLTKQRRLPFPQQTSFRAKEQLELVHGDLCGPVTPATPGGRRYFLLLVDDLSRYMWVMVLGSKAEAADAIRRAQAAAEVECGRKLRVLRTDNGGEFTAAEFASYCADEGIQRQYTAPYSPQQNGVKRRNQTVVGMARALLKQRGMPAIFWGEVVVTAVYILNRSPTKALDGRTPYEAWHERKPGVSHLRVFGCLAFVKELGHIGKLDDRSTPGVFIGYAEGSKAYRILNSETQRVRTARDVVFDEGRGWVWDKAVDDGSTPKYDDFTVEYVHFEGAGGVGNSSSPSVSTPVPEPPPTPTPTHSRATTSTTTSSSPTPPQPVTPRAPAPTATPPSTSTPTPASVERNPVEFATPLSHDGERIDAYHDGEQLRYRTMEDLLGDQPVPGLVPPDLEAQLHLACDDGEPRSFAEAEKHVAWRAAMQSEMDAVQENRTWELADLPRGHRAITLKWVFKLKRDEAGAIVKHKARLVARGRLGVHHMDVKSAFLNGDLKEEVYVHQPPGFVIPGKEGKVLRLHKALYGLRQAPRAWNAKLDSTLKGMGFEQSPHEAAIYRRGNGGNALLVGVYVDDLVITGTKDAEVAAFREEMKATFHMSDQGPLSFYLGIEVHQDDSGITLRQTAYAKRVVELARLTDCNPALTPMEERLKLSRDSTTEEVDATQYRRLVGSLRYLTHTAGLGLLRRLRQSAVKRIIRYVAGTLDHGLYYPRCPGKAHFVEYSNSNHAGDIDTSKSTSGILFFLGECLVSWQSVKQQVVALSSCEAEYMAASAASTQALWLARLLSDLLGRDTGAVELRVDSKSALALAKNPVFHEWSKHIWVRYHFIRSYLEEGSIKASYINTKDQLADLLTKPLGRIKFLELCFRIGMAQLPHKTTHKT

SEQ ID NO: 26265 - protein, 1585 aa, Oryza sativa
  Clone ID: TF_OsC1528_2209.pep
ALSQQQQQHRLLLLPLSLPPLHAAAPRRCAMSDARSRRSVASSTRRQQDAELAAAEERKRATAQTAAAAARAARLAAAELAAAREEAEAEAAEDAAHAAEVEVETLRSSINGSIAGDITADRELEELARGRARERAERWAAAHLHGGGGGPRDRAPANGNPDGRGRAGGSPEPARGPCRQRGSLSPDRRHGHHGVQTVVRDFGPGGGWPTLTKTNYIEWAAVMRVRLQVRHMWEAVRYGDVDYDEDRRALDALIAAVPPEMQFSLSQKRTAKEAWDAIAAARIGSDRARKSTLQALRKEWENLAFKPGEDVDDFALRLNTLLQKMVQYGNDTYDEERAVEKLFRCVPEKYRQIARSIESLLDLSTMSIEEALGRLKVVDGDEPQPLSGPITIGGKLHLTREQWEASQGDGRKGESSSPTGGRKPRKARGGVQLRWARRRAKGGARRGAQGVATGNHKPARDDACRNCGKLGHWAKDCRQPRRGQAHVARVEEEEPALLLAHASIELPPAAPAAAAFLHLDEPKVLVSLCNGSSNDKADGWYLDTGATHHMTGRREFFTEFDSSVRGSVKFGDASGVEIKGVGSVTFTAKSGEHRLLTGVYYIPALRNSIISVRQLDENGSRVLVEDGLMRIWDRRRRLLAKVTRGTNRLYILSAQVAQPVCLAARRDDEAWQWHERFGHLHFEALKRLSAKEMVRGMPCLDHMEQLCDVCVVTKQRRLPFPPQMSFRAKERLELMHGDLCGPVTPATPGGRRYFLLLVDDLSRYMWVMVLGSKGEAADAIRRAQAAAEAECGRKLRVLRTDNGGDEGIQRHYTASYSPQQNGVVERRNQTGEAVVTAVYILNRSPTKALDGRTPYEAWHGHKPAVSHLRVFGCLAFAKELGHIGKLDDRSTPGVFIGYAEGSKAYRILDPETQRVRTVRDVVFDEGRGWVWDKAVDDGSTPTYDDFTIEYVHFEGAGGVGSSSSPSVSTPVPEPPPTPTPTHPRATTSTTTSSSSTPPQPVSPRAPAPTATPPGTSTPTPARVERSPVEFVTPLSHDGERIDAYHDGEQLRYRTMDDLLGDQPVPGLVPRNLEAQLHLACDDGEPRSFAEAEKHAAWRAAMQLEMDAVQENRTWELADLPRGHRAITLKWVFKLKRDEAGAIVKHKARLVARDFVQQEGIDYDDAFAPVARMESVRLLALAAQEGWGVHHMDVKSAFLNGDLKEEVYVHQPPGFVLPGKEGKVLRLHKALYGLRQAPRAWNAKLDSTLKGMGFEQSPHEAAIYRRGNGGKCLADAEVATFKKEMKATFQMSDLGPLSFYLGIEVHQDDSGITLRQTAYAKRVVELAGLTDCNPALTPMEERLKLSRDSTAEEVDATQYRRLVGSLRYLTHTRSDLAFSVGYVSRFMQQPTTEHQQAVKRIIRYVAGTLDHGLYYPRCPGKAHFVGYSDSDHAGDIDTSKSTSGILFFLGECLVSWQSVKQQVVALSSCEAEYMAASAASTQALWLARLLGDLLGRDTGAVELRVDSKSALALAKNPVFHERSKHIRVRYHFIRNYLEEGSIKASYINTKDQLADLLTKPLGRIKFLELCSRIGMAQLSHKTTHKT

SEQ ID NO: 26266 - protein, 240 aa, Oryza sativa
  Clone ID: TF_OsC10527_2.pep
MGSSDGDKPLRRIAASFEELEAVAKQQAPGPAMEVGSFARACSNVSVLFGCLGIAFKFAEMDYVAKASPRRHPRSLVFALPCPRGVRSAINCLLLPPFQVDDLLEASKSISKLPEMVELDIQKGTVRQAGSHTRNMLRVKRGIDMVKILFEQILVTEGNSLRDAASKAYAQVFAPHHGWAIRKAVAAGMYALPSKSQLLKKLNEDENSAKVQMQTFIRASGPVILYVEDLFTSRNLGMDW

SEQ ID NO: 26267 - protein, 692 aa, Oryza sativa; identical to SEQ ID NO: 20618
  Clone ID: TF_OsC1713_4329.pep

SEQ ID NO: 26268 - protein, 959 aa, Oryza sativa
  Clone ID: TF_OsC1528_1666.pep
MAAAVLPALRPTPPASNFPALLPTPPRSQMLPLLPTPCLIILPASFRAPPASDPKPGRADAVERWDARKEAGSSAASSSSSSSSSGLPCRADSCERWDAHKNKKAGGSAASSSSRARGGISPGRADSYERWDAHKTPGSPASSTGSSRSPCRADSVERWDSNKRPLSRASSAERWDINKKPRPKKDAVGSGKNNSTSQTTTMVSGTSAFDVLHREKTAIRFLGSASRDCSLFVRDGSPSSPLACFAPSSTLATASSSCRATGLSTTSIRVTLWLMVMKCFWVSTGKPEGILTADHQKQFEEATTLFVGCILSVLGDRLVKVYMHMTDAKELWDALNTKFGATDASNDLYIMEQFHDYKMADNRSVVEQAHEIQTMAKELELLKCVLPDKFVAGCIIAKLPPSWRSFGTALKHKRQEYSVEGLIASLDVEEKAREKDAASKGDGGQSSANVVHKVQNKSKGKYKAQQTTNFKKQKKNNNNPNQDERTCFVCGQPGHLARKCPQRKGMKAPAGQTSKSANVTIGNTGDGSGYVGTVDLKFTSGKIVQLKNVQHVPSIDRNLVSGSRLTRDGFKLVFESNKVVVSKHGYFIGKGYECGGLFRFSLSDFCNKSVNYICASVDDEANVWHSPSHGLLVHQMDVKTAFLNGELDEEIYMDQPDGFVVEVNEADKCVYYRHGGGEGVILCLYVDDILIFGTNLEVINEVKSFLSQNFDMKDLGVADVILNIKLIRGENEITLLQSHYVEKILNRFGYSDSKPSLTPYDPSLLLRKNKRIARNQLEYSQIIGSLMYLASATRSDISFAVSKLSRFTSNPGDDHWRALERVMRYLKGNMELGLHYTGYPAVLEGYSDSNWISDVDEIKATSGYVFILGGGAVSWRSCKQTILTRSTMEAELTALDTATVEAEWLRDLLMDLPIVEKPPVGAEPQPPAPHLPTPPAFSAPLRAPLRARVAAHLPHISRP

SEQ ID NO: 26269 - protein, 383 aa, Oryza sativa; identical to SEQ ID NO: 20670
  Clone ID: TF_OsC1528_1686.pep

SEQ ID NO: 26270 - protein, 1460 aa, Oryza sativa
  unsure (1)..(1460): unsure at all Xaa locations
  Clone ID: TF_OsC1528_1816.pep
MPLRRGALPPRAPLRPAPGGLCGRALLRRTCSLSWPATTGGAALRHTKYKNLADLYYAEDLVVDLISALYSYQMKNSRWKPVFALETGGPSNADSQDFEDDGGFLGRTRLGRLIQAAGRELLEKLNSARSNSPTKIFLVLFGFYTANALATILGQTGDWDVLVAGVVVAAIEGIGMLMYRKPMSRPPGRFQSLIAMVNYWKAGEAKVRECLGDRRRRGELDAGWEWWIVEGDELLLDIICHSPLGIGALLWVWRIHTVHAAAYSQRVTIQLPTMGLESRDATSGGDLRSRAKDDSYHNPQAPCKEELGAVTGQRRRKIRICFIVGNIPKNPVSTGKPMGVLNADQQKEFDEATTLFVGCIPSVLGDRLVEVYMHMTDAKELWDALNTKFGATDASNDLYIMEQFHDYKMADNRSVVEQAHEIQTMAKELELLKCVLPDKFVAGCIIAKLPPSWRGFGTALKHKRQEYSVEGLIASLDVEEKAREKDVASKGDGGQSTANVVHKAQNKSKGKYKAQQTTNFKKKNNNNNPNQDKRTCFVCGQPGHLARKCPQCKGMKAPAGQTSKSANVTIGNTGDGSGYGANVHVCADISLFSSYQVAWGSTVLIGNGSHASVHGVGTVDLKFTSGKIVQLKNVQHVPSIDRNLVSGSRLTRDGFKLVFESNKVVVSKHRYFIGKGYECGGLFCFSFSDFCNKSVNHICGSVDDEANVWHSRLCHINFGLMSRLSSMCLIPKFSIVKGSKCHSCVQSKQPRKPHKAAKERNLAPLELLHSDLCKMNGVLTKGGKRYFMTLIDDATRFCYVYLLKTKDEALDYFKIYKAKVENQLDRKIKRLRSDRGGEFFSNEFDLFCEEHGIIHERTPPYSPESNKIAERKNRTLTDLVNAMLDTAGLPKAWWGETLLTSNHVLNRVPNRNKDKTPYEIWIGRKPSLSYLRTWGCLAKVNVSITNKRKLGPKTVDCVFLGYAHYSIAYRFLIVKSEVPDMHVGTIMESRDATFFESFFPMKDTHSSSSQPSEIILSSITPPEQTEHTHEHVTEEDDSEAPRRSKRQRTVKSFGDDFTVYLVDDTPKSISEAYASPDADYWKEVVRSEMDSIIANGTWEVTERXYGCKHVGCKWVFKKKLRPDGTIEXSYGLLVHQMDVKTAFLNGELDEEIYMDQPDGFVVEGFAVNEADKCVYYRHGGGEGVILCLYVDDILIFGTNLEDLGVVDVILNIKLIRGENEITLLQSHYVEKILNCFGYIDSKPSPTPYNPSLLLRKNKRIARNQLEYSQIIGSPMYLASATRPDISFAVSKLSWFTSNPGDDHWRALERVMRYLKGTMELGLHYSGYPAVLEGYSDSKWISDVDEIKATSGYVFTLGGGAVSWRSCKQTILTRSTMEAELTALDTATVEAEWLHDLLMDLPIVEKPVLAILMNCDNQTVIVKVNSSKDNMKSSRHVKRRLKSVRKLRNSGVITLDYIQTA

SEQ ID NO: 26271 - protein, 893 aa, Oryza sativa; identical to SEQ ID NO: 20669
  Clone ID: TF_OsC1528_2002.pep

SEQ ID NO: 26272 - protein, 1083 aa, Oryza sativa
  unsure (1)..(1083): unsure at all Xaa locations
  Clone ID: TF_OsC1528_2106.pep
MAGFADALRPDKFTGVHFKRCRSNSRKPLFVGCILSVLDDRLVEVYMHMTDAKELWDALNTKFGATDASNDLYIMEQFHDYKMADNRSVVEQAHEIQTMAKELELLKCVLPDKFVAGCIIAKLPPSWRSFASLDVEEKAREKDAASKGDGGQSSANVVHKAQNKSKGKYKAQQTTNFKKQKKNNNPNQDERTCFVCGQPGHLARKCPQCKGMKAPAGQTSKSANVTIGNTGDGSGYGNLPTVFSVNQSTNWWVDTGANVARGSTVLMGNGSHASVHGVGTVDLKFTSGKIVQLKNVQHVPSIDRNLVSGSRLTRDKFKLVFESNKVVVSKHGYFNGKGYECGGLFRFSLSDFCNKSVNHICGSVDDEANVWHSRLCHINFGLMSRLSSMCLIPKFSIVKGSKCHRCVQSKQPRKPHKAAEERNLAPIELLHSDLCEMNGVLTKGEKRYFMTLIDDATRFCYVYLLKTKDEALDYFKIYKAEVENQLDRKIKRLRSDRGGEFFSNEFDLFCEEHGIIHERTPPYSPESNGIAEKKNRTLTDLVNAMLDTAGLPKAWWREALLTSNHVLNRVPNRNKDKTPYEIWIGRKPSLSYLRTWGCLAKVNVLITKKCKLGPKIVDCVFLGYAHHSIAYRFLIVKSEVPDMHVGTIMESRDATFFESFFPMKDTHSGSRQPSEIIPSSITPPEQTEHTHEHVSEEDVSEAPRRSKRQRTAKSFGDDFTVYLVDDTPKSISEAYASPDADYSKEAVHSEMDSIIANGTWEVTERPYRCKPVGCKWVFKKKLRLDGTIEKYKARLVAKGYTQKEGEDFFDTYSPVARLTTIRVLLSLAASHGLLVHQMDFSFIKWXVKTAFLNGELDEEIYMDQSDGXFAVNEADKCVYYRHGGGEGVILCLYVDDILIFGTNLEVINEVKSFLSQNFDMKDLGVADVILNIKLIRELGRNVLVHVRPRRSAGSSPQNTLFASARPCNDVMLKKLGGISPVRLFCDKANMRSAGRCDKPSGMELPRRFWSNSSCTIFVRFASDGGKWPESELWLSWSTVRFGNASSHRGMPPTIEVVVFEVRDVEGGAIVERVRYLAGERVVA

SEQ ID NO: 26273 - protein, 1355 aa, Oryza sativa; identical to SEQ ID NO: 20647
  Clone ID: TF_OsC1528_2166.pep

SEQ ID NO: 26274 - protein, 1508 aa, Oryza sativa
  Clone ID: TF_OsC1528_2167.pep
MAGFADTLRPDKFTGVHFKRWQIRVSTGKPEGVLTAEQQKQFEEATTLFVGCILSVLGDRLVEVYMHMTDAKELWDALNTKFGATDASNDLYIMEQFHDYKMADNRSVVEQAHEIQTIAKELELLKCVLPDKFVAGCIIAKLPPSWRSFNTALKHKRQEYSVEELIASLDVEEKAREKDAASKGDDGQSSANVVHKAQNKSKGKYKAQQTTNFKKQKNNNNNPNQDERTCFVCGQPGHLARKCPQRKGMKAPAGQTSKSANVTIGNTGDGNGNLVSGSRLTRDGFKLVFESNKVVVSKHGYFIGKGYECGGLFRFSLSDFCNKSVNHICGSVDDEANVWHSRLCHINFGLMSRLSSMCLIPKFSIVKGSKCHSCVQSKQPRKPHKAAEERNLAHLELLHSDLCEMNGVLTKGGKRYFMTLIDDATRFCYVYLLKTKDEALDYFKIYKAEVENQLDRNIKRLRSDRGGEFFLYEFDLFCEEYGIIHERTPPYSPESNGIAERKNRTLTDLVNAMLDTAGLPKAWWGESRDVTFFESFFPMKDTHSNSSQPSEIIPSSFTPPEQIEYTHEHVTEEDDSEAPRRSKRQRTTKSFGDDFTVYLVDDTPKSISEAYASPDADYWKEAVRSEMDSIIANGTWEVTERPYGCKPVGCKWVFKKKLRPDSTIEKYKARLVAKGYTQKEGEDFFDTYSPVARLTTICVLLSLAASHGILVHQMDVKTAFLNGELDEEIYMDQPDGFVVEGQEAKVCKLLKSLYSLKQAPKQWHEKFDRTLTSACFAVNETDKCVYYRHGGGEGVILCLYVDDILIFRTNLEVINEVKSFLSQKFDMKDLGVADVILNIKLIRGKNGITLLQSHYVEKILNHFGYIDSKPSPTPYDPNLLLRKNKRIARNQLEYSQIIGSLMYLASATRPDISFAVSKLSRFTSNPGDDHWRALERVMRYLKGTMELGLHYSGYPAVLEGYSDSNWISDVDEIKATSGYVFTLGGSAVSWRSCKQTILTRSTMEAELTALDTATVEAEWLRDLLMDLPIVEKPVPAILMNCDNQTVIVKVNSSKDNMKSSRHVKRRLKSVRKLRNSGVITLDYIQTTRNLADPFTKGLSRNVIDNASKEMGLRPIEDAVLQSILERTHLCELDCWSQSMKILGESSRKLTKDLGDCGHCGRALAAHAAGLQQCASAALRLRRQPAKAADCIHMLVLVPCILLLIACPFLMLILNPCRCNSLQDEKTIRLSRLGDKWNIRLSDSSGNRRMVGGCRKFAEDNDVGVGDICLFEPVFGGLDSGLLLGREAVDDERAVHVDRHLPEVDVAQPERHRRADVHVERHVAGLLALLQRALQPRPEAVPPLHGHPHHRRVPVALVERRQPPRAQRRAAVRHRRPRPGAVADPDHVVGVLRADGRHQLGVHGEVGGAHVEPRHGHVGHGVGRGLGPARVQEVRRRRRHRHDEEEEEAAAPAEAAAQAATVRDAVPGHVAAGARRDRGQRAGAVLLREHHVPRRRRRLGRPRAPVVRH

SEQ ID NO: 26275 - protein, 1239 aa, Oryza sativa
  Clone ID: TF_OsC1528_2230.pep
MAKELKLLKCVLPDKFVAGCIIAKLPPSWRSFGTALKYKRQEYSVEGLIASLDVEEKAREKDAAYKGDGGQSSANVVHKAQNKSKGKYKAQQTTNFKKQKKNNNNPNQDKRTCFVCGQPGHLARKCPQRKGMKAPAGQTSKSANVTIGNTGNGSGYGNLPTVFSVNQSTNWWVDTGANVHVCADISLFSSYQVARGSTVLMGNGSHASVHGVGTVDLKFTSGKIVQLKNVQHVPSIDRNLVSGSRLTRDGFKLVFESNKVFVSKHGYFIGKGYECGGLFRFSLSDFCNKSVNHICGSVDDEANVWHSRLCHIIFGLMSRLSSMCLIPKFSIVKGSKCHSCVQSKQPRKPHKAAEERNLAPLELLHSDLCEMNGVLMKGGKRYFMTLIDDATRFCYVYLLKTKDEALDYFKIYKAEVENQLDRKIKRLRSDRGGEFFSNEFDLFCEEHGIIHERTPPYSPESNGIAERKNRTLTDLVNAMLDTAGLLKAWWGEALLTSNHVLNRVLNRNKDKTPYEIWIGRKPSLSYLRTWGCLAKVNVPITKKRKLGPKTVDCVFLGYAHHSIAYRFLLVKSEVPDMHVGTIMKSRDATFFESFFPMKDTHSGSSQPSEIIPSSITPPEQIEHTHEHVSEEDVSEAPRRSKRQRTAKSFGDDFTVYLVDDTPKSISEAYASPDADYWKEAVRSEMDSIIANGTWEVTERPYGCKPVGCKWVFKKKLRPDGTIEKYKARLVAKGYTQKEGEDFFDTYSPVARLTTIRVLLSLAASHGLLVHQMNVKTAFLNGELDEEIYMDQPNGFVVVGQGKVCKLLKSLYGLKQAPKQWYKKFNKTLTSAGFAVNEADKCVYYRHGGGEGVILCLYVDDILILGQTLRGENGITLLQSHYVEKILNRFGYIDSKPSPTPYDPSLLLRKNKIIARNQLEYSQIIGSLMYLASATRPDISFVVSKLSRFTSNPGDDHWHALERVMHYLKGTMELGLHYTGYRAVLEGYSDSNWISDVDEIKATSGYVFTLGGGAVSWRSCKQTILTRSTMEAKLTALDTATVEAEWLRDLLMDLPIVKKPVPAILMNCDNQTVIVKVNSSKDNMKSSRHVKRRLKSVRKLRNSGVITLDYIQTARNLADPFTKGLSRNVIDNASKEMGLRPIEDAVLQSSLERTHLCKLDYWSQSMEILGESSRKLTKDLGMPAKSFDRAAGLSATSVRSSAAIALGPGARPSYACRPAATTRGRRRLDGDRSVPPMQVN

SEQ ID NO: 26276 - protein, 914 aa, Oryza sativa
  Clone ID: TF_OsC1528_2260.pep
MADQGHSVAGSDEMLLGVYMTDAKELWDALNTKFGATDASNDLYIMEQFHDYRMADNRSVVEQAHEIQTMAKELELLKCVVPDKFVAGCIIAKLPPSWRSFGTALKHKRQEYSVEGLIASLDVEKKAREKDAASKGDGGQSSANVVHKAHNKSKGKYKAQQTTNFKKQKKKKNNPNQDERTCFVCGQPGHLARKCPQRKGMKAPAGQTSKSANVTIGNTRDGSGYVARGSTVLMGNGSHASVHGVGTVDLKFTSGKIVQLKNVQHVPTIDMNLVSGSRLTRDGFKLVFESNKVVVSKHGYFIGKGYECGGLFCFSLSDFCNKSVNHICGSVDRGGKNKTEPKNRTEKTETETEKTEIETEKTETEKFGSDHGGELFSNKFDLFCEEHGIIHERTPPYSPESNGIAERKNRTLTDLVNAMLDTAGLPKAWWGKALLTSNHVLNRVPNRNKDKTPYEIWIGRKPSLSYLRTWGCLAKVNVPITKKRKLGPKTVDCVFLGYAHHSIAYRFLIVKSEVPDMHVGTIMESRDATFFESFFPMKDTHSSSSQPSEIIPNSITEHTHEHVTEEDVSEAPRRSKRQRTAKSFGDDFTVYLVDDTPKSISEAYASPDADYWKEAVRSEMDSIIANGTWEVTERPYGCKPVGCKWVLKKKLRPDGTIEKYKARLVAKGYTQKEGEDFFDTYSPVARLTTIRVLLSLEDSHGLLVHQMDVKTAFLNGELDEEIYMDQPDGFIVEVNEADKCVYYRHGGGEGVILCLYVDDILIFGTNIEVINESHYVEKILNHFGYIDSKPSPTPYDPSLLLRKNKRIARNQLEYSQIIGSLMYLASATRPDISFAVSKLSRFTSNPGDDHWCALERVMRYLKGTMELGLHYTGYPAVLEGYSDSNWIFDVDEIKATSGYVFTLGGGAVSWRSCK

SEQ ID NO: 26277 - protein, 214 aa, Oryza sativa; identical to SEQ ID NO: 20674
  Clone ID: TF_OsC359_5521.pep

SEQ ID NO: 26278 - protein, 660 aa, Oryza sativa
  unsure (1)..(660): unsure at all Xaa locations
  Clone ID: TF_OsC359_6217.pep
MDEFVATMDISEANEGYVSCGSVIEMSRQMKAARAGVRAQSXPACXGIPTVGKVGSVLLFTARMGEGLCHMFTTGSKAMECGVKMCLVGWPWLAWDELGPRSGYQFGLNHRRPLVKAVLDGHLCEEEDAVNCLPKLRKTVGSASEAKEAVKPAVKQEKKIRSVKVLSLVSDLSLPFXVFPLSLSKPGXQMADNEKGSKVRNQDKGASCSQVNKAPDTSCVVVVQHLINQNKLLIDLLQHHQTPILNPSQMQPQVQFEADQAPTSPDNVPLASQQAHCAMPHVDSKEAIIICLIYDEQGHYARNCPQQKRKAPMRTDDEVRKMTITGTEWPPPGMTKRQIGNFFRGAPQLTQHLLANGGRVSDSEDSDQVSSGDEDEKSPXGFKQNKMEHKACSRCGEIGHVASSCVTTCLHCEKDHPPGECPMSRITCFLCEGTDHVPKDCQFSFLLTKKMANHPASSNKEKHQDHVNPRQEYSFQPNSRVGQRNQNGKSKSRVRQDISCLNCQXLGHFAARCPKLRNIAASMSVHATPHNQKLVPXRIVIHASRSSRIAXLQQLSALPQRCQCXFQPQPPVDKTEANICVVPLDVPVQQPRNXVLDEELGRKKVIVCYNCSEERHYSRNCPQPKRNPRHHSGRYARRRHDHNIRVTGANAVPVKPSASQ

SEQ ID NO: 26279 - protein, 1342 aa, Oryza sativa; identical to SEQ ID NO: 19855
  Clone ID: TF_OsC1713_3583.pep

SEQ ID NO: 26280 - protein, 1204 aa, Oryza sativa
  unsure (1)..(1204): unsure at all Xaa locations
  Clone ID: TF_OsC1713_4249.pep
MSALVAAAASPRAGAAATVPGDGMPGAGAAVNDNVNGGSSASQSSGGTFSGSPHIVHVMIIVLIFWIKICRYMTIFPTIQKPDRSFSVVGFALKPHAFDGSNYKRWKARALLWLTAMQCFYVSRGKRSEPPLSPEEEVKFEASDCLFRGALISILADNIVDVYMHMPSGKDMWDALEAKFGVSDAGSELYVMEQFYDYKMVDDRSVVEQAHEIQMLAKELENNNCELSDKFVAGGIIAKLPPSWSDFATSLKHKRQEFSVSDLIGSLGVEEKARAKDNRHKKVEGGSSANMVQKKNPHASHNNKKVKPDGKPKATTNFKKKGKGKANGDCFVCGKSGHWAKDCPKRKDRKSANMVISKGGETSGYGKLLPTVLSVFHSSDWWVDTGANIHVGRGSSLSMGNGSLAAVHGVGMVDLKLTSGKTVQLKNVQHVLSIKKNLVSGSLLCREGFRLVFESNKCVVSKYGTFVGKGYDRGGLFRFSLDDMCNNHNVVNHISENGSKCHTCVQSKQSRKPHKASEARNLAPLELVHFDLKALHYFKTYKAEVENQLERKIKRLRSDRGGEYFSNEFASFCEEFGIIHERTPLYSPQSNGVAERKNRTLTEMVNAMLDTTGLSKEWWGEAVLTACHVLNKILMKHKDVTPFEEWERKKLNLSYLRTWGCLAKVSVPIAKKRKLGPNTVDCVFIGCAIHSVGYRFLIVNSGVPDMRVGTIIESRDATFFENEFPMKHTPRTSSQETVIPHEHFAPIEHNDQTPEGNPEEDNIVDTRKSKRQRVAKSFGDDYIVYLVDDTPRTIEEAYSSPDAYYWKEAVRSEMDSIMSNASHGLLVHQMDVKTAFLNGELEEEIYMDQPDEYVLEGQEGMGCKLLKSLYGLKQAPKQWHEKFDTTLISVGFVVNEADKCVYYRYGGGEGVILCLYVDDILIFGTSLNVIEEVKDFLSKSFEMKDLGVADVIINIKLLRGDEGGITLVQSHYVDKVLSRFGYSDCMPAPTPYDPSVLLRKNRRIARDQLRYSQIIGSLMYLASATRPDISFAVSKLSRFVSNPGDDHWQALERVMRYLKGTMSYGIHYTRYPKLLEGYSDSNWISDADEIKAASEYVFTLGGGVVSWKSCKQTILTRSTMEAELTALDTATVEAECLRELLMDLPMVEKPVPAILMNYDNQTMIIKVNSSKDNMKSSRHIKRRLKSVRKHKXLRSDSIRLCPNS

SEQ ID NO: 26281 - protein, 363 aa, Oryza sativa
  Clone ID: TF_OsC24769_1.pep
MENTQFSRPKAVPYNDSWEIPNSDYILLYLNDKQTGKITCMVCGKEGHYTCECPMKNKEKYVICTLCGKVGHCHLWCCHQNESERRACRRCGEKGHYDNWHHLGCSSCEKHHPLGRCPMGKITCFLCEGNGHVPVQCHLSPMLTAITQNQRESFNQGEEGHSALRNPNRCHVPSSDKANVAADKAPNQSLGVTCFNCGGKGHYSNKCPQKQKQHGVRSTNAAAMKDKTPNLTGVTCFDCGDRGHFSYTCPQNLLEVMLTAELEPHDDTYERQPKADNGTVPTVLSLNCGEASHCGRNNPMKSLESSSDKINSTAMTYKAPKRVLGVICFNCHEEGHYANRCPQKQQGINSGTSQSPIKRQRKE

SEQ ID NO: 26282 - protein, 1951 aa, Oryza sativa
  Clone ID: TF_OsC73154_1.pep
MTPRRGELLPTMLACLRVASPSRTWAALSPENRAGSGFSGSIGGDVQSIQAESIQAGRTGHLQGETTSSGLGEAASPTATFGRRSVGNVSFASPAATVQPSVEIQSAASSAVAPAIGRATVATATLRTARLDSAALLALTVLGSRPLHHVEFVLPHTPRLRLANALHLAVVPTRAAFLTRTPPPLVAPARQRIRHATAPPLLHCRHPPSRIPSPGPRRRLRDRPWLRLVSWAARAPPTTEPRDVEQAFLDEFKLRRGEVAVSLHHPQAFLIKFQHRRHCEEALAKGYVKRHGIEIHFIKWRSLKSALGVALMFRVRLCLDGVPMHAWAADIAERIIGRTCALEQIETDVVHPVESGNTRSIDLWAWTANPSTIPKRMWLGFTKRAKDPNLAPLFAVENPLEHWQRGVRHPVLFHLEEIHDYTAATIDLEGQGSFQPAKRRLPPWSLGVLDGEQVPGRVFEDFPHHPPPPRSVHERLGGRDRDDERREARRPERRSDRDAIDGRADRPRRGRAVRGGHLHDEGDHDDEDDWDGERDDRDGCADRDGRHARDQGGRGGRGRRRGSGNDHPRPWRRNDRDDDRDDRGRDLGRGRDDRRGSDNNYRRERTRSPRRWDRGGANRSGGGTRRTADPVYDSSKLMNIPLLHKSANQAEVGEFRLLHALHNSSFLCQEPQTNTLSPVSQLQWLSIIADKAATPALSGRPAKPRIEAWFQNAAWEPIPVEHAFARIKSALPPPTSTTTCQQVEEALLRIELAAAATDPPVGEPFPQIDSPPPRVTSPALAQGPVVPTGAMEIDDIVAPPPPSPVATQLAQAAASASPISTGVLDALFASPPQPIIASPPRSPPRSPCARPLHMGRRLKIRTRQHSQPTRRSERIAKQPARPTMERCQRVLFKRLGVLNGEEGASIEQVIAEYVAMFDGPLPAHVIAALTTIFGIDDEEQETMDAALISLVGEANVGKNFVFLLFHLRAVVFAPAPTDCYLISWNVRGLNSPARCNVVHELMLDTKCTLACFQETKLQSIDDGLARFLGGYKLDKFAFKPARGTRGGILLLWSSGDFDVQEVRIGRFSISAQITDIRSGVTFLLTGVYGPTRHHLKDSFLRHIRRLRPSPGEGWLILGDFNMIYRARDKNNSNLNLARMRRFRAVIDRCELHEIPLQNRKFTWSNERRKATLVKLDRCFCNEEWDLAFPHHVLHALPTGPSDHYPLVLSNPQGPHRPRTFKFENFWTRVPGFKDKVKDIWSQPSSHTEPMHRLNQKLQHTAVGLRDWTKGICSEAKLQFHMALNVIQRLDVAQEHRELTPLETRLRAALKRKVLGLASIERARKKQASRVTHIREGDANTKFFHLKVNARRRRNTIQRLKKDSGWAVTHGDKELTIHDHFASFMGRPGPRPNELNWETLDITPIDLATLGEPFTEEEVHKAIKEMPADKAPGPDGFTGAFFKVCWEIIKDDILLVFSSIYNLRCAHLNLLNSANIVLIPKKDGAESVSDYRPISLIHSIAKIFAKMLALRLRPHMHELISVNQSAFIKGRSIHDNYLFVRNTIRRYHRQRRAMLLFKLDITKAFDSVRWDYLLALLQRKGFPTRWIDWLGALLSSSISQRILSKATELGAISKLRGRTTRLRISMYADDDVIFINPTQNDVATSANILHRFGTAIGLVTNLQKSQVAAIRCGNIDLEEVLQGVPAKRANFPLKYLGLPLALGRLRKTDLQPVFDKISGRVASWRGKNMAAAGRTTLVKSVLSAQPIYLLTALKVMKESLEQLDKQRRRFLWAGTGDITGGKCKVNWAKTCLPTSQGGLGVLSLDKFTRALRLRWLWNEWRDPSKPWVGLETPCDGVDRNLFAASTKITVGDGNTTRFWDSAWINGRRPKDLMPLVYEISKNRKKSLRQGKEDDSWVHDLTLDAGLSITINLLDQLVRLWEANCKKCQGYQLLDYLSLSGPITVSRARSASP

SEQ ID NO: 26283 - protein, 499 aa, Oryza sativa
  Clone ID: TF_OsC73154_11.pep
PMANAHPMVPLVLRNLLPLLRDVDTVQFALDVAHARMRDNAARLAMLVPLLARARRLAPAGVDAEAAELMDQLEEAVVGALEARLQLVQVVTLLVVVRAVATARRRARRLPSVLLAVAALAFAVSGSGVALGPLRVFVMVSTVLLLVLSWELRFVWISASFSTVPIAVLSNGASCRSARARRERRTAVAEAACKRDGQRSGVEQMRGGGGGQSSAWRPVGSGGGGGACGGGSPLAVGMVVVGVSVPRARYSRRDPLLLVSVVVSLVPAGSRRGAVASVLLLLRRRIDGVLRFSLPATSAASSMSAALSGEVRGEHVVVLDHEPVEAAAGTTRNLLIRDGFSVTDLWIVTDKPGVGIGGDVQSIQAESIQARRTGHLQGETTSSGLGEAASPTATFGRRSVGNVSFASPAATVQPSVEIQSAASSAVAPAIGRATVATVTLRTARLDSAARLALTVLGSRPLHHVDAFATQPRLPCSTAITRQAGSRHPAPDAASATAPG

SEQ ID NO: 26284 - protein, 389 aa, Oryza sativa; identical to SEQ ID NO: 19860
  Clone ID: TF_OsC1713_5364.pep

SEQ ID NO: 26285 - protein, 374 aa, Oryza sativa
  Clone ID: TF_OsC1713_5535.pep
RPGSTDSPVSSRVHPPAACGDLHPASSGAGAGVPLLPPHPLSLEMPRYDDHYGSTRLYVGRLSSRTRSRDLEYLFGRYGRIREVELKRDYAFIEFSDPRDADEARYNLDGRDVDGSRILVEFAKGVPRGAAGGSREYMGRGPPPGTGRCFNCGIDGHWARDCKAGDWKNKCYRCGERGHIERNCQNSPRNLRRERSYSRSPSPRRGRGHGRSRSYSRSRSRSYSRSRSRSLSGSPRGRRDRDDRRSRSLSYSRSPRRSISPAANGKERNPSPNGRRSPRSPQDRVSPPPKDNDERNGDSPWGRENSRSPSDGYRSPVAANGRSPSPRNNGSPSPMDNNSRSPRDNGSPSPRDGNGDGGSRGGSRSPRASESPEA

SEQ ID NO: 26286 - protein, 343 aa, Oryza sativa
  Clone ID: TF_OsC1713_5589.pep
QPPHPRRPRPRIPPPFSSKEMPRYDDRYGSTRLYVGRLSSRTRSRDLEYHFSRYGRIREVELKRDYAFIEFSDPRDAEEARYNLDGRDVDGSRILVEFAKGVPRGPGGSREYMGRGPPPGTGRCFNCGIDGHWARDCKAGDWKNKCYRCGERGHIERNCQNSPRNLRRERSYSCSPSPRRGRGRSRSYSRSRSRSRSYSRSRSRSLSGSPRARRELERSRSLSYSRSPRRSISPAANEKKRSPTPDGSRSPRSPQDQVSPPPKDNAERNGSDHGDSPRGRENSRSPSDGYRSPAAANGRSPSPRNNGSPSPMDNGSRSPRDGNGDGGSRGGSRSPRPSESPEA

SEQ ID NO: 26287 - protein, 1286 aa, Oryza sativa; identical to SEQ ID NO: 19770
  Clone ID: TF_OsC1713_4259.pep

SEQ ID NO: 26288 - protein, 1020 aa, Oryza sativa; identical to SEQ ID NO: 19777
  Clone ID: TF_OsC1713_4290.pep

SEQ ID NO: 26289 - protein, 742 aa, Oryza sativa; identical to SEQ ID NO: 19784
  Clone ID: TF_OsC359_7892.pep

SEQ ID NO: 26290 - protein, 963 aa, Oryza sativa; identical to SEQ ID NO: 19766
  Clone ID: TF_OsC1528_1838.pep

SEQ ID NO: 26291 - protein, 1494 aa, Oryza sativa
  unsure (1)..(1494): unsure at all Xaa locations
  Clone ID: TF_OsC2630_1.pep
MWGLHKSYPPPLFLFVSVGRELAAVAGASSNSIHSLLLPFPAASLLAAAVHQPASGGDPGVALERRQRRAREGQSGGGGGDRGRRGRLAVGRKKTSHENGRVLATLGPATALSTAALDALSAGHDAPASAVLPPCPRTRKGRLRLATATHVGILSKMAAFGGGFFCTCGGSVEGGRSSAGEGGGGTTDGRGQHAEPADNGTVGNKPYTMYLGNLTSGIRARFRAWTRDRALEGVFMPRGRTHSPRRRSASPSVHVSGSGGRASGSGGSDRGLVIHRVVKEAGGAANYPLLTRTNYNDWSLLMKIKLQARCLWGAIDPGGVELHEDRMALDAICSAVPPEMISTLATKASAKEAWDCIRILRVGDDRIRKASAQKVRMEYESLVLRDGETVEDFAMRLTSTVNQLATLGDPEPADKVVEKYLRVARPRFTQLVLSIETLLDISTLSLEEVTGRLKAAEDAMPLPSSSSDNAGKLYLTEEEWLERHNKKEQEAKKNSGSPSNRGKRRGGKGRNGGGAGVGGAKNTNSGAARREDKCRNCGKYGHWAKDCRSKPKRDEQAHVAQDDEPTLLLLTGGVITHACEQEHAPAPSAPTPSSDPIYLEEKKLFAALDDAAKRDPGRWIVDSGASNHMTGCRTAFSDIDTGITGNVRLGDGSVVRIEGRGTVLFSCKNGEHRTLSNTYLIPRLAANIISVGQLDETGFKVEAEDGVMRIWDEQRRLLARIHRNPGRLYVLDVELARPVCLTARIGDEAWKWHARFGHINFTALRKMGREQLVRGLPAVSQVDQLCEACLAGKHRRTPFPQQAQQRSLEPLQLLHGDLCGPISPPTPSGNRYFLLLVDDYSRFMWLSLLPSKDGAAAAIKRIQAAAERKSGKKLRALRTDRGGEFLVHHFADYCAELGVRRETTAPYSPQQNGVVERRNQSVVGTARSMLKAKGLPXTTPNVKKLDDRSKPMIFVGYEPGSKAYRCYDPASRRVHISRDVAFDEEAQWRWDGETASELDFTIEYTTVYHPAVVNAPRADSEQPELPTPSATSTSPCTPAATAGTTATSAEFATPPTIAADDLDADHDDAPLRFRRVDEILGPATPPGLAVREFDDELMMASAEEPASLAEAQQQDCWRQAMLDEMKSIEENGTWLLVDPPPRQRPIGLKWVFKTKKDAAGNITKHKARLVAKGYVQRQGIDYDEVFAPVARLESVRLLLAYAASEGWAVHHMDVKSAFLNGELKEEVYVAQPPGFVVDGKEQKVLRLVKALYGLRQAPRAWYTKLDASLLSLGFHRSASEHAVYMRGANARRLVVGVYVDDLVITGGNHSELDQFKKEMRETFQMSDLGLLRYYLGLEVSQTDEGITLSQGAYAKKILEAAGMVGCNPSQTPMEPRLKLSKLSTSPCVDATDYRKIVGSLRYLVNSRPDLAFSVGYVSRFMEKPTTEHLAAVKRVLRYVAGTINRGCSYRRKKGAVHLVGFSDSDVADDVDKREITTGVIVCLGKQPLTGWFGR

SEQ ID NO: 26292 - protein, 728 aa, Oryza sativa
  unsure (1)..(728): unsure at all Xaa locations
  Clone ID: TF_OsC359_6011.pep
LRSLNRGSAFSHSLVAPPPPRIPPLPSAPRAIKRXGINPRVPLPRFPLFPLSLSLGFVRIKPVIVAGAINGAESXRAIPPSPAALSFPRRYLNPPRAPLFRFRRSPLTLAVGIVLAPXHLLSAVAAVLRLAAAAAPLLLPTRRHLPRHRRIAVDLVRASVSLADRRSTVVIVIPSRAAVSLRSGRRSRRRRCPGVSRGPPFAFPLPSSLSGAAPPRRWSPAVTIGARARRSRRPRRRGRPRARPRGCQVGPAVSRPRPRVRLTRGTHGADRRQPRAPGPPWTVGLTRGPHSPWTRANEGYTSCGPMADNEKGNKVRSQDIGTSSSRVNEAQDTSCAAVVQHLINQNKLLIEILQQHRMPILNPSQMQPQVQLEAVQALTPQVSAPPTSQKAPHAMPHVDPKEASIICFMCDEQGHYARNCPQQKRKAPMRTEGEVRKMIITSTEWPPPGMTRRQRRNTFRGAPQLTEHLLANGGRVSDSEDSDQVSSEDEDKMERKACSRCGEIGHVASSCASTCVHCEEDHPPDRCPTSRITCFFCEGTDHVPKDCQFSFLLTKKMANQPAGFNGEKHQGNTNPRQDYSFSLTPVPGQRNQNEKRKCRVREDICCFNCQGMGHFADKCPKPRNIAAGTSVHATPCNQKLAPQRMVIHASRSSPIARVATAPIPMSALPQGVNAQFQPQQRIVVDGRSCVSPRPTPGRAKGNQPPEGDTKQKTVIRCNQQSEGSFSCE

SEQ ID NO: 26293 - protein, 789 aa, Oryza sativa
  unsure (1)..(789): unsure at all Xaa locations
  Clone ID: TF_OsC359_7259.pep
KENPKRSSFSPPPSLLGRLGPLLPPSLSLLPRGPSASPRARAADRRARPPLSLTGGAHLSSPSSRRARRRARALAPPPPRIAPHPAVPARIKERGITPRDSLSRFPRFPLSLSLGSVRIHPVILAGDIYGARDPRAXFPSSPAAFSPSRCYIIAPRAPLFRFRRSPLALAVGSVLAPCSSLSAVAADLRLAADVAPVLLPARRHLPRHRRIAVDLVRASVSLADRRSAAVIVIPSRAAVSLRSVRRSRRRRCPGVSRGPXPLRFPLPSSLSGAAPPRRWSPAATIGARVRRSRRPCRRGRLRARPRGCQVGPAVSRPRPRVRLTRGTHGADRRQPRAPGPPWTERLTRGPHXPWTRANEGYTSCGPMADNEKGNKVRSQDIGTSSSRVNEAPDTSCVAVVQHLINQNQLLIEILQQHRMPILNPSQMQPQVQLEAVQALTPQVSAPPTSQKAPHAMPHVDPKEASIICFMCDEQGHYARNCPQQKRKAPMRTEDEVRKMIITSTEWPPPGMTEHQRRNSFRGAQQLTEHLLANGGRVSDSEDSDQVSSDDEDKIELKACSRCGEIGHVASSCASTCVHCEEDHPPDRCPTSRITCFFCEGTDHVPKDCQFSFLLTKKMANQPASSNGEKHQGNTNPRQDSSFSLTPVPGXRKQNEKRKCRVREDICCFNCQGMGHFADKCPKPRNVAASTSVHANPRNQKLAPQRIVIHASRSSPITRVATAPIPMSALPQGVNAQFQPQQRIVVDGRSCVSPRPTPGRAKGNQPPEGDTKQKTVIRFNQQSEGSFSCE

SEQ ID NO: 26294 - protein, 453 aa, Oryza sativa; identical to SEQ ID NO: 19779
  Clone ID: TF_OsC359_7550.pep

SEQ ID NO: 26295 - protein, 508 aa, Oryza sativa
  Clone ID: TF_OsC359_7896.pep
RWSRRPLVRCLLDGQVSEEEDIVSCLPKLRKTAGSASEMEEVVKPAVHNSKRLRSVKVLSLVSNLSLPFVFPLSLSKPLQQMADNEKGNKVRSQDIGTSSSRVNEAPDTSCVTLVQHLVNQNRLLIEILQQHQTPILNLSQIQPQVQLEAVQALTPQVSAPPTSQKAPHAMPHVDPKEASIICFMCDEQGHYARNCPQQKRKAPMRTEDEVRKMIITSTEWPPPGMTRRQRRNTFRGATQLTEHLLANGGRVSGSEDSDQVSSDDEDEKSPQGFNQNKIELKACSRCGEIGHVASSCASTCVHCEEDHPPDRCPTSRITCFFCEGTDHVPKDCQFSFLLTKKMANQPASSNGEKHQGNTNPRQDYSFSLTPVPGQRNRNEKRKCRVREDICCFNCQGMGHFADKCPKPRNIAASTSVHATPCNQKLAPQRIVIHASRSSPIARVATAPTPASALPQGVNAQFQPQPSVDKTEASIGIVPLDVPAQQPRNQVQDEEPKRKKVIYNGSTC

SEQ ID NO: 26296 - protein, 1454 aa, Oryza sativa
  Clone ID: TF_OsC372310_1.pep
MSAPTPRVSRSREPHQRRISRSPPHRRGRRRPGEDRELIPVQRVVKEVGGSANYPLLTKTNYGDWALMMKVMLQARGLWDAVEHGDADFQADRMAMEAILRAVPPEMLASLAVKPSAKEAWDAIKTMRVGVDRVRKSKAQMLQKQYDAMEFKDGETVEEFSLRLNGLVTNLATLGVHLEEGKVVEKSLNSVPDHLSQIALSIETLLDLDELTLEEVTGRLRNAEEKLPAKSSAAGGKLFLTEEQWTARWKEKQAAESSSGKAKSGGGNRRRRGGKKKAEAAARDGDRAGRDTQEGREPNRDKCRNCGRTGHWAKDCRQPKRPAEAHQALADEDDDEPALLMAHVVDAAPVSASSSSAPPASSPPSQPDKTIELVEPKVFAHLLTEKQTDGGVWHLDTGATNHMTGIREVFAELDLSVRGSVRFGDGSVVGIEGRGKIIFECRNQEHRALTGVYYIPKLNANLISLGQLDENGCDVRIYHGVCTIRDPAAQLLARVRRTRNRLYLIKLTIGQPVCLAAKAQECAWLWHARYGHLHFDALRRLASRHMVRGMPDIDHVEQLCDSCVISKQRRTPFPRRSMFRAEDRLELVHGDLCGPISPATPGGKTHFLLLVDDASRYMWITLLGRKSEAADAIKRFQARAEAESKQKLRILRTDNGGEFTSVEFATYCAEQGVSRHFSAPYSPQQNGVVERRNQTILGMARSLLKAKNMPARYWGEAVTTAVFLLNRAPTKSLANMTPYEAWHGKKPAVGYLRTFGCLAYVKDVRPHLPKLSDRSKPMVLIGYADGAKAYEVFDPVSGRVQVSRDVIFDEGAGWDWDAAGAAAVPGGGGCSDFTVEYLTTATSPSPSTSAPSSASSGASASRAVTPSSASTPATLASASTPATPTFVSPPPGVDENLDAEQDDCPLRYRSMGDLLGDARSPGFATRDPEKGELHLLAAEEPASFTEAEQRQEWRRAMLDEIASIEENNTWRLVDLPSGHRAIGLKWVFKLKKDAEGRVAKHKARLVAKGYVQQPGIDFEEVFALVARLESVRLLLAQAAQAGWTVHHMDVKSAFLNGELAEEVYVKQPPGFVEEGREHQVLRLDKALYGLRQAPRAWNSKLDATLLSLGFRQNDCEHAVYVRGNTSARLLVGVYVDDLIITGTKEDEIVRFKGEMKALFKMSDLGLLSFYLGIEVEQVAGSIRLSQAAYARRILERAGMLGCNPSATPMEQRLKLSKTSAAAPVNPNWYRGIVGCLRYLVHTRPDIAFSVGYVSRFMEAPTTEHEAAVKRILRYIAGTTEFGCHYHQSSSPVQLVGYSDADMAGDPDTRKSTTGVVFFLGTSPVSWQSVKQKVVALSSCEAEYIAATTAACQGVWLSQLLGEVNQEEPDAFKLLIDNKSAIALSKNPVFHERSKHIATRYHYIRERVGDGSVHVEFVRTEGQIADILTKALGRTRFQELRSRIGVADVKFRCKT

SEQ ID NO: 26297 - protein, 941 aa, Oryza sativa
  unsure (1)..(941): unsure at all Xaa locations
  Clone ID: TF_OsC1713_4588.pep
MQCFYVSQGKRSEPPLSPKEEAKFEASDCLFRGALISVLTDNIVDVYMHMPSGKDMWDALEAKFGVSDAVSELYVMEQFYDYKMMLAKEFENNNCELPDKFVAGGIIAKLPPSWSDFATSLKHKRQEFSVTDLIGSLGVEEKARVKDNRGKNIEGGSSANLVQKKNPHASHNNNNKKVKPDVKPKATTNFKKKGKGKAKGDCFVCGKPGHWAKNCPDRKDKKSANMVISEGGGTSGYGXRGSSLLMGNGSLAAVHGVGTVDLKFTSGKNVQHVPSIKKNLVSGSLLCRDGFRLVFESNKCVVSKYETFIGKGYDSGGSKCHTCVQSKHPRKPHKASEARNLAPLELVHSDLCEMNSVLTKGGKKYFMTLIDDCTRYCYVYLLKTKDEALHYFKIYKAEVENQLERKIKRLRSDRGGEYFSNEFTSFCEEFGIIHERTPPYSPQSNGVAERKNRTLTEMVNAMLDTAGLSKEWWGEAILTACHVLNKIPVKHKEVIPFEEWERKKLNFSYLRTWGCLAKVNVPIAKKRKLGPKTVDCVFLGYAIHSVGYRFLIVNSGVPDMRVGTITESRDATFFENEFPMKNTPSTSSQEPVLPHEHFAPIEHNDQTPEENPEEDNIVATRKSKRERTAKSFGDNYIVYLVDDTPRTIEEAYSSTDADYWKEVVRSEMDSIMSNGTWEVVERPYGCKPVECKWVFKKKLRPGGTIENLNVIEEVKDFLSKSFEMKDLGVTDVILNIKLLRGDEGGITLVQSHYVDKVLSRFGYSDCKPAPTPYDSSVLLRKNRRIARDQLRYSQIIGSLMYLASATRPDISFAVSKLSRFVSNPGDDHWQALERVMRYLKGTMSYGIHYTGYPKVLEGYSDSNWISDADEIKATSGYVFTLGGGAVSWKSCKQTILTRSTMEAELTALDTATIEAEWLRELLMDLPVVEKXKPVPAILMNC

SEQ ID NO: 26298 - protein, 847 aa, Oryza sativa
  Clone ID: TF_OsC1713_5062.pep
MATVCPCARLPTGMSSVYLVVSECVALAPASETTRCCDVCTDGRAIRFLESVRRDYSLFVNIYFTFTNMSNTGDNGNTGYKEKEAPVNINGGNTASNSNGGPFLGVLADNIVDVYMHMPSGKNMWDALEAKFGVSDAGSELYVMEQFYDYKMVDDRSVVEQAHEIQMLAKELENNNCELPDKFVAGGIIAKFPPSWSDFATSLKHKRQEFSVTDLIGSLGVEEKARAKDNRGKNIEGGSSANLVQNKNPHASHNNNKKKVKPDVKPKATTNFKKKGKGKAKGDCFVCGKPGHWAKNCPDRKDKKSANMVISEGGGTSGYGYFLPTVLSVFHSPDWWVDTGANIHVGRGSSLLMGNRSLAAIHVFDIAVYLLKTKDEALHYFKIYKAEVENQLERKIKRLRSDKGGEYFSNEFTSFCEEFGIIHERTPPYSPQSNGVAERMNRTLTKMVNAMLDTAGLSNEWWGEAIFTACHVLNKIPVKHKEVTPFEEWERKKLNLSYLRTWGCLAKVNVPIAKKRKLGPKTIDCVFLGYAIHSVGYRFLIVNSGVPDMRVGTITESRDAIFFENEFPMKNTPSTSSLEPVLPHEHFAPIKHNEQTLEGNPEEDSIVDTRKSKRQRVAKSFGDDYIVYLVDDTPRTIEEAYSSPDADYWKEAVRIVERPYGCKPVGCKWVFKKKLRPDGTIEKYKARLVAKGYTQKEGEDFFDTYSPVARLTTIRVLLALAASHGLLVHQMDVKTVFLNGELEEEIYMDQPDRYVLKGQEGMVCKLLKSLYGLKQAPKQWHEKFDPTLTSAGFVVNEADKCAYYRYGRGEGVILCLYVDDILIFGTSFNVIEEVKDFLSKSFEMKDF

SEQ ID NO: 26299 - protein, 145 aa, Oryza sativa
  unsure (1)..(145): unsure at all Xaa locations
  Clone ID: TF_LIB4833-033-R1-N1-B4.pep
FPNDLCNNCKRPGHFARDCPNVALCHACGLPGHIAAECSSKDLCWNCKEPGHMANSCPNEGICRNCGKSGHIARECSAPPMLPGEMRLCSNCYKPGHLAAECTNEKACNNXRKSGHLARNCPNEPVCXLCNVSGHLARECPKSDA

SEQ ID NO: 26300 - protein, 844 aa, Oryza sativa; identical to SEQ ID NO: 19801
  Clone ID: TF_OsC1232_8.pep

SEQ ID NO: 26301 - protein, 731 aa, Oryza sativa
  unsure (1)..(731): unsure at all Xaa locations
  Clone ID: TF_OsC359_6616.pep
KKVNPSCFRLARALAPPPPRIPPLTSVPRAIKRXGNIPRDSLPLSPPPHFSLPLSLGFVXNSSPNLAGXINGGRIFRARFPLXPAALSPSQPYINTPRASLRRFRHSPHSLSAGIELAPSLSLSAVAAELRSAAVLAPDHLPPRRRLLRLRRNLADLVHLSVSVADRRNAAVPVNPSHAAAPLRSSRRSRRRRRPGVSRGPPIRFPLPSPLSGAAPPRRWSPAXTIGARARRXSRRLCRRGRLRARPAAAMWGPAVSRPHPRVRLTHWTHGAGRCEPGAPGPPWTVRLPRGPHXPWTRTNEGYTSCGPMADNEKGNKVRSQDIGTSSSRVNEAPDTSCVTLVQHLINQNRLLIEILQQHQTPILNLSQIQPQVQLEAVQALTPQVSMPPASRRTHGDVPHVDSKEASIICFMCDEQGHYARECPQQKRKTPMRTEDEVRKMIITSTKWPPLGMTKRQRRNTFRGAPQLTEHLLANGGRVSDSEDSDQVSSDDEDEMERKACSRCGEIGHVASSCATTCVHCEEDHPPDRCPTSRITCFFCEGTDHVPKDCQFSFLLTKKMANQPASSNGEKHQGNTNPRQDYSFSLNPVPGQRNQNEKRKCRVREDICCFNCQGMGHFADKCPKPRNVAASTSVHATPCNQKLAPQRIVIHASRSSPIARVATAPTPASALPQGVNAQFQPQQRIVVDGRSCVSPRPTPGRAKGNQPPEGDTKQKTAIRFKQQSEERFSCE

SEQ ID NO: 26302 - protein, 530 aa, Oryza sativa; identical to SEQ ID NO: 19806
  Clone ID: TF_OsC359_6910.pep

SEQ ID NO: 26303 - protein, 736 aa, Oryza sativa
  Clone ID: TF_OsC359_7459.pep
MADNEKGNKVRSQDIGTSSSRVNEAPDTSCVTLVQHLINHNRLLIEILQQHQTPILNLSQIQPQVQLEAVQALTPRVSMPPASRRTHGDVPHVDSKEASIICFMCDEQGHYARECPQQKRKTPMRTKDEVRKMIITSTEWPPPGMTKRQRRNTFRGAPQLTEHLLANGGRVSDSEDSDQVSSDDEDEKSPQGFNQNKMERKACSRCGEIGHVASSCATTCVHCEEDHPPDRCPTSRITCFFCEGTDHVPKDCQFSLLLTKKMANQPASSNGEKHQGNTNPRQDYSFSLTPVPGQRNQNEKRKCRVREDICCFNCQGMGHFADKCPKPRDIAASTSVHATPCNQKLAPQRIVIHASRSSPIARVATAPTPASALPQGVNAQFQPQPPVDKTEATFQLLQNWNYPAGATNVQVPTVQQQCKLSEFLKTETPTFAIVVEPMEASDWLRTVEKKLGLIQCTDQERVVFATHQLVGLASEWWDSYEASRPEGHTITWDEFSSVFKRSHVPAGMITLRKREFRYLKQEDLTVTEYLHEFHRLAHYAPEDVENDEDKQEKYLQGLKDEIAVQLLLEEYEDFEKLVDKAIQLESEHNRMKNCKRRIVSIPVFPCGNQRQRTEPLQITGSSVAHQEFPPQEDGHNADNNISNTNDDDTTNNHASCPISDHSNQACNVNIIHQGVDDSINDGTQNDNPSNCDSEKDSNGDSNYGFSERQHAQGPHCPRSILNTRSEEYLVEKGRKW

SEQ ID NO: 26304 - protein, 1686 aa, Oryza sativa
  unsure (1)..(1686): unsure at all Xaa locations
  Clone ID: TF_OsC359_5506.pep
MPRYKPEYLFGVEGFVQELRTMSFVIGFGTAPFYAQIPHDRHEEKCRVKVTLNSNSEDIPSVMFEAGGRNYIHVCQEVARITIGELRDRYSDQLADTEYRYHPRQPQGSDRGSYLETEGIENDATTRHLVEMLWAMDETRAETVLAAQDREDRNRGKICKLEDKVDRLEKELAALKGEAPPQKARIRLTARKRALFVPRYQLAPKFSPVSLLVXCPCQMVLTRSNGNGPNNNNNNNNGENPTLAQVLAQQTQLMNMMMQQLQNQQNQLNQGNNNAPPPQNKLAEFLRVRPPTFSSTTNPVEAGDWLHAIEKKLDLLQCTDQENVSFASHQLHGPASEWXDHFRLNRTTAEPITWLEFTAAFRKTHIPSGVVSLKKKEFRSLTQGSRSVTEYLHEFNRLARYAPEDVRNDEERQEKFLEGLNDELSYPLMTRDYPDFQKLVDKAIRQEDKYNRMEQKKRRIAQFKTQQGNNQRPRLTLGPQSMPQGGSSSVVHPQRQFFNNNAGNNIRNQAPQPAKKEQGSKLVVCFNCGEPGHYADKCPKPRRVKVVPVQSNSTVPASKARVNHVAAAEAQDAPDVILGTFLVNSVPATVLFDSGATHSFLSMSFAGNHGMEVEDLRRPMMVSTPSNQALSLQRSPSVRIEIKGVPFLANLILLESKDLDVILGMDWLARHKGVIDCANRKVTLTSNGGRVVTVHALSSESLRSRLNQITLEEIPIVREYPDVFPDDLPGMPPKRDIEFRIDLVPGTTPIHKRPYRMAANELAEVKRQVDDLLQKGYIRPSSSPWGAPVIFVEKKDHTQRMCVDYRALNDVTIKNKYPLPRIDDLFDQLKGATVFSKIDLRSGYHQLRIKEEDIPKTAFTTRYGLFECTVMSFGLTNASAFFMNLMNKVFMEYLDKFVVVFIDDILIYSRTKEEHEEHLRLALEKLREHQFYAKFSKCEFWLSEVKFLGHIISAGGVAVDPSNVESVTNWKQPKTVSEIRSFLGFTGYYRRFIDNFFKIAKPMTRLLQKDVKYKWSEECEQSFQELKNRLISAPILILPDPKKGFQVYCDASKLGLGCVLMQDGKVVAYASRQIRPHEKNYPTHDLELAAVVHALKIWRHYLFGTRIEVYTDHKSLKYIFTQPDLNMRQRRWLELIKDYDMGIHYHPGKANVVADALSRKGYCNATEGRQLPLELCKEFERLNLGIVSRGFVAVLEAKPTLIDQVREAQINDPDIQEIKKNMRRGKAIGFLEDEQGTVWLGERICVPDNKDLKDAILKEAHDTLYSIHPGSTKMYQDLKERFWWANMKREIAEYVAVCDVCQRVKAEHQKPADLLXPLKIPEWKWEEIGMDFITGLPRTSSGHDSIWVIVDRLTKVAHFIPVKTTYSGSRLAELYMARIVCLHGVPKKIVSDRGSQFTSNFWKKLQEEMGSKLNFSTAYHPQTDGQTERVNQILEDMLRACALDFGGSWDKNLPYAEFSYNNSYQASLQMAPYEALYGRKCRTPLLWDQTGEHQVFGTDILREAEEKVKIIQERLRVAQSRHKSYADNRRRDLSFEEGDYVYLRVTPIRGVHRFHTKGKLAPRFVGPYKIVSRRGEVAYQLELPQSLAGVHNVFHVSQLKKCLRVPTEEANLEQIEVQEDLTYVERPTRILEIDERKTRNXVIRFCKVQWSNHSEEESTWEREDELKSAHPHLFASSSESRGRDSV

SEQ ID NO: 26305 - protein, 1596 aa, Oryza sativa; identical to SEQ ID NO: 19789
  Clone ID: TF_OsC359_6712.pep

SEQ ID NO: 26306 - protein, 1690 aa, Oryza sativa
  Clone ID: TF_OsC359_8039.pep
ACAVRAVRAAEPPPPVVTSSPTSSSPSPIPSFPESPFSQEKSLKSSKASKATPGLEWYIPGLEIGLCSRDGCSEWLGLYNRMPRYKPEYLFGVEGFVQELRTMSFAIGFGTAPFYAQIPHDRHEEKCRVKVTLNSNSEDIPSVMFEAGGRNYIHTCQEVARIAIGELRDRYSDQLADTEYRYHPRQPQGSDRGSYLETEGIENDATTRHLVEMLWAMDETRAETVLAAQDREDRNRGKICKLEDKVDRLEKELAVLKGEAPPQKARVRLTARKRALFVPRYQLVPKVRVVEKEVTPALADPPVVNMVLTRSNGNGPNSNNNNNNEGNPTLAQVLAQQTQLMNMMMQQLQNQQNQGNNHAPPQNKLAEFLRVRPPIFSSTANPVEAGDWLHAIEKKLDLLQCTDQEKVSFASHQLHGPASEWWDHFRLNRITAEPITWLEFTAAFRKTHIPSGVVSLKKKEFRSLTQGSRSVTEYLHEFNRLARYAPEDKLVDKAIRQEDKYNRMEQKKRRIAHFMTQQGNNQRPRLTLGPQSMPQGGSSSVVRPQRQFFNNNAGNNIRNQAPRPVAALTQQQPAKKEQGSKPVVCFNCGEPGHYADKCPKPRRAKVVPAQSNSTAPASKARVNHVAAAETQGAPDVILAPSIRIEIQGVPFLANLILLESKDLDVILGMDWLARHKGVIDCANRKITLTSNDGRVVTVHALSPEFLRSRLNQITLEEIPIVREYPDVFPDDLPGMPPKRDIEFRIDLVPGTTPIHKRPYRMAANELAEVKRQVDDLLQKGYIRPSSSPWGAPVIFVEKKDHTQRMCVDYRALNDMTIKNKYPLPRIDDLFDQLKGATVFSKIDLRSGYHQLRIKEEDIPKTAFTTRYGLFECTVMSFGLTNAPTFFMNLMNKVFMEYLDKFVVVFIDDILIYSRTKEEHIEHLRLALEKLREHQLYAKFSKCEFWLSEVKFLGHVISAGGVAVDPSNVESVTNWKQPKTVSEIRSFLGLAGYYRRFIENFSKIAKPMTRLLQKDVKYKWSEECEQSFQELKNRLISAPILILPDPKKGFQVYCDASKLGLGCVLMQDGKVVAYASRQLRPHEKNYPTHDLELAAVVHALKIWRHYLFGTRTEVYTDHKSLKYIFTQPDLNMRQRRWLELIKDYDMGIHYHPGKANVVADALSRKGYCNATEGRQLPLELCKEFERLNLGIVSTGFVAALEAKPTLIDQVREAQINNPDIQEIKKNMRRGKAIGFLEDEQGTVWLGERICVPDNKDLKDAILKEAHDTLYSIHPGSTKMYQDLKERFWWASMKREIAEYVAVCDVCQRVKAEHQKPAGLLQPLKIPEWKWEEIGMDFITGLPRTSSGHDSIWVIVDRLTKVAHFIPVKTTYSGSRLAELYMARIVCLHGVPKKIVSDRGSQFTSKFWKKLQEEMGSKLNFSTAYHPQTDGQTERVNQILEDMLRACALDFGGSWDKNLPYAEFSYNNSYQASLQMAPYEALYGRKCRTPLLWDQTGERQVFGTDILREAEEKVKIIQERLRVAQSRHKSYADNRRRDLSFDAGDYVYLRVTPLRGVHRFHTKGKLAPRFVGPYKIISRRGEVAYQLELPQSLAGVHNVFHVSQLKKCLRVPTEEANLEHIEVQEDLTYVERPIHILEIDERRTRNRVIRFCKVQWSNHSEEESTWEREDELKSAHPHLIASASESRGRDSV

SEQ ID NO: 26307 - protein, 1544 aa, Oryza sativa
  unsure (1)..(1544): unsure at all Xaa locations
  Clone ID: TF_OsC1713_5497.pep
MSNKVNHVGKAPMFNGTNYSXWKIKISTHLKAMSFHIWSIVDVGFAITGTPLTEIDHRNLQLNAQAMNALFNSLSQEEFDRVSNLETAYEIWNKLAEIHEGTSEYKDAKLHFLKIQYETFSMLPHENVNDMYGRLNVIVNDLKGLGANYTDLEVAQKMLRALPEKYETLVTMLINSDMSRMTPASLLGKINTNDMYKLKKKEMEEASPSKKCIALQAEVEDKSKSKVNEVNEDLEEEMILLARRFNDLLGRRKERGRGSNSNRRRNRRPNKTLSNLRCFECRKKIEAFIGEWDSNEESSASSGSEEEGGDDASSKKKKMVVVAIKEAPSLFAPICLMAKGSSKVTSLSDSESDDDCDDVSYDELVSMFEELYAYSEKDIVKFKALKKDHASLEVLYEXLKISHERLTISHEKLKEAHDNLLSTTQHGAHIDVGISCDLLDDSATCHIAHVASSSISTSCDDLMYMPSPCSSSSSCVSICDASLVVENNELKEQVAKLNKSLERCFKGKNTLDKILSEQRCILNKEGLGFIPKKGKKPSHHATRFVKRNGKYCYKCREVGHLVMNYHTGGSHWVLDSGCTQHMTGDRAMFTTFEVGGNEQEKVTFGDNSKGKVIGLGKIAISNDLSIDNVSLVKSLNFNLLSVAQICDLGLSCAFFPQEVIVSSLLDKSCVFKGFRYGNLYLVDFNSSEANLKTCLVAKTSLGWLWHRRLAHVGMNQLSKLSKRDLVVGLKNVKFEKDKLCSACQAGKQVACSHPTKSIMSTSRPLELLHMDLFGPTTYKSIGGNSHCLVIVDDYSRYTWVFFLHDKSIVAELFKKFAKRVQNEFNCTIVKIISDNGSEFKNTNIEDYCDDLGIKHELSATYSPQQNGVMERKNRTLIEMAWTMLDEYGVSDFFWVEAINTACHATNRLYLHRLLKKTSYELIVGRKPNVAYFRVFGCKCYIYRKGVRLTKFESRCDEGFLLGYASKSKAYRVYNKNKGIVEETADVQFDETNGSQEGYENLDDVCDEGLMRAMKNMSIGDVKPIEVEDKPSTSTQDEPSTSATPSQAQVEVEEEKAQDPPMPPRIHTALSKDHPIDQVLGDISKGVQTRSRVASICEHYSFVSCLEPKHVDEALCDPDWMNAMHEELNNFARNKVWTLVERPRDHNVIGTKWVFRNKHDENGLVVRNKARLVAQGFTQVEDPKNPKHVYKLSKALYGLKQAPRAWYERLRDFLLSKDFKIGKVDTTLFTKIIGDDFFVCQIYVDDIIFGSTNEVFCKEFGDMMSREFEMSMIGELSFFLGLQIKQLKDGTFGLEDAKPIKTPMATNGYLDLDEGGKPVDLKLYRSMIGSLLYLTASRPDIMFSVCMCARFQAAPKECHLVAMKRILRYLKHSSTIGLWYPKGAKFKLVGYSDSDYAGCKVDRKSTSGSCQMLGRSLVSWSSKKQNSVALSTAEAEYVSVCSCCAQLLWMKQTLLDYGISFTKTPLLCDNDSAIKIANNPVQHSRTKHIDIRHHFLRDHVAKCDIVISHIRTEDQLADIFTKPLDETRFCKLRNELNVIDFSNVA

SEQ ID NO: 26308 - protein, 178 aa, Oryza sativa
  unsure (1)..(178): unsure at all Xaa locations
  Clone ID: TF_LIB4309-037-R1-K1-D4.pep
MAGKEEGRIFVGGLSFHTDERKLADAFRRFGKVVDAQIMLERHTQRHRGFFFVTFSDPEAVDSAIKEMHCQELDGRTISVNKAEPKMNTDDTRYESGGGRGEYRGGRGDGPPPGNCFECGRAGHWARDCPNPGGGRSARYSSSSSAXGGRGDRFSGSDRFGDRYMDDRYDGGYREPCD

SEQ ID NO: 26309 - protein, 323 aa, Oryza sativa; identical to SEQ ID NO: 19816
  Clone ID: TF_OsC7718_1.pep

SEQ ID NO: 26310 - protein, 1716 aa, Oryza sativa; identical to SEQ ID NO: 19802
  Clone ID: TF_OsC359_5804.pep

SEQ ID NO: 26311 - protein, 277 aa, Oryza sativa
  Clone ID: TF_OsC20523_1.pep
MANKRQREARKRFREANPGLFPANPTPPADGTKKKKNNKKSMFKKTSKAGGGGAGRSKHPLRVPGMRPGERCFICKAADHVAKVCPEKSLWEKNKICLLCRQRGHSLKNCPDKNDENLKKFCYNCGESGHSLSKCPKPIENGGTKFASCFVCKQQGHLSKNCPENKHGIYPKGGCCKICGEVTHLAKHCPNRGRQDLISSGDDAFNTEEHHLEDNAVLRGGDDLDDDFIEEEETRHTKAKKAKQSSSKSTTETGDGDKNTNTKAKVKQAPKVVKFFG

SEQ ID NO: 26312 - protein, 374 aa, Oryza sativa
  Clone ID: TF_OsC359_8329.pep
MVEVCGKKWPSEEFTSPRCSSSHLDEYSCIMEKSYLEKENLELKAQLVELTSKHVDLQEKYDELLCSHGNLVDSHAMLEVTHEVIIITVKSYVPHVQVDFTCANSCCSQANIFLRTTCDLDYVGKKDKYIDHGFVCNAQPSQDNRESMLKKLEKGSTVACTKFYQEDNKSNNKSKGQDQSKNKASITCFKCKKMGHHVRDCPWKKQKKLSKNEDLAHKFFKSTKEGHFASSCPCKIDDEATLPRKTSRINRRKCYGCIEKGHEIGFCPHKKDDHSNRSSKRQTGNKQVKKQDKSKTQLCYNCRAKGHIGKNCPIGKIPKPNLSFHHNLLRKAKNGTCATRVISSLHASTKAIWVPKSLVTNIHGPNVIWVPKYA

SEQ ID NO: 26313 - protein, 200 aa, Oryza sativa
  unsure (1)..(200): unsure at all Xaa locations
  Clone ID: TF_OsC6521_1.pep
MARVYVGNLDPRVTAREIEDEFRVFGVLRSVWVARKPPGFAFIDFDDRRDAEDAIRDLDGKNGWRVELSTKAGSGRGRDRSGGSDMKCYECGEPGHFARECRLRIGSGGLGSGRRRSRSRSRSPRYRGRSRSRSPRYRRSPSYGRRPTGSXPKRRSYSRSPPPARARSYSRSPPPPRERSYSRSPAQPANREESPYANNA

SEQ ID NO: 26314 - protein, 1647 aa, Oryza sativa; identical to SEQ ID NO: 19828
  Clone ID: TF_OsC91_2317.pep

SEQ ID NO: 26315 - protein, 1554 aa, Oryza sativa; identical to SEQ ID NO: 19827
  Clone ID: TF_OsC91_2600.pep

SEQ ID NO: 26316 - protein, 1496 aa, Oryza sativa; identical to SEQ ID NO: 19823
  Clone ID: TF_OsC91_2629.pep

SEQ ID NO: 26317 - protein, 95 aa, Oryza sativa
  Clone ID: TF_uC-osflM202067e09b1.pep
MMELRKHWGVGGRRCGACEASPAAVHCRGCGGVYLCTVCDARPGHARAAHERVWVCEVCEVAPVADTCKADVGVLCAACDADHPKGNPVARRHAR

SEQ ID NO: 26318 - protein, 407 aa, Oryza sativa
  unsure (1)..(407): unsure at all Xaa locations
  Clone ID: TF_OsC1274_1.pep
MDALCDFCRGAXSLVYSRSDAPALCVSCDRNLHSVNPLSRRQTCVLLXDRXVIDPAPDRCLEETTCLCPHTERTGRGGGCSVVFHQRERRRCXSWCSTSTQLSRIWSSSMDIPTESTETNCEEGINMMSINDNDVNNHCGAPEDGRLLDIASTALMSDLPTGDKFKPLIGSSSGDGMNLLPLNSDQPAEPVSTTPKAPCVTDKDMFNDGSVYGDFCVDDADLTFENYEELFGTSHVQTEQLFDDAGIDSYFEMKDVPADESNEQPKPVQPECSNVASVDSGMSNPAARADSSHCIPGRQAISNISLSFSGLTGESSAGYFQDCGVSSMILMGEPPWHPPGPESSSAGGSRDNALTRYKEKKKRRKFDKKIRYASRKARADVRKRVKGRFVKAGEAYDYDPLSQTRSY

SEQ ID NO: 26319 - protein, 92 aa, Oryza sativa
  Clone ID: TF_rsiceb_8130.y1.abd.pep
MEMELGLGRYWGVGRRRCGACAVAPAAVYCRTCDGDGGGGGYLCAGCDAEHGRAGHERVWVCEVCELAPAAVTCKADAAALCAACDSDIHDA

SEQ ID NO: 26320 - protein, 452 aa, Oryza sativa; identical to SEQ ID NO: 18113
  Clone ID: TF_OsC79690_1.pep

SEQ ID NO: 26321 - protein, 278 aa, Oryza sativa
  Clone ID: TF_OsC69289_1.pep
MSVAAEGKEKGVGGGGGGAGAGACELCGAAARVYCGADEATLCWGCDAQVHGANFLVARHARALLCRGCARPTPWRAAGPRLGPTASLCERCVRRGGGGRGGGGGGGAAGGGGRGGGGDEEMGGEGDEEEEDEDEEVVVVEEEDEDDEDEEGEGEGENQVVPWAEEAEATPPPVASSTSSSSREAAANGANAADRVKEDQPCSTSQPSLCRYASSAHHGGGGRSDEATSSRNGGGVGGRFLASRHRKRSPSDFRRSGLAQSVSGVQGSNRLQGGRWSK

SEQ ID NO: 26322 - protein, 108 aa, Oryza sativa
  Clone ID: TF_jC-osroLIB3475022g09b1.pep
MTWRSCDYCGEAAAALHCKADTARLCVACDRHVHGANALSRRHVRAPFCARCEARPAAARVAAVAGAGGCGGGGEARLLCAGCADDDSADAARVPAVGFSRCPRARRA

SEQ ID NO: 26323 - protein, 160 aa, Oryza sativa
  Clone ID: TF_OsC34358_2.pep
MMELRKYWGVGGRRCGACEASPAAVHCRGCGGVYLCTACDARPGHARAAHERVWVCEVCEVAPAAVTCKADAAVLCAACDADIHDANPLARRHARVPVAPIGSAAAAAVIPEALLIRINPAGAQPEALENKLLHRAPKLQTGNRKNVPQPYTDCRSSQSY

SEQ ID NO: 26324 - protein, 357 aa, Oryza sativa; identical to SEQ ID NO: 18114
  Clone ID: TF_OsC80961_1.pep

SEQ ID NO: 26325 - protein, 223 aa, Oryza sativa; identical to SEQ ID NO: 20710
  Clone ID: TF_OsC378772_1.pep

SEQ ID NO: 26326 - protein, 257 aa, Oryza sativa
  Clone ID: TF_OsC1269_1.pep
MRIQCDACEAAAATVVCCADEAALCARCDVEIHAANKLASKHQRLPLDAALPAALPRCDVCQEKAAFIFCVEDRALFCRDCDEPIHVPGTLSGNHQRYLTTGIRVGFSSVCSANADHLPPPAPKGNSKPPASGIAAAAAPKPAVSAAAQEVPSSPFLPPSGWAVEDLLQLSDYESSDKKGSPIGFKDLEWLDDIDLFHVQSPAKGGSTAAEVPELFASPQPASNMGLYKASGARQSKKPRVEIPDDDEDFFIVPDLG

SEQ ID NO: 26327 - protein, 126 aa, Oryza sativa
  unsure (1)..(126): unsure at all Xaa locations
  Clone ID: TF_8956058.pep
MKLLCSACEAAEASVLCCADXAALCARCDRDIHAANRLAGKHLRLPLLSPASSSSPPPPPSRRXPPSPPKCDICQESHAXFFCLEDRALLCRSCDVAVXXAXAFVSAHRRFLLXGVXVGQGTRALP

SEQ ID NO: 26328 - protein, 122 aa, Oryza sativa
  unsure (1)..(122): unsure at all Xaa locations
  Clone ID: TF_jC-osleLIB3474042h04b1.pep
SRVRVLRFCDACGGEAVRLFCRADPVILCAGSDARPHGPGSXHARVWLCEVCEHAPVGVTCWADAAASCVGLRRDIHSANPVARRHERLPGAPFFGALAYTPKQGSGAHGGDAVAVDDDGSN

SEQ ID NO: 26329 - protein, 360 aa, Oryza sativa; identical to SEQ ID NO: 18118
  Clone ID: TF_OsC1272_1.pep

SEQ ID NO: 26330 - protein, 479 aa, Oryza sativa; identical to SEQ ID NO: 20717
  Clone ID: TF_OsC770_1.pep

SEQ ID NO: 26331 - protein, 51 aa, Oryza sativa
  Clone ID: TF_uC-osflM202027f08b1.pep
MRIQCDTCEAAAVTVVCLADEAVLRARCDIKIHAADKLARKHQLLPLDATL

SEQ ID NO: 26332 - protein, 269 aa, Oryza sativa; identical to SEQ ID NO: 20718
  Clone ID: TF_OsC280_2.pep

SEQ ID NO: 26333 - protein, 271 aa, Oryza sativa
  Clone ID: TF_3618313.pep
MKIQCDACESAAAAVVCCADEAALCAACDVEVHAANKLAGKHQRLPLEALSARLPRCDVCQEKAAFIFCVEDRALFCRDCDEPIHVPGTLSGNHQRYLATGIRVGFASASPCDGGSDAHDSDHHAPPMGSSEHHHHHQQPAPTVAVDTPSPQFLPQGWAVDELLQFSDYETGDKLQKESSPPLGFQELEWFADIDLFHNQAPKGGAAAGRTTAEVPELFASQAANDVAYYRPPTRTAAAAFTAATGFRQSKKARVELPDDEEDYLIVPDLG

SEQ ID NO: 26334 - protein, 403 aa, Oryza sativa; identical to SEQ ID NO: 20708
  Clone ID: TF_OsC1268_1.pep

SEQ ID NO: 26335 - protein, 380 aa, Oryza sativa; identical to SEQ ID NO: 18117
  Clone ID: TF_OsC62991_1.pep

SEQ ID NO: 26336 - protein, 395 aa, Oryza sativa
  Clone ID: TF_OsC385_1.pep
MNYNFGGNVFDQEVGVGGEGGGGGEGSGCPWARPCDGCRAAPSVVYCRADAAYLCASCDARVHAANRVASRHERVRVCEACERAPAALACRADAAALCVACDVQVHSANPLPAITIPATSVLAEAVVATATVLGDKDEEVDSWLLLSKDSDNNNNNNNNNDNDNNDNNNSNSSNNGMYFGEVDEYFDLVGYNSYYDNRIENNQDRQYGMHEQQEQQQQQQEMQKEFAEKEGSECVVPSQITMLSEQQHSGYGVVGADQAASMTAGVSAYTDSISNSISFSSMEAGIVPDSTVIDMPNSRILTPAGAINLFSGPSLQMSLHFSSMDREARVLRYREKKKARKFEKTIRYETRKAYAEARPRIKGRFAKRSDVQIEVDQMFSTAALSDGSYGTVPWF

SEQ ID NO: 26337 - protein, 448 aa, Oryza sativa
  unsure (1)..(448): unsure at all Xaa locations
  Clone ID: TF_OsC84660_2.pep
MSSTAKAAAAGAVGAKSARACDGCLRRRARWYCAADDAFLCQGCDTSVHSANPLARRHERLRLRPSSPPPLVPPSGSGRRDEAVPAAWFKRKARTPRSHAAKSAAAFGQLLSRRLVVVPEAAAGSGGDSPEERKDEGEIVEEQEQLLYRVPIFDPALSEFCSPPPLEDAAAAVSCCNEDGAVENPTKPSMTTTTATTPPLQFFPDGQANFGPTDAELREFAADMEALLGRGLDDGNDEDSFCMETLGLIEPVDDDAGRVKVEADGDAGMTLAWCHELDTETSSGEMLDIDFDCGSPQAATTPDEKVGSSGPAAADDDAQLQQSNLALSLNYEAIIESWGTSPWTDGERPHVKLDDSWPRDYSGVWMAAAGVFGHGGEEQALTPRLGMDGGREARVSRYREKRRTRLFSKKIRYEVRKLNAEKRPRMKGRFVKRAAAXPPPPSPRRASR

SEQ ID NO: 26338 - protein, 192 aa, Oryza sativa
  unsure (1)..(192): unsure at all Xaa locations
  Clone ID: TF_OsC174263_1.pep
SGALGPALLGGGRRRRARHPRRHRQEQPRRHVRAGLQPPEQRGLSGAGAAAATGGGGGDLRPERGGHRDADRDAGGGDATAHRAERRPGRGGAPARRARRQPHPLRPPXQNRLRARGTPPAPAPPSDVLALHRXRRRRRGRRGVRRRHARARRRGPGVILLIHHLNPQPAAGGALFGYFLDHIKSSDQITFN

SEQ ID NO: 26339 - protein, 332 aa, Oryza sativa; identical to SEQ ID NO: 18116
  Clone ID: TF_OsC1713_5565.pep

SEQ ID NO: 26340 - protein, 303 aa, Oryza sativa
  Clone ID: TF_OsC281_1.pep
MMASDGSASPASCGGAACGVCGGAATVYCAADAAALCVPCDAAVHAANPLASRHDRVPLAVAMAAASSGVYDHLFAPDDDAASSWAAAAAAGAAVQGQGQGSPNDSSSSFTNDSAGGGGGGGAERSLFDLLSDVDIMSCGGGGLASSFDGAAAPPLWLHPGQLAALTPWSPADSVVVPTSAAGAVAAAAAAREERVRRYREKRKNRKFQKTIRYASRKAYAEARPRIKGRFVKRATTAAASSSSDDDSTAAAGVSGAGGAGAAATKEAKFWLSFSDDGRADGVGFYMDSTTAATAAYGVVPTF

SEQ ID NO: 26341 - protein, 531 aa, Oryza sativa
  Clone ID: TF_OsC106088_1.pep
MAVSVFNTRRRTSLVSAFIDRTRMFISTPLPQVRDKVSRTKPPKPHGGGGERRRKKQPQEAAARAGGGMGGSSASPCDLDREFAPQIAQLLATPPLQPAQEYYNGLIQSRKHDGIRVNFSSKHGKGVCANKEFAEGDLILKDQILVGAQHSLNKIDCAVCSYCFRFIGSIEFQIGRRLYWQSVGSSSDCTNRRHCHESDLGSSASSSGATKENSSTLPEEVLGSLITGDMSLPFTDHFSLPQVVPCRGCEEERYCSQSCADSDWETYHSLLCTGSKTEPSQRSALQKFIEHANGSNDIFLVAAKAITFTLLRYKKLKTQPEFQNNTDESNFSLLMEAWKPLSMGYKKRWWDSVALPEDVDSCDEDTFRQQIRDLALTIIIFCVSQSLQLLKDAIFDSDGLVVPSPVEDYFIHIDDLPDDEKCNISQEEAEKVTRPFLDALGEDYAAPCEGTAFFPLQSCMNHSCCPNAKAYKRDEDTDGNAVIIALEPIKKDDEITISYIDEDVSYEERQAELADYGFICTCPRCQEEKPN

SEQ ID NO: 26342 - protein, 381 aa, Oryza sativa
  Clone ID: TF_OsC63363_1.pep
MASWEEMASWEEQLRDELAARDLAVASVPGKGRGLFAARSFFPGEVVISQEPYASTPNKISVGSNCDNCFASRNLRKCSVCRVAWYCGSACQREEWKLHQLECRAIAALTEDRKKMLTPTIRLMVRLVLRRKLQDDKMANLVQLILPSFELDLKEITHTFSKFACNAHTICDPELRPLGTGLYPVLSIINHSCVPNAVLIFEGRTAYVRALQPISKNEEDSEEDALLEGYRCNDQKCDGFLLPNAVDNSEVGSMYKTIEELERKLYHPLSITLLHTRETLLKIYMELQDWQTALMYCRLTIPVYERIYPPFHPMIGLQFYTCGKLEWLLEYTEDALMSLTRAADILRITHGTKSEFMKELLGKLEEVRAEASFRLSAGDEQ

SEQ ID NO: 26343 - protein, 233 aa, Oryza sativa
  Clone ID: TF_OsC22960_1.pep
MECAAKGLVAEPCAGEARRRCGGCGAVAYCSRAHQTVHWGFHKEECARLAEQMSRIDMLKQFPFTFSVESPAPNHTFPSLRCFLLESFKLHQKGLWKSECICDPEVTSVKDLSKTTDWSMGSALCPCTEPEHNVSTPLTSWKDYYRWRSLPLQSPVAVLLHWQLTLYLIVAPNAGIAAYPSWIPTIEIIRKVGIPAIFTDFCEEAAHLASSCITSITGQPLRVPIQNCKFVSP

SEQ ID NO: 26344 - protein, 1010 aa, Oryza sativa
  Clone ID: TF_OsC64741_1.pep
MGAGGWSARSRWVGQGRRRSRVPGSKGRRRWWMAEAAGSSSSSSASAVVVAVVIAVVVVVWVVVRRKVRRAAARREEVLRLTRLAQEESEMAEVECARAYYSELFPSVVHATEMVDEAAWGAPPAVVPAQAEAEAEMEARAQPQPQPPVGAKGVCAVCFRPTTFRCKQCKAVKYCSFKCQIAHWRQGHKNECRPPSTDANHDDVAELSVAKERKIEQTSASEENIAETNTAATVKNLNDKTKDMPSEVLASVEVPDDDHSVSAVKLPQSSSQVASLGSRKTESNMKPTTPVENGSYTKDLDEALVCRFQPSPPKISGSGSLINKESLIDSKKHQDCSQTSNSKKYADNNNAQAALPVAVEPKTSRTALHVEVGHSKTKAAGSDNIGVSKMVPSVLTVDKVSPVPGGRSVTPNSSKRADNIAERNSKPSEKSISTANSLATSLKKIVRQQTAPKVVRHYPSEPTHFPYELFIKLYEKVELQPFGLHNLGNSCYANAVLQCLMFTRPLTSYLLGGLHSKNCSKKEWCFMCEFEKLVGEGRQGKIALSPTGILSHLPDIGSSFGPGKQEDAHEFLRYAIDAMQSVCMKEARKSGTHRLHEETTLMQLIFGGYLRSKIRCTRCDATSEQHERILDLTVEIDGDISSLEGALERFTSTEVLDGDNKYKCSRCKSHERAKKKLTISEAPNVLTIALKRYQSGKFGKINKAIRFPETLNLQRYMSPKADDTSPVYSLYAVVVHHDIMNAAFSGHYVCYVKDTHGKWYKTDDSQVKPVSLENVMSKCAYMLLYARCSPRAPSSVRPALMAQDPARVKKDKARVNSGRWHGGGPIHQGGQMYADHMTDDLPHTYDEFGHGPYSPAESPSPSESSSIFTSSDTGSHSTDSSESTRNSTSEDMERLIFGDQVSYFDGSMFGHGENGRMTYSRSKSSLGTSSSGQEVDQYRPDEHRLQGAREGWNQGDESSSLYTNQSKHQFSSKLTEQYRRRLDGTEHDPGEANSVLLRRSARERTAQTFY

SEQ ID NO: 26345 - protein, 919 aa, Oryza sativa
  Clone ID: TF_OsC49686_1.pep
MATPDVILPGPSLRPMPYMRSAPSARPEYHECATCHGPAKTRCSRCKSVRYCSGKCQIIHWRQGHKQTCQQWNGFGTSSSGGLPPTENTEQMPFLSNLNSPLRGSDVHLHDMDFDTMSEPSFVTTDSYNLDTSPFLSDRSNMNKPNQFLHTSENGAAIGSYEKNDYSIDGEVPSSEILSGNKGLNNSSGSGENCGNRDVIYPLNSVVHQPNNYAPEIRKRPKASITVYESDKGVYLTSDMISSGEGPYASAAESLQRSNSSGNVTGKGNMIHKKPPYPSGSTKTAVSTNSSLQGCNGISKAGASKVEALKKPSKFLKTSLVGLINDNKRSKVLFPYEDLVKFFQYEVRGISPRGLFNCGNSCYANAVLQCLMCTKPLMIYLLLRLHSKDCNTKTQAPTLLGVVVKSLTISDFFDIDCFILLGCSKNWCLMCELEQYASTLRESGGPVSPSRILSNLRNIGCRLGGGSQEDAHEFLRHLVMSMQGACLDGLGGEKQVEASLQETTLIQQMFGGRLKSKVKCLRCYHESERYENIMDLTLEIHGWVESLQDALTQFTAPEDLDGENMYKCGRCSAYVKARKQLSVHEVPNILTVVLKRFQTGKYGKINKCVTFPDMLDMVPFVTGAGDNPPLYFLYAVVVHVDTENASFSGHYISYVKDMQGTWLRIDDSEVQAVSLNQVMSEGAYMLFYMRSFPRPPKIYIEKGLSSVPTCSKRHSSKSSKGSKQDLNHTESLFASSDQTYGIYDFRPDNGYIQDQHAALRTRNFYHTDDAFADSISTDFSDATSSEWSLFTSSDESSFTTESTRDSFSVVDYGDNAGLDPISSIFGPYYAQDHPPGSFASCTRLSPSNPQTRYFQENTGFVSDSSMPAHLPGNVHRGRYPDRACSSSAEPPASANPRSVYGRYGLSREGFVQTSGFCQM

SEQ ID NO: 26346 - protein, 385 aa, Oryza sativa
  unsure (1)..(385): unsure at all Xaa locations
  Clone ID: TF_OsC8143_1.pep
MRTRSGSLYRSGGGGGETAMVGQKRKRSSLPPQYATAGDCCGGGGRRKRLAGGGPDYLDELPDDLVLAVLSKLGASASSPSDLLSVHLTCKRLNGLGRHDMVFAKASPASLAVKAASWSEPVQRFLKLCADAGNLEACYILGMIRFYCLGNRSGGAALLARAAVGGHAAALYSLAVIQFNGSGGAXGPRAGAALCARAAALGHVDALRELGHCLQDGYGVRRDPAEGRRFLVAANARELTLALAAAASHRPFAALPLAGGAAAGAIGCPLLSDFGWSLPEAEPHPANLFMADWWASRGVQATAKKPGLEAPAAATGDSDGGGELRLCSHVRCGRRETRRHEFRRCSVCGAANYCSRACQALDWKRAHKAQCVPMDRWLLAAGEAQ

SEQ ID NO: 26347 - protein, 403 aa, Oryza sativa
  unsure (1)..(403): unsure at all Xaa locations
  Clone ID: TF_OsC11539_1.pep
KPRTRRGVDEDEARRVLLAGVVPGRAAEEAEDRRRRRGGIGCGGRGGGRRRRGAXNDMFEELPDDLVVSILADVAASARSPGDLAGAMLTCKRFRELGQSKVVLARASPRCLAVRAKAWSDAAHRFLQRCADAGNLDACYLLGMIRFYCLGSRGSGAALMAAAAVGGHREALYSLAVIQFNGSGGSKDDRDLRAGAALCARAASLGHVDALRELGHCLQDSYGVRRSVLDGRRLLIQANARELAAAVAASASLLRAATGKPAAAASRRHSCLLNDFGXTPRRPRPAGEAHAANRFLVDWFASRPLTGSTTSAAPAPTPGSAAEDEAAGLRLCSHALCGRPETRRHEFRRCSVCGVVNYCSRACQALHWKTAHKAECTPMDRWLDNAAAGAANPNAAAMAAPAP

SEQ ID NO: 26348 - protein, 419 aa, Oryza sativa; identical to SEQ ID NO: 20722
  Clone ID: TF_OsC114099_1.pep

SEQ ID NO: 26349 - protein, 181 aa, Oryza sativa
  unsure (1)..(181): unsure at all Xaa locations
  Clone ID: TF_rsiceb_7074.y1.abd.pep
ARGADKDARAGCRCCAXRCAAWLGHTPALRELGHCLQDGYGARRDAPAGRRLLLHAAAREHLSWKKHNHGHHDGSAAEDAVSRFMVAWWDSHRAKAAARGCLPGEHGDGEHDGGEDLRLCSHARCGRRETRRHEFRRCSVCGAASYCSRACQALDWKRAHRAQCAAARWLAAAAAADGVAH

SEQ ID NO: 26350 - protein, 161 aa, Oryza sativa
  Clone ID: TF_uC-osflM202007a02b1.pep
GFKDIRCNQPCGKNRQCGMHACNRSCHPSPCDPPPANGDASSSTGGRASCGQVCGAPRRECKHTCTAPCHPSSPCPDLRCEFPMTIACSCGRITATVPCSAGGTANGDNMFEVSIIQKLPMPLQPVESDGRRVPLGQRKLFCDEDCAQMERKRVLAEAFDI

SEQ ID NO: 26351 - protein, 858 aa, Oryza sativa
  unsure (1)..(858): unsure at all Xaa locations
  Clone ID: TF_OsC24256_3.pep
QQQRRPRRRNHGGGGQRRGPPQERPSAAPPPPPPQQQQRQQHAAPAPTRAAAPAPARVAATKAAAGGDGAVPQLVQEIQDKLARGAVECMICYDMVRRSAPVWSCGSCFSIFHLPCIRKWARSPASAADASDPDSSWRCPGCQSVHAVPARELAYTCFCGRRREPPNDLFLTPHSCGEPCSKPLEKADPAVKADDAAATRCPHVCVLQCHPGPCPPCKAFAPDRLCPCGKQTIVRRCADRTTPVTCGQRCDRLLPCRRHRCEKVCHTGPCGDCNVLISARCFCGKKTETLLCGEMELKGNLSEKDGVFSCSEACSHMLSCGNHACQDICHPGPCGECELMPGKVTACHCGKTRLLEKRASCLDPIPTCDKVCDKKLPCGVHRCKVTCHEGDCPPCVVRVEQRCRCGSSGQMVECYKVLEEEFRCNKPXCNQPCGKNRQCGMHACNRSCHPSPCDPPPANGDASSSTGGRASXDSAGGTANGDNMFEVSIIQKLPMPLQPVESDGRRVPLGQRKLSCDEDCAKMERKRVLAEAFDITPPNLDALHFGENSNASDLLSDLFRREPKWVMAIEERCKFLVLGKTRGNSSGNLKVHVFCHMTKDKRDAIRVIADRWKLSVQAAGWEPKRFITIHPTPKSKAPARILGSKPGVFVAASHPFFDPLVDMDPRLVVAMLDLPRDADVSALVLRFGGECELVWLNDKNAVAVFNDPARAATALRRLDYGSAYQGAAVFLPSSSAQPGNVWVAGQKDGVAATKSSANPWKKATASEPDPSSGDWTGVLGQAPGSVWRRGGDTVAQVMGTSNRWNALESDAATSSRPVEESKPAPRTDAVSSAGPSTAPPVSKMQPEVEVDDWEEACE

SEQ ID NO: 26352 - protein, 5100 aa, Oryza sativa
  Clone ID: TF_OsC4072_1.pep
MAAEISALLDLLLHPPAAAAGDRDPPARRLRGPAARAGLEALAGALAAGPPADPARARAVLAAARAVMRKNNQLPVSTSDPSIPFGFENNMKCEVSTVVELSVPPSFIEGRYTFVLVEQVESTVVEIVERSLEFCLLYLEKSSYACEDYGLLNEVAYFMECVLLRGTPSKVYSLEPSVVNDVIEQWSSVQVDSERISPQEKYFCYLKGLWNVGALFADCFLMAQPGFNCSNSGDDLQRFRLTLSPECLQQDYVIAENTESSHTASPNGMVSIAQHFAVVHLHCIPVLLTLVQKLCQSPALDVIEDTNFNMRLSFGQRILKLVHGLAMEFPCDASDAMMLCSVARCTDSLPVLFKLKFKFANHDRVFSGDGVGTVLLQILDEFLQLIHIIFCNSDICCTVQVCILASLLEIFSPEKWKYDRSAACLMPPLVYSPHIVQYVLKLLNDTKRWTSRVDRDRPGKDVLGYSCNSETDGLSCHARSKKVPLLKKYTSEEYLQLIFPSEEQWLDDLVHLIFFLHEEGVKSMPLLEKPQMSCTKQVTLSELESVASHEEEALFGNLFAEARSTGVADSVEQPISLGSGPSSSQHGPIQLAADLICFMKMSIFSPEWCTAIYVDACRKFHSNHLEQFLSILQCPAFCSDESIATTSLSEVNSLHINTACFELLQMFLISHECPASLREDLVDKVFNAENGMYTYNNYTLALVARAIISGASSIYNLGRKVFVQYVGYLLEKANDKSSSSLDLNNFCRILPCAFHLEILLVAFHSTTGPEKADLINIVLSSLEKMRQPPLGVNASGLTRWALLLSRLLLVLRHMLLYPVTHPSWLLMRLRSRMRDILLKEGQSRSMNDYLPSFTAEVVEGIFADTVKEYASTSSLFPQLIDVTPAHAEIYFDKSALEALGLNFANLGSNISEILGVWKGRKAEVAEDLIAERYLFLICWSTLSGIGYSGGYEGLLNPDFADVNFFISFALSVSDDASSLLDANLPSVIFGFLKLLQSEILCGPSVLESWDFLRKGAWLSLILSLINTGFWGHQTSGKPDVDLQGKQVVQDAEIFGKSLLTFISENSGHCLHVLSSLLETYLHAFKEAFISFVVEKGRVCEDHCYPSWLLKHSAFDKSKHPLLFEKVGSNIGMLEPICDLSSRIDRVATKLGDGRKEYFLLKCLLHGFPVNSASNNSAILSCVLVINEIIYMLNGCIKIMQPNDRDLVDVGVISKLLSMIMTIKSDGMFTSIHKLCDSIFMSLIDQKDDLAGYSDLFVLKQLEGYLADINSKEIMDNEVKEIIVFTIVDLVEDLRSKTNVFKFFLGEAEGAPERANSLFALEQADMSVFIDVLDKCQSEQVNLKILNLFTDILGDGLCPDLKQKLQHKFIGMDVSCFSSWLEFRTLGHSMKIESTNSTTSGPTALRELTMDFLMRLTCPSSETLAKELQHHLFDSMLLLLDKAFMSCDLQIVKAHFHFIAQLSTDESHFKELFEKTLKLMENMVGNEGLLHTLKFLFTCVESVFGDAGSNRSALKRLSSKSSGNSFGSGSLIPKQLKNSDSLVLRTNQESNSTVDCDASSGEEDEDDGTSDGELVSIDRDEEEDGNSERALATKVCTFTSSGSNFMEQHWYFCYTCDLTVSKGCCSVCAKVCHQGHRVVYSRSSRFFCDCGAGGVRGSSCQCLKPRKFTGTSSVSPPVTSSFQPILPYHEDVEPVADSGSDFEDDISTEAENCIKLSVPKGFSDELPVFLKNLDVEVRMLELCKKLLPMILSQRELNLLKDRKVFLGGEMPMSQASDIFQLKKAFKSGSLDLKIKADYPNSRELKSHLANGSLTKSLLSISIRGKLAVGEGDKVAIFDVGQIIGQPTAAPITADKTNVKPLSRNIVRFEIVHLIFNPLVEHYLSVAGYEDCQVLTLNSRGEVTDRLAIELALQGAYIRCVEWVPGSQVQLMVVTNKFVKIYDLSQDNISPLHYFTVADDIIVDATLVPSSMGKLVLLVLSEGGLLYRLNVALAGDVGAKTLTDTVLVKDAVSMHKGLSLYFSSTYRLLFVSHQDGTTYMGRLDGDSSSITELSYICENDQDGKSKPAGLYRWRELIAGSGALACLSKFKSNSPLAVSLGPHELFAHNMRHASGSNAPVVGIAAYKPLSKDKAHCLLLYDDGSLNIYSHTPNGSDSSTTLTAEQTKKLGSSILSSRAYAGTKPEFPLDFFEKTTCITCDVKFNSDTTKSSDSESIKQRLSSDDGYLESLTSAGFKVTISNPNPDIVMVGCRIHVGNTSASNIPSEITIFHRVIKLDEGMRSWYDIPFTTAESLLADEEFTIVVGRTFDGSSIPRIDSIEVYGRAKDEFGWKEKMDAALDMEAHVLGGSSASGKSGKKAQTMQAAPIQEQVLADALRILSRIYLLCQPGFCTDTIDADMELNNLKCRSLLETIFQSDREPLLHSAACRVLQAVFPKKEIYYHVKDTMRLLGVIKSLPSITSRIGVGGAASSWVTKEFIAQIHTVSKVAVHRKSNLASFLETHAVAILNVTRKLGYAECLALHSNEKSGVSVAPAVALLKKLLFAPYEAVQTSSSLAISSRFLQVPFPKQTMIANDDAPDNHAKASAASNSTTGNAQVMIEEDPATSSVQYCCDGCSTVPILRRRWHCNICPDFDLCETCYEILDADRLPAPHSRDHPMSAIPIELDTFGGEGNEIHFSVDELTDSSVLQAPADRTIQTSPSSIHVLDASESVDFHGSMTEQRTVSISASKRAINSLLLSRLIEELSGWMETTAGTRAIPIMQLFYRLSSAVGGPFMDSTKPENLDLEKFVKWLIDEINISKPFPAKTRCSFGEVSILVFMFFTLMFRNWHQPGTDGSHSKSGGSSDLTEKGPVHVQVSTTTLQSSNDDHDKNEFASQLIRACSALRQQSFLNYLMDILQQLVHVFKSSSINGEGGSSSSGCGSLLTVRRELPAGNFSPFFSDSYAKSHPTDLFMDYYKLLLENTFRLVYSMVRPEKEKSADKDKSCKVPNTKDLKLDGYQDVLCSYISNAHTTFVRRYARRLFLHLCGSKTHYYSVRDSWQYSHEVKKLHKIINKSGGFRNPVPYERSVKLIKCLSTLCDVAASRPRNWQKFCLKHTDLLPFLMDNFYYFSEECIVQTLKLLNLAFYSGKDANHNAQKTESGDIGSSTRTGSQSSDSKKKRKGDDSSEGSSEKSCMDMEQAVVVFTGKDGDVLKRFVDTFLLEWNSTSVRHEAKSVLFGLWYHAKSSFKENMLTTLLQKVKYLPMYGQNIIEYTDLMTCLLGKANDSTAKQSDTELLNKCLTSDVVSCIFDTLHSQNELLANHPNSRIYNTLSCLVEFDGYYLESEPCVTCSCPDVPYSRMKLESLKSETKFTDNRIIVKCTGSFTIQSVTMNVYDARKSKSVKVLNLYYNNRPVTDLSELKNNWSLWKRAKSCHLTFNQTELKVEFPIPITACNFMIELDSFYENLQASSLESLQCPRCSRSVTDKHGICSNCHENAYQCRQCRNINYENLDSFLCNECGYSKYGRFEFHFMAKPSFSFDNMENDDDMRKGLTAIESESENAHRRYQQLMGFKKPLIKLVSSIGEQEIDSQQKDAVQQMMVSLPGPTGKVNRKIALLGVLYGEKCKAAFDSVSKSVQTLQGLRRVLMTYLHQKNSNDTDALPACSIPRSPSSCYGCSTTFVTQCLELLQVLSKHATSRKQLVSAGILSELFENNIHQGPRTARTLARAVLSSFSEGDADAVQELNNLIQKKVMYCLEHHRSMDISQSTREELLLLSETCALVDEFWEARLRVAFQLLFSSIKVGAKHPAISEHIILPCLRIISQACTPPKSDSGEKEPGMGKSSLMQAKNDDTVGHSVTNLSTSKTQSELSGKIPDGSRRRQDISLLSYSEWESGASYLDFVRRQYKVSQAVKGLQKTRHDSQKSDYLVLKYGLRWKRRACRKSSKGDFSKFALGSWVSDLILSSCSQSIRSEICTLISLLCPSNSSRQFQLLNLLMSLLPRTLSAGESAAEYFELLGTMIDTEASRLFLTVRGCLTTLCSLITKEVSNVESQERSLSIDISQGFILHKLVELLNKFLEIPNIRARFMSDNLLSDVLEAFLVIRGLVVQKTKLINDCNRLLKDLLDSLLVESTANKRQFIRACISGLQKHVKEKKRRTSLFILEQLCNLICPVKPEPVYLLILNKAHTQEEFIRGSMTRNPYSSAEIGPLMRDVKNKICHQLDLIGLLEDDYGMELLVAGNIISLDLSISQVYEQVWRKHHGQTQHSLSNASQLSAAASSVRDCPPMTVTYRLQGLDGEATEPMIKELEDEREESQDPEVEFAIAGAVRECGGLEIILSMIQSLREDELRSNQEELGSVLNLLKYCCKIRENRCALLRLGALGLLLETARRAFSVDAMEPAEGILLIVESLTMEANESDISIAQSVFTTTTEETGAGEEAKKIVLMFLERLCPPDGAKKSNKQQRNEEMVARILPNLTYGEPAAMEALVLHFEPYLMNWSEFDQLQKQHEENPKDETLSKNASMQRSAVENFVRVSESLKTSSCGERLKEIILEKGITKAAVGHLRESFASAGQASFRTSAEWTVGLKLPSIPLILSMLKGLAKGDLPTQKCVDEEDILPLLHALEGVPGENEIGARAENLLDTLANKENNGDGFLAEKIQELRHATRDEMRRRALKKREMLLQGLGMRQEFASDGGRRIVVSQPIIEGLDDVEEEEDGLACMVCREGYTLRPTDMLGVYAFSKRVNLGATSSGSGRGDCVYTTVSHFNIIHYQCHQEAKRADAALKNPKKEWDGATLRNNETLCNCIFPLRGPSVPPGQYTRCLDQYWDQLNSLGRADGSRLRLLTYDIVLMLARFATGASFSTDCKGGGRESNSRFLPFMIQMASHLVDGSANQQRHVMAKAVTSYLSSSPSTPESPVRLSALSGARGGSGSSEETVQFMMVNSLLSESYESWLQHRPAFLQRGIYHAYMQHKHGRSTLKLSADTSSSAVRSDEGSSADSNDSKRLFAIVQPMLVYTGLIEQLQQFFKKGKSSGTQKVGEKDGSSGGNLEAWEIMMKEKLGNMKEMLGFSKDVLSWLEDMTSSEDLQEAFDVMGALPDVFSGGHTTCEDFVRAIIHGAKS

SEQ ID NO: 26353 - protein, 848 aa, Oryza sativa; identical to SEQ ID NO: 20734
  Clone ID: TF_OsC96744_1.pep

SEQ ID NO: 26354 - protein, 576 aa, Oryza sativa; identical to SEQ ID NO: 20737
  Clone ID: TF_OsC329578_1.pep

SEQ ID NO: 26355 - protein, 881 aa, Oryza sativa; identical to SEQ ID NO: 20741
  Clone ID: TF_OsC15191_1.pep

SEQ ID NO: 26356 - protein, 265 aa, Oryza sativa
  Clone ID: TF_OsC1100_1.pep
MARGLKKHLKRLNAPKHWMLDKLGGAFAPKPSSGPHKSRECLPLILIIRNRLKYALTYREVISILMQRHVLVDGKVRTDKTYPAGFMDVISIPKTGENYRLLYDTKGRFRLQSVKDEDAKFKLCKVRSVQFGQKGIPYLNTYDGRTIRYPDPIIKANDTIKIDLETNKIVDFIKFDVGNVVMVTGGRNTGRVGVIKNREKHKGSFETIHVEDALGHQFATRLGNVFTIGKGNKPWVSLPKGKGIKLSIIEEQRKRDAAAQAAANA

SEQ ID NO: 26357 - DNA, 394 bp, Glycine max
  Clone ID: TF_11274280
ggcggattcttctcgggaggagaacgttttcatggcgaaattggcggagcacgccgaccgttacgaggagatggttgagttcatggagaaggttgcaaagactgtggaggttgaggagttgacggtggaggacaggaatctcctctacgcggcttacaaaaacgcgatcgctgcgaggagggctttgccgacgaccacttcctctattgatcgtaaggaggagaccccgtgcgctgaggaccacttggccatggttgaggaaccctccggcacattggctgcgtacatccctgcgatctgtcgggtgagataataactccgatcatacagccttataccttccgcttcatctgcccccagctccaccttttaggttaagattgatggtgattac

SEQ ID NO: 26358 - DNA, 273 bp, Glycine max
  Clone ID: TF_LIB3170-033-Q1-K1-B1
tggcccattcattcggtgtcggtccactccccttaatttacgttattctactcgtacgctgattaaaacaggacatgagaatggcatgagcataggggctaaacagataacagttcgtgtaccttgcgaagctgccagagcaggcagtgcggaacgaagagatggaggatttcatgcataatgatgcggtggagtggactccagcgactgatacttactgtggatgatcataacctcctatcggtggcctacaagaacgagaacggttctctg

SEQ ID NO: 26359 - DNA, 422 bp, Glycine max
  Clone ID: TF_LIB3106-074-Q1-K1-A6
gagaaagagagagagagagtgagaaactgttttaaattcgcaaaccctaagttcggaaaggggggctatggctgtctccaaggatcgcgagaacttcgactacatcgccaagctcgtcgaacaggccgagcgatactaagtgatagtggaatcaatgccgaacgcagcgctactagacgccgcaccaactgtaaagcagcgaaagaccctaacaagccaaagaggcctcctagtgctttcttcgatttcatggatgacttcaagaatgtattcaacatataacatcctgaaaacaaatcatcgtctgctgtgggcaaagctactggagcaaaatgcaagaccatgtctgatgctgaaaaagcaccttatgtggcaaagtctgataaaaggacagtggagcacgagaagatcatgccagccta

SEQ ID NO: 26360 - DNA, 287 bp, Glycine max
  Clone ID: TF_LIB3167-080-P1-K1-C4
gaattccggggtcgcaccacacccgtccgggtcaatgggccaactttcttctcctttaagggttccctttcggtgacccctttccagaccggaattttccattttttaggatataaccggcgagatccgggaatctgaaaaaggccggttcctcctcgggaggggaaggttcccttggcaaaatgggcggggcaggccgagcgttccaaggagagggtggagttcatgaaaaaggttccaaatcctgggtaggctttgtattggccggggtttgacccttttccttt

SEQ ID NO: 26361 - DNA, 371 bp, Glycine max
  Clone ID: TF_LIB3242-758-P1-K1-F4
taataaaaaatcaacggggtataccagtgatacagaacacttagcaaaatattacgcgtccttaaaatagaacacaaagaagcctgggctctgggcatacaacatcatattacagattgccaaccattgtatgaactacggcgattcttaatttggcacaaggaaatggcgtttagagtcaacctacatgagaggaagtataccacccatcaaacctatcagggatatcaaggctcatttcgctggtcctggacatcatatggtcaaagggtgaggttggcggctaaaaggtgcataatgtgcgtgctttctttgacggttttttgtttcaaggtgtgcagttgagaattcgtttctaaaaagccttgtta

SEQ ID NO: 26362 - DNA, 367 bp, Glycine max
  Clone ID: TF_10847191
gtggcctcgcaagaagaacatgatcctatcgaagctgccctggctatcggggccctacgaacagatggtgtagttgatgcggatagtgtacccttgagaccacgactaggagctcaccatcgaggagaggatcctcctctccgttccgtacaataacgttatcagagcgcgccgcgcctcgtggcgcatcatcttctcgatctagcacaaggaggagagccgcggtcactaggaccacctcttcctcatcctctactaccgattcaagatctattcctatctctgcaacatatgccaccgtatgctcaaactccttcactgctttctgataccatccacttcctccggctacttcaaagtcttatac

SEQ ID NO: 26363 - DNA, 241 bp, Glycine max
  unsure (1)..(241): unsure at all n locations
  Clone ID: TF_700977595H1
cttcgccgagttnaaagancggcggtnncccggaaagnaggccgccncgagacgcttctnccggttaccaaagccnttcaaggacattgataatancgagttgnctctcaactcaacnctatcnggctgggtttgctctgaattctccgtgtnttactatganattcttaactctcntgatcgggcttgcagacttgnaaaanaggctttgntgaaggnattgtgattggatacntgggag

SEQ ID NO: 26364 - DNA, 1479 bp, Glycine max
  Clone ID: TF_GmC1228_5
cttgcatgcctgcagaggctgagttaccacccacacatcccatccgtttgggcctggctttgaacttctctgtcttttattatgaaattttgaactctcctgaaaggtatgacttttattttattttcctgacagtattactgtttaaatgccaacctctttgtgtactatgtgcctaagttgggccctgtttaacaaatttaacaccatactcttcatatctcagggcctgtcaccttgctaagcaggcatttgatgaagccatctctgagttggatactctgagcgaggagtcttacaaagacagcaccctaattatgcagcttctgagggacaatctcaccctgtggacttctgacatccctgaagaaggaggtattcattaatggaaatcaatgttttgtgtcactctgttagctggacttgtccacaatgtaaattaaatacatgaaaacttttagggttaattacaagaattacactaaaaaacatttgtagctaagcagaacttaaaaaattaagagcattcataggcttagcctggattgatccaatgaatttaacccagtaaataccaaataatttaaaatgaaaggtttccaaccaaaaactcaaaccatcaaaggttggttttgggtggtgaagattcatgcttgcccttattgggtcagaagcccacaaaacttgaaattttggctgcctggtgtcagaaaaaactaaaaggggtttccaaaataaaaattgcaaaagcatgcataccatgcagcacacattccagtattggacattgttacagactacagtggcctgaagccataccactgctttagtatttttagggtcaggtgagtttgctgagagtattatgtacttggttgtggtgacttataaggtgatgtcctagtctttcgctttgtttttcaattcattttcactctaatttattgcttctattggtcatcatattttgattgtggtttactgtttggtatacttattttgctgttgtttccgactaggctattgcttctcattttattttctagctatttttctttctttgttctgtggtcctgccaacccaacatcagtatctatgatttgtctggttaattaaatacgtcctcttttaacagctgaggaacaaaaggtggattctgccagagctgctggaggtgacaatgcataggtaggttatgtacccatttagctgatggtatttgggttttacttttcaccttaacaaagttacattttgcaatgaagtgaagcaggtattggctaggaatttgtggtgtcatacgagaaggctagtctttctcttgataatttaccattaggatgtagtaatagaacatggagttggtctctagaaaatcaccatagggctttgtgagccttttattctatgcgtgtgctttctgttactggatggagactggagttgagatttgtatgttgtttgcctgtgattcagtg

SEQ ID NO: 26365 - DNA, 407 bp, Glycine max
  Clone ID: TF_LIB3040-008-Q1-E1-D4
cggtcacgaattaccgggctgacccacgcgtcaggcgagaacacgacagccaggaagagtgtgcttggtgctcccagatcgtcctggaggatcctgtcatccattcaacaccacgcatatactaacgggaactacttgagtgccaaccagcatattgagtacatacggacagttgaattggatctagccatcatctgctgtgatgttatgatagtgattgatgagcaccttatgccttctgctgcaactggtgaatccaccgtcttttactatcacatcatacgacattattatcgttatcttgctaaatttcagtcaagccctgacaccaacgaagctgctgatcagtctactatagcatctgagtctgctaccgctgcattcacaagctgatttacctcccacac

SEQ ID NO: 26366 - DNA, 388 bp, Glycine max
  Clone ID: TF_LIB3108-043-Q1-K1-D1
ctttcatataaaaaaaaaaaaaaaaaaaaatttaaaaaaaaaaaaaaaaaaaaaaaaaaaaaggaaaaaggaaaaaaaaaaaaaaaaaaaaaaaaaccccacgcttcccccaacccttccccttgagggaaagaacctttttttccttcccttaaaaaaactttttcgaacccccccggcctttgtggcccttattttctttattcgaccaaaagggggaaacccctggaaccgggtttaatatttccatattccggaattaccgttccaaaattctttccaacttttcaaacttttgaaacgttttcttaaagctcctaaattttcgcctaattcaatcggttttttcgggtatttccaaggttttttcctttaaattaaaggggtt

SEQ ID NO: 26367 - DNA, 585 bp, Glycine max
  Clone ID: TF_uC-gmroLIB3259P150a03b1
ctcactctctctctctctttgtcacccagatcttgtaccaatggcaagcgctcccactccacacaaagagatcatgtacatggcaaaactggcggaacaagccaagcgctacaaggatatggcggaattcatggagacggtctccagctccgtcgagagctaggagctgacacgtggaggagcgcacccttctctccgtcccctacaacaacgagatcatcgcgcgccagtcctcctggcgcatcatgtgcttaatcgagcagatggaggagagccgaagaccaatgaccacgtagcgtcatccgagactagccgtccaagatcgaagccaagctctgaaacatttgcgacggaatgctcaaactcctgaacacgcgccttgtccgctgcgacgactgcggcgactacaaggacttctacctcatgatgaaagcagactaccacatgcacctcgccgagttcaagaccggctctaatccgagggaggccgaccagagcacgctgtcctgctacacagcctctcacgacattgctcataccgagttgcctacgactgaccctatgaggctgcgtctagctctgaac

SEQ ID NO: 26368 - DNA, 348 bp, Glycine max
  Clone ID: TF_uC-gmflminsoy062f07b1
ccgaataaacaccccacccaagaggacaccgacccccagggagaacctttgaaggggaggccgcgcacacaccccgccgcgggcagcgaaaacgcacaaagaaaccacgcccgccgaaaaagagagagagacccaagtacaccaggccaaacgagccgagcaggcccacagaaccgaagaaaaggcgagcggacgaagaaagaagcaaaaacgcgaccaagaacaaacagcggaagaaaggaacccaccctgcaccgggaaacaaaaatgcgaacggcgcacgaagggccccgcggcgcaacaagaccgcaaatgaccagaaagaaagagccaagggaaaagaacaca

SEQ ID NO: 26369 - DNA, 597 bp, Glycine max
  Clone ID: TF_LIB4200-001-Q1-K1-H5
ggtccggattcccgggtcgacccacgcgtccggtgagatttgcgaatatgatatatggacgattcttctggggtaggagaatattgacacggcaaaattggcggcgcaagacagcgcgttacgaggagatggttgtgttcatggcgaagtagaaatactgtggtggctgaggtgttgacgaaggaggagaggaatctcctctgtgtgtcttacacaaacgggatagataccatgcagggctttgtggatgatcatgtcctccattgtactgcaagatgaaagcattggcaatgttgaccacgtggtcattataaaggaggacaggtgcgtaaatgagggtgatacttattatgaactgtgatgggatcttaaacctccttgaatccaacctcattcctttcattgcatttcccgatagcaaaatacatttccttgaaatgaagggtgactctgaggagactcttgctcagttcaaaaccggtgcagagacgaaagacgctgatgagagtacttttattgctgacagataaagtcatgatattgcttttgttgatctggcacctactcacccgattaggctgggacctgctttgacta

SEQ ID NO: 26370 - DNA, 322 bp, Glycine max
  Clone ID: TF_10842944
tcacttgcctcacgaagagaacgtttacatcgataaactcgccgtgcaagccgagtgctacgaatagatggtggagtgactggagagggtctctttcggcgccgacaacaacgaacttacctaggaggagatgaacctcttcttaccagcctgctggaacgtgatccgagcgcgccgcgcctggtggctcatcatctcttcgatcgagcaaaaggaggaaagcctgagccaccacgatcacgtctccggcatgctgcactaccgggtcatgatcgtgtccgagctctgcaacatatgcgacgtggtcctcaagctcctcgat

SEQ ID NO: 26371 - DNA, 532 bp, Glycine max
  Clone ID: TF_uC-gmroLIB3259P238b03a1
ggcgggggcaaaataaacccaacctttttgaaggagggaataaaaagccgcttttagggggaaagggaaatggttttttgtttaacggcccccttaaaacaaaaaggggaataaaaataaaaagttttaggggaaaaaaaggggggccaaccttcgggcttgggaaaaaattttaaaaaaaaccaaaatttttgaatgggcccccccagtcctttttggggggcccaaatcctttggaaaaaaagctgaaaaaggccctttgggggagccccttaaatttttgaccccggaaccacataaaggctcaggcccaaaaggttgggctttttcagcttttttggggccccccccccccccctttggaaaatcggaagcccaaaaagtagggttgtttttaaacagctgcttaaaaaaaggggggcccttgtatgacccttccctcggggggcccaacccccaaatggccccataaaaagcttgcttggccaaagggggggcccttttcggagaatctttttttttttaataaaaa

SEQ ID NO: 26372 - DNA, 144 bp, Glycine max
  Clone ID: TF_LIB3051-099-Q1-K1-H7
tttccaaaaggagggcgcccataacacactctccacctacaaagccgctcaacacattcctaataccgaattgcctccaactcaccctaccacgctcaatctagctctgaactattaacacaattactatcaaaatcttaaccc

SEQ ID NO: 26373 - DNA, 205 bp, Glycine max
  Clone ID: TF_11413695
gaagggagggtgccactagtaccattttgattgcaagacacgccccgcccgcattgaaggcggcgaaagcacgctctgcgcgtacagagccgttcaggacattgctaacaccgtgctgactacaactcaccctatcatgctgggtcttgctctgaattcatccgtgtttgactatgacattcttatctctactgcgcgtgcatgc

SEQ ID NO: 26374 - DNA, 580 bp, Glycine max
  Clone ID: TF_12488454
ggcggtcgttccctcgtcgagcgaatagaacgtgtatatggcgaatgtcgccgagcaggccgagcgctacctatagatggtggagttcatggagaaggtctccgccgccgccgacaactaggaacttaccgtggaggataggaacctactatccgtcgactactataacgtggatcgtagacggccggggccttgtgtcgcatcatctcctcgatcgaccagaaggaggagagccgcgggaacaatgatcacgtctacgtcatcctcgactaccgatccaagatcgagtcacgagctctccaacatgtgcaacggtatactcagactagtggactctcacatgatgctatccgctttctgcggcgattccaaggtctgctacctcaagatgaaggaagatgaccacagataccttgccgagttcatgagcggcgccaagcgtcgagaggctagcgatagcactctctctgcatgcagagtcgcacagcacgatgcgaatgcgcgatctgatgcaactgcttccgataagcgtggacatgcgcttgactatatgtatgagacttagacgtccttattctac

SEQ ID NO: 26375 - DNA, 1516 bp, Glycine max
  Clone ID: TF_GmC548_1
cccacgcgtccgtacggctgcgagaagacgacagaaggggatccaactcaggaagggaaggcgagacagctcaatcctacacatgacatctcaatctcaatctctttcgtagtgttttttgtttttaaatacataaaaaaccattcattctgtttcgttccactccctaatagctgctacagttacagcataacttctattctatatttctttctactcgcaagcaaatcagaacaagagaagagaatggcaggagcagaggggctaaacagagaacagtacgtgtacttggcgaagctgtcggagcaggcggagcggtacgaagagatggtggagttcatgcagaaggtggtggtggggtggacgccggcgtcggagctcacggtggaggagcgcaacctcctctcggtggcctacaagaacgtgatcgggtcgctgcgtgccgcgtggcgcatcgtctcctccatcgagcagaaggaggaagggcgcaagaacgacgaccacgtctccctcgtgaagcactacagatccaaggtcgagaacgagctcacgcaggtctgcgccagcatcctcaacctcctcgactccaacctcgtaccctccgtcttcgccagcgagtccaaggtcttctacttgaagatgaagggcgattaccaccgctatctcgcagagtttaaggttggggatgagagaaaaaccgctgctgaggataccatgttgtcttacaaggctgcccaggacattgcttctggggatcttccccctactcaccccatcagattgggtctcgctctcaacttctccgtcttctactatgaaatcctcaaccagtctgacaaagcgtgtgccatggctaaacaggcttttgaggaagcaattgctgagctggacaccttgggagaagaatcctacaaagacagcacgctcataatgcagcttttaagagacaacctcaccctttggacttctgatgtccaggaccagctagatgagccctgatatccattataggtttgatgggtggtattcttcctctcatggaggtgggctttgaatgtcatttctttgtgctaaattaagaatcgccctagtttataaaatgattggcaatctgtgatataatgttgtatgaacagagaccaggcttctttgttttttatttttatgtctcatgatattttggaaaggatactgtataatgggatatccaattaattaattattatatctgttgcaatctttaccgaagaaaactgtataatgggatatccaattaattattatctgttgcaatctttcttgtgttacttccacagtcccacaacacatagggtcctaactcataagtgcccccattttaaaattttgggtcagcatctggtggtcctataggaactagaaatgtcattgtagcaacattattctcttggaaagaacatttttcattacagctataatggcgcattaaataataatatataaaaataataatatttaatattaattataataaaaa

SEQ ID NO: 26376 - DNA, 1342 bp, Glycine max
  Clone ID: TF_GmC548_2
agactctgcaagggtgggtgagacaggtgaatcctacacatgttatctcaatctttttccaagtgtttttttatacataaaatccattcattcggtttcgttccactccccccaatagccgctattctactcgcaagcaaatcagaacaagagaagagaatggcaggagcagaggggctaaacagagaacagtacgtgtaccttgcgaagctgtcggagcaggcggagcggtacgaagagatggtggagttcatgcagaaggtggtggtggggtggacgccggcgtcggagctcacggtggaggagcgcaacctcctctcggtggcctacaagaacgtgatcgggtctctgcgtgccgcgtggcgcatcgtgtcctccatcgaacagaaggaggaagggcgcaagaacgacgaccacgtgtccctcgtgaagcactacagatccaaggtcgagaacgagctcacgcaggtctgcgccagcatcctcaacctcctcgactccaacctcgtaccctccgtcttcgccagcgagtccaaggtcttctacttgaagatgaagggcgattaccaccgctatctcgcagagtttaaggttggggatgagagaaaaaccgctgctgaggataccatgttgtcttacaaggctgcccaggacattgcttctggggatcttccccctactcaccccatcagattgggtctcgctctcaacttctccgtcttctactatgaaatcctcaaccagtctgataaagcgtgtgccatggctaaacaggcttttgaggaagcaattgctgagctggacaccttgggagaagaatcttacaaagacagcacgctcataatgcagcttttaagagacaacctcaccctttggacttctgatgttcaggaccagctagatgagccctgatatcccttataggttgatgggtggtattcttcctctcatggaggtgggctttgaatgtcatttatttgtgctaattaagaatcgccctagtttataaaatgattggcaatctgtgatataatgttgtatgaacagagaccaggcttcttttttttgtgtgtcatatggtattggaaaggatactgtataatgggatatccaattaattattatctgttgcaatctttcttgtgttacttccacagtcccacaacacatagggtcctaactcataagtgcccccattttaaaattttgggtcagcatctggtggtcctataggaactagaaatgtcattgtagcaacattattctcttggaaagaacatttttcattacagctataatggcgcataaaaaaaaaaaaaaacaagaaatatgaatacaaggg

SEQ ID NO: 26377 - DNA, 255 bp, Glycine max
  unsure (1)..(255): unsure at all n locations
  Clone ID: TF_700744868H1
ggttaagcggtgaccccagagaatctgtgacatggcggattcttgctcgggaggagatcgtttacatggcgcccacgnggagaggncgtgcgttacgaggacatcgtggagtttctggagaaggttgcaaagatcgccgaggttgacgagttgacggtggaggagaggaatctcctctctgtcgctttcaagaacgtgattggtgcgagtcgggcttcgtggaggatcatatcctccattgagcagaaggaggag

SEQ ID NO: 26378 - DNA, 268 bp, Glycine max
  Clone ID: TF_LIB3028-005-Q1-B1-B10
aagcttctccctcttactcttacactctcatccaaatcttgcaaaaaaaaaaaatcacaatggcagcgagcgctcacactccatccaaagagttcgtgtacatggccatcctggcggatcatgcccatcgctactaggagatggtagagttcatgagaaaggtctccgcctccgccgacaaccatgagcttagcgttgaggaacgcaacctcctctccgttggcgaacataactttatctgagcttgccgctccacctggcgcatcat

SEQ ID NO: 26379 - DNA, 484 bp, Glycine max
  Clone ID: TF_9204460
ggcggccgctccctcgcctaacgaagagaacgtgtacatggcgaagctcgccgagcaggccgagcgctacgaagagatggtggaggtcatagagaatgactccgccgccgccgacaacgaggagctaaccgtctatgagaggaacctcctctccgtcacgtacaaaaacgtgatcggagcgcgccgcacctcgtggcgcatcatctcctctatcgatcacaaggaagagagccacagcaacgacgaccacgtctacgtcatccgcgactaccgatccaagatctactccaatctctccaacatctgcgacagtattcttaaactcctcaactgtctcctcattcccttcgcttcctcctacgagttcaaagtcttctacctcgatatcaaagcagattacccacagtacctcatcaagttcaagaccagcacctaggctaatgaagctgacgacaacactctgtttacatacaaacccgttcac

SEQ ID NO: 26380 - DNA, 520 bp, Glycine max
  Clone ID: TF_LIB4164-027-Q1-K1-A12
ccacgcgtccggggggttacgcgtgcgaaagagaatgagagaatttgaaaaccctaatcttacaaagatcggtgatgactaacctctcaaggatcgagagaactttgtttacattgccatacttgtctatctggctgtgcgtttctaagagatggcggaatcaatgagaagcgctgctaatatccccatccgaactgacgagcggaggagcggaacttgctctctgtagagcacaagactgcgactagcgctcgcacagagacctgaaggatcctgacgtgcattgagcaaaagggagaaacaaaagggaactagttgtatgcaacatggactaaggactcccgacaagaaggcgaatcgaagctatcgaacatctgatgaggtaggatgagagcgagcgatgaacactttatcactgctggtgtacgtggggaatccactgcgttgaactattagacgacaggagagtatgactgggatcgagctgaatgcaaatcgagcaaagagaagaaggaagctg

SEQ ID NO: 26381 - DNA, 374 bp, Glycine max
  Clone ID: TF_uC-gmflLIB3260P031c03b1
cccacgcgtccgttcacgcgtccgcccacgcgtccgaaagacagcaccctaattatgcagcttctgagggacaatctcaccctgtggacttctgacatccctgaagatggagcagaggaacaaaaggtggattctgcccgagctgctggaggtgacgatgcatagcaggtattggccaaggaatttgtggagtgcatacgagaaggctagtctctctcttgatagtttaccattaggatgttgtaatagaacatggaattggtctctagaaaatcaccataaggctatgtgagccttttattctatgcgtgtgctttctgttactggagactggagttgagatttgcatggtgtttggctgcattttaatgaat

SEQ ID NO: 26382 - DNA, 207 bp, Glycine max
  Clone ID: TF_701044857H1
gcaaaaaaaaaaaaccacaatggcagcgagggctcccattccacgcgaagagttcgtgtacatggcgaactgtccggaacaggccgagcgctacgaggagatggtggagttcatggaaaaggtctccgcctccgccgaaagcgaggagctgcccgtggaggagcgaaacttcttctcggtggctaaaaaaaacgtattgggcgctcg

SEQ ID NO: 26383 - DNA, 330 bp, Glycine max
  Clone ID: TF_GmC418_4
gttactttgtttttcaggacattgcaaatgccgaactgcctccaactcatccaattaggcttggccttgcacttaacttctctgtattttactacgaaatccttaactctcccgatcgtgcctgcaaccttgcaaaacaggttagattcagatatagtgaatatcttgggctttgttttgctctgtttattttcgttttacaacattttgagcaatgttttggatgtttcccgtgaaaagaggaaggaattgggccccatacagtgaaatttgcagctattattgtccattaattcgaataactttatggctactcccataatgcatttc

SEQ ID NO: 26384 - DNA, 304 bp, Glycine max
  Clone ID: TF_5688049
ggcgagcgccccctcgcctcgcgaagagaacgtttgcatggcgaagctcgccgtactaggcgagcgctacgaagagatggaggcgtctatggagaaggtctacgccgacgtcgacaaccaagaacgtaccgcggaggagatgaaccatctctgcgtcgcctacaagaacgagatcggagcgcgccgcgcctcgtggcgcatcatctcctcgatcgagcaaaatgaggagagccgcggcatcgatgatcatatgtacgtcaatcgctgctacctattcaagatacagtcggagctctccagcata

SEQ ID NO: 26385 - DNA, 786 bp, Glycine max
  Clone ID: TF_LIB4203-002-R1-K1-G1
gctgtagcctgtgagcagccagatcagggacagagtctcagcctcgccgccaccgctgctgccgccgccgcccaaagactgccgagccgcgtccgtgtgccgccacccactccggacacagaatatccagttatggataaaaatgagctggtgcagaaggccaagctggccgagcaggcagagcgatatgatgacatggcagcctgcatgaagtctgtcactgagcagggagctgagctgtcgaatgaggagagaaaccttctctctgttgcttataaaaacgttgtaggagcccgtaggtcatcgtggagggtcgtctcaagtattgagcagaagacggaaggtgctgagaaaaagcagcagatggctcgagaatacagagagaagatcgagacggagctgcgtgacatctgcaacgatgtactgtctcttttggaaaagttcttgatccccaatgcttcgcaaccagaaagcaaagtcttctatttgaaaatgaagggtgactactaccgttacttggccgaggttgctgctggtgatgacaagaaaggaattgtggaccagtcacagcaagcataccaagaagcatttgaaatcagcaaaaaggagatgcagccgacacaccccatcagactgggtctggccctcaacttctctgtgttctattacgagatcctgaactccccagagaaagcctgctctcttgcaaaacagctttcgatgaagccattgctgaacttgatacattaagtgaagagtcgtacaaagacagcacgctaataatgc

SEQ ID NO: 26386 - DNA, 1366 bp, Glycine max
  Clone ID: TF_GmC518_1
ggcccgctcccgaggccggcccgggccgcggaagaaaacgcggacgacgtacctttcacttcacttgtggttcctcactctctctctctccacaccacactgaggagggagacagtggaaggaaggaacactcaaatcactgaaccagccatggctaccttctccaaggaacgcgagaactttgtatacgttgccaagttagctgaacaagctgaacgctatgatgaaatggtggatgccatgaagaaggtggcgaagctggacgttgagttgagtgtggaagagaggaacctgttctctgttgggtacaagaatgtggtggggtcacggagagcttcatggagaatcttgtcatcgatagagcagaaagaggattccaaagggaatgagttgcatgttaagcatatcagggattacaggaacaaggtggagttggagctgtccaacatttgcagtgacattatgataattttagatgagcatcttattccatccactaatattgcggagtccacagtgttttattataagatgaaaggagactattaccggtatttggcagaatttaaagctggcaatgaaaagaaagaggtggcagatcagtcacttaaagcatatcagacagcttctaccactgctgagagtgaactacaacctacacatcctattcgtttgggtctggctctaaatttctcagtgttttattatgagatattaaattcacctgaaagggcctgccatcttgcaaagcaagcctttgatgatgctgtctcggagctggataccctgaatgaggattcttacaaggacagtaccttgattatgcagctgttgagggataaccttactttatggacttctgatatccccgaagagggtgaggacctaaaaatggaaagcgcagccagggttgatcaaggagaagatgagttaggccgctaacccatcattctgtcatatgtctaagatttgatgcattaatttttctcaatcatattttctccattgtagtgaagcctctatctgaatggtgcactgcacctcatcaactttgagtcattcttatttttgagtgatggcctatttgagtcatctacttcatttttatgctattgttgagtagttttattcatgtgtttgtgacacaaaaacaccattggtttgcaatgcataatttccctatttgtatcctgttatggttaagatctgttcttgggttggcctttcaagaactgatcacatgtgagccactgtaatattgcaatatttagacttttgttaagtctcattttattaagacagacaaattaggttaaaaaaaaacccctaaaaaaaaaaatggtaataataaaagcaataatataag

SEQ ID NO: 26387 - DNA, 260 bp, Glycine max
  Clone ID: TF_700681991H1
ggatatagcgcatgccgatctggctccaacccaccccatcaagctctcgcctgctctcaacatctcagtgctctactacgagatcctcagcacccctgaccgtgcttgtaacattgcaaatcaggcctctgatgaggcaatcgccgcgctagacatcccatgagaggagtaccacaaagacagcactccgatcatgcagctcctgcgtgacaatataactgatggagtgccgacaccaacgaggacggcagtgatgacat

SEQ ID NO: 26388 - DNA, 292 bp, Glycine max
  Clone ID: TF_LIB3094-060-Q1-K1-D9
aacggggacgcgtgtgtctatgtctatcaaattctataacatccagagctcgggcaaaaagaagggcacgatgtcagagcgcgctccgactacactcgaacaggtcgtgtacatggcgaagctggctgagcatgccaagcgccacgaggagaaggtggagcatatggcgaatgactgcaactacagcgagagcgaggaactgacccgggaacaccacaaccgtgaatgggcctactacaagaacgtagtcctctctcaacgagcctacgagttcatcatgctctgaattgac

SEQ ID NO: 26389 - DNA, 1880 bp, Glycine max
  Clone ID: TF_GmC518_2
tgaggagggagacagtggaaggaaggaacactcaaatcactgaaccagccatggctaccttctccaaggaacgcgagaactttgtatacgttgccaagttagctgaacaagctgaacgctatgatggttctctctctctctctctcgattttcactgtgaagtgaacactcgttctggttccttcattttagctgcattccactttcaatcacgtttccatcatctcctgcagctacccattttctctttttccttataacagacatttgttctgataaagtttcaatttttccataaaagtccactgctttttcacttctgcatagaactgctattctacttttacatgcccatttcaccatctaaattattatgaaagaaaaagagtaaaatttggatttgtagtaggatatttccattgcatgctaagtttttaaaagtcatacctggacatgatttctgaaagagtgtggaaattaaactttgtattttatttgttacgtgttttggaatttgattcaagagtgttgagtggtggagtataataactatttaaaagtcatacctgagatgatttctgaatgagtgagtgtgaaaattgaactatatttgtttgttatgtgttttggaatttgattcaagagtgctgtgtggtggagtatgataattactttaaaagtcatacattcctcatgatttttgagtggatgagaccgtgaaaattaaactatatttatttgttatgtgttttggattttggttcaagagtgttgaggggtggagtatgataattactttaaaagtcatacctgacatgatttctgagtggatgagggtgtgaaaattaaactctatgtttatttgttgtgttttggaatttgattcaagatgtgtttgagtggtggagtgtggtgtgcagaaatggtggaggccatgaagaaggtggcgaagctggacgttgagttgagtgtggaagagaggaacctgttctctgttgggtacaagaatgtggtggggtcacggagagcttcatggagaatcttgtcatcgatagagcagaaagaggattccaaagggaatgagttgcatgttaagcatatcagggattacaggaacaaggtggagttggagctgtccaacatttgcagtgacattatgataattttagatgagcatcttattccatccactaatattgcggagtccacagtgttttattataagatgaaaggagactattaccggtatttggcagaatttaaagctggcaatgaaaagaaagaggtggcagatcagtcacttaaagcatatcagacagcttctaccactgctgagagtgaactacaacctacacatcctattcgtttgggtctggctctaaatttctcagtgttttattatgagatattaaattcacctgaaagggcctgccatcttgcaaagcaagcctttgatgatgctgtctcggagctggataccctgaatgaggattcttacaaggacagtaccttgattatgcagctgttgagggataaccttactttatggacttctgatatccccgaagagggtgaggacctaaaaatggaaagcgcagccagggttgatcaaggagaagatgagttaggccgctaacccatcattctgtcatatgtctaagatttgatgcattaatttttctcaatcatattttctccattgtagtgaagcctctatctgaatggtgcactgcacctcatcaactttgagtcattcttatttttgagtgatggcctatttgagtcatctacttcatttttatgctattgttgagtagttttattcatgtgtttgtgacacaaaaacaccattggtttgcaatgcataatttccctatttg

SEQ ID NO: 26390 - DNA, 751 bp, Glycine max
  unsure (1)..(751): unsure at all n locations
  Clone ID: TF_LIB4203-002-R1-K1-E7
ggacgggcgggcgagcgagcgagcgagtgagcaggcggtgtgggcgtgcgaggcgaggccgagtcgcgagcgacatgggggatcgagagcagctgctgcagcgggcgcgactggcggagcaggcggagcgctacgacgatatggcctccgccatgaaggcggtgacagagctgaatgaaccactatctaacgaagatcgaaatctcctctctgtggcctacaagaatgtagttggtgccaggcgatcttcttggagggttattagtagcattgagcagaaaaccatggcagatgggaatgagaagaagttggagaaagttaaagcctaccgggagaagattgaaaaggagctggagacagtttgcaatgatgtcttggctctgcttgacaagttccttatcaagaactgcaatgattttcagtatgagagcaaggtgttctacctgaaaatgaagggcgattactaccgctacctggcagaggtggcttctggggagaagaaaaacagtgtggttgaagcttctgaggccgcgtataaggaagccttcgaaatcagcaaagagcacatgcagccaacacaccccatccggcttggcctggccctcaatttttctgtgttctactatgagatccagaatgcaccagagcaagcctgcctcttagccaaacaagccttcgatgatgctatagctgagctggacacattaaacgaggattcctataaggactncactctcatcatgcagttgct

SEQ ID NO: 26391 - DNA, 2223 bp, Glycine max
  Clone ID: TF_GmC1228_1
ctcttattcaacaccaccacttccggcgaccatttctaactaattccggcgacgccacgctcccgacaccggtgacctctctacctctcactgaacgagtgaacgtgcatcttaatttttttttttttttctgtttatgattttggatcgatttgtttctgttactgaaaccaaagatgtgagatcccaccacttcacttcaattctctttcactacgctttcattttgcgaatcccgaacgttctctttctctgaatcgctcggttcaaattcacattcaatttcgaaggattttcttcaccagaattcatagcagtagcatgcactacgtaacttcgttttcatcaaaggtgtcactgaagtagaagcgttgaatattttctcaatcgttgttaaatgcttagccaccgtggaggataattgttaattgcgctgcgaatccgtgttctcaatcgttattctacggaaatttgattattcaaaattcgagaaagctagaaaatatttatgtagaagtaaaagtggctatatgactagtatctgtgcaaaattatttttggcccaccaaacgccattcaatttgcctccctcccaatcccacagcgctccctccaccgtgacaatcactcactccccactcatcaccaggagaaacgcgtgagaaacattcctctcagagcgcgtggaaacaccccctctcccaccaccaacccttgccgtcgtgccctgtccctccacaaccaaacccttccttctctcaacttgcttattcctgcgcgaacacgaccgaccacgcataatgacacaaaaaatttctagagcgagaaagtgagaggagagagaaagtagcagatcctccatggcctccaccaaggaacgtgaaaacttcgtctacgtcgccaagctcgccgaacaagccgaacgctatgaagaaatggtggaagcaatgaagaatgtggcgaagctaaacgtggaattgacggtagaggagcggaaccttctgtcggttgggtacaagaacgtggtgggtgctcgtagggcttcgtggaggattctttcctcgattgaacagaaagaagaagctaaagggaacgatgtgagcgtgaaggttaaatcctttggctccacgaggagcgcaaaacttgtcaacaccgccaagctagcgaacatgccgtaggttattaacatattgtcgatagaacatcgagtgaggcgaggtgactttgaattatgaggcgggaacggtacctgtagctcgtagggtcaaggcaggtggtgatggacataaggcttctgagcattttatgaaggcgattcaattgacttcagaagctaaagggaacgatgtgagcgtgaagaggataaaggagtataggctgaaggtggagtctgagttgtccaatatctgcagtgatatcatgactgttattgatgaataccttattccctctagctcatctggtgaacctagtgtctttttctacaaaatgaagggggactattaccggtacctcgcagagttcaagtccggtgatgagagaaaagaggctgctgatcattccatgaaagcgtatcagttggcttccactactgcagaggctgagttagcatccacacatcccatccgtttgggcctggctttgaacttctctgtcttttattatgaaattttgaactctcctgaaagggcctgtcaccttgctaagcaggcatttgatgaagcaatctctgagttggatactctgagcgaggagtcttacaaagacagcaccctaattatgcagcttctgagggacaatctcaccctgtggacttctgacatccctgaagatggagctgaggaacaaaaggtggattctgccagagctgctggaggtgacaatgcataggtattggctaggaatttgtggagtcatacgagaaggctagtctttctcttgatagtttaccattaggatgttgtaatagaacatggaattggtctctagaaaatcaccataaggctttgtgagccttttattctatgcgtgtgctttctgttactggagactggagttgagatttgcatggtgtttggctgtaatttagtgaatttcttcattttgactttctttctaagaggatgctaccttgcattcttttatcagtttacatagataatatttatttcaaattatgcgaatcattgtttctaaacagaagtttacgaccgtttttttttt

SEQ ID NO: 26392 - DNA, 364 bp, Glycine max
  Clone ID: TF_uC-gmflminsoy059f05b1
ttgacgcgtggggtgagattggcggatctcagaaatgtcagatttttctctgaaggagaacgattacagggcgaaattgtgaggagcagagccgagcgttacgaggagatggttgagttcattgagaaagttgcaaagactgtgtaaggtgaggagttggcagtagaggagaggaatataatatatgttgcttacaagagcctgatggatgcgatgcgggctttgtgggggatcatctactacatcaaggttatcgagtaatgagggttcggtggagacaacagtgggcgttctcagggagcccaggtgcgaatttgatctataagacctgttcagaaaggtaagaacataggacacgaacttt

SEQ ID NO: 26393 - DNA, 1538 bp, Glycine max
  Clone ID: TF_GmC1521_1
ggctcgaggcttctcttattcccttttctctctccttctactctccccctctttctcattttccggtgacatggagtccaagtggggtggcgcccccgccagcatcatggcggcgaatttcgacgacttcaagtggatcgcctccatgttcgatcccggaaacgacgacgtcaagcccttctccgacgcagctttccaaaaccaggatgcagtaactgcattttcaacttgtggtggagtaacagatgatacccttgttcgttcccaaaacctcactcccattcaatccaccatttctgcaactattgattctcagtcttccttttgtggtaccgttgggagcccagtgtctgctaacaaaccaaacgtgagagataatcaagtaaaaggggtcgccaccactacaagtggttcctcacgtgagccatctgatgaggatgatgaagcaggtccttgtgaacaaagcacaaacgctattgatatgaagcgccttagaaggaaggtttctaatagagagtctgcaaggaggtccaggagaagaaaacaagcccatttggctgacctggagtggcaagttgaacggctgagactggaaaatgcaaacctatttaagcagcttacagatgccagccaacaatttcgtgacgctgatacgaataaccgagtcctaaaatcagatgtcgaagctttgagagctaaggtgaaattagctgaggatatggtcactcgtggcacactcacccctatcaacaaccagattcttcaaaatcagagttcactaaacaccccacctcaactcaacacaaataatctacaccgcatgacacatgtttcgccaaccatcaccgtccgtgggaatgatgatgcttcatatggaggtggaattacagttagtggacaaaattcacctcttggtgggcttggaaacttggataatattccttgcagcgatttcaatagtggaatcaatagtaataatgctgtgagctctatgactagcatgtggccttaacgttattcttattgcaccacatgacttgtgttgtagtagtactgtccggttagatccaactttatgcatgtcttggttttattagatttgtggttatattgtggaaaatattatataggtaacaaaaatgtggtatctacgtgtaagaatccatctagaatatttagcatggtgtgtgttaaatggtttcttttttcttcttcacagtctttgcaaccttctccatgaactcaaccatctcctcgtaacgctcggcctgctccgccaatttcgccatgtaaacgttctcctcccgagaagaatccgccatttctcagattcgcaaatctcaccgcttaaccctgaaggaaaagaaagcgtagcccccttctgtcgtcttctcgcagccgtacccttctgtcgtcttctcgcagccgtacccttctgtcgtcttctcgcagccgtacccttctgtcgtctcctcgcaaccgtacccttctgtcgtcttctcgcagccgtatccttctgtcgtcttcgcagccgacga

SEQ ID NO: 26394 - DNA, 316 bp, Glycine max
  unsure (1)..(316): unsure at all n locations
  Clone ID: TF_700977467H1
wgtcgcangcacgcgtacgtaagctcggaattcggctcgagcacacaacaaattnctagagcgnnananngagannagagnnanannagcngatccnccatggnntccaccaaggancgcgaanactttgtctacaccgccaagctcgccgaacaanccgaacgctannaagaaanggtggaagcaatgnagaatgnngcgaagtgaacgtgnaattgacgntcgcngagccganncttctgtcggnanggtanaagaacgtngtgngtgctcgcacngcttcntggnggantntancgncgnttgnncacanana

SEQ ID NO: 26395 - DNA, 331 bp, Glycine max
  Clone ID: TF_LIB3094-072-Q1-K1-C6
gtccttaattcaccgatccagccacgcgtccgctctatcgctcacacacactatctctctgtctttctctcacccagatcttgtaacaagagctatgtctaccactccacgcgaaaaggtcacgtacatggccaagcataccgatcatgccaatcgctactaggagatgatgaaactcatggagaaggtatccgcctacaacgatagccatgagctcaccacggaggaacataaccttctctccgtaaactacaagaacgtgatcagcgctcgccacgcctactagcgcatcatctccataatcgagcacaaagaggataaacgcgtgaac

SEQ ID NO: 26396 - DNA, 358 bp, Glycine max
  Clone ID: TF_uC-gmroLIB3259P229h02b1
tgtaaaacatatttttgggagagagggtaacgggagggaaaatgtacgaccagtttcaggagaacaggaggttcataagggcccgtcggtgcgggaaccggcgcatcaggaaagacccgccgagaaagagagaaagacccagggctacttggccaagctcgccgagcaggccgagagatacgaagaaatggttgagtgcaggaagaaagcaggaacacttgttcccgatctaactgccgaagacaggaacctcctctcaacgggatacaaaaatgtgaccggcgcaccaagggcctcttggagcatgacgccctccattgagcacaccgacgagtctaagggcaatgagcgcactgtt

SEQ ID NO: 26397 - DNA, 189 bp, Glycine max
  Clone ID: TF_LIB3242-657-P1-J1-H5
gatcgcgagaacttcgcgtacatatgcaaactctccgagctgcccagccttccaagagatggtggaatcaatgaagaacgcgtgcgaatctctgcattgtactgtcgggggaggagcggaatttgctctctgttgggctcacaaatatgattggtgctcgcagagcgcgctggaggatcctgtcttcca

SEQ ID NO: 26398 - DNA, 506 bp, Glycine max
  Clone ID: TF_jC-gmXLIB3563P78cg03a1
tccagatcttgcaaaaaaaaaaaaaacacaagtggcgagcgatgcgctcccacctccacagcgaaagagttctgtgtacactgtgcgaatcctggcgggagcacggcccgagccgctacgagagagataggtgggagttcattggagaaggtgctcccgcctccgccggagagcagatgagcctgacccgtgggaggaggcgcaatccttcttcttcgtgaggctacaatgaacagtaattcgggagctccgcccgcgcgcttcctgagcgcattcatcttccttcacttgagcaaaatggagagagaggccgcggcaatcgaggaccacgtcagccgtcattccgtgactaccgctgccaagatcgagggccgagctctccaacatctgcgacggaatgctcaagctcctagacacgcgcctggtcccctccgccgcctccggcgactccaaggtcttctacctcaagatgaagggagactaccacaggtacctcgctgagttca

SEQ ID NO: 26399 - DNA, 594 bp, Glycine max
  Clone ID: TF_uC-gmroLIB3259P231f05a1
aaaaaaacaaatgaagggggtccccccttcgcttcctaaaataaggggcaattcgaagtttggtaaaaaaacccccatttgggtatttttttaaaccgcattttaggggaatttccaggggcttaaaaaaaatgggcggttcaaaacccctttttatgggagggccaaactaaaatggcccgggccctccccattttttaacgaaaaacccgattgcccaaaatctcggagccccggagattagccttcaaccccttctccttttgaaaactttacaagggggaggttcaaggcctaacaccccgagttgggtttgttaatttttgtcccccgccaccttgggggggggcttttttaattttattggcaccatcaccctgtttgtcaaaggtccaggggggggggttatcacttcctcgtgggttgaacaaagggccttccttgtaggacccctcccccaaggtatccatattaacaatagccctataaaaagcctgttttgcagggttgcccccccctcccggaaagttaaaaattctttatttaaacccggggaagtttaaagcaggcccccccctgtttgggggggggggg

SEQ ID NO: 26400 - DNA, 513 bp, Glycine max
  Clone ID: TF_LIB5118-006-B1-PF1-D4
tttgtttctatacgttgctggttttctggcaaattcaaagattctaggttgattgcttttgttgtttaaaaaagaaggagaataataaagaacatcaaaaactcttcataataacagagaagattgcttttacccttgccctttggaccttctcggacaccccacattagccaactatcactctcaaaacaaatggacggaatcagagtttgaactctctagaatgcaaccacaatggaggacgctccctcgcctcgagaaaaaaacgtgtacatggcaaatatcgcccaacaggccgagcgctacgaaaagaaggtggagctcatgaaaaaggtatcttctttcttttaacacccaccaccctaccggggaggaaagaaaccgcctctccgtagcctacaagaacgaaatggaagagcgccgcgcctcaggggaaatcttctcctctatctaacagaaggaggagagccacgctaagtaggatcacgacgccgtcatccgtgagtaccgata

SEQ ID NO: 26401 - DNA, 269 bp, Glycine max
  unsure (1)..(269): unsure at all n locations
  Clone ID: TF_LIB3242-769-P1-K1-A8
cagacgcgtgggcagactcgtggagtggagtttatggagaaggtcttctcctcctccaggagcttttagctaaccgtagaggatctcaaccttctttccgttaactacaagaacgtgatcggcactcgccgcgcctcctgcaacatcatcttctcaatctagcaaaacaatattattctcaatatccaaagcaatttgttctttaaacnctactaccgttccaatatcaagaaaaaccttcttcaacatttaatttcttattttcaaac

SEQ ID NO: 26402 - DNA, 451 bp, Glycine max
  Clone ID: TF_LIB5118-021-A1-PF1-A6
cggccgctcaggcggcgggcggattctcatattctcctcgttccctcctcccataacctccattctactcatcatcattctcatcgagatcacagaatggtgggagcaaagtcattactcccacatacagcacatataccttgcgaagctgtcggagcaggcggagcggtacgatcatatggccgaaggtcatggataatgctcagcagcgacgcatgacggcgccttccggtcgccgtgtgcatcgtgaacctactctctcagcactacattgactgaatcgctcctagtccatgcctgctaataatcctgtggtttctcactcaaaatgctgatgataacaccaaaaaattctattgggagctctgtgctcatgagtacctttatatgatatatgatatgaatccttgcttgcaactcatcgaataccgccagcgatacctattatata

SEQ ID NO: 26403 - DNA, 302 bp, Glycine max
  Clone ID: TF_LIB3049-054-Q1-E1-A8
gctctccgtcaggttcatcgtcccactttcttctccttttaaggtttcctttttgtttcacctttccagatctgcatcttccattttttaggattaagcggtgagattcatgaatctgagaaatgtcagattcttctcgggatgagaatgtttacaatgcgaaattggcggatcacgtcgaccgttacgatgagatggttgagttcatggacaatgtaccagacactgtggaagttgaggagttgacggtagatgagacaaatcttctctctgtggcttacaacaacgtgattggtgctatg

SEQ ID NO: 26404 - DNA, 373 bp, Glycine max
  Clone ID: TF_14991060
aggaaacttttcccggattttggaaaaattcaaggttggaaatgaaaaaaaaaagggggcaaaccagccccttaaagcttatgaaacactttctccccctgttgaaagggaactacaccctacccttcctattcgttggggccgggtccaaaattccccggggtttaataagaaaataatgaatccccctgaaagggccggccttcttgcaaagcaagcctttaataatgttgcctcaaacctgaatcccctgaaggaggatccttccaaggccagacccttgataatgcagttgttaaggaatacccttccttaatgaacttctgatatccccaaaaaggtggaggcccaaaaattggaaaccccacccagg

SEQ ID NO: 26405 - DNA, 283 bp, Glycine max
  Clone ID: TF_LIB3094-073-Q1-K1-C4
acggtttatctctcacacacactttctctctctctctatctcacccagatcttatatcagtgacgagcgctatcactccacgctaagagttcatgtacatggcgaacctggcttactcaacctaacgctactagcatatgatgaaattcatttaaaaagtctccgactacttcgagtaccagaatctcaccgacaacgctcgtaacctcctttccctatcctaccaaaactgcatcaacgctaccctcgcctcaccactcatcatctgctcaatctatctaaa

SEQ ID NO: 26406 - DNA, 221 bp, Glycine max
  Clone ID: TF_700755182H1
ctcacacacactttctctctctctctctctcatccagatcgtgtagcaatcgcgagcgctcccactccacgcgccgcgttcgtgtacatggcgaagctagcggagcaggccgcgcgctacgaggagatggtggacttcatggaaaaggtcaccgcctccgccgagcgcgacgagctgaccgtcgaggagcgtaacctcctctccgtcgcctacaagaacgt

SEQ ID NO: 26407 - DNA, 312 bp, Glycine max
  Clone ID: TF_LIB3242-403-P1-J1-G11
aattcggctcgagctcacacacactttatgtatctatctctatcagccagatcttgtagcaacggcgagcgctcccactccacgcgaagagttagtgtgcatggcgaagctggcggaacaagccaagcgctacaaggagacggtggagttcatggagaatgtctgcagctccgccgagagcgaggagctgaccgttgaggagcgtaacctcctctccgtcgactacaagaacgtgaacggcgctcgacgcgcctacaggcgcatcatctccttaattgagcagaaggaggagagccgcggaatctaggacca

SEQ ID NO: 26408 - DNA, 208 bp, Glycine max
  Clone ID: TF_8282709
ccacatgtccgtcatacgatactaccgctccaagatcgttgccgtactctacaacgtctactacggaatcctctatctcgtcgacactctccttgtccacttcgtcgtctacggcgacttcaaagtcttgtatctcaagatgaagggagactaccacaggtacctcgtcgagttcaagaccgtcgctgacctcaacgatgccgccgag

SEQ ID NO: 26409 - DNA, 498 bp, Glycine max
  Clone ID: TF_jC-gmro02910042d09a1
ggctcgaggagaaagtgagaggagagagaaagtagctgatcctccatggcctccaccaaggaacgcgaaaactttgtctacaccgccaagctcgccgaacaagccgaacgctatgaagacggttgaattttcgttgtggattttgaatttgaactttgcggagcacaattgtgtgtgattttttgagtgtttggtatgttgtggttagaaatggtggaagcaatgaagaatgtggcgaagctgaacgtggaattgacggtcgaggagcggaaccttctgtcggtagggtacaagaacgtggtgggtgctcgtagggcttcgtggaggattctatcgtcgattgaacagaaagaagaagctaaagggaacgatgtgagtgtgaagaggataaaggagtataggcagaaggtggagtctgagttgtccaatatctgcagtgatatcatgactgttattgatgaacaccttattccctctagctctgctggtgaacctagt

SEQ ID NO: 26410 - DNA, 262 bp, Glycine max
  unsure (1)..(262): unsure at all n locations
  Clone ID: TF_uC-gmropic116f05b1
gtcgcttctcgnccggcgaaannggcggagcgggccgattgaaacgaggagacggncgagcccacggagaagggngcaaagacngnggaggccgaggagccgacggnggaggagaggaancnccncncngnggcnaacaagaacgngannggngcgaggagggcnncgnggaggaacanancccccanngagcagaaggaggagagcaggggcaangaggaccacgnggccannanaaaggagnacaggggcaaaanngagg

SEQ ID NO: 26411 - DNA, 1069 bp, Glycine max
  Clone ID: TF_GmC1228_2
cacaaacacacaaaaaatttctagagcgagaaagtgagaggagagagaaagtagctgatcctccatggcctccaccaaggaacgcgaaaactttgtctacaccgccaagctcgccgaacaagccgaacgctatgaagaaatggtggaagcaatgaagaatgtggcgaagctgaacgtggaattgacggtcgaggagcggaaccttctgtcggtagggtacaagaacgtggtgggtgctcgtagggcttcgtggaggattctatcgtcgattgaacagaaagaagaagctaaagggaacgatgtgagtgtgaagaggataaaggagtataggcagaaggtggagtctgagttgtccaatatctgcagtgatatcatgactgttattgatgaacaccttattccctctagctctgctggtgaacctagtgtctttttctacaaaatgaagggggactattaccggtacctcgcggagttcaagtccggtgatgagagaaaagaggctgctgatcattccatgaaggcgtatcagtcggcttccactactgcagaggctgagttaccacccacacatcccatccgtttgggcctggctttgaacttctctgtcttttattatgaaattttgaactctcctgaaagggcctgtcaccttgctaagcaggcatttgatgaagccatctctgagttggatactctgagcgaggagtcttacaaagacagcaccctaattatgcagcttctgagggacaatctcaccctgtggacttctgacatccctgaagaaggagctgaggaacaaaaggtggattctgccagagctgctggaggtgacaatgcataggtattggctaggaatttgtggtgtcatacgagaaggctagtctttctcttgataatttaccattaggatgtagtaatagaacatggagttggtctctagaaaatcaccatagggctttgtgagccttttattctatgcgtgtgctttctgttactggatggagactggagttgagatttgtatgttgtttgcctgtgattcagtgaatttcttcattttgacttc

SEQ ID NO: 26412 - DNA, 3616 bp, Glycine max
  Clone ID: TF_GmC1521_2
ggggaataaagtatcaacccaaatatatatcatgttatctggtaaattgagttattatacaggaatccctactaaaatggacatcgcactaccttttacgaaaaaagagtaaccttagtgcaagccccccaacaaaatacacaattcaaaatacatggcagccaatcgcgaccagctggcagtgatagcactaccttaaattatcattccctcatctataagcagaaactagttttatctccatatacacgaagaattataacatgatggtgtttttatttctccgctaatgtttagtccctgatttgagatcataatgccagaacaatagctgcaaatttaatcggaatcaatactaactagcaacaataaaaaatttataaatcactaaaccacattcttctcatccataaaacacattagacaatccactgaaacattgtaaatcccaagcgcaacgcgcacttgaaatcataaaattcattaatacaataatcccactatggcaagccacattggatccatattatcggtaatacatatccaatcaactaccacatcgcaactgccatcgcctattcgcctggttgttgcttagatgtttccttgatctcatctccagcatcgtccgtgatgtctgatgtccacaaagtcagattgtcacggagaagttgcatgatcaatgtactatctttgtatgactcttcacccaatgtgtcaagctcggaaattgcctcatcaaatgcctgcttggcaagattacaagcacgatctggcgagttaaggatttcataatagaacacagaaaagttgagagcaagtcccaacctaatggggtgagtgggggccaagtcagcaagagcaatatcctgagcggatttgtaagcaagcaaagtactctctgcagcctctttcctctctgccccggtcttgaactcagcaaggtacctgtggtaatcacccttcattttaaggtaaaagactttgctctcgggagatgcagcggaaggaatgaggttggactcaaggaggttcaaaatcccatcacagatcttgctgagttcagcctcaattttgcccctgtactcctttataatggccacgtggtcctcattgcccctgctctcctccttctgctcaatggaggatatgatcctccacgaagccctcctcgcaccaatcacgttcttgtaagccacagagaggagattcctctcctccaccgtcaactcctcaacctccacagtctttgcaaccttctccatgaactcaaccatctcctcgtaacgctcggcctgctccgccaatttcgccatgtaaacgttctcctcccgagaagaatccgccatttctcagattcgcaaattcctcgcaccaatcacgttcttgtaagccacagagaggagatttctctcctccaccgtcaactcctcaacctccacagtctttgctaccttctccatgaactcaaccatctcctcgtaacgctcggcctgctccgccaatttcgccatgtaaacattctcctcccgagaagaatccgccatttctcagattcacgaatctcaccgcttaatcctaaaaaatggaagatgcagatctggaaaggagaaacaaaaaggaaaccctaaaaggagaagaaagtgggacgatgaacctgctcagaacttggtaagcctcacctaaaacctgaaaattttgtgcagcaagagggtcatttgggtttttatctggatgcacttgccgtgccttaatgtaataagctttcttaatctcggcttcggatgccgtagggctgacacccagcacgtcatagtattcggtctccttcaccatttcaaagcccagttgattgatagtggatgacgtattccaagccaaaaccaaatggcgttatccttctcactaaggcctaaactctctctccgcctgttgtggttggtatggacgtgggaatcccgggcgttgactgctgcaaccgcgtaattctctgtgtgaagccctcctctccggtggttccgactttttgccctcccccttctgtcgtccaggcgtagaattattagacaagcaaaacaacactgcacaatgcggtccccgccgacaagatgcgatctccagcacatacaggcacattccacacgagcgatacatacaatacaccccctcaaaaaccaacaaacaatcaaataaactacaaaccggatatcaaactcaatccttgctggttgaagtaggtctctgggcacccgggggggcggttggcctagggaaattataatcaaattgcatgccagcaaagcgcggggcctccacataggggctctgagacgaaaaatcaggacttgaagatttgggtgatgtactaggagaagtatcattgccagtttcacttccattcaacttgtgtactgccttatttggacactttcattctcgtttccattggctgatttaaccctctggaagattttaccaagagtttttaaccctttagctcgagcgcggagttcttctttcttggcaccgttgtcttgaagaaccatttgacaaacgcgggaaagagtggcttcaatgtctgccacattaagcttccacaatgagtcaatcattaatttcttgtgattttgcatgtattcttcaagctcttcttcagtatagtccccttctgaactgagttgctttttcatatcctcctgcaattggattaaagcaattgcccctgttgctgctgtaacttgagatttaatagagtgccctttgtttctaaaccactcagcaataaaaggcacacccaaataaattgctttcttccctagctcttttgctgcctgccttgcgtatatgtagccaatggtattcaacatatcaaccccataagctgcattagatagccgggctacttcagcttctgcatcattaacaaaaccctctttgtttccttgaacatattggttgagtctatttttcagtatctctgcaagcttttcttctctctccttctgaacaaccctcattttctcttgcaactttttactatcaaattgttctccttcagtaaagatgtccattgaagccattgatgccatggctaactgacctatatattcctcaaaaagctcactaccaaaaagcatggcaaagattgctgcaggatcaataattgcttcagttgaaattcctgattttccatgagcatcataagcttgtctttgagctgggtcactcagaacttggtaagcctcacctaaaacctgaaaattttgtgcagcaagagggtcatttgggtttttatctggatgcacttgccgtgccttaatgtaataagctttcttaatctcggcttcggatgccgtagggctgacacccagcacgtcatagtattcggtctccttcaccatttcaaagcccagttgattgatagtggatgacgtattccaagccaaaaccaaatggcgttatccttctcactaaggcctaaactctctctccgcctgttgtggttggtatggacgtgggaatcccgggcgttgactgctgcaaccgcgtaattctctgtgtgaagccctcctctccggtggttccgactttttgccctccgcgttccgtcgtccag

SEQ ID NO: 26413 - DNA, 329 bp, Glycine max
  Clone ID: TF_jC-gmst024131g06a1
ggctcgagctaagatgtagcatccatcttagatggttttgtcgcacaacaagaaagggttatttgcactatcgcgcggtcactccacgcgaagagatcatgtacatggcgaagctcgtggtcccggcccagcgctacgaggagatggtggggtacaaggaaataggactccgccttaaactagagcgaggaactgaccgtggaggagcgcaacctcctcttcgtggactcaggaacgtaatctgggctcgtcgtgccttctggcgcatcatcacctccactgtccagaagggggagagccgtggggacgaggaacctcttctgcaactt

SEQ ID NO: 26414 - DNA, 246 bp, Glycine max
  Clone ID: TF_700746076H1
cggctcgagctttctctctgtgtctctctcgccgaggtcttgtggcggtggcgagcgctgccactccgcgcgaagagtgcgagtgcgtggcgaagtggcggacaggccgagcgctgcgaggagatggtggagttcgtggagaaggtctccgcctccgccgagagcgaggagctgaccgtggaggagcgtgacctcctctccgtcgcctgcgagggttgtgtttcggcgctcgccgcgcctcctggc

SEQ ID NO: 26415 - DNA, 402 bp, Glycine max
  Clone ID: TF_uC-gmroLIB3259P220d12a1
aatacgctgaccatagtcgcctcttttggatggacatgctaaagttgcccagcacatccacagtttttaacgaagatcacgaacgcccaaaacctcggtcacactgtgatgagcatcctacaccttcgcggtttgcaaacagtacataatggaaggtcaaagactaaagagcggtctatgagatggttaatggcgcgcccacccacctgtgggcgcggcatctctaatggcatgggcaccatcctcctgcctgtgggcaggtccagagggtgaggctatcaccgagcagttgcctgaccacagcgcaacccagggatgactcctctcacaaaggatccaatccagcaatgccctcaacaaaagcctgttttgccaggctgcaagcccgatcaggggaggcaa

SEQ ID NO: 26416 - DNA, 784 bp, Glycine max
  Clone ID: TF_GmC1228_4
ggctcgaggtctttttctacaaaatgaagggggactattaccggtacctcgcggagttcaagtccggtgatgagagaaaagaggctgctgatcattccatgaaggcgtatcagtcggcttccactactgcagaggctgagttaccacccacacatcccatccgtttgggcctggctttgaacttctctgtcttttattatgaaattttgaactctcctgaaagggcctgtcaccttgctaagcaggcatttgatgaagccatctctgagttggatactctgagcgaggagtcttacaaagacaggccaccctaattatgcagcttctgagggacaatctcaccctgtggacttctgacatccctgaagaaggagctgaggaacaaaaggtggattctgcccgagctgctggaggtgacgatgcataggtaggttatatacccatttagctgatggtatttgggttttactttttaccttaaagttacattttgcaatgaagtgaagcaggtattggccaaggaatttgtggagtgcatacgagaaggctagtctctctcttgatagtttaccattaggatgttgtaatagaacatggaattggtctctagaaaatcaccataaggctttgtgagccttttattctatgcgtgtgctttctgttactggagactggagttgagatttgcatggtgtttggctgtaatttagtgaatttcttcattttgactttctttctaagaggatgctaccttgcattcttttatcagtttacatagataata

SEQ ID NO: 26417 - DNA, 412 bp, Glycine max
  Clone ID: TF_9902456
ggcaagcgctaccactccacgcgaagagttcgtgtacatggcgaatctggcggagcaggccgagcgctacgacgagatggtggagttcatggagaaggtctccggcaacgccgagaactaggagctgaccgtggaggagcataaccagctctgcgtcacctacaagaacaggatcaggacatcgcgcgcctgctggcgcataatatcctgaatcgagcagaatgaggagagccagggcaacgaggaccacggtcccgtcatccgcagctaccgatcacagatcaaggccgagctctgacacatcgtggacggtatcctgtaactcattgaacgcacctagatcactacatccgctacgggacattagggtaatataccgtttatgaagggacactactacaggtcattgtca

SEQ ID NO: 26418 - DNA, 402 bp, Glycine max
  Clone ID: TF_LIB4200-007-Q1-N1-E11
aaaagggaaattccagggcccttttgaaaataggcggttcaaaacccccccccaaggggaggcccaactaaaatagcccagtccctccccatttcataacgaaaaacatgaatccccaaaatctcagtacccccgagattagcattcaaccccttctccctttgaaaaccttccccaggggaaggccaacccccaattaaaagggtggggtgtttaattttggccccccccccctttgggggcggcttttttaatttaatttgccccattatcctgcttgtaaaaggccccaagggtaagggtatcacaaaaaaattgcatgaccaaagggctatccttggatgattcccctcccaacggatccaattcaacaatagcctcataaaaagcctgttttgcaag

SEQ ID NO: 26419 - DNA, 511 bp, Glycine max
  Clone ID: TF_11274056
cttttctgtattttactacgaaatccttaattctccggatcgtgcctgcaaccttgcaaaacaggttagattcagagatagtgaatatcatggcctttgttttgctctgtttatttgtgttttactatattttgagcaaagttttggatgtttaacgtgaaaagaggaaggaattcggccatatacagtgaaatttgcagctattgttgtccattgatttgaataactttatggctactgcatgttgcatttcgttaatgtcgaagcaataatgatgttactggttggattctagcggctaaatatgaatttgtaatatggtttgtacagttgttcctcctttacctgtagcttaaatgagttgtcaaatatttattgggtttcacagtaggtgtttggaattctaatagttatagctagcaaacaataatcaatcaatatttgacttcttaatctagatactggtatagatgggaatctgaccttgaggaatacccgttgaataaattct

SEQ ID NO: 26420 - DNA, 296 bp, Glycine max
  Clone ID: TF_GmC566258_1
ctcgagctcgcgccctccccttcccgccgcctcactgatgtcgtcgctgcctctcgttcgtcgccctgtgctctccactctgcaaccatgtcgcgtcgtagtaactacgacagatacggcccagcgtttactcacccactatctcgccccagtcatgccgagacgtacgacgaaatggttcagtgtatgaagatagtagcacaacttgatcttggtctgactgtggatggcaggttacttctctcagtgggatacgttactgtgattggttcacgacgggcctcttggcgcgtaat

SEQ ID NO: 26421 - DNA, 644 bp, Glycine max
  Clone ID: TF_uC-gmflLIB3275P131g01b1
attagcttggactgctttaaatggtgcaactacagcacatgcacatcataagcacattatttgatcttaattactcgtctgtatttgacaggatatgacactttttgtgcggttaataagatcaaataacatgctaatttctagaaagcacaacacgttacaaggcactttactatatggttgtgaagagccataatatggaggcctaatgtgtttcatggactaaatacagcttctgaccatccttgatcatgtccacatcagtaactttaccagcatcttctgataaaatacaagcatcgccagaaaattctatttgttctgccgctgatttgattagctcttgtatggagtgtggaatccataatacaattccatgtcttctattatctttcggatcccacgggtggtaagggaacactgtgcacttctttggatgcattttgtctgtatattcttgggatgggaattctgacagttgagcagattttgcatcttccagaagcttgatcaggttcttatttccacacatccgagcttcatcaagcggcgtatttccccatctgtctttggtaaaaacactagctcctccttctaatagcaactttgccatgaaatataaaccttcagctgcagcaatgtga

SEQ ID NO: 26422 - DNA, 1521 bp, Glycine max
  Clone ID: TF_GmC27269_1
cacgagggcgcggagacgaatgaaggggccccattacgcgatcgcccacgcgtccgcccacgcgtccgtacggctgcgagaagacgacagaaggggggagaaatgaattgatcccaggggctctgtgatttgatcagcagatagagattgaacatttgcagcgaaaagggaaagaaagagaaaatcatgtcaacagcagaagctcctccttctttccaagaagcagcgcgatgcgttgtctgcaattgcagtttcaacactttcagaagaaggcaccactgtcgatcctgtgggagaacattgtgtaatgaacattcatcaaatcaaatggctttaccacaatttggcctttactcaaatgtccgagtatgtgctgattgtttcaacaacttgcggtctgggaaggatgaaccacagacttcttcagacggagtaaacagtgtgacagatacaatttctaaattagatatcaacgcaaatgttgattcaaaatccatactaactgcagagactaagcttttgtcaggcattaaagagtgtaaatgtggaatgccactttgcatttgtgaagctccaaccccttcctctgatgcattcccccagcagaaacccaatccagttattgcagctccatcaaatcctaaacctaagaagacagatactgttccgaaaattagaagctccatttcaactagtaaatttagttctatgtttaacgttggtcatgtaactaatggtacctcagacagaccccagattgattatgaagttactggagagggtttaagagaagcaataaaaaatagtgacgttgctgctgttaagaaacttcttaatgagggtgtggatgcaaattacagggacaagcaaggactgtctttattacatttggctgcagtcttcaatcaaactgatatagttttcattcttatggattcgggggcatagcctggagtacaacaatggaccaaggagaaacacctatagattgtgtttatctgtcattgcaatacaaaatgcgaaagaagatggaagaaggtggaacagtggaccaaagcatttgaacaatctattacttttatctgtgttctttttatgcagtgcccccaatactaccactgtctaaaggtcctccgttaccagaacaaaaatttccggcttctgtataattgtgacagagatggagttcaattcatctttcgaatggcagactaagtatgcagacctttattagacatatctttgtcagccacgcaacttaggcagtattactattcagtttgtaaatttctttggtctatgacataataagagcatttttaagtatgcatctatgtattgttgagttgagcagctgtcttactttcttccaccacatgcagtcataaatgtggaattctaaattaaaaagggtttaagaaaaagaaaaaatgatgtggtataaaaatcccgtttcatgtcccggtcatttttttctctcttctgttgcaagcaatgagtcatagttgactatgatactct

SEQ ID NO: 26423 - DNA, 464 bp, Glycine max
  Clone ID: TF_GmC133757_1
gaaagcacaggagtgagttatgtcagactcaggtgcagttaccttgccagctgtagatgacattcccaagcatgggaattgtagcgaactgggtattgttgtggctgaagctgagcatctacagtcactggaacccgaaagttctttttttggagctagacagaacgcataaaaggcaaatatatatagcagcaagttcaggaaattggagtgaggctttatcctatttcaaaattcatcctcattggtggcgaattccattgacttctcgtggagttacagctctacacgttgcagttagcatgagaaaaactagttttgtggaaaagttggtggatcgtgtggatcgtatgaacatgcaagatttggaaattcgcatggcagatgggaacacagccttttgtttggctgcgataacaggaaatgtgaaatgtgctaaaattctgttgggcaagaatccgggg

SEQ ID NO: 26424 - DNA, 455 bp, Glycine max
  Clone ID: TF_uC-gmropic020c12b1
cccatgcgttcggaaactttagagaaagtgaatagtgatatggaggcaaagggtgtgcggttcttagcgtatcaatcaatattttcgagcgttggatctggggacttcgatggggtgaagaaactggtggaggaagcgaagaaggaagaagggtcatcgctctctgatgtgatgtctcttcagaacgatgctggagagactgcgctatacatcgctgcagagaataatctgcaagagatgttcagcttcttgctcagcatctgtcactttgaggtcgacaagattcgctccaaggctgatatgaacgcctttcatgtggctgccaagcgtggcaatctagatattgtgagggagcttttgaatatttggcctgaggtctgcaagttatgtgacttctcaaacaccagtcctctatattctgctgcaactcaagatcacttggatgtggtggatgc

SEQ ID NO: 26425 - DNA, 1472 bp, Glycine max
  Clone ID: TF_GmC4222_2
ggctcgaggtcggactaggaaagttttcaaagccaagcaaatacgagctttacccaattttcttgctgttgaattttccactgttcaatcttcaaaatcacatttttctcgatcttcaccttctgggttgctttttttttttcttcttcttcttcttcttcttttgttttcgctatggaatcgaaaaaccctgcgaggtttacgctggggaagcagtcgtcgcttgccccagaacgccataacaaagaagcagagctccaaaaagatggggaagctgttgatcagggtgtgaggttgatgtattcggcattcgaaggcgatgtggatggaattcgcgaggcgttggagtctggtgtgagtgtgaattacaaggatattgataatcgcactgctcttcatgttgcggcgtgtgagggcttcactgatgttgttgatttattgcgacagaaggggacggaatatcttcccaagggagatcttcgtgatttcttgaaaagaaaaggagctttgaaaccatcgacagctgtgagatttgcacttgatattgctaggggagtgggttatttgcatgaaaataagccatcacccattattcaccgtgatcttgagccttctaatatattgcgggatgattctgggcacctaaaagttgcagactttggggttagcaagttgctggcagttaaagaagacaagcctctaacttgccacgatacttcctgccgctatgtggctcctgaagttttcagacaagaatatgacactaaagtggatgtattttcatttgcactaattctgcaagagatgattgaaggctgccctcctttttctgcaaagcaagacgatgaagttcctaaggtatatgctgcaaaagagcgtccacctttccaagcaccagccaagcgttactcccatggaattcgagaattgattgaagagtgctggaatgagaatccagcaaagcggccaacatttaggcaaataataacaaagctggagtccatctacaacacaattggtcacaaaagacattggaaggttaggccattgaaatgcttccaaaatctggaggccttgttgaagagagatcattcaaatggaagtagtcgtggcggttcatctcgctccacatcaagcagaatatgaaggagaacattggtcttatcctgtaactaaaatattggtataaagataaaagatagcaaccaaatttgacttcttgagttggagctttgcaacgttttctcgtgtgtattcattcacaggttcatggttgttttcgtctttcaagattctttatactcgatgatttatttccaattacatttatgtctggtgacagaattagtatttgtatgtaacatatacacgtattctaaggaatttgctccctgtcatgtacattattatgtaacaagacatttttgttgggtatatatcatgcaatagatttttagctgaagaacttcacc

SEQ ID NO: 26426 - DNA, 710 bp, Glycine max
  unsure (1)..(710): unsure at all n locations
  Clone ID: TF_LIB4164-057-R1-N1-B9
ttgatgcctgcgttaatttagagatgctataagctcattcggtccaaaagtgtccaacattattatatgaatgcaacaattttcaaaacatgtagtaaatatcaatgaggaagttttcaaaacacatcaccatatattacaatttacaagcaaaactgacaaggatttgcaaataataataataataataataataataataataataataaattaatgaatgaataaatgaacatactagtgcattgtagcacatgcatgatacaagatccacaatttaattatttgaattgaccataaacttgtctaggaaataaaaaaatggaaaaagaaaaggccaagatccataataaaaatcaagatagaagagaagaggacccttatgctaatccgaagaagaagaaagaaaaaatgaattgaatcaatttaaaacaagttttccaaatttcatttatattattatgttaatagagcaatgaaattgaaacctttacattagctccggcttgaagaagcttctccacacaggcgatgttcccatgcattgttgccaacataagcggagtctaaagcattcccgttttttctttcttccatattaagtgcaagaagtataaacccatatggaaacaaacattgaaaatatgtttgcaaattaataatgaacatcaattntaaaaagccaaaatatgtttgcaaatatgggagct

SEQ ID NO: 26427 - DNA, 749 bp, Glycine max
  Clone ID: TF_GmC238964_1
cggaattaccggcccgacccacgcgtccgtttctctttgtgtgtgggttttttctttatcctcagtttgatcgcaatttgcaaatagaaatggcgaaatcgagcaaagatccgacaacgtcgtatccggcgataaagtcagagcagtacttacacagccccgttcactacgcggtggcgattcgcgaccacacaaagctttccagaatcatttcttcgcttccccgagttcccgacccggcccgagtcatcaccgagtccgactcgctcactcaggagcgagtcgccgagaaaatctctgccgtgctcgaccgccgcgacgtcccattccgggagacgcctctccacctcgctgtccgcctcaacgacgtctccgccgcgcgggccatcgcctccgccggcgccgacatctccctccacaacgccgccggctggaacccgctccaggaggcgctctgccggcgcgcctccgaaatcgcgcaggtgctcgtccggctccaccaccgcgccgcctgggcgaagtggcgccgccgcctgcctcgcctcgtggcggctctccgccgcatgcgtgatttctacatggagatctcgtttcactttgagagctccgtgattcccttcgtcggaaaaatcgctccctccgacacctacaaaatctggaagagcgacgggaacctccgcgccgacaccaccctcgccggcttcgacggcctcaaaatccaccgcgccgaccagagtttcctcttcctc

SEQ ID NO: 26428 - DNA, 603 bp, Glycine max
  Clone ID: TF_uC-gmflLIB3275P093b11b1
aagggagtctccgcttatggtgcaacgacgacgcggtgttgagaagattgtgcaatggggtaggcgatcatggatcataaccaccatcatcgtcatcacaatcacaatcatgctcttcacaccacccctctctccgagcccaccacccccaccacccctcgccccaccctcttcctctccacctccggcaaggccctcctcctctccaactccaacaagcgcctcgacacccccaggaagaaatatgtcaagcaggtcaccggccgccacaacgacaccgagctccacctcgcctcgcagcgcggcgacgtggactctgtccgccacgtcctcgccgagatcgactccatcatgatggggagcttggagttcgatgcggagttggcggacatcaggtccgccatcttcaacgaggtgaatgatctgggagaaaccgccctcttcaccgtcgcggaaaagggccacctcgacgtcgtccgggagctcctcccttacaccaccgatgatgcgctttcctccaaaaaccggtccgggtttgacaccttgcacatcgccgctagcaatggtcatcttgccattgtgcaggcgctactaaaccatgac

SEQ ID NO: 26429 - DNA, 774 bp, Glycine max
  unsure (1)..(774): unsure at all n locations
  Clone ID: TF_GmC60497_1
gactctcttgtaagcgagtgaacataattaccaagtgcacatatagatatatgggcatgatgagaatgagtggacttacatggtcagtgctaaagagtgagctgtgaaatagaggggagagaaagagagagaatggaacaaattccattgtttaatgagaaaatgaaattggctcagaaagcagccatggctaaacgatgggaagacttcaagaaaataatgaaggacgaccaggagaacttgctcaagcagtttgatctgtttgagaacagtgccatccatgttgcaactcgctctaacagcccacgactcctcagagaattgatagagatgttaccaaaagaagaaaggtggcaagctttgtgcaaggaaaatcgcgaagggaacacggttttacacgaggttgtgttttgtaagaagaagaaaatggctgatgttgtgtttgagattgaagatgagttgttattgcaacaacaatcatcatcactagaggaaaagagaacattgctagatatgagaaaccaccgaggtgaaacccctttgttcatggctgcaatgcatggaaagctgaagatgctcaagcatatggccaaccgtacaggcacacgaaatatggaagattttcgaaaacatttgcatcgatctgacaaatattctgctcttcatgccagtgtcatggggcaacattntgatgttgcaatttggctagtaagaatgaatagagaacttgctatgganaaggatgagaaggaattaacttgtcttcaattactt

SEQ ID NO: 26430 - DNA, 694 bp, Glycine max
  Clone ID: TF_GmC1132_2
aaagcaaggactaaaacgttgactccaaagatccccaatgatacaactgcaatccaaattgccatggcagaaaatcatgtggacatggttcatttgcttgtcatgaatggtgcagatgtctctgatgtgcataaccatgaattttgttcatccaccttagatgaaatgctgcagaagcgtgaaattgggcatctaattaatgtaactgaggtcatgcgcagtggagttgtattaaaggggaaacatcaagaacaggagctcaatggaggaagatctaatggactaaagtttccaagggtaagcatatatagaggtcaccctgtagttagaagagaaaaaggttcggtggaagctgggaagctaataaggttgcctgattcattagaggaactcaaaactattgcaggtgaaaaatttgggtttgatgcaaaagatgcaatggtgacaaatgaagaaggagcagaaatagattccattgatgtgatcagagataatgacaaacttttttttgttgaataatctgagatgcgaaaatgtcaagtgtaaatatataatctcgcacaacagaattacttacaagtttcttttgtgttagtaattttgtcttcttcctgtagccataaagaagtggcttgattggaaacatttttcagttgacttttggtttataattcatagttttttacttccaata

SEQ ID NO: 26431 - DNA, 1221 bp, Glycine max
  Clone ID: TF_GmC252_1
caagcgtccggaacatttatgccggctctcggcaccgtgttcaagcgattagggtttcctcccatcgaacttgataaccctcacgtgcccctccctcgccgccacgtggatcgccgtcctcccctcggagtacaccgcatccacttccaactcctcgccgtcgttgccgtagcgctccaactgaaacttcatcgtgtcgattcggtccattgccgcggcctcgtgaagaaccgattcgtcgattttgcagccggaggcttccagaagcttcaccgcttggaggctcccaaccctaattgcgagcggcatgagggattccgccgtcgcgcagcaaatccgcgacgacgtcggcgctgccgcattccatggcgacgtgggggccgacgagggagacgtgggggccgggtttggagaatagttggcggaggtgttcgacggtggcctttcgggtggggagcatggtggctcggtcggttatggcgtcgggagggtcggagagagggtgttgatcagagggctgagagagttgtagtgtgtaagaaacagaagagagtgggggaattgtggagaagggtttgtggtggttaaagacactgccactgacatggtgtgcatgaggctggtgagcttgaaggaggagctgcacttttggcccttttggaatatcaactcaacttcctttgtttctgctttcactaacctgtccatgatcaacctgattgattctttgattattgattgattgattctgactttgaactttaaagggtgcttgattacttgaaggaggatgattgattgattctttggctgtttgtttgtttagtttatgttttttttttaatttattagtagacttgtgtgattaattaatactatgtgtagcatgcttgttggttggggtgtgactgtgacagggtaggtgggagacattgaccatgactcctccttgaaagaatggagaaggatatgaaacagtcgcttttgaatttgatgaagcattttcagcgagactcgagactcaagaatgctattactactagtcaattgcacaggactcggacaaggtaaagaaggtgtaagagttgccttattccaaaaggatttgtttttgctgactgattttctagttagacctaccattctggttgcaagtttcattcactttttactgaccaattcaatttcaacatataaatgtgaaggttggaaatgcttttc

SEQ ID NO: 26432 - DNA, 471 bp, Glycine max
  Clone ID: TF_GmC77836_1
atcgattccaacaaagtcttctaaaaatattagtgttgttgggaaccaaggtgtccacaacacaactattcacaaagccacactcacaatcaaagccaagaagtactctcaacataatgagttctgacgcgttgaaagttgctgccgaagggaataacatagacggtctctaccaagagattcagcaggatccacgtattttggagtccatagattcaatcccatttgttgaaactcctttgcatgttgctgcaactcttggtcattttgagtttgctactgagatcatgacactgaaaccttcatttgctcagaaactaaatccagaaggcttcactcccatccaccttgctttacaatgcaaccatgacgaaatggtccttcgccttgtagaaatgaacaaagatctcgtccgagtcaaagggagggaaggccttactcccctacatttggccagttaagaaattaaac

SEQ ID NO: 26433 - DNA, 255 bp, Glycine max
  Clone ID: TF_GmC673008_1
tagcaaggcgatgatgacattggttgacgagctggagacattggttgacgagctggatgcattggacttggggtcgtcggtggtgccggtgaagaaggtcccatacggcgacgtgttcgaggcgtcccgcgctggcgacgtcgagcggctccggtaccttctggaggcaggcgtgaacgtgaacgctcgtgaccagtgggactccgttgccctctactacgcctgcctcgccggccacctcgacgccgcccgcac

SEQ ID NO: 26434 - DNA, 3583 bp, Glycine max
  Clone ID: TF_GmC84_2
ggctcgagtttcatttggcatttacatttgcatttgatttccgcgttcgcaagttgtaatcaaaatcaagccatagcgaccgaggaaggcggtgatcggcaatgagcagcggcggcggaggcgaaggagaaggagaaggcgcgtgtgagtcgaacgtcgctgattctgtggcacgcgcaccaaaacgacgccgcggcggtgcggaagcttctggaggaggatccgtccctggtgaaggcgagggattacgatagccgcacgccgctgcacgtgaagtcactccacggatgggtcgaagtgtcgaagtgcttgatcgaattcgatgctgacgtcaacgctcaggatcgttggaaaaacactcctctggctgatgcagaaagagctaaaagaactgccatgattgagcttttgaagtcacatggtggcttgtcgtatctggtcaggacttcaggcatgaggttaatttactagtgaagctttcgacaccctaatgtcgttcaatttcttggagctgttactgacaagaagccccttatgttaattactgagtatctgagaggaggtgatctttataagtacctcaaggacaaaggtgcacttagtccttcaacagccatcaactttggcttggatattgctagagggatggcctatcttcacaatgaaccaaatgttatcattcattgagacctaaagccaaggaatgttcttttagtcctctggtgctgaccatttaaaagttggtgaatttggacttagtaagctcattaaggtccaaagtgctcatgacgggtgaaactggaagctactgccacatggctcctgaagttttgaaataccggagatatgataagaaggttgatgtgttctcctttgcaatgagtgagatgcttgaaggtgaacccccgttttcaatttaagaaccttatgatggagccaaatatgtggcagaaggacaaaggccttcttttagggcaaagggttatatcctgaactgcaagactgttgttgttgttggcggctggggttagtctctgtggaggtttgggtgttttttgaggcagagcttattctcattttgctccaatggagatgcaggaccaaatagaaagcacaagatcaaccatatttggctcagctagtaacatccattccaatgctgaaaagcaggccgaaaatgttgctcccaaggtgaggaaaccatataccattactaaacaaagggagaagtggacagaggaagagcatcaaaagttccttgaagctttgaaattgtatggtcgtggctggcgccaaattgaagagcatataggtaccaaaactgctgttcagattcgaagccatgctcaaaagtttttctctaaggttgtgagggaatctgaggtcagtgatgagggttctatacaaccaattaacatacctcctcctcggcctaagaggaaacccctgcatccatatccccgtaaatcagttaattctttccgtccgcccacgcgtccaatgaaacagaaatatctccatctacaaacctgttagttgcagagaaagacaccccatctccaacctcggtgctatctacggttggttcggaagcatttgggtctcaattttcagagcagactaacagatgcctttcaccaaactcttgcaccactgatattcactcagtcagcttatcacctgctgaaaaggaaaatgattgcatgacatccaaagcatccgaggaggaagagaaagcatcaccagcttcacttcctttatccactgtttctaacccaaacatgtgcatgaagcctgagtttagttccaaggacactttcatagaagatgctgccaatatgccacaaaccactagtattaagctttttggaagaacggtctctatggtaggtaatcagaagtcactgaacatagatgatgatgatggtaagccaataactgtgaagtctgatgaagtagatgatgttgagaatgagaagcttggccaatcaggagaatccaagcaagtagatacacaattatcactcggcgtggttagtggtaactggcctataacacccgatgctgatggagctaatgtgaccagcatagagcccccaaaggagaaccaatgcttcagtgaatctgcacctgatgcattttttccgcagtggagtttgtcccaaggccttccacctttctacctgaggccatgcaatcaggtcctaaatcccttgcctcttaggccctcctctttgaaagtaagaacaagagaggaggaaagttgttgcactggttccaacactgaatcagtctgtgacatggaaaaccaaggcaagaactcagatgctgttgattctaagtttcaaaaatatcacgaggaaggagctgcaccccagaagaagcctgcaaggggatttgtaccatataaaagatgtttagctgaaagagatggacattcttttattgttgccatggaagagagggaggggcaacgagcacgtgtgtgctcatagccttacattctatttttacatgattcataatcatggtgttaatcagagaaaaaactgagaaataaggacctgatttaggtagttgtgatctaattgtctaattgacaagcatctgatttccaattcttttttcccatattttctttctttctcctgaaaacacttcatgtccaataattcaagcgggggcttgtggcattgtttgttctggctcgtatcatgttacagttactttaaccaaatagagacatatagcagcaagtctgtcattactgttttatttctactcttggcttctgtgtgtctttttagttgtatgattgcatcagtgatgggggtgttctagggaagcgaggacaagcacagcatgtcactagacatcatatatgtcataacaattggctctggaaaacaaatgatgtcaatgaattaaagcttaaagagtgccatgtggtgatgactaccttaccaatttgtatatctggattttctttctgtatcatatttttaataatagattttaaacattgtttcttcaaaaaggttatatccctgaactgcgagagttaactgagcagtgttgggatgctgacatgaagcaaagaccttcattcatagagatcattaaacaccttgaaaagatcaaggaaaatttgccttcagatcatcactggcacttgttcacttcatgatttttaggagcattggtgccgtgaaattcagatgattatctgctattaccattccagcgggttgccttatctactgtcgcgggtttttgaacagagccgacttggaaaacctagctaaggtcatgagcattgctttgaactgttagattcaaatgagcataacaggtttatgctgattgcctttatctggtgtttacattcaattactgttttttgtctcattaaaattcttggcgaattctattcagctatttaagtgagcagatactagttgttgcttgagtgtaatatgtagggtacaaaacccattgaggaaaaatataacacatcatgcaatctagtgtttaatattttatcttatgattaaaaattaatagcggttttcatttcttccaa

SEQ ID NO: 26435 - DNA, 1078 bp, Glycine max
  Clone ID: TF_GmC39086_1
cggtccggattcccgcttcgacccacgcgtccggggcgcgggatgttggggaagaccgagttctgaccgattccttttgagtggcgttgtcatttgtcagcattaatggtcccatccatcctcacccttggatctcatctttcccattccattctcaccgtccgatcttcctctttctcttccatttcaatttcaattcgcgagtgcgcgagtgggtttgaacgaagaaccctaaccatctccgcagcgcaagctgctcattgcaaccctccaaactatcaactgggatcgtaaccgctctctcgccctcgccagatttgattggatcggcttcctgcattcttggactcgggaatttggaccaaaaacagttccccaaatcttgctttttgtcttgttcttgtttctaagtcgttaatgtcagtgcagcgaagtaatctctggcaagttgattgtggcaggggagaggagggttcaaaattgggcagcatataaacttggattacccattttggtggttttccctttgtcattggaaccatggaaattgttgatttgagtgtctaaggtaagtccgaggtatgagtgcagcctatgctgtatctgctttgtaactcaagatttacggaccatggaagccaatggaatcgctcatgatagtagtagcctaggagcggggagaagggataagagagaggtgggagacaaaatggtggaagatttaagtaaatatgcacacagccctgctcacttggcagttgccaggcgcgaccatgcttccctaaggcgcattgtttccgccctacctaggcttgctaaggctggtgaagtccacacagaagcagaatctattgctgctgaacttcaagctgatgaggtatctacttttattgatcggcgtgacgttcctggcagggagactcctcttcaccttgctgtgcgtctccgggatccagtctctgctgagattttgatggctgctggtgcggattggagtctgcagaatgaacatggttggagtgctctccaagaagcagtgtgcaccagagaggaagcgattgccatgattattgcacgg

SEQ ID NO: 26436 - DNA, 1104 bp, Glycine max
  Clone ID: TF_GmC124507_1
caaaaacgtgttacagattgttgaacgagcgtccgggcagctacaaacaatctcagccagtggaatagttctggaaacactcacaagagacaactacgacaactggagtgctcttgtgaggaactatctaataggtcaaggtctttgggaagctgtcaattctgtttctgaaattagtgtgcaacccaaagaggtttctgattcttggaagaagaacaatgccaaggctttgcatataattcagctagcatgtgggatggagattcggctcgagattagaggcgttgaaacagccaaagaagcttggaacagattgggcgcgttatatagctcacaattaaaagcggatccagatattgagcaaggtgtggtggatgatagtctccatgaatataaaccgctgcacagatatgtggagagtggtgattggaaaaatgcaaaatcaatgatcaataaagatgtcaaggccatattttccacctcctctacggggaggaccgttcttcacgttgcagtgattgctgggtacgaaaacattgtgaggaatttggtgaagatagggaaagagaaactagttaaaatgcaagacaactatgattacactgcccttgctctcgctgctgaatataccggaaacgtgaacatggcaaagtgcatggtggatcagaagaagggagggaaggatctgctactgataaagacaaaaggtggtgaaatccctgttcttctttctgctgctaagggctacaaagacatgactcgctatctttactctcagactcagcttgaagcgttcatcgacaaaaattcccacattggggttttgcttcttgcacgatgcatcaccgctgaaatatttgatgtggctttgagtttaatccatcgcattccaaagctgcctctaacccatgaatccgatggccaacggcctttatacgcattggcacacatgccttgtgcattccctagtggcagtggatttggacgtctccaacaactcctttatgacagaaggttctgtgatatggctttgaattttccgcctgtaaagctcttgggtcgattgctcatattcctttatctgtgatttcaaaattatatact

SEQ ID NO: 26437 - DNA, 453 bp, Glycine max
  Clone ID: TF_22541747
agagatctagctctactcactaacgccaagggagaaacaccccttcacatcgctgcagtatggacactccaatatcacaaacttattggttgaacatgtcaaagcttttccagcagcaaacaagtttatgagggctagaaatgatgagaaggacactgcattacatgaggctgtgcgcaatcatcacattgaagtagtgaagaccttgttagaaatggatcctgattactcctatgagactccactttatctgccttcagaaagacaatatcagcaagtggtggctcagatatcaaacaaagtgaaagcaccggcatatgttggccccaataatcagtagcattcatggtatcaaacactatagcaatgtttctggcagcttctatacatattgatcgcactagcaacaatgattgtcgcattcgctacagccacgaatgccgtattggatct

SEQ ID NO: 26438 - DNA, 707 bp, Glycine max
  unsure (1)..(707): unsure at all n locations
  Clone ID: TF_GmC88220_1
cggaattcccggctcgcccacgcgtccgaggaaatggaaaagaagaagagaaggtcctctctagctcctcttttatcgcgatcgtatttgttttgtttttctctctctgtcaaacagtttccctctccgagtcccagtttttctcggtgtgcccaaacacgccctttgtctgaagctcctttcagctgagatctaccctctctttctctcatggcttttgcttttgcactgaacaagaactgttaaaactactgcaaatgaaagcatttggagaggttaaagccagtgctgtatccaactctattttctattctgataagcgcatctcaacccaaaagcctcatgatgaacaacttgaccattgagactgaggattcttttgcaagcttgcttgagcttgcagctaataacgatgttgaaggtttcaagcgaatgattgagagggatccttcctgtgtagatgaggtaggactatggtacagtcgtcaaaagggatctaggcggatggtcaatgagctcagaaccccattgatggttgctgctacttatggtagcattgatattctggatctgattctctcactttctggctgtgatattaataaccctgtggcctttgacaagagcactgcccttcattgtgctgcttcgggtgggtctgaaaatgtngtggatgttgntatattgcttctaccagcgggggctga

SEQ ID NO: 26439 - DNA, 2415 bp, Glycine max
  Clone ID: TF_GmC1245_1
ggcgggaattgatgctacaaagtatggtcatagtcctgtgcacaaggccttagttttgaaggatcatggtgaactcaggaggatacttgctggcctcccacggcttcgtaacagcggccgagtttcgcactgaagcggtttcgattttagaggaagagaaggctgatgtcatcgcgtctgagattaaccagcgtgatgtgcctaaccatgatacccctcttcacttggctgtgaaattcggggatgaagtggccaccgagttgcttaaggttgctggggcaaatgggagtttgcagaatgagcagagttggagtgttcatcaggaagcttgttgcatcatcgaagaaggtatgggtaaccaattaaggaatcattaccaacctctaagataggcaaaatttttcggaagggtgactggattggtgattattacacgtaagaagttggccttatacttggaaagtatttggctatttaaaaaacttgggatatttgtcatcacatggatctctcctttatctatcaagtaaatttgaaagagggattcaactaggagtgcagacatgaccttggctggtttttgatggaatcaaaagtcagatttcagttcatgccattcttttccttggtgatggttcggaagatgggaaagtcccacctgggtcactctgcatgatctcacacaaggaaaaggaggtactcaatgctctagacgatgctggctttccagcaaatgatgaggaggttcagcaagaagtggttgcaatgtctaaaacaaatatatttaggcccgggattgatgttacacaggcagttctgttgcctcagttgacttggaggcgacaggagaaaacagaaatggtagggccttggaaagctaaggtctatgatatgcacaatgtagttgtgagcataaaatctagaggagttcctggagccatgacagatgatgaactcttttcttcttgcaatgaaaatgaaacagagagtgaagagctcaatgatattttgactgaggatgaaagaaggcaattggaagatgcactaaggttggagtcgacagacttgaacaatgagagtgatgaggtgatcattgggcatcgtcacagctgttatgaagaaagagaaattcctattgaagatggaaattgtaacaaaagtggagaaaataagcaagaaaagaaaggatggtttggtggatggaggaaaaaggattctaaacctgaagcatcaaagaagattgctccaccgagaagttctctctgcgtagaagaaaaggtgagtgatttattgggggattctccttcaagaaatcagagtaagccaggaagacattctgttgagatagctgtgaagggtgatgagtcacggaggagaaaagatgccaaagcttcttctgcaaattctgatagcagaagtcgtcacaaggatggaaatcgtgaaaatgaatataagaaagggttgagacctattctttggctttccccaaactttccactaaaaactgaagaactcttgccattgcttgacattgttgcaaacaaagttaaagcaattcgacgtttaagagaactccttacaacgaaacttccaatgggaacttttcctgttaaggttgccatccctgtggttcccaccatcagagtattggttacttttacaaagtttgaagaactagagccagtagacgaatttgcaacaccaccatcaagcccatctgcagctgagcaagagagccctgcagtgcctcacttctcggcatcgtcttggtttcaatggataaaggctccttatcgctctagtacatctgctccaggatccagcagtaggatagaaaatattgaagacccttttgcaattccatctgactatacttgggttactgctgaagcaaagaaaaagaagatgcaagagaagaacaagtcaaagaaaggaaaaagtcataactgattatgccacttcataagtaagctccacacttggaaggactttggttgtttagagaacttgggccatttgtctggaaattgaattcgaagctatctttcatgtaggagtgagtgagtgattctccaaggagttgtgcgttgaccatttggggcttgtggcataaggaaaagacacattgtgattcttgcaataattgctggagttttcaactttgcaccaaagaatttgttgattgtgtttcaatatatgtggaaaaccattatctcttgatagttgcaatcacagtgagcaacttttatattcatgattgcagtttaaattcacctatgtttggttatataattctttcccatgattttattcatgtaaataaattgaagaatttgtttactagctttgggggctttatcatagtacgttctattatattttcagtaatgatattgatgaaatttggtatcgttt

SEQ ID NO: 26440 - DNA, 2790 bp, Glycine max
  Clone ID: TF_GmC335_1
aacgacgatcgagtttgagtcggaatgtgattgggaaacaaaaaaggcgagtgtttaaaatcaatcaaagactaagttgaagacttgaagccatgagatgaatcacttatctcttgacactgaagattctcttgcaagcttgctgctggagcttgcagccaacaacgatgtttcgggtttcaaaagattaatcgagtgtgaaccttcctccatagacgaggttgggttgtggtatggccgccacaaagagtcaaagaagatggtcaacgagcaaagaactcctttgatggttgctgccacctacggtagcattgatgtcatgacgttgattctttctctatcagaagctgatgtgaaccgatcatctagccaggacaaaagcacttgacttcactgtgcagcttcaggtgggtctgatatcgtggttgatgctgcgtaattgcgactaaccagatgccgttataggaatacttgcaatcacaatgttcaatgttccaggagcagcagctggatcctccagtggcggattaatgtggagcagagaatggaagtgcttctttgaacctgctattggaggcgcctggcggtgataaatgccacatgatcatcgtgtgccgcagcagaattgaaattggtttctgctgaacctgacgaaatgaaaaaaaaacctgtctcagtgaacataaataaaaaatcgatgatgaaattctctgatggaagatggctacaataaccaaagaacgtacgcagtactaagataaataaccctcacggaagattcatattcaggtttagtgttacaaaagtaacttagcagggtaagaaaaccagaaggtggcgttaacagaattaatgccatcgtaaatttcttaagcgggctttcacgagaggggatatgtgtgagtatgctcatggggtttttgagtgctggctgcaccctgcacaatatagaacccggctttgcaaggatgggactaattgtgcaagaagagtttgcttctttgcccacaccaatgaagagcttagaccgctctatgtttcaaccggttctgctgttccttctccccgttccagtgcctcctctgctatggattttgttgcagccatctctccttcctctatgtcggtcatgtctccctcgccgttcactccgcccatgtcgccttccagtgcttcaattgcttggcctcagcctaacatcccagcattgcatcttccaggaagtaattttcattccagtagattgagatcttcactcaatgctagagatttttctgtggatgattttgatttgttattacctgattatgatcatcatcatcatcagcagcagcagcaacagttccttaatgagttatcatgcctatctccacatgctatgaattgtaataccatgaaccgctctggtcgaatgaaacccttgactccttcaaatcttgatgatctgttttcagctgagagttcttctcctagatatgctgatccagcattggcttcagctgtattttctccaactcacaaatcagctgtcttcaatcaatttcagcaccagcaaagcatgttggcacccctgaatactaattttgcctctaaaaattttgagcatcctttattgcaggcctcgttgggaatgtctccgcgaaatgtggaacctatttctccaatgggttctaggatttctatgctagctcagcgcgagaagcaacaatttcgcagcttaagcttccgagaactcggctccaactctgctgctgcctctgccgattcttggtcaaaatggggatcacctaatgttaaattggattggccagttggtgctggtgaagttggtaagctaagaaggtcatcatcatttgagcttgggaacaatggtgaggagcctgatttatcttgggtgcagtcacttgttaaggaatcaccagctgaagttaaagataaattggcaaccactgtctcatatgttgcagcagcagctgctggatcctccagtgagggatcaaacattagcacgcaaatggagtctgttgttgatcatgctgtactgggagcatggcttgaacagatgcagcttgatcatcttgtggctcagcaaaactgaaatgagtttctgctgaccctgaggtagttaacaacagaaatgtttcagtaaataataatcatatatattcgtttatgaattttgttgatggaagaaggttacagtaactaagaaaggaagcagtactaagaaaaagaaccacatcactgagcaaaattcattttgaggtttagtgttgcaaaagtaacttagaagggtcaggaaaccactgggtggcgttcacagaattaatgccagtgaagggttttttggctgcctatctcttcaaattttaggtccacattcctgtcaatttttccttccttgaggagcaaatgttgtatcacaatgaagtcctattcctaagtttgatctatcttttgattttgtttctttatattttggggtagaaaccaaagttacagaagggtcattggagtaattccttgtgtctctattttgttccaattttggggatgaaaacacaggttgctggatagtatatggtatttcttttgtaatctggaatcaataattgtcgatgccagggagtgggtaaattaggaatatttgaacattgatcctttgggcatgtaacattcaattgaagtttattgctatattgtttttaaaacctttgtctctattctaaatatcgcagcgttagtagtttctatttgcattgataaataactaaattgtatcatcaaaaa

SEQ ID NO: 26441 - DNA, 409 bp, Glycine max
  Clone ID: TF_LIB3242-347-Q1-J1-H4
gtgcattggcatcacaactcactatggtttggtttgtggactgttttatctaaaaagaagcaaatgggtaatccagtaaaaccaagtactgccgaccgtcttcacatttccccaatttcctactatctcatcccctaataacttaattttggcttcaaaaccttttgccggcaattccagatataagcattccaaaacacctttacatttaacaacgttttctgggcaatcaaaagtaatcacttatctttccaagcacaaagctgatgttggtgcttctgcaatggattacatggctgcaatacacttttcttcacataaagggcattttgaagttgttctcgcgctactttcaacttgtgcctttctcaaaaccgtcaccctcaaaagcatgacttcattacactat

SEQ ID NO: 26442 - DNA, 185 bp, Glycine max
  Clone ID: TF_LIB4164-051-R1-K1-G4
attcgagctctgtacccggggatcctctagagtcgacctgcaggtggaaaagctttgacacgttgaaccaataatttggcgatattggagtgtccataccttgcagcgatatgaaggagtgtttctcccttggcgttagggagtaggactagatttctgcacttctcaagaatctgatacacaaa

SEQ ID NO: 26443 - DNA, 460 bp, Glycine max
  Clone ID: TF_LIB3242-687-P3-J1-C12
agactcggctcgaggtcggagcaacttgcttgcactatgccgcttattacggacatactaactgccttacggccattctttctgctgctcattccacacctcgttgcagagacttggggaggggcatgatttgccgacataagacatggaaaccgagccacccctatgcatcttgcagctcgccatagatgggcggactgtctgcatgcccttatagacaatggggctcttggacgtgcttcaactggtggatacggataccctgccagcacgccacttcatatggctgaccgaggagcgaccattgatctgagtcccggccgggttggaatcaaaagcatcaccaccactttatcattgctttgcatcagaaatattccctgaattgcggccggcaaatccttccaaaagagccccatgccgacaagctcttgaagctgctgctcccttcactgaaatt

SEQ ID NO: 26444 - DNA, 744 bp, Glycine max
  unsure (1)..(744): unsure at all n locations
  Clone ID: TF_GmC167955_1
gcacgcctacctaagcttctcttcggctctcgctgcctgtgtagatgaaattggcaatttcagagtaaaaaccaattatgctgcagagataacaaaggaaatttggaaatattctgaacatatttctgttgagtgagatcagtgtaatcgtggttcgtgatttgatctggaacaacgcttacttaaaaggactcttattttctctgttctctgctctctcggtctgtcagaaatggctgtagcagactcaatatctttccaagaacaactacttcagagggttgcttcagctcagtttaggaagcctctccttcatcttgtgtccactcaagaagacaagggcagatacctcacccaatgtgtcccacttcacaaagcatcactcaaaggtgactggaaagaagctagaaaactattggatcaagatgggtcacttctcaaaacggccataacaaagggggggtgggccacactcctccacatagccgtgggagcaaaccgtgttcactttgtggaggagctgctaaagttgatgcaaccagaagaattggaattgcaagaccacaagggcaacactgcattctgctttgctgcagcagttgggaatgtgcaaattgctgagatgatggagagaataaatgcatcgttgccaaccataaggggtggnaggaggactcacccctcttcacttggctgttttacaagggaagaaaagaaatggcatggcatctgttccctaaaact

SEQ ID NO: 26445 - DNA, 631 bp, Glycine max
  unsure (1)..(631): unsure at all n locations
  Clone ID: TF_LIB4167-039-R1-K1-A1
ccacgccgtccgccaaactattgcaattgtagctgggtaaagaagagcttccaactttgcgttgtcctcacgaaaagcatctccaactcatatatgtggaagtgcagaaatgaacctgcttgtgcatgcagtcactaccatccgttgcatttagcgtttccattcaccttctgcagcttctgattaaccattgaatcagcttgcaaaacacaagagagtttttcagcaagaggcattggcagaatcaagttcactaatgtctttcgaagatgttaacgctgctgttagtgagtttgctaggagatttaatccaatattaaaaggagattgggaatctacaaaggcttttcttgacaatgacccaagtgcattgacagcaaaggtcactgcaattggtgggactgcacttcatgctgcagctgtaggagggcagtggcaaattattgagaagttggtgcaacatgtgcctgcacaagtactttcagatctggacttgatgggttgtacttgcctgcactatgttgcaatgggcgaaagcacaagtgctgccaaggcattggntggctaaaatccttccttgacacaacttactgacaagaaaggattcacaccactttatctatagtattac

SEQ ID NO: 26446 - DNA, 335 bp, Glycine max
  Clone ID: TF_LIB3028-044-Q1-B1-F5
caacggcacagcaggtggtggaagcatcattgccaatgacaagaaagcagtgtacaggcacattgtgaagtcagaagtgaatctcaatgctattattaatgggaaagcaggcttttcttccaacacgccttcttcaattaatccagacatatcatgtgaaagtaagactccacaagtagaggatatacacgatggttctagtgtgcttcacctggcatgcataattagtgattctgcaatggtagagctgcaccgacagtagggtgcagacgtgaatgctattgattctagagggaggacacctctacattacagcactatgagagggaagaatg

SEQ ID NO: 26447 - DNA, 2379 bp, Glycine max
  unsure (1)..(2379): unsure at all n locations
  Clone ID: TF_GmC64_1
atcgnctactcgtccgacttaacctgtgttttgtttctactttcttcgatcatatgaactctcttttgtcttctctaaaactcaatatcaaaccaacgagctcaaagaaaatcgaggcaagtgtaagctagcaagaggaaattaaaaacctccgtttagttgtgttttcagggaaatgattgcacagaatatagactcagcaactccagaaccacaggacgcagtagtcattgacattgaggactcaacaacaacaaatacagaactacaactcacatcactacaaaatggggtaccaataaatgccaaaccacagcttaaaagggtcgacacagctacttactacaaaatggggtaccaataaatgccaaaccacagcttaaaagggtcgacacagctacttacaaaaggccttcacttgattttctacaggatacgagtgattaagtcattttttgtgttgcttctgctattcagaggatgcaatggaggttttcttctcccaatgtgtgccactttacaagcatgcattagatggcaattggcaagcagcaaagcacatcttagatgcaaaccctgcactgaagactgctgccatagcacctgggtggcccacagtgctgcatgttgctgcaggcacaaaccattatcactttgtggaggagttgctcaacatattagacaatgatgcaattcaattgcaggataaaaagggcaacactgccttttgctttgttgctgcggctggcaattggcgcattgctgagttaatgcagaaaagaaatatacttctgccaacagtcaagggtggagatggaatgacccctcttcactttgctgctttgcaaggaagatgcccaatggcatgcaagctataccctatgaccaaagagatgtttgatgatgaggattgggaattattgttcttcacttgcatcaaaacttgcaactatcacttggccttaaaaatggtaagagataggaaagaactagcttttgcacgagatgggaataacggtgaggagaaaaagggcggcatagctttgcatctcttggctcaaaatcaaaagcctttggattcttgttgtcattgccaccaacatcaaattcccgtcaagataaaccctggcatgaaacaacacgtgtttcttcaattggttaattttctctggaatacccttttggaaaacatagactccaagagcaagatacttgacatcataagtgaaccttctcatctattatttgatgctgcagaagttggtaattttgggtttttgtctgagcttattagtgcttatcccagcttgatatgggaagtggatagcagaaacagaagtataattcacacagctgttttgaatcgacatgctagcatctacaacctcatacacgaaatagggtctataaaagatattatagtgacatttgccggagaagaagacgagaacactttattgcatttggctgcaaaattagctccacctagtcaacttgagttagtctcaggagcagctttccaaatgagccttgagatatcatggtttgaggaggtgaacaagataatgccaccatcattcagatggatgaaaaattccgaaggcttaactgctcgagaattattcacaaaggagcatgcagatttgcggaaaaatgcagaatcatggatgaaacgcacagctgagtcatgcatgcttatttcaaccgttattgccacgggagtgttctctgccgcaattagcacaccaggtggcatgaatgacgaatcaaaagaaccaaactatttggacaaaacatcgtttctgatatttgctgtatcagatgcaacttcactgatctcatctgcaactgcaatactcatattcttatcgattctcatctcgcgttatgctgagtatgacttccacaagtcactgccattgaagcttatatttggactgataagtttgttcatctccataacaagcatgatggttgcatttggttgttccttcttcataacttattactatggcatgaagtgggttcctagtttcatctcagtacttgcatgtctacctatacttctctttataggtctgcaattttcgctgtggtcagttattatctactcgacctactactgcaaagctctctttaagccaggtaaaaagatgctctacgtggtagagagaaaaggatacaatgtttaagataaatgaaggatcatataatgtttcgttgaagtttgtaatatagtagttggcaacaatttgtattgtaagggtattttaaataaatttgaaatgtgaataatatatttgcacaatgattattttattgatacaaaatacatgttaaacaacaacaacaaacttttatcccttttatataattttt

SEQ ID NO: 26448 - DNA, 954 bp, Glycine max
  Clone ID: TF_GmC78648_1
cggacgcgtggggttcaactgaaatgctgcgtcatttgagactggaggattttctttctttaaagccagtggacccttcaaatcattcttttgagggtgatatggagaaaagaaacttaatttttaagctcatttcactgagagaggaggaggaatattcaattaaggatgaagtgactacagaattggatatatcccaacacatggtgaaggagcatctgtttcacaagcagtttaaagagaagctgtactcatggcttcttcacaaagtaactgagagtggtaaagggccaaatgtattagatgaggatgggcaaggtgtgctacatttagcagcttttcttggctatgattgggccataaatccaattatatctgctggagttaatatcaacttccgagatgtgaatggatggacagctcttcattgggctgcatcctgtggcagagagcgcacagttgctgtccttgtctccatgggtgcagattgtggagcattgacagatccatctccctcatctccagcaggtagaacagctgcagatcttgcctctagctatgggcacaaaggaatttctggttttcttgccgagtcttcattaactcaccacctcgaaaccctcacaatggatgatcaaaaaggtggtcggcaagaaatttcaggaatgaaagcggtgcagacagtttcagaacgatctgcaacacccgtgcactttggtgatatgccagatctctgcctcaaggattcgcttactgctgtgcgtaatgcaacacaagctgctgatcgtatacatcaagtatacagaatgcagtcattccagaggaagcagttaactcagtatgaaagtgatgagcttggattgtcagatcagcaagcactttcccttctagcttccagagcatgcaaatctggacaaggagatggtttagccaatgctgctgcagtacagattc

SEQ ID NO: 26449 - DNA, 2012 bp, Glycine max
  Clone ID: TF_GmC797_1
tcgatgcacgcgcgcgtacagctgggaatgcggctcgaggaggagtgcaacagagaagaatcacattcgcattctcaatcacatccattcattcactcatccatatcccttctttccactaacttctctctctagttgatacaaataaaaaacaaagtttcatactttacgacacccttttctgcaactgatgatggaaggaagctgaaacagtgaaaaacagcaacaacgaccaccctgtctttgttttttgtttgttgagttgaaactttagagaaagtgaatagtgatatggaggcaaagggtgtgcggttcttagcgtatcaatcaatattttcgagcgttggatctggggacttcgatggggtgaagaaactggtggaggaagtgaagaaggaagaagggtcatcgctctctgatgtgatgtctcttcagaacgatgctggagagactgcgctatacatcgctgcagagaataatctgcaagagatgtcgcctcgcatgtgtgacgtcaagatcgatatagatgtgcagctgcttgctcagctgtcgatgtcagttccatgttcatagttaggaaaaacggcaaatcttcactgcacaatgctgctaggtatggtgtccatcgtattgtaaaaacacttattgctctggatccaggaatagtatgcatcaaagataaaaaaggtcaaactgcactcaataaggcggttaaaggacagtgtacttcagtggtggaggagatattactagctgatccttctattttgaatgagcgagataagaagggtaatacagctcttcacatggctacaaggaaatgccgttcacagatagtgggccttttgctaagctattctgctgtggatgttaatgccatcaacaagcagcaggaaacagccttggatttggcagataaactgccatatggagattcagctttggaaataaaggaagcccttgcagaatatggtgctaagcatgccaggtatgttggcaaagaagatgacgcaatggaacttaaaagaactgttagtgatataaagcatgaggtgcagtcacaacttatacaaaatgaaacgacacgacgacgggtttctggtattgccaaggagttgaagaaacttcatagagaagcagttcaaaacaccattaattctgtcacattggttgctgtactttttgcctcaatagcattcttagccatcttcaatttgccgggtcaatatataacggacgaaggaaaagagattgggaaagctaaaatagccgatcatgttagtttccaagtcttctgccttctgaattctacatctcttttcatttctcttgccgttgttgtagttcaaattactttggtagcctgggacacaagggctcaaaagcagattgtgtcggtggttaacaagttgatgtgggctgcatgtgcttgcacttgtggtgcttttctagcaatagcttttgaggttgttggaaagaaaacatggatggctatcaccatcacccttttgggggtacctgttctagttggcactctagcaagcatgtgctactttgtttttcgacaacatttcggcattttccgcagtgattcccagagacgcatcaagagagcaagtggaagcaaatctttctcatggtcttactctgcaaatatatcagatttggatgaatacaattctgacattgagaagatctatgccctgtgagtcaagaatcaagagaaatgtttcaaccttttaactgaaactgttatactactgccaagtgataatgttagctcaccgggatttcatcattcatcttgagtttgcagtttttggtttcaggctgtatgtgattataattaataatcaaaacttgtagatttatgtatatgtaataaaaataatatgaaagggaagtccactacttaagtttgatattggaatgagcattttcattacaatacgaaattaaattttcatctgcaccgtgcaagaaaatagagcttcctatcttaaaaaaaaaaa

SEQ ID NO: 26450 - DNA, 1526 bp, Glycine max
  Clone ID: TF_GmC42_23
tgcctcttcctctcagattcaggttccaactcttctctctctctcgccgtctaggtttttctctcaaaatttcgaaaccccgattttctctcaattcgaatctgcgatacatcgtaacctaaattattagatagttatattatctctctgcgtttctttcagcaattttctattttctcctctcatggcttcagattccaaaaaggatttccctgctgatgacaaagctggaacagaagagagtaaaacatccaaagatgagacttcatctaaagattctccagcagaacaaagagcgacagctacttttggacctagacctggacctgctgggcttccaggcaacccttttgatctctcagcaatgtctggtctgctcaatgatccaagtatcaaggaattggctgaacagatagcaaaagatccatcgttcaatcagatggctgagcagcttcagaaaacttttcaaggagctccacaagatgctatccctagcttcgataatcaacaatatttttcaaccatgcaacaggttatgcagaatcctaattttatgaccatggctgagcgcctgggtaatgcattgatgcaggatccgtctatgtctgccatgcttgaaagtttttctaatccatcaaataaagaccagcttgaagaaagaatggcacgcatcaaagaggatccatctctgaaacatattttggaggagatagagactggcggtcctgctgctatgatgaggtactggaataatgaggaggttttgcagaagttgggacaagccatgggtcttgccaattcgggagatgcaggtgcctctgctgaaaattctggggcagatgagaccgaagatttgggaaatgaagatgaatcaattgttcatcatactgctagtgttggtgatgtggagggcttgaaaaatgcactagcctctggtgctgacaaggatgaagaagattcagagggaagaactgctttgcattttgcctgtggatatggcgaggtaaaatgtgctcaagttctcctcgaggctggagcaaaagtggatgctttggataagaataagaacactgctctccattatgcagctggttatggcagaaaggaatgtgtggcccttctccttgaaaatggtgctgcagttactctccagaatatggatggtaaaactccaatcgatgttgcgaagctaaacaatcaaaatgaagtcctaaagctacttgagaaagatgcttttctgtagttgtaatgcatgatgccatgctgtcaccaacaagcaaagggggaaactgaggggaagaaggcatggtgacttcgttattttctcttttggtttcttccagccatttagtgtgttaaactaaattgattagcgttgttggatgagttaccatagaatttgttatctatggtcttgtaatgcatttattgttacactgcatgattttgaagattagtgccgtcatgattttattaatgtttcaattttacttataatacattgcttcgtgggcaaattctggttc

SEQ ID NO: 26451 - DNA, 1370 bp, Glycine max
  Clone ID: TF_GmC265_1
tggcatttggcaaaactgcgaagaagagcagaagaaataccggagaaaagagagttgttgagcagaagagtgttgtgttgtgcattcgcggaagaagaaggagcagatgggtaatccacggaaaccgagtaccgccgacgagcttcacacggcggcaaggtccggtgatctcatcgccgttaactcaattttggcttcaaatcctttggccgttaattccagagataagcattccagaacacctctgcatttagctgcattttctgggcaagcagaggtagtcacttatctctgcaagcagaaggctgatgttggtgcttctgcaatggatgacatggctgcaatacactttgcttcacagaagggacatttagaagttgtccgcgctctactttcagctggggcctctctcaaagccaccacccgcaaaggcatgacttcattacactatgctgttcaaggttcccatatggaactcgtcaagtacttggccaagaaaggggcaaaccttggtgccaagacaaaggcaggaaagacccctttggatcttgctaccaatgaagaaatccgctcctttctggaggaatatgagaagtcagcaaagaatggagaattgggaaagaaagacaaagataaagctgaagaatctgatccaaagacatccacattgggatctgaaggtgatttgagttctgaacctgctgcagctgctattgatgaagaagacaatgtgggagagaagaggaagaagggtaatgaagatggcacaagagaagaagagtcatcacaaccaaaaaaggctagagttaacttaagtcatctccaaagttccgacgatacccaagaagaagaaaacctgtagtttggtattttcatagtagaactaaaattttgttattgtaatgtagtatgtaattgtatctgatttggaatccctttgttgggttagttggctggactatctgttgactgttaagtaacgaccgattctggattaatacaattttctctttctttgaagttggatcgctagggaatattgttgggaggttggtgaggtccaaacatcgaaggcgtgtctcttgctcagtggctattgattcccacaacatcgaacccatcaaacttaaagagaatgcatgcacatacaattgagaggttttggtcttagcagtaaccagtttcttgtgtgccttttcaattcattctgctggcttttagatttcccgtgatacaggtaaaatggtgaaagaaatactattatagagttaatattgtagaggttttacaagtataatttttggagacatgagaaatgaaaattagttataatgtaatggtataattctatttccccttcttcctaaaaa

SEQ ID NO: 26452 - DNA, 1276 bp, Glycine max
  Clone ID: TF_GmC5728_1
gaacccttctacatttcccgtcaaagagaaccttccataacctcacttcaatggcggaagattgcgcgggaagtggagttcaacagcaaggttgaaaagaagagaagaggcttgattccccttagggatatgaatttggatgactacaaggcttataaggaagccaaattggcgcagatgaagcttctcgattactcttctagttttccggtggacgaaaatgtccctgaacctcaattgaatcgcggagaaaagtttgaggctgaagctgaattggatggtggtgaacgtgttgcgcctaagaaccctaggtgggctgtttatgggaggggtttggaggatgtcactgagtttttcaatagtgacaactatgaccctactgctaaaacccctggaggtcgccggaagttgtttaataaggaggagaaggttttgttgaataagaggataccagacttggcagctgctacttcagataaatggcttcccctgcacactctcgctgcttgtggagaatttcaccttctagattctttgttgaagcataatgttgatatcaatgctgtggataaggatggtttgactgcccttcacagagcaacaattggaaaaaagcaggtcataatcaattatctcctgagaaactcagctaatccctttgtacaggataatgagggagccacattgatgcactatgctgtactaacagcttctacccagacaattaaaatactcttattgtataatgtggatataaatctccaggacaattatggctggacaccattacatcttgctgttcaagctcagaggacagatttagtgaggcttttgctaatcaaaggtgctgataagacattaaaaaatgaggatggtttaactcctcttgacctttgcctttacaatggtcaaagtgccagaacatatgagctaatcaagttgtttaagcagcctcaaagacgtcttagtcatgtatcagtatgacagacggggctaagaaacaatacgacttctgaaagatttggaccaacaaatgaagattaaccgttgccaaattttgcatgacaattagcatcccttggtcacatggaaattttgggacaactacggtattgtactatattaaaattaaaatgtatattttaaatgtgataggaaggaaaataggaatattttcatgaaaagaaagaaaaatggtctgccatttttaaattgcgtctttcttgaactccgggcaaagcttttcttttctctatcaagtgtcaaaaaaaaaaaa

SEQ ID NO: 26453 - DNA, 438 bp, Glycine max
  Clone ID: TF_LIB3093-017-Q1-K1-A6
cccacgcgtccggtgagtgtgtgctttgcggcagcaagaggagatgacttgttgttacatcaattactcaaacggggcatggatccaaatgaatccgacaacaatcgaaggacagctttgcatatagcggcatctcaaggaaaagagaactgtgtttcgcttctgttagattatggggcggatcccaacattagaggttgttctacgtgcagatttggaaggtaatgtgccactatgggaggctatagtggaaggacatgagtcaatgagcaagctgttatcagagaatggagcaaacttgcaatgcggggatgtgggtcaatttgcatgtaatgccgttgaacaaaacagtctcaacttgctgaaggaaataatgcgctatggaggagatatcacgcttccaaacagcaacacatggaccacagccttgcacgttgc

SEQ ID NO: 26454 - DNA, 1379 bp, Glycine max
  Clone ID: TF_GmC312_1
tcgtctcccgaaatacactggatttaggactgataagaaaggtcaaactgccctacacatggctgtgaaagggcaaaatgaagaaattttgctggaattggtaaaacctgacccagcagttttgagtctggaagataataaaggaaatacagcattgcatattgccacaaagaagggccgtactcagaatgttcgctgcttgttatcaatggagtgtatcaacatcaatgctacaaacaaggctggagagactcctcttgatgttgcagaaaaatttggaagtccagaactcgtctccatattgagggatgctggggctgccaattctactgaccaaaggaaacctccaaatccatcaaagcaactcaagcagactgtcagtgacataaagcatgacgtacaatcccaactccaacagacacgtcagactggcatgagggtccagaaaattgcaaagaagctgaaaaagctccacattagtggcctgaacaatgcgataaactctgctactgttgttgccgttcttattgctacagttgcttttgcagccatcttcacagtccctggtcaatacgttgaagacaaaacacatggattttcacttggacaagcaaatatagcaaacaatgcagctttcctaatattttttgtgtttgacagcctggcattgttcatctctctggcagttgtggtggttcaaacctctgtcgttgtgattgagcaaaaggcaaagaagcagctcgtttttgtcattaacaagctcatgtggatggcttgccttttcatttccattgccttcatttctcttacatacgtggtggtgggatcacactccagatggcttgcaatatatgctactgtgattggaagcttgataatgctctctacaattggctccatgtgctattgtgtaattttgcataggatggaggagacaaaattgagggccgagagtcgatcgttctctatgtctcatgcatcagaccaagagattttaaacagtgaatacaagagaatgtacgcactgtagtctgtaggatagttgatatatcagaatggaatggcttttatcctccagcatattcttgaagtgatatgtagtttctactatcagtatcagattttaccaagacaagctgtctatgttagactacaggtaccgtgagaaaagagggaaaagaagaaaatgggtggggaattctcgtcacatccactcgtaattataaatgatgtcaaatttagcatcatgtcagtgaaatgattgtggtgttgaagaatgaagacttatatccatttgtatttactctagtattctattataaactaaacttcataaaagaatctaattcaattggtttaagagagtctctgaatattat

SEQ ID NO: 26455 - DNA, 1261 bp, Glycine max
  Clone ID: TF_GmC1132_1
gactctcacacagctcctgagactcaagaccaatactcttctagaagcaatgcagattaaaagagaagataacatacaaatactcaaaaattttcttcagcatttcaagcaggttaaggatctgagtatcaaagatttgatggtggagaacgtagaagaagaggaccctaacatggctgtgaacttgctaactgtggcaagcactggcaatgctgcttttcttgaggagcttctaagagcaggtttggatcctgacattggagactccaaagggaaaactccattgcacatagcagcatcaaatgggcatgaagggtgtgttaaagtcttactcaagcatgcatgcaacatgcatataaaagacatgaatggtaacactgcactatgggatgctatagcatcaaaacattactcaatattccggatcctcttccagctttctgctctctctgatccaaacacagcaggcgatctcatgtgtacagcagcaaaaagaaatgaactaacagtgatgaccgatcttctaaggcaaggactaaacgttgactccaaagatcaccgtgatacaactgcaatccaaattgccatggccgaaaatcatgttgacatggttcagttgcttgtcatgaatggtgctgatgtctctgatgtgcataaccatgaattttgttcatccaccttaaatgaaatgctgcagaagcgtgaaattgggcatctaattaatgtaactgaggtcatgctcagtgaagttgtattaaaagggagacatcaagagcaggagcacaatggaggaagatctaatagtggactaaagtttccaagggtaagcatatatagaggtcaccctgtagttagaagagaaaaatgttccatggaagctgggaagctaataaggttgcctgattcaatagaggaactaaaaactattgcaggtgaaaaatttgggtttgatgcaaaagatgcaatggtgacaaatgaagaaggagctgaaatagactccgttgatgtgatcagagataatgacaaactttttttttgttggataagctgagatgcgaaaatgtcaagtgtaaatatatatataatctcgcacaacagatttacttagatgtttcttttgtgttagtaattttgtcttcttcctgtagccataaagaagtggtttggttggaaactagttttttttttttacttccaataactgaaaatccatttcctattacacaaaaaactgaaaatatagttgacattttttcttttt

SEQ ID NO: 26456 - DNA, 1716 bp, Glycine max
  Clone ID: TF_GmC67_1
tcgcgatctctttcaattggtgtcagagatgaaagcagaatattttccacccaaagaagatgttatcttgcaaaacgaagcccccactgacttttatatactggtcactggtgccgtggaactactagttcttaaaaatggggttgaacaggttgttggagaggccaacgcgtccgtacggctcgtgatctttacagaagggggtgagattggtgtgctttgttataagccacagcttttcacagttcgaacgaagcgactaagtcagttgctcaggctaaaccgtactacgttcttgaatattgttcaggccaacgtgggagatggaaccataataatgaataatctccttcagcatttgaaagagatcaacgatccaatcatggagggagttttggtggatattgagaacatgttagctcgtggtaggatggacctaccagtgagtgtgtgctttgcggcagcaagaggagatgacttgttgttgcatcaattactcaaacgaggcatggatccaaatgaatccgacaacaatcgaaggacagctttgcatatagcggcatctcaaggaaaacagaactgtgttttgcttctgttagactatggggcggatcccaacattagagatttggaaggtaatgtgccactatgggaggctatagtgggaggacatgaatcaatgagcaagctgttatcagagaatggagcaaatttgcaatgcggggatgtgggccaatttgcatgtactgccgctgaacaaaacagcctcaacttgctgaaggaaataatgcgctacggaggagatatcacgcttccaaacagcagcaacacagggaccacagctttgcacgttgcagtctctgaaggcaacgttgagactgtcaaattccttttggatcacggggcgagtattgacatgccagacaagcatggctggaccccaagagatcttgcagatcagcaggcacatacagaaatcaaagccctttttgattccattggggagcctaaggtccattcttccgtcgctattccggtgaggaatagcaagatcaagtaccttggtaggttcacaagtgagccaaccatgacattgcctcttgatggatcgtttcatggaactgatggctcttggagccagaaccagagccaaaaccagagccggccgaggcgtcggagcaacaactaccataactctctgttcgggatattgtcagcagcacacaatggggaaaagtacctgctttcagctgttgacatgaataacaatgcaaggaatggtatgaagagtagtagtgcagttggtccaactagagttataattagttgtcctgagaagggtgaggttgttgggaagcttgttttactgcctggaagctttcaagagctagttgagattggagccaagaaatttggtttctatcctaataaggttgtatgcaaagatggaggtgaaattgaagatatagagataattagggatggtgaccatcttgtttttcttggtgcaagtggagggtgctagaatccaatcgtgcagctccagcaacaccactaaccaatggcgtgcatatataaaatgcatataaggaacgtctttactgttattgtaattgttttatttttcctgtctcatctgtgttctcattctcaattgtaaatctttagccttcttctcatggttaatgtgaaataatatatttctgcctacgtccc

SEQ ID NO: 26457 - DNA, 3218 bp, Glycine max
  Clone ID: TF_GmC60185_1
cacgcgtccgttcagttccgacttaccgttgatgtctttgctgacttcttgttaaggttgtcggtgatgcaattgttgttggttttgtgctaagagaagaagctgttgggaaggtttctttcgtcttttgatgatgatgtcacacaacttaacggggcagcttgtgggtgcagagatacatggctttcacacgttggatgatttggatgttagtaatactatggaggaagcaaaaagcagatggcttcgtcccaatgagattcatgccatactctgtaatcacaaatatttcaagatcaatgccaagccagtaaatttgcccaaaagtggtactattgtactatttgaccgcaagatgcttaggaacttcagaaaagatgggcacaattggaaaaagaaaaccgatggaaaaactgtcaaagaagcccatgaacacttaaaagttggcaatgaagaaaggatccccgaatattatgcacatggccaagataacccaacctttgttcgtagatgttattggttgcttgataagaatctggagcacatagtccttgttcattatcgtgacacacaagagttacaattgcaaggttctcctgctacacccgtaaattcaaattcaagttctgcctctgatccagctgcatcttggattccatcagaagacttggattctggggtgaacagtgcttatgctgttgagcttaatgacaatttaactgccaaaagtcatgagcagaggcttcatgagattaatacacttgaatgggatgacctagtggttccaaatgtcaacacttctactacatctaatggaggcaacgtcccatattcatttcaagaaaatcaaagtttactgagtggaagatttggcaatgtatccagtaatccttcagcagaaattccttcttttggtaatttaactcagccagtttctgggagcaatagtgccccttacagtttcccagatagtgctattcttctgaaaaatagtcctatatcatcgggaggcgttgacaccttgggcactttggtcaacgaaggcttgcaaagtcaggacagctttggaacgtggatgaacatcatatcggatacaccatgttccatagatgaatcagctcttaaagcatcaatttcttctgttcatgtaccatattcatcactggtggcagataatctgcaatcttctctgccagaacaagtatttaatctcactgaggtgtcccctacatgggcatcttccactgagaaaacaaaggtcctggtaactggatattttcataataactatgaaaaccttgcaaagtccaacctactgtgtgtctgtggtgatgtaagtgttcctgtagaaattgttcaggttggagtttaccggtgctgcgtaccaccacactcgcctggattggtcaatctctatttgagctttgatggccataagcccatcagccaagttgttaattttgagtatcgtactcctattttgcatgagccaactgcttcaatggaagagaaatacaactggaatgagtttcgacttcagatgaggcttgctcatttgctctttgcttcagacacgagccttaacattttctcaagtaaagtatcaactaatgcactgaaagaggctagaagattttccttcaaaacatcatatatctccaaaagttggcaatacttgatgaagtcaattgatgacaatacaattccattttcaaaagtaaaagattccttgtttgaaactgcattgaaaaacaaattaaaggaatggcttttggaacgaattatcttaggcagaaagagtactgaatatgatgcgcaagggcaaggtgtaattcatttgtgtgcaatgctaggatatagttgggcaatctccttattttcttggtcgggcttgtcgctggatttccgtgacaaatttggatggacagctcttcattgggcagcatcttatggaatagagaaaatggttgcaactttgttatcttgtggggcaaggccaaacttggtcacagatccaactcctcaatatccaggtggatgtactgctgctgatcttgcttatgtgaagggatgtgatggcttagctgcttacctttctgagaagtctctggttgagcagttcaatgacatgagcttggctggaaatatcagtggctcactggaaactagctcaactgatccagtaaatgctgcgaaccttaccgaggaccaactttacctaaaggagactttggaagcttaccgtacagctgccgaggcagcagcacgtattcaagctgcatttagggagcattcatttaaattacgatatcaagcagttgaaattatgagcccagaggaagaagcacgtcagatagtagcagcaatgaggattcaacatgcctttcgcaactatgagtcaaagaaaaagatggcagccgctgctcggattcagcttagattccgtacatggaagtaccgtagagaatttctcaatatgcggcgtcaggctattaaaattcaagctgctttcaggggctttcaagcacggaagcaatatcggaaaatcgtatggtctgttggggtgcttgagaaagtgatcctgcgttggcttttaaagagaaaaggcttccgtggtctccaggttaatcctgccgaggaggagacacaggaaagtgatacaattgcagaggaggatttctttcgcaccagccggaaacaagccgaagaacgtgttgagaggtctgtcatacgtgtgcaggccatgttccgttctaagaaagcacaagaagaatatagaaggatgaagctgacacataatcaagcaatgctggatgaattagaagaattcctaaattctgaagatgacatgttacccaagacatagcttggtgccttttccaaaacaaggtttccccatatttgggatgtagccaactcctgtgacaaactagtgtgtagtgatagcttggtgtcttcttttatataggaagcagatcctgtaaattacctagtgtagattttgaacccatgaccctttcatattgctttaatgtcttgaatgggtcgtccgtgtgtaattaagcttccctatgagggatgcttctaatgcaagatcaagtttgtaactttgtttttggtgaaaaatcaagtttgtaacttaaataacaagccttcttagatttgaattgacataattgttgttggaactcttctatgtaataaattaagagtccatt

SEQ ID NO: 26458 - DNA, 1853 bp, Glycine max
  unsure (1)..(1853): unsure at all n locations
  Clone ID: TF_GmC506_1
acctgattgcgattatagtgatgctgaccttgttgtcgagggaattccggttagtgttcatcgatgtattctggcctctaggagtaagtttttccatgaattattcaagagggagaaggagtcatcagaaaaagaagggaaattgaagtataacatgaatgatttgttgccttatggcaaggttggatatgaagccttcctcatattccttggctatgtatatactggtaaactcaagccctctccaatggaggtgtctacttgtgttgacaatgtttgtgctcatgatgcgtgtagacctgccattaactttgctgttgagttaatgtatgcctcttccatttttcaaataccagagttggtatcacttttccagagacgtctacttaactttataggaaaggcccttgtggaagatgtcatcccaatcctcactgttgctttccattgtcaatcaaatcaacttgtcaatcaatgtattgatagggtggccagatcagaccttgaccagatttcaattgaccaagagcttccgcatgaactctcacaaaaagttaaattgctccgccgcaaacctcagcaagatgttgaaaatgatgcttctgtagtggatgctttgtctctaaaaagaatcactagaatacacaaggcgttggactcagatgatgttgagcttgttaaacttcttttgaatgaatcagacattactttggatgaagccaatgctctccattatgctgcagcctactgtgaccccaaggttgtttctgaggtacttggtttgggactggctaatgtcaatcttcgaaattctagggggtacacagtgcttcacattgctgccatgcgtaaagagccttccattatagtatccctacttacgaaaggggcttgtgcatcagatttgacttttgatggtcagagtgctgttagtatttgtaggaggttgacaaggccaaaggattatcatgcaaaaacagagcaggggaaagaaacaaacaaagatcggatatgcatcgatgttcttgaaagagaaatgaggaggaatccaatggctggggatgcctgtatgtcttcccataccatggctgatgatctccacatgaaactactgtaccttgagaacagagtggcatttgcaagacttttcttcccttcagaagccaaactagccatggacattgcgcatgctgagacaacatctgagtttgctggtctttctgcgtcaaactcaaaaggttcaaatggaaacttaagggaggttgatctcaatgagactcctatagtgcaaaataaaagacttctttctagaatggaagcccttacgaaaacagtggagatggggcggcgctacttcccacattgctcggaagtgctggacaagttcatggaggatgacctgcctgacttgttttaccttgaaaagggtactcatgaagagcagagaatcaaaaggacgcgtttcatggagcttaaagatgacgtccacaaggctttcaacaaggacaaggccgagtttagccgctctgggatttcatcttcatcatcctcatcatccctcagagattctgttgtacattacaaggctaggaaagtgtaattttaaaaccatacatagtgtttttgattttgacatacatattatatatagtgcaaattttaaaggtgaagcccaccaactcatctgtaaaattctcgaagcaggaaagttgatgtaaacaacctgcgcatatatttttgaaaatgttttcatatgctttttggtggagaaatttacggtaatttttttttgaagataaatatataagatgtacctttaatctcccnnanaaaaaaaaaaaaaaaaaaaaaaa

SEQ ID NO: 26459 - DNA, 936 bp, Glycine max
  unsure (1)..(936): unsure at all n locations
  Clone ID: TF_GmC231432_1
ccacgcgtccgcattctctcccatacccaaaaccctcgccgccgcaatggaaaccaagaagctccaccctcgcttctcgctcggccgccaatcctccctcgcgccggagcgcgccggcgccggcgactcgtcggaggccctggacccggcggtccggttgatgtatctggccaacgaaggtgactcggacgggattaaggagcttttggacgccgggagtaacgtcaatttcaccgacatcgacggccgcacctcgctccacgtcgccgcttgccagggccgcaccgacgtcgttgacttgctgctccgacgaggcgcccacgtcgatccacaagaccgctggggcagcacccctctagttgatgcaatgtactacaagaatcaccaagttgtcaagcttttggagaaacacggtgcaagaccccctatggctcccatgcatgtgcagaatgctcgtgaagtacctgagtatgagattgatccttctgaacttgattttactaatagtgtttgcataacaaagggaactttcaggattgcattatggcgtggaattcaggttgctgtcaagacacttggggaggaattgttcactgatgatgacaaagtaaaggcatttcattatgagcttacattacttgagaaaataaggcatccaaatgtagtccagtttttgggtgctgtaacacaaagcacaccaatgatgattgtcacagaatatctaccccagggggatctcggtgcctacttgaagcggaaaggtgcattaaaaccagtaaccgccgtaaagtttgcacttgatattgctaggggtatgaactatttgcatgaacataaaccagaagccattatacacagagatcttgagccttcanatatactgcgggatgattctgggcatctgaaagttgcagactttggagttagcaagttgct

SEQ ID NO: 26460 - DNA, 1895 bp, Glycine max
  Clone ID: TF_GmC798_1
gagactgtgagcgagactcggtagtaatagtatagtctacaaggtttcgtattctactacttgaaacctaactcttccttcttcttctacattactcctatggctcccgatgcttccgacgcacttgcagtaaggcagaaagttcaattatttctgaacgcggctcgtactggttcaattgatctcttgaagaaattggcgttgcagctggacgagggcaaggatttggcgaaatcggtggaagcaataaaggacgccaacaagagaggagcactgcattttgccgcgcgagaaggccaaacctctgtttgcgagtacctcttaaccgatttgaagctctctgtcgattctcaagatgatgatggcgagactgcactcattcatgctgctcgtcagggacataccgccaccgctaaatatctgattgaccacggtgctgatcctactgtggctagcaatttaggggccacggcattacaccattctgcggggataggagatgctgagctgctcaagtacttgctgtccaggggagttaatcctgatctagaaagtgatgcgggaacacctttggtttgggctgctggtcatgcccaaccagctgctgtcagtgtactgttggaacatggtgcaaatccgcatgccgaaactgatgatggtattaccccactcctttcagctgtggcagccggttctctagcatgcttagagctgttaattcaggcaggtgctaaagcaaatataagtggtcaagctgagcatgctttagctgatgcaaagataatggaagtcttgaactatgattttgccaaaagcttgttatagggaatgggcagctctctgacgaggatggtgtcaagctgaagcagcaagttgctgcaaggggctatccaaaagctgttgagatattgttccccttgacgtccaaagtagatactattcctacttggactgttgatgggatacttgagtatatgcaatctgaaactagaaagcaacaggatgaatcgataaatgcaaaagaaactaatcagcccaaggaagctgattttccggagcaaaatgtccctgaggtggcacctgaagccaaaaagagagcagcagaagcaaagtcaagaggggatggggcttttaaaaggaatgaccatcatatggctatagatttttatacccaagcaattgatctgaaccccattgatgctactttgctatccaatagaagtctttgttggattaagttgggtcaagctgagcatgctttagctgatgcaaaggcttgtagagctttaagaccagattggccaaaagcttgttatagggaaggagcagctctgcgtttgttgcagaaatttgatgaagctgcaaatgctttttatgagggagtaaagcttgatcctgaaaataaggagcttgtaaatgcgttcagggaagctgtcgaggctgggaggaaatttcatggaacggctgaaaataaatcatagtttagccttttgttaataccatgtttcagagagaagagatcaaaatattgcgggtggtgcagccttattcacttgatccttttttccccaatgtgtgtgtgcgtgttttctttaactagttactgtcgtataggaagagtcagctagtaatctgtttcattaaattgttttagtaattataaaggttatgcttatttgacatgttccaaaattgttgcagaattagtacacattatgaaaatggcaatgcaggttcatgggtatttctcccatactgttgtaggattcatttgtttaaagttcagaattttttttatagaattaattttgaattgtcgaactcaattaagatgagtatttgaagatttgcattgaaacttatttttggttagcaagggttaatatgtttatggt

SEQ ID NO: 26461 - DNA, 539 bp, Glycine max
  Clone ID: TF_17022045
ttgactttgcttctgtaatgtatgcatccagctcttcatatggctgcagctaatggacatattgatattgtggagtatttaatcagtagaggggtggtaagtagttttttttacctatattcttcatttgatcttggaactttatgatctgaataagtcattgtttttttttttatcagcaaaaataatattatatatattataataaaagcagtacaagtggtactagtatatatacaagtcagcccttctataatgcaggaatatggtttcataatacagactatacagcacgaattaaggaaccatataactgaccgtatagttaccatagattagcccatcagctaagacactagaccccccttcttacaaatccctccctaatgttacttgacctgtggtggaaaggcacttcaaatcctttttcgagattggttagccaagtccagcatactaatatggcatcctccatcagttagcgttgaagctgtctgatagcaaatcatttcattgaccattaccagctttttccttga

SEQ ID NO: 26462 - DNA, 433 bp, Glycine max
  Clone ID: TF_LIB3087-005-Q1-K1-G2
ccggcccggaattcccgggtcgacccacgcgtgcgcccacgcgtccgcccacgcgtccggaggttaagaacaataacataaaccattcttcaccgctcctgtctcccaccatagtaatgggtcagagcctaagttgcagtggcaactatgaccacggtctcttcaccggcgggcagcacggtgaccttgaaattgtcacaactgtgttggactccgacccctctgtcttgcaccaaaccactctctacgatcgccactctcctgttcatattggcgctaccaatgaccagatcgagattctgtctaagctcttagatggatctctcaacccagatgttttaaatcgccacaaacagactccgcttatgctggcagcaatgcatgggaacatcgcgtgtgttgagaagcttcttcaagccggagctaatgtttt

SEQ ID NO: 26463 - DNA, 1421 bp, Glycine max
  Clone ID: TF_GmC6832_1
attggatcaaactgccttggaacgaaacaagaagggccatcttcccgttcatcttgcttgcaaaaggggttgtgttgagatggtaaaagaattctttgaacctggatccggatggcccattaatccttatgttctcctcaatcaaaagggtcaaaacattcttcacattgcggcaaagaatggaagagataatgtggtagaatacctactaggaaattgcaacactggtcatctacatataaaccagaaagactatgatgggaacactccattgcatttggcttccaaaaatttatttcagcaagttatcagcttgatcacagaggataagaggactgatctgaatctcacgaatgaagacggtttaacggctggtgatatcagtaagacctttgaacatccaatgttacgtggaagagagattttatccatggagttatcaaaaggagctggagtccctgtaaatcacatgttgcattctcaacgccaaccacagcctgaaaaagacacctctgattttcaacgcaaatcactgtctgaaaaagacacccgtgaggcatttttgattgttgcagcgttgttgatgacagtgtcatttgcagctggttttactgtaccgggaggtctatatagctctgatgacccaaaccctaaaattagaggaactgcagtttttgctggtaattcaggattctggatattcatcatcttcaataccataactatgtatagctctgcaatggcatgtggacttctgtctgtgggaatagttaatcggtctaaattaagtcgtttttcggacttgtttttgacatgtgcctttctcgcagcatcagtggcctttttggctgctgtacttctagttgtggccaataaccgtttactcgcaggtgctacaatcctcattggagccttgcactatatcctctacttttttgtaataaaataatctcgagcaaatgaaactttgatgactgatgaaattaaatctaagtcatcacttccacttatttattccagtttgaggagttttttctcgagaaatataggtggtaagcccaaaaatcttcttcattctcagaaagcaaacaaggacaaggacaatggattagaagagcatgtgcaacaaggcaattgagtagaagtttttattgtttttactgggatagaataagaaagacaattcagatcttgttcatttaactttcctttatctatgacatgaaacttgggatttgtttgtcaaattgaatctgaaaaatttagtttaaaattaaggtaatgtttgatttgatggcttattttctgttttttatttcttaaaaaagatttttattttcaattttttataacattttaaaaatatatatcgagaaaaaaatattgttaggtgtcatcacgtacgttttgactttatcagg

SEQ ID NO: 26464 - DNA, 1690 bp, Glycine max
  Clone ID: TF_GmC269_1
tttttatctctaacataggtagatagttaaaatgcaactagatttacacagaattcaaattatataaactaataaagataaaatctaagtaatagagccacaaattcattggatgattccttttccagttttccggatatatgcacaaaaattgttcctcgaaaaagttgtggctagaattgttacattgaattaaaataataggaaaagaagaggctccagttaggcaattaggctttggtcccatccaatcgcaaccaggaaatggatgtggttccttatccagtaacacccccaaacctcatttctctgccacatgaaccctcccaaacacagaaaccatagcaaaaagaaacccagattattgattattaataatggaagccatattcgtcaccaaacccgcttcccattctctcctcttaactaaactctctccgaatcccaaacacttgttccctccacaccaacaatcctttcacaacatccgccacaaacccacgcgcttccgccccgtcatcgctgttttccaaaaccaacatcaacaagatgcagctgcagcttccaaccacaccgaagatgagtcctacggcgaagtcaaaggcatcattggaagcagagccttggaagccgccaccggaatggagtacctcatcgagtggaacgacggccacgcgccgtcctgggttcccgccgacttcatagccaaagacgtcgtcgccgagtacgaaactccctggtggactgccgccaagaaagccgacgagtccgcgttgaaaaacttaatcgaatccgacgacggccgcgacgtcgacgccgttgacgccgacggccgcactgcgctcctcttcgtcgccggactcggctcggagtcctgcgtgaagctgctagcggaggccggcgctaatctggaccaccgagaccggagcggcggcctcgcggctctgcacatggcggcggggtacgtcaggcccggcgtggcgaaggttctcttggatctcggcgcggatcccgaggtggcggacgaccgcgggagaacggcgttggatctggcgagggagattctgaaggtgacgccgaaggggaatccgatgcagttcggacgcaggattggactggaaggtgtgattagggttttggaaggggcagtgttcgagtacgcggaggtgcaggagattctggaacggagaggaaagggtgagaatttggagtatcttgtgcggtggaaggacggtggtgccaacgagtgggtgaaggcgaagtttgtggcggaggatttggtgaaagactacgaggctggcctcgagtacgccgtcgctgaggcggtgctcgcgaaaagggtagcggatgaagggacgccggagtttttggttaaatgggccgatttggaggagcccacatgggagcccgaggagaatgtggacccagagcttgtcaaagctttcgagggaagtaacaaccaggcccagcccagtagtaatgggcccgctgtggtcttttccaatcaggatagccctagcctgtgatttttcatagtttgtttggactgggattttgttgcaaaatttcgggagcaaattaattaataattgttttgtaccaaatcaagttgtggacatgaaaaagctaatcaaatccaatacatattttcctcctggttttagatcgtactttgaatgttttaggaaag

SEQ ID NO: 26465 - DNA, 1406 bp, Glycine max
  Clone ID: TF_GmC1249_2
acggctgggagaagaaaacaaaaaaggggttttccttattccaatagcgaggcgagacatcgattccaaaggtgcgtttctgctgtgctagggtttctgcatcttccacctccgtcgcgatgaaaccaggcttcatctgattccgatttcccttcgctccttctcctccttaacattcatcttcttcgattcctctacaaattatgattattattatgatgaactccatcttcgcctcgcataaccttcgcgtcttcggtcccggcttgaatcccttcgcaccttattgcatcgccaatcactcccttttcctttccctttcctctcgctaaattacaattccctttctttttcctctccaacttctccttctccgtttctccgaacatgtaaattcggaggacaccgtctttgattcggtctatttttttgggggttactttacttcggttacgcgtcgtcgttttgcttttctttgtcgtcgtttttgcgttgcgttgattgctgagaaagaaagaaagaaagaaagatgctggaggaacagcctgttgttttgttcaggaagagcccttccaggaggcgcttgagatctgcttttgctaccgatgataggggttggacctcgcttcatgttttcgctcgaaaaggcgatctcaaattggttaaaaaacttctcaatgaaggaatggatgtcaatgtgtctgcatggggccccaaatcaaaaggggtgacccctctccaccttgctgccgaaggtggtcacattggagtgatggatgtactacttgagtgtggtgctgacattgatgccagaactaagggtgcttgtggctggacgccgctccacattgcagccaaggaaaggaggagggatgctgtgaaattcttgatagagaatggagccttcatgccacctgatatcagtgatagcagatttaacccaccgcttcattactgccccggactggaatgggcctatgaggagatgaagcgacttcgtcaggaagacttgtctgctggagagacatgttacagctctgaaagttaatttgcttttcagggatttggttggtgtttgatagtgtgtttggatgccattcagaggagatcaaagttaatataactagcttttgcgtcacctttacaaatttgacatgaaaatatgctgatacgtacattcagaaagcgtatccagacatgcactgtatctgtattgtatgaataaatgtacaattgaaataaaactactatgtagtgtatggggatgttttactattttagcatcttggatgcccttgtttatggaaacaattatgtacgattattaatgtgatatgctgtgattgttgatgttttcaaatacgtgttgtagactatgttcaaagtattgctattgttattctgtt

SEQ ID NO: 26466 - DNA, 356 bp, Glycine max
  Clone ID: TF_GmC265_4
gtgcattggcatcacaactcactagggtttggtttgtggactgtggtagcgaagaagaagcagatgggtaatccacgaaaaccaagtactgccgacgagcttcacatggcggcaaggtccggtgatctcatcgccgttaactcaattttggcttcaaatcctttggccgttaattccagagataagcattccagaacacctctacatttagcagcgttttctgggcaagcagaggtagtcacttatctctccaagcacaaggctgatgttggtgcttctgcaatggatgacatggctgcaatacactttgcttcacagaaggggcatttggaaggtgttcgcgcgctactttcagc

SEQ ID NO: 26467 - DNA, 3463 bp, Glycine max
  Clone ID: TF_GmC74695_1
cccggggtcgacccacgcgtccggtttaatattttcacagttcagtatgaaaaatcccctttttatttaatgttctatcttcatttgcctgattctgctctatctttttctctcacctcctcctaactttctgccttccctcattctcggtctcacaaacttaaagtaatatccagaaaggaatgaagaaaacctgggctcttcttcttatgtgttttttcttgtttgaggatggtgtgctttaaactagaactaatgagatatatcctgtaaatgttgatcacactctattggtttaaactaattataataaccttctagaaattgctaatttggttctatggttcttatctgtggaataagctcctgttctcaccctttttattctacattgcggggatttaaactctcacataattctcagggaatatcgacacaagatgggaaccaaggcgaagtttacaagtgctaaagaaaatgaagaatctcttaaacagagcaaaggttgcaaaaagccctagctagggtgaagtcaatggttcagtatccagaggcaagagaccaataccataggctgttgaatgttgtaactgagatccaaaaaaatcaggtaaagcatgagagcagttataacaattcagaagaaccgagagaattcggtgacctcaacgatcttgaagcattgttggacgaagatattttcatgcctacagcaacttagaagttagctttcattgttcattgtatgactttgaatttctcatcaagagaagttacctattattcctggggtgaattatatctcactcactcaagacaataaaaccaaagacattcttaatgctggattgacatatgaatccccaaaaccccttggcttttcctcatgggaaggtatcttagaaaataatgctggaagtcaacatgtgcattttcagcctttatttcctggaacacagcctgataacatgggaatcaatagcaatttttctcaaggagaagagataatggtgccatatttgaccaccagcattgctaagcagcatgagaatggaagtatcattaaagctgaaggaaattggcaggtttatgatgttgattctttacgcatgtccagttggcctatagatagtgcttattcaggctcaacatgtgaggtaagttgtagcaactgtgagcaggaagttaatgatgttgattttcagaaatccttggaacagtgtcttctacattcacacaaacaaaacaaggttctcatgcaaaatgatcttcaagaaaaacttttgaatgaaaaagaaaagataaaatcaaatctagaggcctatggaatagaagacacatatttatcttttaaaaggactctgttagatggacctccagctgaagagggtctgaagaagcttgacagtttcaaccaatggatgagtaaagagcttggagatgtggaagaatcaaataaaccatccacttctggtggttattgggatacagttgaaactgaaaatgaggttggcaacacaactattccttcccaagggcacctggacacctatgtattggatccatctgtttcccatgatcagctttttagcattattgactattccccaagctgggcatttgaagggtcagaaattaaggttatcatttctggagaattcctaagaagtcaacatgaagcagaacaatgtaagtggtcatgcatgtttggtgaggtagaagtgccagcagtgatcattgcaaaaggtgttctttgttgtcatacacctccacacaaggctgggagggtacctttctatgtaacttgttccaataggttagcatgtagtgaagtgagagaatttgatttccaagtccactatactccagaagacactacaggtgagaatagaggaagcacttttgatacttttagtatccgatttggagaacttttgtccctggggcatgcctttcctcagaattcagattcaattagtgtaagtgagaaatctcaactgagaagtaaaatcaattctttactgagggaggaggaggatgattgggacaagctactgaaacttactcaagaggaagatttttctccagaaaatttacaggagcagctgcttcaaaatcttctgaaagataagttacatgcatggctccttcagaaaataacagaagaggggaaaggccctaatatattagatgagggtggccaaggtgtgcttcattttgcatctgctcttggctatgattgggccctagaacccacaatagttgctggtgtgaatgtgaactttcgtgatgtaaatggatggacttctcttcattgggcagcattttgtggcagggagcgcacagttgctttcctcatctctctcggcgcagcacccggagcactgactgatccatgtccagaacatccttctggtagaacaccagctgacctagcttctgcaaatggacacaaaggaattgcagggtatcttgctgagtcttcactaagtgcacacctcacaactctcgatttgaacagggacgcgggagaaaattccggagcaaaagtagtccaaagactccaaaacattgctcaagttaatgatcttgatggtttatcatatgaactgtcattgaaagattcactggctgcagtgtgtaatgccacccacgctgcagctcgtattcatcaagttttcagaatgcaatcatttcagagaaaacaactgaaggaatatgatgatgacaaacttggattatctgatgagcgtgctctttcactcataaaaatgaatgtaaaatcacacaagtctggaccacgtgacgagcctgtccatgctgctgcagtacgaatccaaaacaaattccgcagttggaagggaagaagagaatttttaatgattcgacaacgcatagtaaaaattcaggctcacgtgagaggtcaccaggtcaggaaaagctgtgggaagataatttggtccgttggaatcttggagaaggttattttacgttggcgtcgaaaaggtagtggtttgcgtggatttaaaccggaggccaattctgagggaactatgatacaagatgtatcttcaacagatgatgactatgatgtcttaaaagaaggcaggaagcaaacagagcaaaggttgcagaaagccctagctagggtgaagtcaatggttcagtatccagaggcaagagaccaataccataggctgttgaatgttgtaactgagatccaagaaaatcaggtaaagcatgagagcagttataacaattcagaagaaccgagagaattcggtgacctcaacgatcttgaagcattgttggacgaagatattttcatgcctacagcaacttaaaagttagctttcattgttcattgtatgactttgaatttcacagcagagttaggtgatcaactgtctcactttgattgttatagtaaattagtaatcttaattctcattcttttgttgtt

SEQ ID NO: 26468 - DNA, 500 bp, Glycine max
  unsure (1)..(500): unsure at all n locations
  Clone ID: TF_jC-gmXLIB3564P099ba06b1
cccacgcgtccgtacggctgcgagaagacgacagaagggggtgtgtgtttaaattcaataagagactaagttgaagacttgaagccatgagatgaatcacttatctcttgacactgaagattctcttgcaagcttgctgctggagcttgcagccaacaacgatgtttcgggtttcaaaagattaatcgagtgtgaaccttcctccatagacgaggttgggttgtggtatggccgccacanagagtcaaagaagatggtcaacgagcaaagaactcctttgatggttgctgccacctacggtagcattgatgtcatgacgttgattctttctctatcagaagctgatgtgaaccgatcatctggccttgacanaagcactgcacttcactgtgcagcttcaggtgggtctgaaaacgccgtcgatgctgtgaaactgcttctagaagcaggcgctgatncgaattctgttgatgccaatggtcgccgacccggggatgtta

SEQ ID NO: 26469 - DNA, 682 bp, Glycine max
  Clone ID: TF_GmC1587_1
caacggcacagcaggtggtggaagcatcagtgccaatgacaagaaagcagtgtacaggcacattgtccgtacggcgagaagacgacagaagggaatctcaatgctattattagtgggaaagcaggcttttcttccaacacgccttcttcaattaatccaaacatatcatgtgaaagtaagactccacaagtagaggatatacaagatggttctagtgtgcttcacctggcatgcataattagtgattctgcaatggtagagctgctcctacagtatggtgcagacataaatgctattgattctagagggaggacacctctacattacagcactatgagagggaagaatgcaactgcaagagtgcttattacaaggggggccaatccacttgccgtagacaaagaaggcaacactccttttaagcctgcaacggaacctgacactgcaggcaaagaaactcttgctctaaaccagcaaatcgcatgccctcaaaacttaatagaaaaatgattcatggggtcaccttgtgttcgagatagaaatttggcaagagagcaattgacaatgtgtacaggaccaactttgttttatagagcaatagataatagaagagaagaatggaagatgcgactttttccctaaaagaaaagaaagaaagaaaataaacatttcttataacagt

SEQ ID NO: 26470 - DNA, 3202 bp, Glycine max
  Clone ID: TF_GmC516_8
atgtccccggcttatctaattcttctgctatcagaaggttacgagtatgatattaatgatctgcatcaagaggctcaagccagatggttgaagcctgcagaagtgatgtacattttacagaatcatgaaaagttccagttcacccaagaggtcccacaacagccaaccagtggatccctgtttctgtttaacaaaagaatcctgcgatacttccgtagagatggtcataactggcataagaaaagtggtggaagaactgtgggagaagcacacgaaaggctgaaggttctaaatgttgaagccttaaattgttactatgcacgcggagagcagaaccctgctttccagaggcggagctattggatgttggatccggcatatgagcatattgttcttgtgcattataggaacacaagtgagggaaagctaagttctggagctggggcacaattgtcaccaagttcttctgtctatactcagagtcctagcccatattctactcagaatccagggtcaacatccatacttggtgattcatatgaacctaatcagagtttctccagtcctgggtctacaaaagttacatctgagatattcgttctgaacaataaaatgggtcacatggattgggcagatacagaatcaggaacctcatctgaactcgaggttactcaagctttgcgccgattggaggtacagttaagtttgaatgaggacaactttgaagatattgtttccttcggcagtaagcatgaaactgttcatgattcaaatcccaagcacgatcaaagggtgatcagcaatcaagagcaatctgcagctttctctagacccgatgatcaagggctattttatgatggatgtaatggaaggcaagtttttttgtcctcttcattatggaagcatcaaatgggaagagaggaagatcatggttaccctgatgcaaatgaaaaggctttatggacagagcagctggaatcacataagtcctcatctgcagtcaagttacctcagaaaaatgtatacatgccagctgaaaatgaaaattcagtatcttctgcaagaagggtaccagtttccaaccaggaaaacagtcactggctcaacttcaactgtaataattctgaaaactgtatgatttactttcacctggttaacttaacaacctttttggtatattttggtgtttcttcaacttctgattcccctcccatgttagcagctgttttctcacaacctcaaggtgttgatgaagtcaaatttcctgcctattcttctatgttggaaacacaagtaattaattctgactactatgaaacattgtttgaccaaagccaaattggagcaccaccagatgcaaattcaagcttgactgttgcacaaaaacagaaatttactattaagactatctccccagaatggggttatgccaccgagactaccaaggtcattgttgttgggtcttttctctgtcatccctcggattctgcatgggcttgtatgtttggtgatgttgaagttcctattgagataattcaggatggtgtaatctcttgtgaagctccatctcaccttcctggaaaggttactctgtgcattacttctggaaactgggagtcctgcagtgaagtcagagagtttgaatatcatgataagaccaatagttgcactcgatgtactcaatccgaaacagaagccactagaagtccagaagagctgttattacttgttagattagggcagatgcttctttctgcatcaacaataaagaatgacaacatagaatctggaattcctctaataaaaccgaaagctgatgatgattcatggagccatattatagatgctcttctagttggcagtggaacgtcgagtggtactgttgattggcttcttgaagagcttctaaaggataagtttcaacagtggctttctttcagatcacgggaaaaagatgaagagacaggctgctctttgtccaagaaagagcaagggattattcacatggttgctgggttaggttttgagtgggccttgaaccctattctcacgtgtggagttaatataaatttccgtgacatcaatggatggactgcccttcattgggctgcacgttttggaagggaaaaaatggttgcttcacttatagcttctggagcatctgctggagctgtgacagatccaaatgcacaagatccaactggtaaaactgctgcatctattgcagccagcagtgggcacaagggactggcagggtatctttcagagatagctgtaacaagccatttgtcatcgcttacactggaagagagtgaatcatctaaaagttctgcttatcttcaggcggataggactgttaacagtgtctccaaggaaaatcttactgccaatgaggatcaggcgtcactcaaagataccttggctgctatcagaaatgtaactcaggcagctgcgcggatacaatctgcttttcgctcacattcttttagaaaacggagagcaagagaagcaactgctagtacaggtggcattggtaccatttcagagatttctgctatgtcaaaacttgcgtttcggaactcacacgaatataattcagctgctttatccattcagaagaaatatcgaggttggaaaggtcgtagagatttcttagcattgcgccaaaaagtagtgaagatacaggctcatgtgaggggttaccaggttaggaagcattacaaggtaatatgggcagttggaatcttggacaaggttgtcctacgatggaggagaaaaggagctggtttacgaggtttccgacaagagatggacatcaatgaaaatgaagatgaagatattctcaaggtgttccgaaaacagaaattagatgtagaaattgaagaggctgtttcaagggtgctgtccatggttgactcaccggatgctcgtgagcaatatcatcgcatgcttgagaaatatcgtcaagctaaggctgaacttgcgggtacgagtgacgaagcatcattatcaacttctgtaggagatgacttatttatggatgatttttatccatttccctaagagcaaacgctagcctagataatcttcattattatgaatgaacagtttgtggaacaagctgacttattagtttaacacaatatatattctatagtgataatagcgatggacaatgtcactttgaacagaataaaatggt

SEQ ID NO: 26471 - DNA, 2187 bp, Glycine max
  Clone ID: TF_GmC1240_1
ccacgcgtccggtggcagagaatcgaggaggcgcaagagtaggacgcggggaatcctgaacgccaaagactgaggcgaatatttagctgaaaataaattcacaccacaacccaacacaaacactttctctttctttctctcttcaatcttgatcccattttttttcttctctcttccttcctttggaattgaattcagcatcagcatgaacagcaggtctcaggatcaacgctcaagacctgccaagccagccacaatccatggctgcgccctctccggcgacctcgttggactccagaggctacttcgagacaacccttctcttctcaacgagagaaaccctgttatggcacagacaccacttcatgtctctgctggtcacaataggactgagatagttaaatttcttcttgattggcaagggacagataaggttgagatggaggccaagaatatgtatggagaaactccattgcacatggcagctaagaatgggtgcaatgaagccgcacaattacttcttgcttgtggtgctactgttgaagccagagcaaataacggtatgacacctttacatcttgctgtttggtactcactacgagcagaagaattcttaactgtgaaaacattgcttgagtacaatgctgattgcagtgccaaggacgatgagggaatgactcctttaaatcatctatcccaaggcccgggaactgagaaacttagggaactattactctggcatcttgaagaacaaaggaagcagcgagccattgaggcatgcagtgaaaccaaagctaaaatggatgagcttgagaaggaactatcaaatattgtcggtcttaatgatctaaaagtacaacttcgcaagtgggcaaagggcatgcttttggatgagaaacgtagatctcttggtctgcatgttggcaggagaagaccacctcatatggcctttctaggcaaccctggaacaggtaaaactatggtagcacggattcttggaaaattactccatatggtgggaattctacccactgataaagtgacagaagtacagcggactgatttagttggtgaatttgttgggcacactggtccaaaaacaaggaggaagatcaaggaagcagaggggggaattctttttgttgatgaagcctatagattgataccaatgcaaaagtccgacgataaggactacgggttggaagccttagaggagattatgtctgtcatggacagtggaaagattgtcgtaatatttgctggctacagcaagccaatgaagcgagtcattgcttctaacgaaggtttctgtagacgggtgaccaagttttttcaatttaatgatttcaactcagaagaactagcgcaaatccttcacatcaagatgaataatttagctgaagatagtttgctatatggatttatgttgcatcccgattgctgtataaaagccttagcagcattgatagagagggaaacaacagaaaagcaacgtaaagagacaaatggaggtttggtagataccatgttggttaatgctagagaaaatttagacctaaggctcagctttgactgtatggatacagaagaacttcttaccatcacattggtagatttagaagcaggccttcagcaattaacacagtaatcattctttgcaatctagtagatattttggagagattcatttcagcttacctcaattttcacacaagtttgacatctgcacaatgaggaacatatcatgaataagtttggtacaataggttgattcttttgggagttcttttccttgtattttgtaattgataatattatataggcttcattcatgtactttgctatatttttttttatctgaataatgatttgtagacacctaatgcaaatctataccttgagagaaagaactagaagagagagaagtgattatttgatgagtgatatgatgtgattaagaagggagaggaagatagggagaaatgaagggtcaaatgaaatgagtgtttaggtagctatgtatcattgttgtttttatctgcctttcatttgtattcattgtatgttattattcattattgtgggggagtaacgaaatcttcttttatttgtggctgtcccaaaatattttcattattattaaccattaatgttaattggtgatgctttttaaaaaaagggaaaaca

SEQ ID NO: 26472 - DNA, 674 bp, Glycine max
  Clone ID: TF_uC-gmflLIB3275P054d03a1
gtcatgcaaaacttggcaacgactaatattcatttgttggtccaaatctttcagaagttgtatcttagccccatctgtcacactgatacatgtctaagacgtctttgaggctgcttaaacaacttgattagttcatatgttctggcacattgaccattgtaaaggcaaaggtcaagaggagttaaaccatcctcgttttttaatgtcttatcagcacctttaatcagcaaaagcctcactaaatctgtcctctgagcttgaacagcaagatgcaatggtgtccagccataattgtccgggagatttatatccacattatacaataagagtattttaactgtctgggtagaagctgttagtacagcatagtgcatcaatgtggctccctcattatcctgtacaaagggattagctgagtttctcaggagataattggttatggcctgcttttttccaattattgctctgtgaagggcagtcaaaccatccctatccacagcattgatatcaacattgtgcttcaacagagaatctaaaaggtaaaattctccacatgcagcaagagtgtgcagaggaagccatttatcctgaaaataatagtagtattgaccattaaaaaaagcattgaaagtattcacccaagactaagtgaatcagaacccttttccctccct

SEQ ID NO: 26473 - DNA, 2559 bp, Glycine max
  unsure (1)..(2559): unsure at all n locations
  Clone ID: TF_GmC16_1
agggagccaaacaggcttacgcggaatctgactgctgcccgaagtcattctcagtaactgctaatcactgacacggtcagctaagctaagctaccccttctctctctaaaacctttgccattgtctcccacaacaccttacaacttacaactccaatcaggcacacgcgggtgagagtcaagattcattcatttatttataaccaccggttcaggtggcgcagcaaaaccaaacccacaagaggtgaagaacaataacataaaccattcttcacctctcctctctcccaccatagtaatgggtcagagcctaagttgcagtggcaactatgaccacggcctcttcaccgccgtgcagcacggtgaccttgaaattgtcacaactctcttggactccgacccctctctcttgcaccaaaccactctctacgatcgccactctcctcttcatattgccgctaccaatgaccagatcgagattctgtctaagctcttagatggatctctcaacccagatgttttaaatcgccacaaacagactccgcttatgctggcagcaatgcatgggaacatcgcgtgtgtggagaagcttcttcaagccggagctaatgttttgatgtttgatactagttacgggagaacctgcttacactatgccgcatactacggccattcttcttgccttaaggctattctttcttctgctcaatctagtccagtatctgcttcttgggggttttctcggtttgtgaatattagagatggaaaaggtgcaacgccattgcacttggcagctcgtcagagacggtctgaatgtgtacatattctattagacagtggtgctcttgtttgtgcttcaactggtggatatggctgtcctgggagcactcctctacatctagcagctagagggggatctatagattgcattcgtgaattgttggcatggggtgctgatcgtcttcaacgcgatgcatctgggcggataccatatatggttgctctgaaacacaaacatggagcctgtgcatcattgctaaatcctacatctgcagaacctcttgtctggccgtctccattgaagttcatcagtgagcttaatcctgaagccaaagctttattagagcaggcattgatggatgcaaacagagaaagagagaaaaacatattgaaagggagttcttactctctgccatctccatcacattctgatggggtagctgataatatgtctgaggttagtgagtccgaattatgttgcatctgctttgagcaggtgtgcacaattgaagttcagaactgtggccaccagatgtgtgcacaatgcacactagccctgtgttgccacaacaagcccaaccctgccactgcctgtcttactccaccagtttgtccattttgtcggagcacgataacaagactcgttgttgtgaagacagaatgccacgatgaaactgatcaagacagtgctgatatcaactgttccaagctgagcaagtcatcaaggaaactcagacacttgaatgacagtggtagcagcagcttcaagggactatctagtgttagttcattcgggaagttgggtagccgcagctctggaaggattgctgctgagtggcttgataaacagtgatggcaaattacttgtggtaatcaatgattccatattggcaagatacggtaactacagaggtgcttaaccggcaaggcaaaaatcaaagttgaaaacaggtgaaggaatattatgtaattttgggaaataagcaaaagtgagttgaagtgaagtgaagttcgcggtaggtaccaagtgttgttgggaaaaagagaaggggatgtcatgttgttgtagtattattgttacttgagaatgaagaagcatcacctgcgtcgatcgatgattttgggcatcgtcaataattttattttatcatacgtatcccagtaaagtgggaataatttctctcaaaagtataaatcaataatattaagggaaagtgtattgcttatttgcattatttatttctttgtatcgataagatataagaaataagatacaaaagagaaagacagagcctttttgttgcttgtcaaaaaatcaataatattatgggaaactgtattgcttatttgcatctgatttatttctttgtaccgatatgttatatgctatacgtttcttaagagaaaaaaaaaagccttttgtaaaaaaaaaaaaaaaaaaaaaaagaaaaaaaataataaataagagagaaaaaataaaaaagtgcggtggatnatgtagggaggatncgaggttagtgtgttttgaatgntantnnttttttntnanagagagggaaannaatttnaanngggcggggnnnntgaaangnnnggagttggngaagngtggggnnggnnaaanaatagggnttgtggaagagnagncgttnnggnnnnaggggggagtaggnacgagggtggcggcgcngctcgncgcgcaaanggcacngagccngcgcggcgagggggagcggccggcccgggagccgcgcagtggcgccgcgcncggcggaggcgc

SEQ ID NO: 26474 - DNA, 961 bp, Glycine max
  Clone ID: TF_GmC88213_1
cacatgttcttctcttatctctatctcttctgctttggaaccaaaacacaaacacaataacaacatatcaagctttaagtgcaagtaaacaaacacaacacaaccaaggttgacaagaattgaaagttgaatcctgtgtgttgctggtgcagatatggactcaaactcaaaggctgtgtgcttcataacccaccaagccattttcaacgcggttcgatgtggggaccttgaagggctgaaggagcagctgaagaacaagggtgaagagggggtttctgaggtgatgtctatgcagaacgatgcaggggaaaccatgttctacatagctgctgagattggtcttcgtgaggtgttcagcttcttgtttggtttatgtgacatggaggtgctgaagatcagggccaaatcggatttgaacccctttcacgttgcagccaaaggtggttgtttggatattgtaagggaaattttgagtacttggcctgaggtttgcacgttatgcgactcctctaacactagtcccctatattttgctgctattggagatcatttggatgtagtgaatgcaatattggatgttgatgtgagttcaatgatgatagtaaggaaaaatggcaaaactgcattgcacaatgctgctaggtatggcatccttcgcattgtaaaagcactgattgcccgggatcccggaatagtctgcatcaaagatagaaagggtcaaactgcactgcatatggctgtgaaaggacaaagtacttcagtggtggatgagatattacaagctgatcttaccatattgaatgaacgagataagaagggtaacacagctcttcacatggctaccaggaaatgccgtcctcaggtagtaagcattttgttaacctacacagctctgaatgtcaatgccatcaataatcagaaggaaacagccttggattttgccagataactacgatatgga

SEQ ID NO: 26475 - DNA, 2033 bp, Glycine max
  Clone ID: TF_GmC1882_1
ggctcgagacccccaccatcttggtcgttggtgcgggcgatcatggatcatcatcgtcaccctcatcacaccacccctctctccgagcccaccacccccaccacccctcgccccaccctcttcctctccacctccggcaaggccctcctcctctccaactccaacaaatccctcctcctctccaactccagcaaacgcctcgacaccccgaggaaaaaatatgtcaagcaagtcaccggccgccataacgacaccgagctccacctcgccgcgcagcgcggcgacgcggcctccgtccgccagatcctcgccgagatcgactccatcatgatggggagcttcgagttcgacgccgaggttgccagtgtcaggtccgccatctttaatgaggtgaatgagctgggagaaaccgccctcttcaccgcagctgaaaagggccacctcgacgtcgtaaaggagctcctccctcacaccagccacgacgcgctttcctctaaaaaccgctccggctttgacaccttgcacattgccgctagcaaaggtcatcttgccattgtgcaggcgctactagaccatgatcccggtttgattaagacgtttgcgcagtcaaatgcaactcctctaatctctgcggctacacgagggcatgcagatgtcgttgaagagttgttgtctagggatcctactcagttggagatgactaggtccaacgggaaaaatgcgctacatttagctgcacgccagggacatgtgagtgttgtaaagatactactacggaaggatcaacaacttgctcgaaggactgataagaaaggacaaactgcgctacacatggctgtcaaaggggttagttgtgaagtggtgaagctgattcttgctgcggatgcagccattgtcatgcttcctgacaaatttggcaatactgcgttgcatgtagccacaaggaaaaagaggacagagatagtgcatgagctgttacttctacctgacaccaatgtaaataccttgacaagagaccacaagacagctcttgacttggcggaggggcttccaatatcagaggaaattctggagatcaaagagtgtctcattcgttatggtgcagttaaagccaatgatctcaaccaaccaagggacgagctaaggaaaaccatgacacaaatcaagaaagatgtgtattttcaactggaacaagctcgaaaaacaaacaagaacgtgagtgggattgccaatgagctacgaaagctgcacagagctggaatcaacaatgctgcaaactcagtaacggtggttgctgtgctatttgcagcggttgcatttgcagcaatgttcacagttcctggtggggacaatgatcaaggggtggcagtgatggcacacactgcgtctttcaaggccttcttcatatccaatgcaatagcactctttacatcattaagtgtggtggtggttcaaatcacgattgttagaggggagataaaggctgaaagaagggttgtggaggtgatcaacaagatgatgtggttagcctctgtctgcacctctgtttcgttcatttcagcatcttatatagtagttggtcgacgcagccagtgggctgcaatacttgttaccattgtaggggccattgtaatgggtggtgttcttggtaccatgacatactatgtggtgaaatccaaacgctcccgaaggatgaggaggaagaaagggaagttctctaagacaggaacacaatcgtggcgcctttcgagttcggatgattcggaaataaatccaatctatgccatttgatgttacttaatttgggacttcaatgtaagtttgatgcttctgttcaatgcttttgtatttatttatttgtcaagcattgagaaggactcttagcttaatttggaggtttcatttgttcatagagagtggcttttatgtaagtaaaatggttccttgttactcagtgtttcaaagggaacaatataaggaagccaaagtggtcagttacactgtttcttatgaaggttgatttcacatcacac

SEQ ID NO: 26476 - DNA, 1433 bp, Glycine max
  Clone ID: TF_GmC2979_136
gtaagcaaaccccaggaatcctgaaagctttattaatattttcatactatagtttcagagttgatcttccagaagtgctaatttgaatccacaagtacatatgaaatttaacttattcacaaagtcctatgtgggattatgattcttctagtatagacatttctctgtatgcatttctagctgaaaattttcattttttaaacaaacatgtgtactgctacttatgccacacgcgtgaacacgcctaactccttcacaccgtctcaaatctcaaacatgatatagctttatgacttgatctatcttagctcgacatacagggcaaccccatttctttgatttcacctcgttcaagcaagacatgcatccagcaacatggccacagggtatgcatgccccttctgctggagcatctaaacatatcacgcatgatgaactacttccaccggcacttttttgtccttctttaagaagcttctcagcatctggagatgccatatcaactgggcttaaatcaattgatggatactgaatggggccatctcctggaatctcattggtgattggcggagcggatggattcaaatccaaagcactaggattcacacagctttggaggtgctgagtattgccatccgggttagcttcttgtaccaactcactatcacttgtattgggatttggtgtgccaagaaaaccatgattgtctgtgttcactgcactgcttgaagagcttgcatcaaagcttggctgtgtatcaggaaagggtggtctctcctgcatggcagactgaagggatgcactgatggccatagccaactctgtgtcttctgcatctggtggtgctgtgggtggacctgtaggcacattgttttgcaagaatgcaggacttgcctgtggaattcctttgcaagcattagaaaaccatgtaagttgttgcttgtcattctcacttgcaggcccaagtttaatgcgtgttttagtagtgtgattaacaactgtcactgacggatcagactggtgaagctttggttcttgtaaatcggcgttccacagtccaataacagtatgtggttgtgcatcctgcaacctagaatatatggcaagctccaacttgtaaggtttggcaagagtacgggagccaactggtaaaacaaccacccaaactttctttgataccaactgaggagctactacttctagaaacccaggaccatgaaactcgcgcaaccaaccggagaacaagcatagatgactctcaattgtacgaacaacattgctgtgtcctttggccctggcaacctcaagagcagttagacaatcatcattcaagactaaaggattggctccatgcaaaagaagtaagttaacaatactatcaaagtcccttttagctgcatgatgcaatggagtcccaccatgacgaccaggac

SEQ ID NO: 26477 - DNA, 1647 bp, Glycine max
  Clone ID: TF_GmC311_2
agcgcatggtcctttctgaaaattcctccgcaatgttcctcaatttctccgccaatactcccaagttggttcctctcgcgctagggttttagtctacagctcattctcacacacaaccctaacaacacaaatttcccactttctagggtttcctttcgtcatccaccatggccgagtggcagtccctcctccaatcgattctcgtcggcctcattttctcttaccttctagccaagctcatctccatcgtcgtttccttcaaagacgacaatctcaccgtcacgcgcgcctccgccgccgaaaccaccgccacgcgcgcggaacaattcgaggatgctctgaagcgcgacgacgccgtttcctccgatgcgcgccccttcgaggaggagtcggtcgtggccgagcacggcagcgtgaggatcgacagcgatggcgactacgacgacgactgggagggcgtggagagcaccgaattggacgaggcgttcagcgccgcgacggctttcgtggccgccgccgccgccgatcggctatcgcagaaggtgtcgagcgacgtgcagctacagctttacggtctttacaagattgccaccgaaggtccctgcagcacgccccagccttcgcccctcaaaatgaccgcacgtgccaaatggcaagcgtggcagaaattgggtgctatgcctcctgaagatgcaatgcagaagtacattgatattgtgaccgagatctatcctacttggcttgatggttcatctttgaggaataaaagcggcgacagtggtggacatggttcagaggctaagggaccaatgggccccgtattcagcacttttgtttatgaagaggaatatggcagtgactcacaaatggaagccattcatggatttgccagggaaggagatatggctaatctgctcaagtgtattgaaaatggtgtttcaatgaatttaaagggacaatgatggacaaactcccttgcattacgctgttacatgtgagagggaagccatagctgagtatttagtgaagcataatgcagacatatattcaaaagataatgatgggagttcaccacgtgacatctgtgagtcaaactggccatgcatgcagcatgtgggggaagaagtaaattgattgattgattgtttgcttgttgcagcttctggccaatacaaccttttagccaaatcccaagaggatgttcgtgtctatataacttgattttttttgtccttactcatgatggtgtatacacccttttcagtctagtgtacgcctatgcaccgcttaggtaatggttagttaattaggttgtattctgttctattattgtttcctctgctcagctctttaaatctggctctcatttcttatatatttcatggataaagatatacacggaaactagaaatagtaacagggaaagggaatcttaaacgatattctttcctcggaaaaccttctacccttctattgaaggcgatatagattttacagggttattttaggtcttcaaatggtgttaagattatccgcagtgaaatctttgattgataatgatgtcgtgattatgttgaatctgatgttttaattaataatgtaatttaaatttgtgtcaaatattataaatcatatttttttcatatt

SEQ ID NO: 26478 - DNA, 830 bp, Glycine max
  unsure (1)..(830): unsure at all n locations
  Clone ID: TF_GmC190413_1
tctatctgtctgtctcggctcgtcgttctagatcgcgatctagaactctctctctctctctctctctctctctctctcatgaacgacgcacttcccatgtttcctcggttctatagatggagatggaagctctgaatctcgctttcgccgaatctcgtcttctgtgttcagatttcgctattctccgtttggattgatgaaaaaaaaagccttttctcttcccgttatttttttctcgtcggatttggaattcgatcttcacctcatccactcgtaatcgctatccgaagcatgtgcggtggtccagagaaatcaaagtctctttcaactccatcttcatctgcggtagaaggttcaactaacggcaaagacatgaacaaattaacagttcatgctgcagattctttttcctgcttactcgagcttgcttctaacaatgattttgaagattttaagctagctttagttagggatgtttctctaataagtgaagttggcctctggtatgttcgccagattgggtccaaacaaattgttcttgagcaccgaactcctttaatggttgctgctatgtatgggagtatagatgttctaaaacttatactctcatgtccggagactgatgtcaatttctcctgcgggacagataaaagcactgcccttcactgtgctgcatcgggtggttctgttaatgcagttgatattgtcaaattgctcttatcagccggtgctgatatcagntgtgtggatgctaatggaaatcgtccagttgatgttattggtgttcctcctaagcttgaaggtctgaaagcacccttgaagatctactt

SEQ ID NO: 26479 - DNA, 2626 bp, Glycine max
  Clone ID: TF_GmC26_1
cggctcgagcattcgtccgatcgaggtcttctcgatttccttctctacaacacaacgctctcttctcttgcaaccaaagtacttgttccagtgtctactctactcaaaaaggatttgggacatcatgtgcagtgattcgaaaagtaaactttcttccccaaccctcgtcgtcatggagaatagtaacattcagaagcagaatctggatggtctctacaactcggttttgcttgaattgtctgcatctgatgattatgaagctttcaaaagagaggtggaggaaaaaggcttagatgtgaacgaggcaggcttttggtacggtagaagaattgggtcaaagaagatgggatctgaaacgaggacccctctgatgattgcttctttgtttggaagcgctaaggtgctcaattatattcttcttcagaaaggaggaggtgttgatgtgaacagggtctgtggttctgatagggccactgctctacattgtgctgttgctggtggctctgaatcctcacttgagattgtcaagctcttgcttgatgctggggctgatgctgagtgccttgatgccagtggcaacaagccggtcaatctgattgctcctgcctttgattctttgtcaaaatcgcgaaggaaggccatggagatgttcctcaggggtggtggggaaagagacgatgaactcatgagccaggagattcaagagagaaaagaagcaattagtgataataagaaagaataccctgttgatatatcactgccagacataaacaacggtgtatatggaacagatgattttaggatgtacaacttcaaggtgaagccttgctcaagggcttactcccatgactggactgagtgtccattcgttcacccaggggagaacgctaggaggagagacccacggaaatacccttacagctgtgttccttgccctgagttccgcaaagggacctgccagaagggtgattcctgcgagtatgctcatggtgtttttgagtcctggctacatcccgcccaataccggacaaggctttgcaaggatgagacgggctgtgctagaaaagtatgcttctttgctcacaaacctgaagagctacgccctgtgtatgcttccactgggtcggctatgccatcaccaaaatcctattcagctagtggacttgacatgacagcgatgagtccattggctcttagttccacatctttgccgatgccaactgtttcaaccccacccatgtctcccttggcagcagcttcatctcccaagagtggaagcatgtggcagaacaaaataaaccttactccaccatcgttgcagctccctggtagccgactgaaggctgctttgagtgccagggatctggagatggagatggaactgctcggtctagaaagccctgctcgccaacaacagcagcagcagcaacaattgatcgaagagattgccaggatctcttccccatctttccggagcaaggaattcaataggattgttgatttgaatcctactaaccttgatgacctgttagcatctgctgacccttctgtattttctcaactacatggactttctgtgcaaccttcaacacccacacaaagtgggcttcagatgcgccaaaacatgaaccacctccgtgcgagttatccatccaacatcccttcctctcctgtgaggaagccctcagcttttgggtttgactcatcagctgctgtggcaactgcagtgatgaattctaggtctgctgccttcgcaaagcgaagccaaagtttcattgatcgtggagctgcaacccaccatcttgggctgtcttcagcttccaactcttcttgcagggtatcctctaccctttcagattggagttcccctaccgggaaactggattggggtgtaaacggagacaagctgaacaagctgaggaaatctacttcctttggattcagaaacagtggggtaactgcatcccccatagcacagcctgaatttggtgctgagccggatgtctcatgggttcattcattggttaaagatgttccctccgagaggtctgagatatttggtgctgagaagcaacaatatgatctcagtaaagagatgcttccaccatggatggagcagctgtatatagagcaggagcagatggtagcatgagctagggctgccatggcaatgcttcttggttattctgacaaagtttatttatttatttaattattttattcatttgaaatgcttctactatccaatattacacaatattattagggataggatgacatatgttgcaaagaacaaagttcaggttaatccagagattcaaacgggagttccaacttctagatcagggaagacttggagaaacgttgaacaaaggatgctgaattttttttattgtataatataaatttattccccccttttctctacgggatggatgtattttctctagcaagtggacctcaaagtatttgccattgattaagcagcacaattcttttttatataaaattgttatgccattttatcaatgcttatccatcattattagaagtactttcaaggaaatttctcgtgtgactgcttattggctattctttcttatttaaatacttgatttcttgtgac

SEQ ID NO: 26480 - DNA, 2504 bp, Glycine max
  Clone ID: TF_GmC26_2
ccacgcgtccggtcttctcgatttccttctctataacacaacgctctcttctcttgcaaccaaagtacttgttccagtgtctactctactcaaaaaggatttgggacatgtgcagtgattcgaaaagtaaactttcttccccaaccctcgtcgtcatggagaatagtaacattcagaagcagaatctggatggtctctacaactcggttttgcttgaattgtctgcatctgatgattatgaagctttcaaaagagaggtggaggaaaaaggcttagatgtgaacgaggcaggcttttggtacggtagaagaattgggtcaaagaagatgggatctgaaacgaggacccctctgatgattgcttctttgtttggaagcgccaaggtgctcaattatattcttcttcagaaaggaggaggtgttgatgtgaacagggtctgtggttctgatagggccactgctctccattgtgctgttgctggtggctccgaatcctcacttgagattgtcaagctcttgcttgatgctggggctgatgctgagtgccttgatgcgagtggcaacaagccggttaatctgattgctcctgcctttgattctttgtccaaatcgcgaaggaaggctttggagatgttcctcaggggtggtggggaaagagatgaactcatgagccaggagatggagctacagatgttttctgttccagagaaaaaagaaggaagtgataataagaaagaataccctgttgatatatcgctgcctgacatcaacaacggtgtatatggaacagatgagtttaggatgtacaacttcaaggtgaagccttgctcaagggcttactcccatgactggactgagtgtccattcgttcatccaggggagaatgcgaggaggagagacccacggaaatacccttacagctgtgttccttgccctgagttccgcaaagggacctgccagaagggtgattcctgcgagtatgctcatggtgtttttgagtcctggctacatcccgcccaataccggacaaggctttgcaaggatgagacgggctgtgctagaaaagtatgcttctttgctcacaaacctgaagagctaccccctgtgtatgcttccactgggtcggctatgccatcaccaaaatcctattcagctagtggacttgacatgacagcgatgagtccattggctcttagttccacatctttgccgatgccaactgtttcaaccccacccatgtctcccttggcagcagcttcatctcccaagagtggaagcatgtggcagaacaaaataaaccttactccaccatcgttgcagctccctggtagccgactgaaggctgctttgagtgccagggatctggagatggagatggaactgctcggtctagaaagccctgctcgccaacaacagcagcagcagcaacaattgatcgaagagattgccaggatctcttccccatctttccggagcaaggaattcaataggattgttgatttgaatcctactaaccttgatgacctgttagcatctgctgacccttctgtattttctcaactacatggactttctgtgcaaccttcaacacccacacaaagtgggcttcagatgcgccaaaacatgaaccacctccgtgcgagttatccatccaacatcccttcctctcctgtgaggaagccctcagcttttgggtttgactcatcagctgctgtggcaactgcagtgatgaattctaggtctgctgccttcgcaaagcgaagccaaagtttcattgatcgtggagctgcaacccaccatcttgggctgtcttcagcttccaactcttcttgcagggtatcctctaccctttcagattggagttcccctaccgggaaactggattggggtgtaaacggagacaagctgaacaagctgaggaaatctacttcctttggattcagaaacagtggggtaactgcatcccccatagcacagcctgaatttggtgctgagccggatgtctcatgggttcattcattggttaaagatgttccctccgagaggtctgagatatttggtgctgagaagcaacaatatgatctcagtaaagagatgcttccaccatggatggagcagctgtatatagagcaggagcagatggtagcatgagctagggctgccatggcaatgcttcttggttattctgacaaagtttatttatttatttaattattttattcatttggactgcttttactatccccaacattacccaatattatagttagggatgggattaaatatgatattgcaaagaccaaagttcaggttaatccagagatttgaacggagagttccaatttttaggtcagggaagacttggagaaacgttgaatgaaaaaggatgctgaattttattttattttattgaataaaagaaaaatttattccccccttttctctacgggtggatggatgtaaaaaaaaaaaaaaaaaaaaaaaaaaaaaaaaaaaaaaggagaa

SEQ ID NO: 26481 - DNA, 2517 bp, Glycine max
  unsure (1)..(2517): unsure at all n locations
  Clone ID: TF_GmC275_1
ctcgagcgtttttgcttttgccacccttcagccagaacactgtttaagttcatgtcatgttggccaacttcggattccaacttttgtttccttgtacttcactgtttacaaggttaattaatctcagttcctagaatctcattttttcatttttcaacaacttctagtccaagagaataagcatatattctgttagtggtgtgtgctttcactttttgcttttatgaggggtcttaaaggcatctttacagtgctgcttgcaactactagaattgaacaaagtggtagtgagtctcctttgttgtaaaagggtcatctctaatttggactactactactatgcctccttcaaacttccctcttcgttgggagagcacaggagaccgatggtggtatgcatctccaattgattatgctgctgcaaatggcctctatgatctggtcactgagcttctccaccttgacaccaacctcctcattaagctcacttcccttcgccgaattcgccgccttgaagccgtgtgggacgatgagtccaagtttgaggatgttgccaggtgccggtccaaggttgcaaggaatcttatgattgagtgtgagacaggaagagggcataagcataactctctcatccttgcaggctatggtggatggcttctctacactgctgcttcggctggggatgtagactttgttcttgagttgttggggagagaccctcttttggtgtttggtgagggagagtatggtgtcactgacatgttttatgctgcagccaggggcaagaactgtgaggtctttaagctcctgcttcattctgctctttcaagaaaggagtgccttggtggcagtgaagcagaattggaagagaagttggatgaaggttctaaggttttcaagagggatgtgatgaatagggccattcatgctgctgccaggggagggaattgggaaatactgaagcagattctagcaagtgtttctgtttctcaggttttgtcttatagagattcccaaggatgtactgtcttgcatgcagcagctgcaagaggccaagttgaggtggtgagaaatctaattgaatcctatgatatcatcaactcagctaatgctcaaggcaatacagcattacatgtggcctcttacagaggttacttacccgtggtagagattctgattggagcatctcactcgttagcaacgttaaccaatcactatggagatacttttcttcacatggcagtggttggtttcagaagccctggtttctgtagactggacaagcacactgagctcatgaagcaactgacaagtgaaaaaattgtgaaaatgaaggatatcatcaatgtcaggaacaatgatggaagaacagctcttcatgttgctgtggttcataatatccaatttgatgtagtggaattactgatgtctgttccatcaattgatttgaacatttgcgatgctgatgggatgacccctttggatcatcttagacaaaaatcacgatcagtgtcttctgaaatcttaatcaagcaattaatttcagctggagggatctctaattatcaggactatgtgacgagaaatgcccttgttaagcatcttaggactcatggtattggaggcagtcccggaacatcatttagaataccagattctgagatattgttgtacacaggcattgagaattcatgtgatgacaattatgatcaggcaagtgtagaatcaaattcatggtcaagtgaaataaacaattatgacacagccaattccccatgtaacagcaagtctagttctgtcaattatggtgcaaggcacttaaagtttctgctccaaagttctagaagaagagacacaaaagaagcagcctcagatttagaagatgatgtttctgtgaattccttcggttcaaggaacaacttggaagactttccaatcccattgaggcaaagatactcaaaaatgtgttctcttccaaacaacaaaagaacactatctataaggacttatcttcctagtccttcagccaaaaaacattttcatgcaggtctagtacaaggtgtgattaaggtaaagccacaaatgcctctacctgttcattcaacatctaatctttttcaagaactatctatctcttctcattcttcgaataataagcaaaaacgtgttgatataatgggaccctcttgctccaatcgaccaatggatggtgatggcacactacaattgagctataagcagggctctttcaataagaaactgatgaatcgatatttttcttttggagcacatggccaggctttggaggatgcaaatagctgcacgatgtcaaatggcagttccaagcattttagttctttagttgcataaatgttaaataggagctttgaaaaagtttgtgctgatcacgtttaaaaagttcatgtggaatatgcaacaataataattaatattaatgatactgataatatatgttcggcgctccnnnnnannnnnnnnaannnaagggcggccgcc

SEQ ID NO: 26482 - DNA, 3708 bp, Glycine max
  unsure (1)..(3708): unsure at all n locations
  Clone ID: TF_GmC6578_1
agaaatgctaatgtgcggtcacgattgagagatggttttggcccatcagtagctcacgtttgtgcctatcatggtcaaccagattgtatgcgggaattactattagctggagctgatcccaatgcagtggatgatgaaggtgaatctgttctgcatagagcaattgccaagaagtacacagactgtgctcttgtgatattggagaatggaggctgtagatcaatggccatcttgaattcaaagaatctgacaccgttgcaccattgtgtggcaatatggaatgttgctgttgtgaagagatgggtggaagttgctacttctgatgagattgctgaagcaattgacataccaagccctattggcactgccttgtgcatggcagctgcttctaagaaagaccatgaaaatgaggggagagaactggtgcggatattgcttgcagcaggagctgatccatctgctcaagattcccagaatgggaggacagctttgcatacagctgctatgactaatgacgtggacttggttaaggttattttaggtgctggggttgatgtgaacattcgcaatgtgcacaacagtatacctcttcacttggccttagctaggggtgcaaaggcatgtgttggactgcttcttgatgctggagcagattataatttgaaggatgatgatggtgacaatgctttccatatagcagcagagacagcaaaaatgattcgtgaaaatcttgactggcttattgttatgctaatgaagcctgatgctgacattgaagttagaaaccacagtggcaagacactacgtgacattttagaggctctcccccgagaatggttatctgaagatctgatggaagcactcgtgaataagggagttcatttgtttcctacaatatttaaagtgggagactgggtgaagtttaaaagatctgtcacaactccaacacatggatggcaaggtgctaaaccaaagagtgttggttttgtgcaaagtgttccagacagagataatctcattgtttcattttgttctggagaggttcatgttcttgcaaatgaagtcataaaagttgttccattggataggggacaacatgtacacctgaaagaagatgtaaaagagcctagatttggttggcgtgggcagtcacgtgacagcattgggacagtattatgtgttgacgatgatggaatcctccgtgttggatttcctggagcatccagaggatggaaagctgacccagctgagatggaacgtgttgaggaattcaaggttggagactgggttcgtattcgtccgactcttacatctgcaaagcatggactaggatctgtgacaccaggaagcattggcattgtatattgtatccgaccagacagtagtctgttaatagaactgagctatcttccaaatccatggcattgtgaaccagaggaggttgagcacgttgctccttttaggattggggaccaggtatgtgttaaacgatctgttgcagaacctagatatgcttggggtggtgagacacatcatagtgttggaagaataagcgagattgagaatgacggtctcttaataatagagataccaaatagacccataccatggcaagctgatccatcagatatggagaaggtggaagatttcaaggttggagattgggtaagagtgaaagcttcggtgtcttctccaaaatatggatgggaggatgttaccaggactagtattggggtaattcatagcttggaggaggatggcgatatgggtgttgctttttgtttcagaagtaagcccttttcttgctcagtcactgatatggagaaggttcctccatttgaggtgggccaagaaattcatgtgatgccatctgttactcagccacggcttgggtggtcaaatgaatcaccagtccgctgttggaaaaatattgagaattgacatggatggtgctctcaatgtgagggtcactggtaggcagaacttgtggaaagtttctcctggagatgcagaacggcttccgggatttgaagttggggattgggtacggtcaaaaccaagcctgggaaccagaccaagctatgactggaatagtgttgggagagaaagtttagctgttgtgcatagtgtacaggattctggatacttggagttggcttgctgttttcgcaaagggaagtggatcactcattatacagatgttgaaaaggttcctagctttaaagttgggcaatatgttaggttccgaactggtttggttgagccaaggtggggttggagaggagctgagcctgaatctcatggggttataactagtattcatgctgatggagaagtcagggtcgcatttttcggtctgccaggactgtggagaggagatccttcagaccttgagattgaacaaatgtttgaagtgggagagtgggtgaggttgaactacaatgcaaataattggaaatcaattgggccaggtagtgttggtgttgttcaaggaatagggtatgaaggagatgaattggacagaagcatttttgttggattttgtggggagcaagaaaagtgggtaggaccaagttcccatcttgaaagatttgacaaactctttgttggacagaaggttagagtaaaacaatatgtaaagcaaccaagatttggatggtcagggcatacacatgctagtattgggactatacaagcaattgatgctgatggaaagctccggatatatacaccagcaggatccaaaacatgggtcttggacccatcagaagtggaggtggtagaagagaaggagctctgtattggagactgggttagggttaaagcatcaatttcaaccccaacccaccattggggggaagtgagtcattcaagcataggggtggtgcatcggatggaagacgaggatctgtgggtgtcattctgttttacggagaggctatggctttgtaaggcatgggaaatggaatgggttaggccatttaaagtgggggacaaggtaaggatcagagacggactggtgaccccacgatggggatggggaatggagacacatgcaagcaagggacaggttgtaggggtagatgcaaatggaaaactgagaataaaattccggtggagggaagggaggccctggataggagaccctgctgatcttgcccttgatgaggactgatatgttattttaggaacatggaaggttgtatcataagtaaattttctcattcagctctttagcctatgtttttctgggctgagcttgtgcaaagtggaaagctatatatgcggtctgctacttgatgtgctctaaaccataactcctttatgaaggttgaaatgcagtttggccatacatgtattgatgttaataaacagaaggggtggaagaatggaagctgtggagataggaaaactgtcttgctgaccgagtggtggagatttaaaggcagctaaaataaatatattggcagttggcccatttatatattcattactcacaagtttgtagtcccagattttgaggtttatatcgtatgtatgtttatttcatattgtacaaattgtattcaactgtcaacttaatgcatttttttgactcgattatgcagttgcataattcttgaaatagaattgattccattatacaaaaaaaaaaactaaaaaaaaaaaaaaaaatnnnnnnnnnnnnnnnnnnnnnnnnnnnnnnnn

SEQ ID NO: 26483 - DNA, 2755 bp, Glycine max
  Clone ID: TF_GmC6455_1
cggacgcgtgggcggacgcgtgggcgctcgcgcaaggcacggtcacgaaatcacactttggccaattcgatgccggccgttcacattcgaacccacgacatgctgaacccgttggagcgtcaattcctcgatgcagccgaaaaaggcaatcggccggtgctggaagcgtgtttggccaagcaattgagaaaagcgccgctgaatatcaatgcggtggacacaatgggacggacggcgatcgaaatagcggtggacaacgaaaatttggaaattgtgcaacttttgctgcgacagcccgacgttcgcatcggaaacgcccttttgtgtgccattcgcgagggtgtctatgaattggtcgaagtactcgtcaaccacccgtccatcacaagggatatgctcggcgaagggtgggccaaatatttggatccgacggagacggccacttcggagtactcgagtgacatttcgcccgttattatggctgcccatttgaaccaattcgaaattctgcaaatgcttctccgaaaggatgccaacattgagaagccgcacaagcattactgcgcttgtgaaatgtgcgactctgaacggatcaacgacggactgcaccggtcgttgaagcgaatcaacaagtacagggctttggcgagtccggcatggatttcgctgacgagttcggacccaattctgtccgcatttaagctgagcagagagctgcaaaagcgagcgaaagtggaggacgagttcaaggaccaatacttgcagttggccgagcaatgcaagcagtacgcgtgcgatttgctcagtcagtgccgaagcaccgaagaagtgatggcggtgctgaacaaagaggacaacttctgcaacgaggaggtcgacctgaacgcggcaaagtgttcattggcacgactgaaattggccatcaaatacgaacagaaaacgttcgttgctcacccccattgccaacaactgctcacttccatttggtacgaaggctttcccctgaagcgtcaccgttcctcctcccttcgcactttgctcatcgctcttttgctggtgctcgggtggcctttgatggccatttgttacattgcctttcccaaaagtcgcgtgggcgaaatcgtccggtcgcccttcatgaaattcctttactacagcacttcctttggctgttttcttgctcttcttacgatggtcacttttgaggtgcaccgtgaacaaaccggcgaagtgaaaggcggcacggcgacgcgtgccgctgaccgtggcccaacgcccacactgatcgaatggttggtgttcatttgggtaattgggatgttgtggtccgaaatcaaacaaatgtggttggagggcttcaccaaatacatccaccagtggtggaattggctcgacttcgtcatggtctgtctgtacttgtgcaccatttccattcgattttctgcctattcgatttacgtgatgcacaacgttggcgagcagttcacaccccgccacgtcatccgcacgcattggaatgcgtttgagcccgtgttggtcagtgaggcgctgttcgctgtcggcaacgtgttcagaccaatccctacttgggacccttgcagatctccttgggctgcatgctggtcgatgtggccaagttctgcttcattttcgtgctgatcatctccagcttctcgatcggattggctcagctttattggtattacgactcgcagacgccggtctgtttgagttccgatcggtgtaaaatcgtgccgaatgccttttcgtccattgcctcctcctacatgacccttctgtggtctttgttttccatcacaaaagtggaggacaccgaggtggtcgaagcgcatcacttcaccgtttgggtgggcagaggtctgttcatcctttatcacatgacgtcaatcattgttctgctcaacatgttaatcgcaatgatgtcgcactccttcgaaaggatcaatgaccatgccgacttggaatggaagttccaccggtccaaactgtggatggcacattttgacgagggctccactctgccgcctccgttcaacatcttcccaactccgaaggcatttatccacacgtgccgtgccatcattaacgttgtcaattggtgtttcggacggtataattatatggcggcaaaggaaggcacgcgggcgaccattcggaggcccggctacagcaaaagatggcacgacatggagggcggcttaagcggtgccccaaacggcgccggagggacagagccacggaagccaatcacttacacggagatcatccaacgccttgtgtcccgcttcatccacgaacagaaaaagtcgatgaaaatggacggcgtcaacgaggacgacctgctggagatcaagcaggacatcagcagtcttcgctatgagttgcgggacgaccgccgcaaggaaattgtgcgttcgttgtctcatattgacgcggtcaaacgggagattatgcgaagtatgagcacaacgacacgaatcttcgggaacacaccgcgacggcaactgtccgtaaaagagcgaagcgtcgcggaagaggccgactcggagttgggcgactcgtccgcaacggaggaaggcggcaccgagtcgatcaggagttcgttgccgttcttcgattcgcttcgctccgccactctctcgccccatccgtttataacaatcgcagcgagcggagacaaacagttccaatacgcggaacgagacgcagtcgcggaacccttgcgctaccgcac

SEQ ID NO: 26484 - DNA, 624 bp, Glycine max
  Clone ID: TF_LIB4281-018-R1-K1-C4
atttaaccttgccttcacccaatcatatgaaaatgactgaagaggtaaaacatgatcaacagtccattacaaaagaaagggaagaatacacgagtatggacaactttcgagggatagtagtggaaggaaatagggatgatgttctagctataagtgcagctgaaggtgaagattttcacgggtcagtagtgcaaggaaattgggatgatgttattcatatgtgtgagaataagggtatgctttgcaagataatgatcaacgcaagcagaggcactgcactccacgtggcagtgagtgaaggcaacgaagttgttgttaatcgtcttgtggaatcaatgataaaccacaacatggtggaggctttggaattgaaagatgagaaaggtgacactcctttgcaccttgcagcatcaaggggactcaagcatatatgtgagtgcatcatagggccaaattatgaaaggaagtatttgattaccattcataacgaggagggtgagactccattgtttcaggctgcactctcatggcaaaaacaagcttttatgtaccttagttccctcatgcccgatgatgaaaactattcagttcttaattcgaggaatggggatagcatccttcatg

SEQ ID NO: 26485 - DNA, 842 bp, Glycine max
  Clone ID: TF_GmC1577_1
ctccctcgaaacccggccacttcgccatgtccgagcaaccatgcttgccatcgggaaggccacctccgtcgacatctgccgcttcttctccaaacctggcccctacgtgtcctgcgacacgatggagtttctattagcgcgctacgacggcgagctagacgtggatgcggtggactccgaggggaggacgacgatccacgtggtggtgagggaggggcacacgagggttatccggttctgcgtcacgatggggggaaaccctaatcgcgtggattcgaaggggtggaccccactctactacgcagcgtggaaggggcacgtgaaggctgcggagtgtttgttggaatgctccaacgtgaagtgcgtgagggacagggaagggagaagaacattttctgttgtcgcggagagtgagcacgaacattctgttattgacaaagtccagaaagaaacaaagagccgcgctggtttttaattagattggattctggctgtttatgggtattttggtccaattctgctgggggaagaaattgaagtggtgaagactaaagacaaatattgttacgggaacaaacggcgaagagcatgaaggatctggggtaaagtgatcaaaattcaaggctaagtattcattttatgctattcatttagagcattacatcttcattcttctccatcttcctccattttattccacttcctttgtctttttttgtatttgtaagtctttcttgacaatgagaaactaaaccttctattgttgggagctcacccaccaaacactcttgatgtaatgattttaactatctatttaatattatttcgatattattatctca

SEQ ID NO: 26486 - DNA, 1562 bp, Glycine max
  Clone ID: TF_GmC1240_3
tcggttggagggtcacaataggactgagatagttaaatttcttcttgattggcaaggggcagataaggttgagatggaggccaagaatatggtgggtacaacgtccattttttactgaagttattctttgaatataaatatgtataatctagacttccagttattgtcttgtaattctgaaaaggtttctttgtatactattgcagtatggagaaactccattgcacatggcagctaagaatgggtgcaataaagccgcacaattgcttcttgctcgtggtgctattgttgaagccagagcaaatgtgattatttttgtcatttcatctttcatttaatcttgtttaaatctagcaagaattgtttttattgttttataatgcatataaaagtttgttcccaactttttcttgcagaacggtatgacacctttacatcttgctgtttggtactcactacgagcagaagagttcttaactgtgaaaacattgcttgagtacaatgctgattgcagtgctaaggatgatgtaatgaacttaatttcctgttttttttcctgttattttaacattttcggtgaaattgtcatagatgctcaagactatgaattgcaggagggaatgactcctttaaatcatctatcccaaggccctggaactgagaaacttagggaactattactttggcatcttgaagagcaaaggaagcagcgagccattgaggcatgcagtgaaaccaaagctaaaatggatgagcttgagaagcaactatcaaatattgtgggtcttaatgatctaaaagtacaactacgcaagtgggcaaagggcatgcttttggatgagaaacgtagatctcttggtctgcatgttggaaggagaagaccacctcatatggcctttcttggcaaccctggaacaggtttttagaatatcttgctcatattaatgattgattgttttagaatatctcatttatactatcttgcaatcaatattggaaagatatcttattgtgcagttaatttcattgcctccattcaccattccatgttatactatttttattgaattgtcatgtttctgtctgagcatcttggcttgatctttggattgtatatacacatttccatgaacacctaattggtatactggaatcgtatttagttctgaaattaatttatatttgacttgtgtatttaataggtaaaactatggtagcaacggattcttggaaaattactccatacggtgggaattctacctactgataaagtgacagaagtacagcggaccgatttagtcggtgagtttgttggtcacactggtccaaaaaccaggaggaaggtatgttattgactttgaaatccttcgcctattacagaaaccaaattttttgtgttgcttaacgagttcaaacttcaaacactgcctacagatcaaggaagcagaggggggaattctttttgttgatgaagcttatagattgataccaatgcaaaagtccgatgataaggactacgggttggaagccttagaggagattatgtctgtcatggacagtgg

SEQ ID NO: 26487 - DNA, 994 bp, Glycine max
  Clone ID: TF_GmC311_3
ccctcctactcgtccgagaagtacattgatattgtgactgagacatatcctacttggcttgatggttcgtctttggtgagccaaaaagctgtttcttcttgtgccctcgatggatgaataactactttcatcaaaaggaggaaaaattatttatagaatgaaagtaaggaataaaagtggggacagtggtggccatggttcagaggctaagggacctatgggcccagtattcagtacttttgtttatgaagaggaatatggcagtgactcacaaatggaagccattcatggatttgccagggaaggagatatggctaatctgctcaagtgtattgaaaatggtgtttccatgaatttaaaggacagtgagggccggacaccattacactgggctgtggatcgtggccaccttaatgtcacagagttgcttgttggcaagaatgctgatgtgaatgccaaggataatgatggacaaactcccttgcattatgctgttacatgtgagagagaagccatagccgagtatttattgaagcataatgcagacatatattcaaaagataatgatgggagttcaccacgtgacatctgtgagtcaaactggccctgtatgcagcatgtggggggagaagtaaattgattgattgattgtttgcttgttgctgcttctggccaatacaaccttttacccaaatccctataggatgttcgtgtctatataacttgattttttttgtccttactcatggtgtatacacccttttcagtctagtgtacgctgtacgcctatgcaccgcttaggaggttagttaattaggttgtattctgttctattattgtttcctctgcttaactctttaattctggctctcatttcttatatatttcatggataaactagaaatagtgacagggaaagggtatcttcaacgatatcctttcctcggaaaaccttctacccttctattgaaggtgatatagattttacagggtt

SEQ ID NO: 26488 - DNA, 2116 bp, Glycine max
  Clone ID: TF_GmC178_1
cccacacgtccccaagtaacatttattgcattcgagaagcaaaaccaaccatctctatccaagatgggaaactttcatcactttttttcttgcataatgaattcttatggctcactcccttctctttctcctcttctctaccttctcttccgttatgttacttttgcagatttagtttgttggagctaggccatagtactctcatggagaacattatccaagaataggtgtgctgaaatttctggcgtgcagaagaccaataatcagaccataaagtttttaccgttttcaaatgataggcgtaaaaatggccttaacacattcaacatctttcccacaaatgtttcagagggctgcttcagctcagtttaggaggcctctccttcatcttgtgtccactcaagaatccaggcacaggtacctcacccaatgtgttccacttcacaaagcagcactaaaaggagactggaaagaggccaagaaaatactagaccaagaccccacgctagagctcaactccgccataacaaaaggatgggcaacagtgctccacattgcggtcggagcaaaccacgaaagcttcgtggaggagttgctgaaactaatgtcgcgcgaagacttagaactgcaagatatcaagggtaacactgcattctgctttgctgcagctgttgggaacgtgcacattgctgagagaatgcgcataaaaaatgcatcattgccaatgataaggggtggagaaggagtcactcctcttcacttggcagtgttacaaggaagaagtgaaatggctcggtatctgtttgataaaactagagaaacactgtacgatgatgattggtttcaactgtttctcatttgtgtaaactctcggctttatgaactggccctggaaatgctaaatcagaaggaatcgctagcttttgctcggggtgataacgatgagacagctttgcatgttttggctcgaaagcctttggattgtggttgccgaagtccgctacgatatccaaaacacgtcctgcatttgtgcaagaacatgaaggaccctccggtcctcaaacttacaagacgcgtgtgggatatatttcttaccctcgatgactctaagatgatgactgcaattagagaaccatctcaagtaacatttattgccgcagaagttggcaatttcgagtttctatctgtgattatgagcacttatccggatttgatttgggaattgaatacgatgggtcagagtataattcacgttgctgccttgcaccgccacgctagcatattcaatttgatacacgaaattggcccaagcaaagatctcctgttaacattttgggatgatgaaggcagcacgttactccattctgtcgcagaaatagcaccaacagatcgacttaatgtagtttctggagcagctcttcaaatgatgcttgagttgacatggtttgaggaggtaaaaaagaacatgcaaccatcatatatagagaggccaaatcatgaaggaattgttcctagagaactattcaccgagaagcataaggagttgttgaaaaagggagaatcttggatgaagcgaacagcaagttcttgcatggttgtttcaaccctaattgccacaggagtgttttctgccgccttcagcgtcccaggtggtaccaaagacgattcaggatctcccaattatttgaagaaacatttgttcacggtatttgcaatatcagatgccttggcattaactctttctaccgcctcaaccctaattttcttgtccatactcatctcaagatatgctgaggaagattttcttaggtcattgccattcaagttgatatttggactagtgtcactatttctctcaatagtcagcatgatgggagcattcagtagtgctttcttcataacatattaccatgctaaaacgtgggttgttcctatcaccattgctgtatttgtgttgttcccaatattgttatttatatatctacagtttcgtctctggcacgacatagtgtattctcactacatgtgtggttctttgtttagaccaaggaaacgcatgattcattagaaagattgagtacaagctcaataattattttttttttcttttgtctgc

SEQ ID NO: 26489 - DNA, 1474 bp, Glycine max
  Clone ID: TF_GmC42_22
agagagagaattagtctcgagttttgttttcatttcgttcttttttttccttccaaactcactcatctcacacttcctcttcctctctcactcagattcagcaattttctattttcttctctcatggcttcagattccaaaaaggatttccctgctgatgacaaagctggaacagcagagaataaagcatccaaagatgaaacgtcatctaaagattctccagcagcacaaagagctactacagctacttctggacctgcaactggttttccaggcaacccttttgatttctctgcaatgtctggcctgctcaatgatccaagtatcaaggaattggctgaacagatagcaaaagatccatcattcaaccagatggctgagcagcttcagaaaacttttcaaggagctccacaggatgctatgcctagctttgataatcaacaatatttttcaaccatgcaacaggttatgcagaatcctaattttatgaccatggctgagcgcctgggtaatgcattgatgcaggatccatctatgtctgccatgcttgaaagtttttctaatccatcaaataaagaccagcttgaagaaagaatgacacgcatcaaggaggatccatctctgaaacatattttggaggagatagagactggtggtcctgctgctatgatgaggtactggaatgatgaggaggttttgcggaagttgggacaagccatgggtcttgcaaattctggagatgtaggtgcctctgctgaaaattctggggcagatgagacagaagatttgggaaatgaagatgaatcaattgttcatcatactgctagtgttggtgatgtggagggcttgaaaaatgcactagccgctggtgctgacaaggatgaagaagattcagagggaagaactgctttgcattttgcctgtggatatggtgaggtgaaatgtgctcaagttctccttgaggctggagcaaaagtggatgctttggataagaataagaacactgctctccattatgcagctggttatggcagaaaggaatgtgtggcccttctccttgaaaatggtgctgcagttactctccagaatatggatggtaaaactccaatagatgttgcgaagctaaacaatcaaaatgaagtcctgaagctacttgagaaagatgcttttctgtaattgcaatgcatgatgccatgctgtcaccaacaagcaaaggggaaactgaggggaagaaggcacgactttgttatttatcttttggtttcttccaaccgttgtgtgttaaactaaattgattaacgttgttggatgtgagtcaccatagaatttgttatctatgttcttgtaatgcatttattgtcacactgcatgattttgaagattagtgccgtcatgattttattcatgcttcaattttacttgtactacattgcttcgtggcaaaattctggttcaaatggtttcgtccaagaat

SEQ ID NO: 26490 - DNA, 2369 bp, Glycine max
  Clone ID: TF_GmC1451_1
gcgaggcgtggtctctctcgtttttgtctttcaccgcgttatggcaatcgccgttgctgtttgccactcttgtttctttttattcgtctctcctcccttcatttttttagtaaccaagacacttactaagtttggtagcttagctctgcctctgattttgatccttgtaaagttggtacttacatggatctatattctgttatatcttgttcattactttcgaccgccttcgcttatgttttatcttttgcccttctaagttctagataatcattattctgttcacattctaaatattcattgccctgaaccaaatcactttctttttttcattctctgtccttaaagttcgttgctttacattacagggtgtccaaccaaagctaccctcaaatctcaatgctttctaccaacaacaacacaacaagtgcaatgattctggagggttgcaggaggataaaaagtttctgatatttttatttttttgggtattgatttggatgatcctctcctttgagttgctgcttcaaggagagagagaattatttgggatgaaagatgctagtgttgatctgggtttttgctggaaggaagaaaagaaggttctgaattctgatatatagtaatcaagagtcaaaactgaggattcgttaggttggtgttgaatccagttccaatggacacaccaaatgcacagccgcaagctgcatcagcaagcacgccaaggaaaaaaatgacaaagcaattgacaggtaaaagggatgatacacctttgcactctgcagcaagagcagggaatatgactgttctgaaagacacggttggtggcactgaagagggtgaactacgtgtgttgctgacaaagcagaaccatgccggagaaacggttctttatgttgctgctgaatatggttatgttgatatggttagagagctgattcaatattatgatcttgctggggcgggaattaaggccaggaatgggtttgatgcactccacattgctgccaaacaaggggatttagatattgtgaagatcttaatggaggctcatcctgaattgtcaatgactgtggatccatccaacaccacagcagtgcacaccgctgcattacaagggcatactgagatagtgaagcttctattggaagcaggtagtaatctggcaaccatttctagaagtaatgggaaaacagctttgcattctgctgcgagaaatggacatttggaggttgtgaaagcgcttctggggaaggagccttcagttgcaacacggactgataagaagggacaaacagcaattcacatggcagtgaagggacagagtcttgaggtggtggaggagttgataaaagctgatccctcaacaataaacatggttgataataagggtaacacagcattgcatatagcaaccaggaagggcagggctcggattattaagttgcttcttgggcagacagaaaccaatgccttggtagttaacagatctggcgaaactgcactagacacagctgagaaaactgggaattctgaaattaaagacattctccttgaacacggtgttcgaagcgccaaagccataaaggctcaaccaggaacagctacagcccgagagttgaaacaaactgtgagtgacataaagcatgaagtccactaccagttggaacacacacgccaaactcgaagaggtgttcaaggcatagccaagcgcatcaacaaaacgcatgctcagggactcaacaatgcaataaactccacaactgtggttgcagtcctcattgccacagttgcctttgcagcaatcttcacagtccccggccaatttgctgatgaaccaaaagacatccctgcaggttcaggaatgaccattggtgaagcaaacatagccccacaagctgcatttctcattttcttcgtctttgattccatcgccctcttcatttctctggccgtggtggtggtgcaaacctcggttgtgatcatagaaagcaaagcaaagaagcagatgatggccatcattaacaagctaatgtggttggcttgtgtgcttatttctgtggccttcttggcactgtcatttgtagtggtggggaaggatcagaagtggcttgcaattggagtcactatcatagggacaactataatggccacaactttgggcaccatgagttactgggtcattaggcatcgcattgaggcctcaaacttaaggagcattcggaaatcttcaatgggaagcaggtcaaggtctttttcagtatcagttatgtcagattctgagctactaaacaatgaccgcaagatattgtatgccatatagaatcactaataaagccttgttgccctttcatttactctcttttttc

SEQ ID NO: 26491 - DNA, 2192 bp, Glycine max
  Clone ID: TF_GmC611_1
aggtaaggcgtagcttattgatggttttttatgggttttttttcccccccatttggggtgtttgagacaaagacaaaagacaagaacaagaagcaccgaacagaacagaacagaacacaacacaagttgcttgaaccttacacgtcaccatcgttgcgtgttgagtgttgagagatgggaaattcgttcggatgttcggcctccggcgaaaggctggtgtcggcggcgagggacggcgacttggtggaagcgaagatgcttctgaactgcaacccgtgtctcgccaaattgtggcattgttgctggagaatggagctgatgtgaattccagaaattattgtggccagaccgcattgatgcaagcttgtagatatgggcattgggaggttgcacagacacttttactcttcagatgcaatgttataagagctgattatcttagtgggaggaccacttttcactttgcagctgtgcatggtcatgtaagcagtattagacttgttgtggctgactttgtaccaagtgcactttatcaagctatacatgctggcacagatgttgacaggggtggtggatcaaatgcgaaagggaaacatgagcaaagtgccctgtccaagtttataaataaaaccgctgatggaggtatcactgcccttcatatggctgcactaaatgggtactttgattgtgtacaactgctgcttgatcttaatgcaaatgtgaatgctgtgacttatcattatggaacatcaatggatttaataggggctggaagtactccattgcattatggtgcttgtggaggcaatttaaaatgttgtcagatccttgttgcacacggtgcaagtcggctggctttaaattgcaatgggtggcttcctcttgatattgctaggatgtgggggcgtcattggcttgaacaattgctggcacccagttctgatgccacaatgcctacattctctcattcaaattacttgtccttgccccttatgagtgtgctcaacatagctagagagtatggattgcaatcatctacagcctcctctgatgagattgacttttgtgctgtatgcctggagaggccatgttcagtggctgcagaaggatgtgggcatgagctttgtgtaagatgtgcactctatctttgctcaacaaacaatgtttcttctgaaatggttggccctcctggctctatcccttgccccctatgtagacatggagttgtctcttttgttaagttgccaggttcccaagcaaaagaaaataaactacatgtgtctcttggcctgtgtaccccatgcatgctacatccacgtgacctagacaagccatccctttctcatacaccagaggttggaagaaatcgtgtagcttctgttccttcggagatactctgccccgtcacttgtagtccatttccatctatggcaattcccttatgtacctgcaatgatggtccatgtccatcatttgaacccagagaagtagaaacacaggatggattacctcatcactctcaagcatcaacagtggatcaggataaaattgaagggccaagactagataaaacaacctgctctagcatgttttggggtagaagaagttgcagcagggagcaccaatgcaattcagaaataaatgcttgactcgcaccatgcttgtacgacacatacaagtgtcgtggatactgggtacactatagatcaacaggatcagtccacaattttcttattaaccagcctcaaatagtgaaactcgggatctctctagaagagaaaaaactgctctgcagatcctcttggctgctcaggttgtatggtaggtgatagacacaattctggcgtttcagcaacacaaccaccctctggatatgtcctttttctgatatttagggagcgtgtgtgaaattagtttcagtttcgtgagatttttattgtgatttattgtaattggatttcattttatccaggaaagtgtcttctttaaggggaaaagaatatcgtatgctttttataacatgtatgaagttaggggcatctgtatattatgcttgtcataaattttataggtttacaaagcacaaatttggggactgaaactagctgatatagttataaatacttgttttttgtggatgatgaggtcgagaccaattatgtcacggctgctgcctcggatgatctgggtat

SEQ ID NO: 26492 - DNA, 558 bp, Glycine max
  Clone ID: TF_LIB5118-026-A1-PF1-G11
ccctttccaccaaaccaaaccaccctccacatcatcgctacaccaccacgtacctgcctacgcgagcatcccagggagggttgtgctctgcagggcccgctgctggtccgccatgacagatcgccccccatgattgacccttcgatccgtctgcgacgggccatccacgccgccgacgcgccgctcgtcaagcgcatcctcaagtcgcacccgtcgctcctccacaacccggacgccgcgcctgccggccagtccaactccaacctgcacctcgccgcgtcgctcggccaccgcgatatctgcgaggccctccttgccgccggccacgaagacccctgcccggccctcaacgaggctcatcagacggcactcatgctcgccgccgccgccggccacgtcgacgtcgtccacctgctctgcgaccacgacgcctcgtgcatcctgcgacgcgacgcccgcggccgcgatgccgtcatggaggccagccgcggcggccacgacaccatcctccagctgctgctgacctacgtccccggcgaaccccacgtcgccggtcag

SEQ ID NO: 26493 - DNA, 3314 bp, Glycine max
  unsure (1)..(3314): unsure at all n locations
  Clone ID: TF_GmC1462_1
gtgagagtagttcttttgaaagttcagattttgatcactctgctgttgaagaatgtgcagcagatagaagttttacttctgcgtatctggagcgcccctcaagaagtttgcaacagcagcgatcctgcactaaaagtgagaagccaatagatgtactgcgaagagtttgtgggaatgataaatgtgccgattgtggagctcctgaacctgattgggcatcgctaaatcttggtgttcttgtttgcattgagtgttctggtgtacatcgtaaccttggtgtccacatatcaaaggtcaggtctcttacattggatgttaaagtgtgggaaccttctgtcataagtttatttcagtctcttgggaatacctcggccaactccgcccgggtcctaggttcgcatccaagtagtgcctttcaggttgatcttgtccctacaggcttaagcaagtctgataaaccaatgatgttcttcatcaccaaaccttgtcaatctgattctctatctgtgaaggaaaagttcatccatgcaaagtatgctgagaagctttttgttcgcaagccaaaggacaatcaataccgtctcttagtagcacaacaaatctgggaggctgttcatgctaacgataaaaaagctgtataccgttacattgttaattctgatgttgatgttaatgctgtttatgagccaacatgcagcagctccttaacccttgccaaagtaatgctattacaagagcagactagccatgatcacagctctactttagcagggaacacattggactggtcctccactaaagaaggccaggtcatggacaatctagatgggtgcaccctacttcatctcgcatgtgaaactgcagatattggcatggtggagctcctcctacagtatggtgcaaatgttaatgcaactgattcgagaggtcaaacacctctacatcgctgtattctcaaaggaagatctacatttgcaagattattgctttctaggggagccgatcctcgagctgtggatgagcagggaagaacccctattgagcttgctgctgagtcaaatgctggcggtgacagagaagtccatgctccatcgactgattctaatggatgagagtgataggcaaaaacctcggagtataatacatatataaaatatggaagattggattatgtaaatttgtatttcataaattgaaaagctggttttttttttttttttttttaagtaaatgtcactagtgtgagggattaagggagagaggtaggttgaaatgcctgccccttagtcatgtgcaaaatagtgctaagatctgtattgtaaaatggccacattggtcttagtaaaagagttatgcatatgctgcactggtagcacccagcctgcacttcgtaatatgatgattgtgtatttttgtttacttttgaggtgaagctgcgatgcattaggctagggatttgtgtatgttgtgtacattggtttttgtgaaggtgttgttgtggctgtaatttatcagatttgaggttttgcttccggatcatttcacctacaaagaactacactttgcaganagtgcgctggaccaaatggactggattgaaaaaatcactggtgttattgcttcattactgagttctcaaattcctgaaaggatgttgcctgcaagcccaatgggaagtggtcatcataggtctaccagtgagagtagttcttttgaaagttcagattttagatcactatgctggtgaagaatgtgcagcagatagaagttttacttctgcgcatctggagcgcccctcaagaagtttgcaacagcagcgatcctgcactaaaagtgagaagccaatagatgtgctgcgaagagtttgtgggaatgataaatgtgctgattgtggagctcctgaacctgattgggcatcactaaatcttggtgttcttgtttgcattgagtgttctggtgtacatcgtaaccttggtgtgcacatatcaaaggtcaggtctcttacattggatgttaaagtgtgggaaccttctgtcataagtttatttcagtcacttggaaatacttttgccaactcagtctgggaggaattattacaatcaagaagtgcctttcaggttgatcttgtccctacaggcttaagcacgtctgataaaccaatgatgttcttcatcaccaaaccttgtcaatctgattctctatctgtgaaggaaaagttcatccatgcaaagtatgctgagaagctttttgttcgcaagccaaaggacaatcaatactgtctcttggtagcacaacaaatctgggaggctgttcatgctaacgataaaaaagctgtataccgttacattgttaattctgatgttgatgttaatgctgtttatgagccaacatgcagcagctccttaacccttgctaaagtaatgctattacaagagcaaactagccatgatcacggctctactttagcagggaacacattggactggtcctccactaaagaaggccaggtcatggacaatctagaagggtgcaccctacttcatctcgcatgtgaaactgcagatattggcatggtgtacggctgcgagaagacgacagcaaatgttaatgcaagtgattcgagaggtcaaacaccactacatcgctgtattctcaaaggaagatctacatttgctagattattgctttctaggggagccgatcctcgggctgtggatgagcagggaagaacccctattgagcttgctgcagagtcaaatgctggtggtgacagggaagtccatgctccattgactgattctagtggatgagagtgataggcaaaaatctcggagtataatacatatataaaatatggaagattggattatgtaaatttgtatttcataaattgaaaagctggtttttttgaaatgtcactagtgtgaaggattaagggagagaggtaggttgaaatgcctgccccttagtcattttgtgcaaaatagtgctaagatctgtaatgaaaaatggccacattggtcttagtaaaagagttatgcctctgctgcactggtagcacccagccagcactttgtaatatgatgtttgtgtaattttgtttacttttgaggtgaagctgcgatgcattaggctagggatttgtgtatgttgtgtacattggtttttgtgaaggtgttgtggctgtaattttccatttttgtatttttgggattacttggtgccttggtgggacaggtgctgaggatgtcatgtccctagttctctaatattctgatgtatttatttatatgataaaaaaattatatattttc

SEQ ID NO: 26494 - DNA, 714 bp, Glycine max
  Clone ID: TF_GmC156986_1
ccacgcgtccgcttgaaactctgttttttttttcttgttgccaagaaaggctctaaaagttttgaagttttaaagagcaggggaaaaccagagcctgacttccttgttttgtgtgtctgtgtctcccaagattctgctgaggccttaagggagtatattacatatctccatgtgcggtgtttccaaggggaaaccttctcaaattgatttgatcatggaggagaagtatgcaaaagaagggatgcatcataagatttctgctttgcttgagttttcagcgacggatgatctaattggtttcaaagatgctgtggaaaaggagggtcatgatgttgatggggtggggttttggtatggaaggcgtgttggctcgaagaaaataggttatgaagagaggacacctctcatggttgcttccatgtttggaagccttgatgtatcaacttatattcttggaatgggttgtatcgatgttaatcgggctagtaggtcagatggggctactgctcttcattgtgctgttgctgggggttctgccgcttccgttgaggttgtcaagcttttgcttgatgcatctggtgatgttagtgctgttgacgccaatggtaaccggtcaattgacttgattgtctctgtggctaattctatcttcaatcaaaggtcaagtgtgctacaggccctcctgggaggtacaagtgatgctgatcaggcatg

SEQ ID NO: 26495 - DNA, 475 bp, Glycine max
  Clone ID: TF_GmC797_5
tgtggacgcgtgggcggacgcgtgggcggacgcgtgggtgtcgatgtcagttccatgttcatagttaggaaaaacggcaaaacttcactgcacaatgctgctaggtatggtgtccatcgtattgtaaaaacacttattgctcgggatccaggaatagtatgcatcaaagataaaaaaggtcaaactgcactgcatatggcggttaaaggacagtgtacttcagttgtggaggagatattactagctgatccttctattttgaatgagcgagataagaagggtaatacagctcttcacatggctacaaggaaatgccgttcacagatagtgggccttttgctaagctattctgctgtggatgttaatgccatcaacaagcagcaggaaacagccttggatttggcagataaactgccatatggagattcagctttggaaataaaggaagcccttgcagaatatggtgctaagcatg

SEQ ID NO: 26496 - DNA, 720 bp, Glycine max
  unsure (1)..(720): unsure at all n locations
  Clone ID: TF_GmC16_2
atctgggtagcggagccaaacaggcttacgcggaatctgactgctgcccgaagtcattctcagtaactgctaatcactgacacggtcagctaagctaagctaccccttctctctctaaaacctttgccattgtctcccacaacaccttacaacttacaacttcaatgtctgagtcaagactcatttatttataaccaccaccagctcaggtggcgcagccaaaccaaacccacaagaggttaagaacaagtagaataacaaaacccattcttcacctctctcccatcgtaataatgggtcagagcctgagttgcagtggcaaccatgaccacggcctcttcaccgccgtgctgcacggcgaccttcaaattgtcacaactctcttggattccgacccttctctcttgcaccaaacaactctctacgatcgccactctcctcttcatattgctgcagccaatggccagatcgagattctgtctaggctcttagatggatctcttaacccagatgttttaaatcgccacaaacagactccgcttatgttggcagcaatgcacgggaacatcgcctgtgtggagaagcttcttcaagccggagctaatgttttgatgtttgatactatttacgggagaacctgcttacactattccgcttactacggncattcttcttgccttaaggctattctttccgctgctcaatctaatccagtggctg

SEQ ID NO: 26497 - DNA, 2197 bp, Glycine max
  unsure (1)..(2197): unsure at all n locations
  Clone ID: TF_GmC130201_1
tacggctgcgagaagacgacagaagtcggggcgggagtctgtctgacgcctcctcccacgtgtccagtaactgctcaacactgacacactcagctaccactctcctctctctagcttcagtaactagcttgccattttgctcaaactcaaagctcaataaatgtgcaaactttgaattgaaaacgtggaggaatcaatcaaggtggcgcaaagagaggagaagaggtggtagagagaaagtgatgggtcaggggctgagttgcagagggagccatgagcatggcctattccgtgctgtgcagcatggggacctagacactgttgcagctttgctacaaacacacccttctcttatgaaccacaccactgtctatgatcaccactctcctcttcatattgccgctgctaatggccagatccaggttttatcttggcttttggatggatctgtgaatccagatgtgttgaatcgccaaaagcagacaccgcttatgttggctgcaatgcacggaaagatcgcctgtgtggaaaagctccttgaagccggtgcaaatgtactaatgtttgatgcttgttacggaagaacctgcttgcactatgcagcttattatggtcattcttcttgtcttaaggcaattctttctgccgctcaatctagtccagtggctgcttcttggttggtccttttttctgtttttgcataaattttctccactgattgattcatgtggtgatttcttatgttggtttttataaaaaaacataaagaagaaaataaattgaattgattgcagggggtttgctcggtttgtgaatattagagatggtagaggtgcaacacctttgcatttagcagctcgtcaaagacggcctgaatgtgtacatattctattgtacagtggagctcttgtttctgcttcaactggaagatatggatgtcctgggagcactcctcttcatcttgcagccaaagnggggatctttggattgcatccgggaactattggcatggggtgcagatcgccttcaacgtgatgcttctgggcgaataccgtatgtagttgctctgaaacacagacatggagcatgtgcagcattgctgaatctttcgtctgctgagcctcttgtatggccatcatctttgaagataatcagtgagcttaatccagacgccaaagagttattagagcgggccctgatggatgcaaacagggaaagggagaaaaacatattgaaagggagtgattactctcttccatctccatcacattctgatggggtagatgacaatatctctgaggttagtgagacagaattatgctgcatctgctttgagcaagtgtgtacaattgaagtccaagactgtggtcaccagatgtgtgcacaatgcacactagccctgtgttgtcacaacaagcctaacccttgtacttcacgtgttatcccgccagtttgtccattctgcagaagcaccatagcaagattggtagttgtaaaaaaagaaagccctgatgacattgatcaagatggtgttgatatcacttgttccaagcatagcaagtcaaggaaatcacgaaactcaaacgagggcggtagcagcagcattaagggattatcaaatgtgaactcatttggaaaaatgggtggtcgcagctctggaaaaattgctgctgaaaatgagtgggaagatgataaacaacagtgatacgatgctgttacttggtgtggtgcttgcgcttatccataattattgcatattggaaagatacggtaacaatttgcttgatcagcaaggcaaaacgaaagtataagaagtaaagggaaaaagaggttcattttattattggaaactaagcaaagtgagtaagattggagttcagggtagtaggtaccaactatcaagtttggttggggaaagaattaaagagatgcatgtcatgttgtaaattgtaactttgttactattatttgggaaagaagaagcatcgcctgcatcgatggttttgggcgtcgtcattgaaatgagaaattctttttctcaaaaaatatataggagtctaagatcatatgaaaatgtattgtgtatttgcttctggtttgtttctttataccaaaatgagcaataaaatacgaaagggaaaggcctgtggttgttgttaaaaaaaaaaaaaaaaaaaaaactcgagactagttctct

SEQ ID NO: 26498 - DNA, 1898 bp, Glycine max
  Clone ID: TF_GmC6679_1
tcgcctcgcgtgggcgcgaacaaatgtgctcccatatattcccttgcaattagaggggagtggaaagaaactgaagccatgatagacgcagatagaaggttggctacttctgccatctcacagggacgggcaacactgcttcacgtagcagcagaagcaaatcagttgcacttcgtaaaggagcttgtgaaactactgagcgatgaagacttggaattacaagaccgcaaaggcaacactgctttctgtttagccgcagcatcgggaaatgtgagaattgttaaagtaatggcccgaagaaatagcaggttgccaactatcaggcgtggggatggactcaccccacttcacatggctgctttgcagggaaaaaataaaatggcatggcatctctaccatgataccgttcaaacattcaatgatgcagattgggatgcattgttcttcttttgtctcaagactgatatttacgatttagctttgaaggtgttacgagagaaaccaagggtagctttggcaaggaatgagaaccaggagacgggcttgcatgttttggcccgaaagccgtcatcttttagttgtcgatgaggtctaggacaaaggtttctatatatgctcaccaactcaggtaagagtccaactttggccctccaacttgtcaagtgtctctgggagacacttctttctctagatggcacagagatgcagactattataaaagtcataagtgaaccatctcaggtaatatttattgccacagaagttggaaattttgaggttttggcagagctggttagatcttgcccagaactcatgtgggaagttgataccaaaaatcgaagcatcattcacattgctgctttgcaccgccacatagacatatataatctaatacatgaaacaagctctatcaggaattttgtagtaacattagaggatgaggataaaaacaatttactgcactatgctgcaaaattatcaccaccgagcaaacttaacttgttgcctggacctgttcttcagatgaagttcgagttgatgtggtatgaggaggtgaagaagatcatgcaaccttgtttcatagagatgagaaattccaatggtaaaactcctcgagaattattcactgaagagcatttagagttagtgacaaaagcagagtcttggatgaaaagcatgataaattcctgtataactatttcaacggtcactgctacactagtgttggctacagcattcagcattaagcgtgaggataaccataaacccaccattactcgtgacttcatgttatatattggaattgcaatgatatcttcatccatctccagtctgattttcttgtctatccttatcacatcaccttgtgtagaggaagactttttgaagtcactgctgcggaagatatggtggggactggtgacactatatacctccatagcatacttgtcgacgacatttaccattgccttcttcacaacgtaccaagtacgggtgccaaaatcatttttttgggggcctttaataagcctattaataatggaatatcttctgtttccatatgggtcactcgtcaacataaacccacgctattggttacccagtaaatacattttttatactgggaaagctaaaggccgtgtaaattaaccatgactctactaggttaaataagtgctacatacctgctttactacaaatagaaattcgcatttgaagttttgaagaactgtactagtttgtcaagtttattatgcctatcaaatagcttgcaacgtgtaatgtagtgttggctggaaaatacaacttatattaattttcagctaacctgagagaaataaacaccaacgaaatttatgtcaatggatgataaataatcaattagtcaatttgatatc

SEQ ID NO: 26499 - DNA, 1972 bp, Glycine max
  unsure (1)..(1972): unsure at all n locations
  Clone ID: TF_GmC334_1
cccacccggctcgagaccaaatcatattaagccatggccacctccaacttctcaattgttctctctctctccctagccttctttctagtgctactcaccaaggcaaactcaaccaacaccgtttctttcaccgtcagcaagttttccccacgccaacaaaaccttatcttccaaggagatgctgctatctcaccctccggggtgttacgactcaccaaggttgacagcatcgacgtgccaacgacgggatccctaggacgtgccctttatgctaccccaatccagatttgggacagtgaaacaggcaaggtagctagctgggctacatcgtttaaattcaaagttttctcgcccaacaagacggccgacgggcttgccttcttcttggcgcccgtcgggtccaagccccaatccaaaggagggttccttggtcttttcaatagtgactcaaagaacaagtcagtccaaaccgtggcggttgagttcgatacttattataacgcaaagtgggacccggcaaaccgacacattggcatncgacgtgaactccatcaagtccgtcaaacggcgtcgtgggggttggccaacgggcaaatagcacagattctcattacctatgacgccgacacgagcctcttagtcgcttctttgatccacgttattttctgaagtctggtgtgtatttgcggcaaggtttggctccaacaagagaaacgagcaatcatatggtatttgatttttagggtggaagaaaaatcagagtgagagaaaaaatcgatggagatggaagtagacatcgagaagaagcaacaagacgtggtgaaagagaaagacttgttcaaagctgcagaagagggcgaggcatcaacgttcgaagctctctcttctgaaatcctctccaaagccctctctctcagaaacgaagacgctcgttcccttctccacgtcgcagcttcttccggtcactcccaggtagtgaagatagtgttgtcttgtgatgcatctgctggtgtggtgaattgtgctgatgaggaagggtgggcgccgcttcactctgcagccagcattgggagtgtggagatagtggagactctattgagcaaaggagctgatgttaatctgaaaaataatgggggtcgtgctgctctacactatgcggccagcaaaggttgggtgaagattgctgaattgctcatctcacatgatcccacgattactataaagtactatctcgttccactccattgcatcgagtagctcgcactgggaaatctgagctgtgtgaacttttgattgcagaaagagaagaggttcatgctgttgatagcgctggtcacactccactaatgaatactgcgatttgctgtaaaaaacaggtagcccagcttgtgataatacatggggcagatgcggatttggaggacaaggaagggtacacggtgcttggtcgagccacgcatgagtttagaccaatattaattgatgctgccaaggccatgcttgagtgatcattcaattataagaaaatgagaaaattgtcaggacaggaatgtggaaagagagcagaattgtggtagttatttcgcaatgccttaatggtggttacgttcttgacaaattatgttgctcaggcaaaaagttcatctatacccttatgttcttagttgtcaaaccagtttgttttgggtatttttgtgccagctttaaattaaatcaggaagattagaatttttgttttgataatcccctaaattagcaattcagattgtataagtcaaaacattttaattctagagattttaagaactctccgttagttgattttataagaaatggttcattttacttttatatcctctctgagacagtgagcttgaagagtaatcttccagaatgggtgaatatttggttctctgccaccaccgggttgaataaaggcttcgttgaaacccatgacgtgttttcttggtct

SEQ ID NO: 26500 - DNA, 2464 bp, Glycine max
  Clone ID: TF_GmC114164_1
cttgcaaaacggattcaggaatacagaacacaggcagagctggagaatatacgagcttctagcaattatatagaaaccgttctaggttctgatggcacccatgttgtgggtttgaactcttacagaagttttgaagcaggggtgcaacctgcaacaaccaaagggcagatcagtgcaaatcgttaagacaggattaaggtttataatgatctttaagctcatgtggatattggaaacggaggatttttgtacttgagaatcaatggaatttatattattacagaatgacgggtttcaatctcatggtctctcagtcatgtaattattctcgcttgtctgaacaaaatagtggcatgtttggtagattccgttcaagacacaatagggcttcgtctctaaatgaggatatttttggttcatgtatagttgatctgtgcacatccactataaagatggatgaagactatacagatctacgtcttcgcttccgtatagtttctccctcaaaatcttaatgaccacaggctgtatattaagctggtataatggacaggaaaaccaatagaaccggagctttaacatgggtttttaaatgccaatcactccaaaggacttaattatgttgagtaagttccccttatagaaactcagcaactggagagaacacgggcagtccttgagaggatactagcatatcgcaaatgtatagcaaccattccaaggacggatgtagtgtatcttgtatgtttgaactcttacagaagtattgaagcagtgctgagtgcagtgctcctgaaccagagctgggcatctctaaaccttggcatattgctgtgtattgaatgctctggagtgcaccgaaatcttggtgttcatgtctcaaaggttagatctataacgttagatgttagggtttgggaaaataccgttctggagttatttgataacttaggtaatgcttattgtaattctatctgggagggcttgcttctacttgatcatgaaagggtaggtgaaccaaatgtgccaatgaaaccttgctctgcagatgccttccaacacaaggagaagtacatccaagcaaagtatgtagagaaatcactgatcatccgagaagaggatatacccgagaatccttcagtttccataagaatctggcaagcagttcaggctgtaaatgtacgagaagtgtatcgccttattgccacatcaacatcaaatctgataaacacaaaatattatgatgaggctcaccatgctgctgatgcataaaaactcagcagctggtgcttctttggcaagtcaatcagaggatagtcagaaatcattgagggatggcatatattccaaggaagtggttagtgtgtcaaagattttaaggggaattcctgggaatgataaatgtgctgagtgcagtgctcctgatccagactgggcatctctaaaccttggcatattgctgtgtattgaatgctctggagtgcatcgaaatcttggtgttcatgtctcaaaggtgagatctataacattagatgttagggtttgggaaaataccgttctagagttatttgataacttaggtaatgcttattgtaattctgtctgggagggcttgcttctacttgatcatgaaaggttaggtgaatcaaatgtgcctatgaaaccttgctctacagatgccttccaacacaaggagaagtacatccaagcaaagtatgtagagaaatcactgatcatccgagaagaggatatacctgggaatccttcagtttccataagaatctggcaagcagttcaggctgtaaatgtacgagaagtgtatcgccttattgtcacatcaacatcaaatctgataaacacaaagtattatgatgagtctcaccatgctgctgatgccaaagggcatcagcatgatcctgaagcctgtctgagagttgaagagactactgagacagagaggtgtttccgtggatggtcattattacatctggcatgtcattctggcagtgcactgatggttgagttgttgctccaatttggtgctgatgtaaacatgtgtgactatcatgaaagaactcccttgcaccattgcattacaagtgggaaaaatcaattggcaaagtttctattaagaaggggtgcaaggccgtcagttaaagatgccggaggactcactgtacttgaaagagcaatggagaggggagcaataactgacgaagaactatttatcttgcttgctgaatgccagtgaagatggatctggtatatatatatatattaggaatgttgaagatatgctgttgttcattaagaaaaagaaagttcaatttcttaattttgaatgcctaattcatcgaaaggaatttcattaactttttaattcatctggatccatatttgttgcggttactatagaaaacatttaacacgtaactcttaatgaaaattttaaaatatattcatc

SEQ ID NO: 26501 - DNA, 587 bp, Glycine max
  Clone ID: TF_LIB4164-037-R1-N1-H11
aagaaatcgaactttcttttcttaatgaacaaaagcgtatcttcaacattcttaatatatataccagatccatattcactggcattcagcaagcaagataaatagctcttcgtcagttatcgcacccctctccattgctctttcaagtacagtgagtcctccagcatctttaactgacggccttgcaccccttcttaatagaaactttgccagttgatttttcccacttgtaatgcaatggtgcaagggagttctttcatgatagtcacacatgtttacatcagcaccaaattggagcaacaactcaaccatgagtgcactgccagaatgacatgccagatgtaataatgaccatccacggaaacacctctctgtctcagtagtctcttcaactttcagacaggcttcaggaccatgctgatgccctttggcatcagcagcatggtgagcctcatcataatattttgtgtttatcagatttgatgttgatgtggcaataaggcgatacacttctcgtacatttacagcctgaactgcttgccagattcttatggaaactgaaggattctcgggtatatcctcttctc

SEQ ID NO: 26502 - DNA, 1047 bp, Glycine max
  Clone ID: TF_GmC150_1
acggctgcgagaagacgacagagccggaacgagaaataccgtgacactgcaacagagtgagagaaattgcaggcggcggcacagaggggaagtagtagtaaataaggatcaatggcggttcctgggaggcgcaacggcatcaacgacgacgaagaggagttagacgacaatgcccttttcgaagaacaaggtgtcgtcgaagacgacaccgatacccctcctcacctccgcgacctctccgccgccgctcaaatcggcgacgcccacgccctccgtctcgctcttgataacttgactggtagtattgatgagccagtggaggatggggatacggctcttcatttgacatgtttatatggccatttggcttgtgtccagctgctaatagaaagaggagcaaacattgaggctaaggatgaagagggtgctattcctttgcacgatgcttgtgcaggaggatttactgagatagtccagctgctgcttaacagagcaaatgatgcagaacatataaagagaatgctagaatcagttgattctgagggtgatactcctctccatcacgctgcaagaggtgagcatattgatgtaattaggttgctgctgtctaatggcgcatctcccacaaaggcaaacttatacgggaaggcccctgcggatttgcctgaacaggaagatgctcggaggctgcttgaagctgcagctcttgccatggcatgccagtagcatttcagtagaaatatttagttccattttgacagagatgctacactttttggaccataaaatctgtatttcatacactactcttttttcgaagttcaaaaatcaaaatgatttattagaggagcaccataggaagttttaactctggagacagataaaaatgaggattcccggattacttatagtggggcaagcttgtttgttttcgttactttgcttaagtgaaatatatttactcttcaacaatttgaaatgtatttactcttcaacatgtcagtgaactatgactggatagttatacttgtcattcagtttgtgccc

SEQ ID NO: 26503 - DNA, 1385 bp, Glycine max
  unsure (1)..(1385): unsure at all n locations
  Clone ID: TF_GmC1340_1
cggnncgaccaacccttccgacccgccctccggctggaagcaggaggcggtggaaggcgagggtttgaggtgcgcaagcaaacaaagatgaaagaagcggatgagcaactatgcgaggcggccattaaaggtgacacgaagaaagtgaggtctcttatatactccggcgctgacgtcacccactttgacggcgatggcctcaatcctctgatgcacgccgcaaagcacggccatgcacccgtcctcaccctcctcctctccgtcggcgctccctggaacgctctttctccctccaacctctccgccggtgactacgccatgcaagaaggccacaacgaaaccttcgagcttctcctcaacgccgggatccaatctgaactgatactgggaacaattgcgaggaaggcaaacaagaacggcgattccggtcacgattatttggaagatagggtgagttttagcgaagacaagcttatggactctgaaagcaaggctgtgatgatggcatgggagaatccgttgatggaggctcatgctaaggcggtttgttccggtggtggccacgtactcaatattgggtttggtatggggctcgtggattcgggcacttcagcgatatgcacctgcttcacacaccattgttgaggctcatcctggggtttatgaacgcatgcttcgctccggttggggccagtaaggaaaatgtcaagattgtttttggacgatggcaaggatgttctgcctcagcttgaaacatatgatggaatattcttcgacacctatggggagtactacgaagatctgagggagttccatcagcatctcccggcattgttgaagactggtggtatctactcattcttcaatggcctttgtggcagtaatgcatttttccatgttgtttactgccatttggtatctcttgagcttgagaatttggggtattccacacaattgattccattgccggttaaggattgtttgggagaacaagtttgggaaggtgtgaaacaaagatattggcagctcgatacgtactatcttcctgtctgtcaggccatagagaaccctgagtgaggcaggaaatggatctcctgcagcttagaaagaactgcaccctgtgcagttacaaatttcaccatccatgcaagtttttttctctcctttatatattaaaattaaaggaatggttgaaatctcatgcagttttttttttaactgtagaggatcttaatcccagtgatgtatggtttgattttaataacatcgtcaattattctaacacgccatgtgtttttgcttgtgtaacgtatcaaatggaattgtaagaatacagttagagtcatattgaacttttgagctttatttgtaaatttcattannnn

SEQ ID NO: 26504 - DNA, 2880 bp, Glycine max
  Clone ID: TF_GmC557_1
cacaggtctcggttcccgagcatcatctctctctctctctctgttttcccatatcttctgtttcccgtcgttggtcaacctttgttcattggttctctttctctttccatttcaagtcttcgcttctttggttcaaaggacttgagcattcttgatgttaaactagccatcttcttcagttctctgtttctttctctctgtttttctgcagcgttttgaagcctcttccaagagtctcttacttaagatttcctgctgtcgagttcatcttccctcttaagtcttaacgggtaacaccctgtatgtaatatttattcttcttttgctcttaacgtctttcccatgtcagttaagttctgaaagttcaaattttttgttctcacgcctcaatttatttgatggatcatccccagatgaaaaatcatctcagtttttgcttctgggaatctgagttttgttgcttgacttgcaagtgactttggtcttgtggtaggggaaacagtgacctttctcaattttgcttatttaatttgagcttagtttgtttagttatagattatgttagctagcttttcagtttagatgggtacttaaaggggtttaatttcttcttttgcttctaaatttagtcaaacagtgctttgactcaattggaatctcgtatatttggaatcatggataactcatatgattcatcctcatccttgagtttcgtatcatctcacctgtcacatggttctagtaatcacaacgtgtcttccaccaccagcaaagatgcatgacgaaaatattgaaattttgagtctgaataagctcagtggaagcctcgagaagctattgattgaggctgagtatgattattgcgatgctgagattcttgttgaagacatccctgtgggtattcatcgctgtatattggcttcgcgtagtcagtttttccatgagctttttaagaaagggactgatggatcagggaaggaaggaaagccaaggtatctcatgtcagatttgatgccttatggcacagttggatatcaagctttccaagtgttcttgtactatctgtatactggaaggctaaaggcttcaccaacagaagagacaacatgtgttgatgaaacatgtatccatgtagcatgccgccctgctatcaatcatgccctagagctgatgtatgcttctgccacttttcagatgaaagagctagttttactttttcagcggcatctcctaaattttgttgagaaggctcttgtggaagatgtcattcctattcttatggctgctttcaactgccaactagaccagcttctctctcggtgcattcagagagtagcaaggtctgactttgacaacacatctttggaaaaagagctccctcgtgaagttgtgactgaaatcaaattgctccgactcccatttcagccagaatccacacctaatgcaatggaagtggagtccttgaatgaaaagagtataaggagaatccacaaggcattggactctgatgatgttgagctactgaagcttcttctaaatgagtctagtgtcactctagatgatgcacatgccctgcactatgcttgtgcctatagcgattctaaggttattcaagaagttcttagtctaggcatggctgatattcttcgtagaaattcccgaggatacacagttcttcatgtggctgcaaggcgaaaggatccatccattttggtagcactactgaataaaggggcgtgtgcatcagataccactccagatggacaaactgctcttgcaatttgtcagaggttgacgagatacaaggattatcaagagcaaacagtgcagtgtaaggaatctaacaaggacaggctctgtgttgatgtcctggagagggagatgagaagaaattctatgactgtgaatatgtctgtttcatcacagttaacagccgatgatttgcacatgagactggattaccttgaagatagagttgcatttgctcggctgttgtttcctgctgaggctagggtagccattgagaatgctgaagcagattcatcatcactgtatgcaaattcatcggctttgaaggtcacaaatggcaacccgaaagaagtagatctaaatgaatctccctcggctcgaaccagaaaactccagttaagattgcatgcccttatgaaaacagttgagaatggtaggcgcttctttccccattgctctgaagtgcttgataagtttctggaagacgacgaaatgccagatgttttcttcctagagaagggcagtgaagaagagcagagaatcaaaaaagcacgcttcatggagcttaaagatgatgtgcaaaaggcatttcacaaggatatggctgaaaataaccattctggtttttcatctacggtgtcttcctcttcttcctcaactcgtagggaaggtcttaaccatagagtaaggagaaaatgaagtccatgttcttctatgtagagtgttgcaacttgcaagtagaagccgtggaatatttagaaaaaataagatggaatgttaaattagggggttttgctaatgaacttgggagatttttactagcttgatttagtttcttatagttgttggaccaagagaagaagaaaaataaaagaagacgaattggcttatagtaatatctttgttccttttcgaagacccaaaagtgtgtattttttactttgttatctgattatagattgttatataattgaaaatctcacctcctgtaataattactttaaagatgacatgcaagactatttaaaagtcatttctaattgattatccttgcaaaattgtatgtccgttgtacaccaaaataattgtatatattgaaaacatataaatactaaactcttgtttcaaaaa

SEQ ID NO: 26505 - DNA, 2168 bp, Glycine max
  Clone ID: TF_GmC611_3
gttgattagtaaggcgtagcttattgatggttttttatgggttttttttcccccccatttggggtgtttgagacaaagacaaaagacaagaacaagaagcaccgaacagaacagaacagaacacaacacaagttgcttgaaccttacacgtcaccatcgttgcgtgttgagtgttgagagatgggaaattcgttcggatgttcggcctccggcgaaaggctggtgtcggcggcgagggacggcgacttggtggaagcgaagatgcttctgaactgcaacccgtgtctcgccaagtattctactttcggtggcctcaattcccctctccattttgcagctgccaaaggccacaacgaggtccctttatttcactttttttacatctaatccaaccctttaatttatttatttttctctgttggttttctgttagattgtggcattgttgctggagaatggagctgatgtgaattccagaaattattgtggccagaccgcattgatgcaagcttgtagatatgggcattgggaggttgcacagacacttttactcttcagatgcaatgttataagagctgattatcttagtgggaggtcagctcttcactttgcagctgtgcatgggcatgtaagatgtattagacttgttgtggctgactttgtaccaagtgcaccttatcaagctatacatgctggcacagctgttgacaggggtggtggatcaaatgtgaaaggcaaacatgagcatagtgcagtgccctttccaagtttgtaaataagactgctgatggaggaatcactgcccttcatatggctgcgttaaatgggtactttgattgtgtacaactgctgcttgatcttaatgcaaatgtgaatgctgtgacatataattatggcacatcaatggatttaataggggctggaagtactccattgcattatgctgcttgtggaggcaatttaaaatgttgtcagatccttgttgcacacggtgcaagtcggctggctttaaattgcaatgggtggcttcctcttgatattgctaggatgtgggggcgtcattggcttgaacaattgctggcacccagttctgatgccacaatgcctacattctctcattcaaattacttgtccttgccccttatgagtgtgctcaacatagctagagagtatggattgcaatcatctacagcctcctctgatgagattgacttttgtgctgtatgcctggagaggccatgttcagtggctgcagaaggatgtgtgggcatgagctttgtgtaagatgtgcactctatctttgctcaacaaacaatgtttcttctgaaatggttggccctcctggctctatcccttgccccctatgtagacatggagttgtctcttttgttaagttgccaggttcccaagcaaaagaaaataaactacatgtgtctcttggcctgtgtaccccatgcatgctacatccacgtgacctagacaagccatccctttctcatacaccagaggttggaagaaatcgtgtagcttctgttccttcggagatactctgccccgtcacttgtagtccatttccatctatggcaattcccttatgtacctgcaatgatggtccatgtccatcatttgaacccagagaagtagaaacacaggatggattacctcatcactctcaagcatcaacagtggatcaggataaaattgaagggccaagactagataaaacaacctgctctagcatgttttggggtagaagaagttgcagcagggagcaccaatgcaattcagaaataaatgcttgactcgcaccatgcttgtacgacacatacaagtgtcgtggatactgggtacactatagatcaacaggatcagtccacaattttcttattaaccagcctcaaatagtgaaactcgggatctctctagaagagaaaaaactgctctgcagatcctcttggctgctcaggttgtatggtaggtgatagacacaattctggcgtttcagcaacacaaccaccctctggatatgtcctttttctgatatttagggagcgtgtgtgaaattagtttcagtttcgtgagatttttattgtgatttattgtaattggatttcattttatccaggaaagtgtcttctttaaggggaaaagaatatcgtatgcttttt

SEQ ID NO: 26506 - DNA, 1079 bp, Glycine max
  unsure (1)..(1079): unsure at all n locations
  Clone ID: TF_GmC61596_1
ggaagtaaattactctctacttgtaaatggctctcatagtgtcactttcagcagaggttttgttctcaaacttttcattttgacttatgttctagtaattttagatgcacgagacttggcttctgaacagttttaagtcttgagtttgtggaaatcggtctccgagcttccagacttgctgtgtttcgatctgtttatccatccaccttcatcgaccttagcatctagagagatagtaaatttccactcgtatggtaggagattttcaagtgactatggagaaacagagcagttttcgggcatctacaatggaaaaacagaagagttttcgtggatttatggaaaaacagaaaagttttcgcattgttatggagaagcagctcagcttcatgggaagtgaaaggaagaagaacaaggaatcacctgggaaacgtggtgacttaccaattcatttagcagctcgggcagggaacttgagtagagtgaaagagataattcaaaactattctaataatgagacaaaagatttgttggcaaagcagaacctagagggggagacccctctttatgtcgcttcagagaatgggcatgctttggttgttagtgagatacttaactacttggacctgcaaactgcttctattgcagccagaaatggctatgatccattccatattgctgcaaagcagggtcatcttgatagttttgtttaaatttcagccaactaccatgggtgagaagcctggaggtgctgagagaactactgcactcctttcccaacttggccatgaccacagatttgtccaactcaactgctttacacacagctgcgactcaaggtcatattgatgtggttaatcttcttctggaatcagattctaaccttgctaaaatagccaggaataatggtaaaactgtccttcactctgcggctagaatggggcatttggaagttgtgaaagccttactcaaggatcgaacactggattaggatgatagaaggcaactgcctacacatgcttggaaggcaaaatgagaattttgctgaatggaaactgaccacanttggttgagatata

SEQ ID NO: 26507 - DNA, 732 bp, Glycine max
  unsure (1)..(732): unsure at all n locations
  Clone ID: TF_GmC4222_4
ccacgcgtccgggactaggaaagttttcaaagccaagcaaatacgagctttacccaattttcttgctgttgaattttcactgttcaatcttcaaaatcacatttttctcgatcttcaccttctgggttgctttttttttttcttcttcttcttcttcttcttttgttttcgctatggaatcgaaaaaccctgcgaggtttacgctggggaagcagtcgtcgcttgccccagaacgccataacaaagaagcagagctccaaaaagatggggaagctgttgatcagggtgtgaggttgatgtattcggcattcgaaggcgatgtggatggaattcgcgaggcgttggagtctggtgtgagtgtgaattacaaggatattgataatcgcactgctcttcatgttgcggcgtgtgagggcttcactgatgttgttgatttattgctccaaaaaggtgctgaagttgaccccaaagatcgatgggggagcacgccacttgcagatgctattttttataaaaagaaatgacgtgatcaaactattggagaagcatggagcaaagcctttgatggcccctatgcatgttaatcatgcgcgtgaagtcccagagtatgaaatcaatcctaaagagcttgattttaccaacagtgtggagataacgaaggggactttctgtagtgcattggggggcgtggaacaaagggtgcagtaaaaaagctggggnaggatgtaatta

SEQ ID NO: 26508 - DNA, 345 bp, Glycine max
  Clone ID: TF_LIB3107-079-F6-R1A
tggcatgccatatgtagaggggagtgtactggtgcggatattgcttgcagcaggagctggttcatctgcgcagggttcgcaggatgggtggtcagctttgcatacagcagctatggctgatgacgtggacttggttagggttatttgaggtgctggggttgatgtgagcattcgcggtgtgcagatcagtatacctcttcacttggccttagctaggggtgctaaggcgtgtgttggacggcttcttgatgctggagcagagtattgtttgagggatgatgatggtgacaatgctttccatatagctgcagtgtcggcaagtgtgttgtcgagataatcttggct

SEQ ID NO: 26509 - DNA, 793 bp, Glycine max
  Clone ID: TF_GmC1577_2
ccacgcgtccgaaacctaacaacgccatagcattctctaacccaccctccctcgacctccacacaaccccaacactaacaagcaccgtcttccatacccatgtcggaaacagacacctatgcgccaccgcctctgttcctgctccagcgcccgccgcttctgctgtcggaagcaccgatgccattgtggacttactcaacaccggcatggatgtgaccgcaatcgcaacagcggaatctatcatgccgctcacaattagggttgggaacctccacacgatgaagcttctggaagccttcgattgcaaaatcgatggattgtttctgcacgaggccacgacgatggtccgaatcgacgcgatggagtttctgttggcgcgctatgatgacgagctagaggtggatgtggtagactccgaggggaggaaaacgatccacgtggcggcgagggaggggcacgcgagggttatccagttctgcgtcgcgatggaggaaaccctaatcgagtggattcgaaggggtggaccccactccactacgcggcgtggaaagggcacgtgaaggccgcagagtgtttgttggaatgctccaacgtgaagtgcgcgagggacagggaggggagaacggcgttttctgttgcagcggagagtgagcacgaacaatctcacgcgcgcacgcgcctggtcgatttgctgggttggggcgacgcgctgctgcgtgcggtgagagttgacgatgttcacggcgtgaagaaatgtttgggggaaggggttagtgtgaacgggagggaccag

SEQ ID NO: 26510 - DNA, 1689 bp, Glycine max
  Clone ID: TF_GmC643_1
acggtctttttcttctaagctatttgattggatgataaaaagatccaagtatcaatatcaattgatttgattagtggcagttccaacaatggaggttgtggtaactccaactctagagaatgacacaataacaacactctatgaagcatcactaaatggctctgtaagtaccttaaacaccctgatccaaaggaaccctctgattctgcatagagtttcactctctccattcagtgaaaccccattacacatagcctctttgctaggacatttggaattctgtgaggcacttcttaaaaggaaaccaagtctagcaagtgaagttgactctgaaagacgttcccctcttcatttggcttgtgctgaagggcacactgaggttgtgaaagctcttttgcatacaaaccctgatgtttgcttggctatggacaaagatgaaatgcttcctctccacttggctgtgatgagaggacacactggagttattaaggagttgaccagagccagaccaggctcaattcaacagaacactattgatgatggttctgttttgcacttgtgtgttaggtataatcatttggaggccttgatattccttgtgcaatcagcaacaaggaaccaacaacagttcctgcttgccaaagacaaagagggtgacacagttctgcatttagcagtgaggctcaaacaaattaagaccataaaacacctacttatgctacctgaaatgagaacagcgattagtgctttaaacaaggcaggtttaacagctttggagatgttggagcgctgtccaagagattttataagcctaaaaattgaaaagatgctacttgaagctgaagttcaaactggcactgcacaacaagggtcaccatcaccaagaatagctactcaaccatcaaatcaatccaagaggagcaagatatgggaaacattatggttaaaatacttacaataccaaagtaattggatagaagagaaaagaggaacattgatggtagtagccactgtaattgccaccatgacttttcagtcagcaataagtccaccaggtggggtttggcaagaagatacaataactggtggacacaactgcactacttatggcatttgtaaagcaggcactgcagttttagcatatgattggccacatgggtttctgaaattcatgaccttcaacaccacctctttcttctcctctcttgctgtggtgctgcttctcataagcggttttcgccttgagaacaagctcatgatgtggatcttgaccatgggtatgactttggcactcacattcatgggactcacatacttttgggcacagagcttggtcacccctgatcacattgttgataaagttaataggatgggaattcctttgtccatagtttgggtgatcatgcttctagtggctgttttggttcatggggttaacttgttcttgtgggtaaagaagtatgtaaagaagtggaagaagcagaagctgctgcagagctaaaagtcattgctcgcgagagttagtccagtgaatgagaattacaattacccctttgaagtttgcaatataaaataataattcttgcatatccagttgttagttagagaaataggattgtgacaacaactaagataaaataattgtgattggatataatcatcacatggaatctaaaaaaattatgtgtt

SEQ ID NO: 26511 - DNA, 1985 bp, Glycine max
  Clone ID: TF_GmC611_2
ttttcgtccgaaaacaaaaggtaagaacaagaagcacagaacacaggttgcttgaaccttacacgtcagcatcgttccgtgtggagtgttgagagatggggaattcgttcggatgttcggcctccggcgagaggcttgtgtcggcggcgagggacggcgacttggtggaagcgcagatgcttctgaactgcaacccgtgtctcgccaagtattctactttcggtggcctcaattcccctctccattttgcagctgccaaaggccacaacgagattgtggcattgttgctggagaatggagctgatgtgaattccagaaattattgtggccagacggcgttgatgcaagcttgtagatatgggcattgggaggttgtacaaacacttctactcttcagatgcaatgttatgagagctgattatcttagtgggaggacagctcttcactttgcagctgtgcatgggcatgtaagatgtattagacttgttgtggctgactttgtaccaagtgcactttatcaagctatacatgctggcacagatgttgacaggggtggtggatcaaatgcgaaagggaaacatgagcaaagtgccctgtccaagtttataaataaaaccgctgatggaggtatcactgcccttcatatggctgcactaaatgggtactttgattgtgtacaactgctgcttgatcttaatgcaaatgtgaatgctgtgacttatcattatggaacatcaatggatttaataggggctggaagtactccattgcattatggtgcttgtggaggcaatttaaaatgttgtcagatccttgttgcacgaggtgcaagtcgtctggctttaaattgcaatgggtggcttcctcttgatattgctaggatgtgggggcgtcattggcttgaacaattgctggcacccagttctgatgcctcaatacctacattctctcattcaaattacttgtccttgccccttatgagtgtgctcaacatagctagagagtatggattgcaatcatctccaacatcctctgatgagattgacttttgtgctgtatgcctggagaggccgtgttcagtggctgcagaaggatgtgggcatgagctttgtgtaagatgtgcactctatctttgctcaacaaacaatgtttcttctgaaatgcttggccctcctggctctatcccttgccccctatgtagacatggagttgtctcttttgttaagttgccaggttcccaagcaaaagaaaataaattacacgtgtctcttggcctgtgtaccccatgcatattacatccacgtgacctagaccagccatccctttctcatacaccagagattggaagaaatcgtgtagcttctgttccttcggagatacgctgccccgtcacttgcagtccatttccatctatggcaattcccttatgtacctgcaatgatggtccatgtccatcatttgaacctggagaagtagaaacacaagatggatcacctcatcactctcaagcatcaacagtggatcaggataaaatcgaagggccaagactggataaaacaacctgctctagcatgttttggggtagaagaagttgcagcagggagcaccaatgcaattcagaaataaatgcttgactcgtgccatgcttgtacgacacatactcgtgttgtggatactggatacactatatagatcagcaggatcagtccacagttgtcttattaatcagcctcaaatagtggaactcgtgatctctcttgaagagaaaaaactgctcttcggatcctcctcttggctgcacaggctgaatggtaggtgatagacacaattctggcgtttcagcaacacaaccaccctctggatgtcttttttttcctgatatttaaggagcgtgtgtgaaattagtttcgatttcgtgagatttttattgtgattattgtaattggatttcattttatcaaagaaaagttgtcttttttaagggg

SEQ ID NO: 26512 - DNA, 383 bp, Glycine max
  Clone ID: TF_LIB3242-391-P1-J1-F2
gaaggattcttctacgatcaatgaggttgggctctggtatggccggcaaaacggatcaaagcaatttgttcttgagcacagaacccctttgatggttgctgccacttatggtagcattgatgttatgaagatggtacttttgtgccccgaggcagatgtgaatttcgcgtgtggggcgaacaaaaccactgccctccactgtgctgcttctggtgggtctaccaaggctgttgatgccgtcaagcttcttttatcggccggggccgatgtcaattgcgtggatgcaaatgggaatcgccctattgatgtgattgctgttcctcccaagctgcaaggtgcgaaagccgttcttgaggaactttttttcggacaatgcttctgat

SEQ ID NO: 26513 - DNA, 805 bp, Glycine max
  unsure (1)..(805): unsure at all n locations
  Clone ID: TF_LIB4167-006-Q1-K1-B6
cccgcgtccggacaaaacaaaaggtaagaacaagaagcacagaacacaggttgcttgaaccttacacgtcagcatcgttccgtgtggagtgttgagagatggggaattcgttcggatgttcggcctccggcgagaggcttgtgtcggcggcgagggacggcgacttggtggaagcgcagatgcttctgaactgcaacccgtgtctcgccaagtattctactttcggtggcctcaattcccctctccattttgcagctgccaaaggccacaacgaggtccctttatttcactttttatatctaatccaatataatctaatgcaaccctttttacttattcatttatttctgttgggttttctgttagattgtggcattgttgctggagaatggagctgatgtgaattccagaaattattgtggccagacggcgttgatgcaagcttgtagatatgggcattgggaggttgtacaaacacttctactcttcagatgcaatgttatgagagctgattatcttagtgggaggacagctcttcactttgcagctgtgcatgggcatgtaagatgtattagacttgttgtggctgactttgtaccaagtgcactttatcaagctatacatgctggcacagatgttgacaggngtgggtggatcaaatgcgaaagggaaacatgagcaaagtgccctgtccaagtttataatanaccgctgatggaggtatcactgccctttcatatgctgcactaaatgggtactttgattgtgtacaactgctgcttgatcttatgcaaatgtgaatgct

SEQ ID NO: 26514 - DNA, 1600 bp, Glycine max
  unsure (1)..(1600): unsure at all n locations
  Clone ID: TF_GmC1249_1
ttcccgggtcgacccacgcgtccgcccacgcgtccgcccacgcgtccgtacggcatggcaaaagaggagaggatagggtgcctttagattgggatactcgactgaaaatagccttaggtgctgcagtgaggcattgctcgtattcatgttgagaatggtggcaagcttgtacatggcaacatcaaatcctcaaacattttcctcaacaccaaacagtatggacgttcgtctgaccttggtcctgcaaacatttcaagctcacttgccttgcaatcatcattcgcatcggattaccgtggcctctaagttaccaacatgagtgcgttcggcagcttttctcgttgcgtttctgctctgctagggtttcatcttcttccatcacctccgtcgcaatgaaaccaggcttcatctgaatccgattccccttcgccccttctcctccttcactttcaccttctccgaatcctctaccaattattatgatgaactccatcttcgtctctcacaaccttcgcgtctttggtcccggcttgaatcccttcgcaccttattgcatcgccaatcacaccctttcctctcgctaaataccaattcccctctccgattttcggggttactttacttggtcgttttgcttttttctttgtggtcgtttttgctttaattgctgagaaagatagaaacatgctcgaggaacagcctgttgttttgttcaggaagagcccttccaggaggcgcttgagatctgcctttgataccgatgataggggttggacctcgcttcatgttttcgctcgaaaaggcgaactcaaattggttaaaaaacttatcaatgaaggaatggatgtcaatgtgtctgcttggggccccaaatcaaaaggggtgacccctctccaccttgctgccgaaggtggtcacattggagtgatggatgtactacttgagcgtggtgctgacattgatgccagaactaagggtgcctgtggctggacaccgctccacattgcagccaaggaaaggaggagggatgctgtgaaattcttgttagagaatggagccttcatgccacctgatatcagtgatagcagatttaacccaccgcttcattactgtcccgggctggaatgggcctacgaggagatgaagcgacttcgtcaagaagatttgtctgctggagagacatcttacagctccgaaagttaatttgcttttcagggacttggttggtgtttgatagtgtgtgtttggatgccgttcagaggagatcaatgtgtgtcagatcagagttaatatgactagcttctgcgtcacctttataaatttgacatgaaaatttgttgatatgtgcattcagaaagcgtatccagacatgcactgaatctgtattgtgggaataaatgtagaattgaaataaaacaattatgtatgtgtaactattttagcatgttcgatctcttgtttatggaaacaatcatgtacgattttaatgtgatatgttgtgattgctgatgttttcttttacttgtagactatgttcagaattcagagccagttcaaaaaaaaaaaaaaaaaaaaaaaaaaaaagcggccgcntagagga

SEQ ID NO: 26515 - DNA, 494 bp, Glycine max
  Clone ID: TF_GmC140986_1
gtgcttgcaattcaagccatctaaaaggcctacttttagtgcaatgctggcaatatttctccgccatttgcaggaaataccacgcagccctcctgctagccctgataatggcttagataagggctctgtgtcaaatgtgatggagccttccccagtacctgaattggaagttcctcaggaaaacccaaatcatcttcatcgacttgtgtctgaaggagatactgcaggtgttagagatcttcttgcaaaggctgcatcagaaagtggcagcaactacctatcaatgctattggaagctcaaaatgctgatgggcaaacggctcttcacttagcttgtagacgtggtagtgcagaacttgttgagacaattctggagtgtagagaagcaaatgttgatgtattggacaaagatggagatcctcctcttgtttttgcattagcagctgggtccccagaatgtgttcgtagccttatcaaaagaaatgctaatgtgc

SEQ ID NO: 26516 - DNA, 1245 bp, Glycine max
  Clone ID: TF_GmC798_2
cgcgttccggctcgaggctcaagtacttgctgtccaggggagttaatcctgatctagagagtgactcgggaacacctttggtttgggctgctggccatgcccaaccagcttctgtcagtgtactattggaacatggtgcaaatccaaatgctgaaactgatgatggtattactccactcctttcagctgtggcagccagttctctggcatgcttagagctgttaattcaggcaggtgctaaagtaaatataagtgctggtggagcaactcctttgcacatcgcagctgataatggaagtcttgaactattaaattgcttattgaaagcgggagctgatcctaatgtctctgatgaggatggtgtcaagccaatacaagttggtgctgcaaggggctatctaaaagctgttgagatattgttccccttgacatccaaagtagatactattcctacttggactgctgatgggatactcgagtatatgcaatctgaaactagaaagcagctggatgaatcgattaatgaccaagaaactaatcatcccaaggaagctgattttccaaagcaaaatgttcccgaggtggcgcctgaagcccaaatgagagcatgcagaatcaaagtcaagaggggatgaggcttttaaaagatatgactatcatatggctatagattcttatacccaagcgattgatctgaaccccactgatgctactctgctatccaatagaagtctttgttggattaagttgggtcaagctgagcatgctttagctgatgcaaaggcttgtagagctttaagaccagattggccaaaagcttgttatagggaaggggcagctctgcgtttgttgcagaaatttgatgaagctgcaaatgctttttatgagggagtaaagcttgatcctgaaaataaggagcttgtaaatgcgttcagggaagctgtcgaggctgggaggaaatttcatggaactcgtgaaaatatgctattaatacctcgttcctaagcattgcgggaagtgcagccttattcacttgatccttttttcctcagtttgtgtttgtgcgtgttttctttcactaggtacagtcgtacaggaagagtcagccagtaatctaatcagtttcattaaattgttatagtaattagaaagcttatacttatttgaaatgttccaaaattgttgcagaattagtaaattatgaaaatgtttcatgggtatttctcccatactgttgtaggattc

SEQ ID NO: 26517 - DNA, 785 bp, Glycine max
  Clone ID: TF_GmC555_3
gtcgtccgagatcgaggttgtcgaggaggtgcagtcccgcgacgagcaatcggcggcgtctggcggcggcggcgatggcatgggggcggaggagagcctccggaacgacgtgtacacggcggcgtcgtacggggatttggagaaactgcagagattggtggagcaagagggttgccccgtcaccgagcccgacgggttgggatactacgcgcttcagtgggctgctctcaacaatcgcactgccgctgctcagtacatcattgagcatgggggagatgtaaatgcaacggatcatactggccagacagccttacattggagtgcggttcggggtgctattcaggttgcggaacttttactccaggagggtgctcgagtgagtgctgccgatatgaatggatatcagacaacgcatgttgctgcacaatatggtcagacagctttcctttaccacattgtttcaaaatggaatgctgaccctgatgttcctgataatgatggaagaagcccattgcattgggctgcttacaaaggttttgccgattctatacgtcttctgttatttcttgatgcacacaggggacgtcaagataaagagggttgcactcctcttcattgggctgctattaggggcaacttggaggccagtaccgtgttagtacaggctggcaagaaggaagatcttatggtgactgataatacaggcctgactccagcacagcttgcttctgataagaatcacagacaagttgcttttttccttggaaatgcccgaaggttgcttg

SEQ ID NO: 26518 - DNA, 458 bp, Glycine max
  Clone ID: TF_GmC27269_3
aaggactgtctttattacatttggctgcagtcttcaatcaaactgatatagttttcattctcatggattcgggggcaagcctggaatacagaaatgcccaaggagaaacacctttagattgtgcaccagctaccttgcaatacaaaatgcgaaaaaagatggaggaaggtggagcagtggaccaaagcatttgaacaatctattacttttatcagtgttctttttatgcagtcctcccaaagagagcttcaaatattaccactgtctaaagctcctctgttaccagaacaaaaaatttcgccttctgtataattgtgacagaggagttcaattcatcttggcagactaagtatgcagacctatataagacatatctttgtcagctgcgcaacttgggcagtattactattcagcttgtaaatttctttggtctgtgacataagagcattttttaatag

SEQ ID NO: 26519 - DNA, 259 bp, Glycine max
  Clone ID: TF_LIB3242-492-P2-K1-B6
ggaccgccctttggttgaggctcactttgagacatctcatgtatagcatctcgcgtctctgctgacgccacgtctaaaggcgtattgccatcactgtccctcacggatggatcagctcgatgtcggatcaacgtcttatagatgtcgatgttgtcggtgatcgcggcgtaatgtaatggtgtctgaccggcttcatcttgtatgtctatatcggcaccgttgtcaagcagtattttgagcagttgttggtgacctctgt

SEQ ID NO: 26520 - DNA, 2499 bp, Glycine max
  Clone ID: TF_GmC555_1
cttcaatttgattccttcgttgtttcgtcctgagagggtcagccatgacccaaaccctctcattctctctctcaccttcccagaaaaccctagaaattaattaaaaccatccaatcttcttttctccatttccccgatttttttttttttcatttctatttcaatcgcaacctcctcctccttccaagtcaacgcggatttcagaattctcgatccatgtcgtccgagatcgaggttgtcgaggaggtgcagtcccgcgacgagcaatcgggggcggaggagagcctccgtaatgacgtgtacacggcggcggcttacggggatttggagaggctgcagagattggtggagcaagagggttgccccgtctccgagcccgacggtttgggctactacgcgcttcagtgggccgcacttaacaaccgcactgccgctgctcagtacatcattgagcatgggggagatgtaaatgcaacagatcatactggtcagacggccttacattggagtgcggttcggggtgctattcaggctgcagagcttttactccaggagggtgcttgagtgctgccgatatgaatggatatcagacaacacatgttgctgcacaatatggtcagacagctttcctttaccacattgtttcaaaatggaatgctgaccctgatgttcctgataatgatggaagaagccccttgcattgggctgcatagaaaggttttgccgattctatacgtcttctgttatttcttgatgcacacaggggacctcaagatacggggggtagcaatcctattcattgagctggtagtttgggcaactcgtaggcctgtagcgtgcaggagcaggctggtgattagtaagatattagtctcgacgaagatattgagtgcattgaagaattaggtagctcagaggagggtataggaatgatgcacatggcaagaagctcgaacttagcaaatggagactcgcataaccattccgaatatgcaaggggcaatggaaatggccatcatgttattaatgtgaattccaattccaacagtacccactccaaaacaaatcatggtcatgttctttttaccgcattgtagccataattaaaaccagggccaaacctgctttcgacgatgcgcccttgggttttaggtgttggtttgggaatgttttacaggtgttgtcagcaaggattcctggttatttcaggatgaataagcatgattatcacgaaacaaaagatgatgacactctcttgaagattgatataaataatcttgctttgcttgctggaaattggtcccagctttgtgcaacatgcaagattgtcaggcctcttcgagcaaaacactgttccacctgtgatcgttgtgtggaacaatttgatcaccattgtccttgggtatccaattgcatcggcaagaagaacaaatgggatttctttgtttttattgttcttgaagttctggcaatgttggttactggtggagtttgtcttacaagagtgtgaactgatccacttgcacctcattcatttggggcatggattcagtatgttgctaacaatcacattggtgcaatatcatttctaatagccgattttttcctcttctttggtgtgtttactttgacagttgtgcaggctagtcagatatcacgcaatattacaacaaatgaaatggcaaatgcaatgcggtatagttacctcagaggtccaggtggtagatttagaaacccatatgatcatggtatcaagaagaactgttctgatttcttgatcaatggttacaacgaagacgttgagtgcattgaagaattaggtaactcagaggagggtataggaatgatgcatatggcaagaagctcgaacttggcaaatggagactcgcacacccatactgaatatgcaagaggcaatggaaatggccatcatgctattaatgtggattccaattccaacagtaccaactccaaaatacatcatggtcatattaatggtcatgttcattcttcgcattgtagccataataaccatggcaaaaccagaaatgacaacgttcccttgggcttgggtcttggccttggacggaacagatctgttacagcctcatcatgatatttacatacatgtctggtgtttgaacctaacctgtaatgtaacataggcacacatctgggttggtttacgttaattcaatttattgtggctcttttctaccacacccccatgtgcaattttgtgctgttacatttagtcgtcctcttatcgttttttctttctactttttgtaactaatttaagttgcattttaaagatgataagccttgaaatctatgtatgaaattcgaatgtatttgctagagcctagaggtcccgccccccttccttcctatggcggttgctacttgctagtgtgcggatgaaacaaatatatatatatatatatatactggtacaacttattctttttaataaattttcttacatatttaattttt

SEQ ID NO: 26521 - DNA, 1693 bp, Glycine max
  Clone ID: TF_GmC125239_1
gaaaatacaattacattgcatacctatagttctttcggccaggtttcctttttttgcaataagcctcaaacttccatggttgaagctcatgaattttgcaaggttttacgacttgataagaaatcctttactgaaatactgaagatatactttttagatggtcgtattgtcttgaacaatctccttgaggtaaaagacttgagtctacaacgtaagcttttggagtcagatttcaacctgactattggtaacatggaaacagagctggcaataaggatgaattttgctgcccatgatggtcatcttgatcttgtgaaacgtttgattggatttggggcagatcccaataagactgattacgatggcagaacacccttgcatatctcagcatcaaaaggatatgtagatatttcttcctatcttgttgagcaaggtgtaaatatcaactgtgcagataaatttggcaccactcccttgcttgaatgcatcaagaatggacacgaaagaagtagcatctatacttgttaacgcaggagctatctttaccattgatgatgttggcaattttctctgcatgactgttgccaggttgctctcgggcctctttcgcagggtcctgggtcgtggggtccatccatttcccaaaaattatgatcaacgtacacctcttcacatagctgcctctgaaggtttgtttacaatggcggaagtacttctagaagcaggagcgagtgttttatctaaggacagatggggaaatacacctcttcatgaagctcataccggtggggatagaaatatgatcaaaatgcttgaagtggcaaaagcttctcagttggttgagttgtccaataatattcatgaaactcaaggtatctatcttatgtttgcaacaccaacagatgaaggctcgagaaagagatgtatagtatttcctttccacccatgggatgatcagaaagcggatagaaaagagggagtggtcctaacggttccacaaagcattgaagagcttataaaggaggcgacaaaacatttggaaattccaaacgcttcctgtattttgtcagaacaatgtggcaaaattgtttatgtaggcacgattaacaatgatgagaagctatttctagtgagtgaagcacagaatgaatgaggtgaaatgttcagcagtaccaacaccactagctggttaatatactttttctttactccacaaatttttccattccagataagaacaatttttatatgtttgcagttattgtcaattagtactaataaacatcctctcatcactctttcaaccatggtacatgtcaacggatccaagttggtgacagggtatgtgaagttgactttgcaaaaacacctttctttctatgctatctcgatcgtagtcataatcccagtgcacaaggtcattcattgactacacctgccggttctttctcagtcttctccacccaatgttagaataaagggttgctttgtgggatgaatgagtaggatattggtggattgatctttgtcttcgaggtggagcttaattgtataaatatcatttttcctctttaattaagctagctagttttctcacgtgcttcaatcgcatgttccaaagtcgtaagaaccaagtattacattgttaataataataataaaaagtcacaagaacttttatcgtaaaaaaata

SEQ ID NO: 26522 - DNA, 621 bp, Glycine max
  Clone ID: TF_uC-gmroLIB3258P143a05b1
atggaatgtaccttttgacagagaacaagatctctccaacaagcctttttattatttcagaatttaggattgtttaaggtttgatgatttcgtgtcgggggtgtttgtccaaaagggaatttgaggccttttgatgaggctgtgaagagacccactgcttccaatttcccgaatagtgtttttgtcgtgatttctgagggacatgaagtttctgagcctggtggggaattcttttggatgttctgcatctggtgagcgcttagtttctgcagccagagatggggatgttcaagaagccaaggccttattggaatataaccctcgtcttgcaagatagtgtatctgttacttgagtccggagttgatatcaatctcaggaattatcgcggtcagactgcattgatgcaagcttgtcaacatggtcactgggaggtggttcagaccctggttatttttaatgccaatatccataaagctgattacctaaatggaggtactgcccttcacttggctgctttgaatggccatacccggtgcattcggctcatcctcgctgactatatacctagcgtccctaacttttggaatgcattacagacaggtgatcataaatcaatctca

SEQ ID NO: 26523 - DNA, 2071 bp, Glycine max
  Clone ID: TF_GmC37725_1
acgagtccccgtaagtcaaccgatggacgcatcacagcacctcgtctaattgcgggaattcagaagaaagaaaaagaaaagagagagacagagacatttgcgccttctttcttgcaatcgcgtttgaataaaaacaaaagaaattcctcttcttattctccctcgcgcgattcatttcattttctctttggaataacctgcagggttgcttccatttcaacatgtagagcgcgctctttgttgttttcatttctgacaagttctttttttttgttgcgttgcaaaatccttctcctcgaggcggcggcatggaaagcattgccgcgcagctgaagcgcggcatctcgcggcagttctcgtcggggtcgctgcggaggaacctctcgtggcagttcacgcgccaggcctcgctggatcctcgccggaacaaccagcgcttcagcttcggccgccagtcctcgctcgatccgattcgccgcagcccctgctccggcaacgccgagctcaccgtgccggagaacctggactccaccatgcagctcctcttcatggcctgccgcggcgacgtcaagggagttgaggatttgctcaacgaaggcatcgacgtcaacagcatcgacctcgacggccgcaccgccctccacgtcgccgcctgcgaaggccacgtcgaagtcgccaggctacttctcagccgcaaggccaacctcgacgctcgcgatcgctggggcagcacggcggcggccgatgccaaatattatggaaatacagaaatttattacatgttgaaggctcgtggagcaaaagtaccgaaaaccaggaagactccaatgactgttgcgaatcctcgtgaagttccggaatatgaactcaacccggtagaactacaggttcggaagagtgatggtatttcaaagggaacataccaagtagctaaatggaatggcacaaaggttgcagtgaagatacttgacaaggacagttattcagatcctgataccataaatgctttcaaacatgaactcacattattagaaagggtgcgacatccgaatgtggtccagtttgttggagctgtcacccagaatatacctatgatgattgtgcgtgagtaccattctaagggtgacctggcaagctatcttcaaaagaaagggcgtttgtctccatcaaaagttctacgctttgctcttgatattgccaggggcatgaactatcttcacgaatgcaaaccagatccggttattcactgtgatttaaagccaaaaaatattttgctggataatggagggcaattgaagatagctggatttggcactgtgagattttcgctaatctcacctgatgaagcaaagctggtacagccagagcctaacattgatctttcaagcttgtacgtggcaccggagatttacaaagatgaagtttttgatagaagtgtggatgcatattcttttggtctcattatatatgagatgatagagggtacacatcccttccatcccaagtcctcggaggaggcagttagactgatgtgcttggaagggaaaagaccagcattcaagatcaaaacaaaacattatcctccagagttgaaagagttgatcgaggaatgttgggatccaacacctgttgtgaggccaacattttctcaggtcattgcacggttggacaaaatcgttgcaaattgctcaaaacaaggatggtggaaagatacttttaaactcccttggaaataaataacaaagtacatactacgtggcaaggaagacatcaagttcagggttgcatcctcaaaaccaatttgtcagcttcatggtggtgtactgttaatagcccttgcaattaataattttggaattcgaataatattaacttgagcttggattaatttgagcgtgaaaatgaatttgcatggttcgtcctatgttcctgtctactagagggctggaacagctcctctctgtacaatgtaccataaaggagatataacatctcagaaattttcttataaaaatgtttttctataaacgtcttatggataaaaaaaaaaaaaaaaacgagactagttctc

SEQ ID NO: 26524 - DNA, 1948 bp, Glycine max
  unsure (1)..(1948): unsure at all n locations
  Clone ID: TF_GmC6794_1
acgcgtnnacgtaagnctcggnnaattcggcttcgaagcctagaatcaacaatgtggctgtaatggtaataccttgaatttgcggtctgaccattcttggtccctgtttggctggcagcctgacagcttcgttagtctgggcctctttgactggcatgttttgccccaacatcacaggccttactacagaccagtactgaaagtggtgtgaaccgtaatttcgtctaccattttcagataaaatgcgtccaaagtagtgcactgtcttcactgaccccccgggcattcagaaagataatagtcgacatgggattgtattatgcattccacactcttgccatgcgctaatcaaatcagcagctgaacaaatagaaatttctgcacggtccttgcaattgataataagatccaggaggaattatttattccagggggagtaataatggatcaaagaaatgttgtggatcaactatattttgtcggccatggagtactggaggaagtagccacttctgaacatgggactgcataaactgtttcacttctgcagcctaacagttcattagcagaaatatctattctttgctacattctttaaccatatactgaccgtgtttgttaactgagtacactcctgcgactttataaacaatcatttacaaatatcctagacatatacttttatgatggaaggaaagtattaaacaaccttctagagggaaaagaatcttttctggataagcagttggagtcagtaatcacatttcatattggaaagcaagaagctgagcttgcttttgaaggtcaatagtgcagctttcaatggggatatgtatcagctaaaagtttaattcgagcaggagctgatcccaacaaggcagattatgatggaaggtcacctttgcatcttgcagcatctagaggatatgaagatatcacaattttccttattcaagaacgtgtagatgtcaatattatagataacttcgggaacacacccttacttgaagcagttaagaatggacatgatcgggttgcttctttacttgttaaagaaggggcctctatgaagatcgaaaatgctggtagttttttgtgtactgcagttgcaaggggagattcagattatcttaaaagacttttatccaatggcatggatcctaacttaaaggattatgattaccgaagtcctcttcacgttgctgcagctgaaggtttatacttcatggcaaagttgctattagaagccggagctagtgtttttacacgagacagatggggaaataccccgcttgatgaagctcggatgtgtggaaataagaatctgatcaagctactggaagatgcaaaatcttctcaactgtcagaatttccatcccaagaatttacagataaaatgcatccaaagaagtgcacagtgttccctttccacccgtgggatccgaaagataatagaagacatggaattgtattatggattccacactctatcgaagagctaatcaaatcagcagcagaacaaatagaaatttctggcggttcttgtattttatcagaagatgctggtaaaattactgatgtggacatgatcaaggatggtcagaagctgtatttagtccatgaaacacattaggcctccatattatggctctttacaaccatataattaagtgccttgtaatgtgttgtgctttctacaaattagcacgtgatttgatcttgttaaccgttcaaaaactgttttatatatcctgtcaaaatacagacgggtgatgaagatcaatactgcttagtgttgataccgtgatttcaatactgcttagtgttggtcatccattttgctattcagtattggctcggaagatttctttgtttttcttgtctgagcattaatattaattaagagatagttaattgaaacaaaaaagaaaaaaaaattattgtgggc

SEQ ID NO: 26525 - DNA, 961 bp, Glycine max
  Clone ID: TF_GmC262_1
agcttgattaatactaccaactacaggtattgtgagctctcagctgtgcaattacattacaaccttaatcgcttagcatacgtaaatcatggctcgagtgagaattgacgtggatttcccaagtccagatgcagcttcacaagtgggactactgcataaggaaattgttggaaaagctatgatttacaagttgtctgaagctgttgaagaaggagatggtgctaactttgttaaggtgttgaagcaacaatgtgaggaaaataagctacgtttgtctgatgtttttgataaagtcaccctagcaggtcattcactgcttcatgtggcagcagatatggggcaaaaaagtattgtgcaggtgctttgtgatctctttcctttgcttctaattaggagaaatgtaagaggtgacactccacttcatgttgctgcgaggtctaagaaatatgagacagtcaagttgattctctcccaatatgccacaaagaagtcaacatatgatgagatgaaagataaaaagataacaagagaaacaaatgaatgtgggaatactcctttgcacgaggctgtctacagtggggatgttgatgtggttaaagagaatttcgaccaggataaggctgtagcctattgtttgaacaagtcaaagagatcaccactgtgtttggcagtggtgaatggtaatgagcaaattctcgaacttctgttgcaaattccattacctgcggaccagccgctttcacagtgtcgtcgaagttctccactccacacagctgtacagcatctcgaacttctgttgcaaattccattacctgcggaccagccgctttcacagtgtcgtcgaagttctccactccacacagctatacagcatcagaaaagagttatgatactagcgataatagaaataaggcccgagctagtttatttaagggatgaagacggaaatactcccctttca

SEQ ID NO: 26526 - DNA, 5103 bp, Glycine max
  unsure (1)..(5103): unsure at all n locations
  Clone ID: TF_GmC201_1
agacgttactttctctattctcaaagtcacacacagcactttctctctcatcttaactctctcccatgtttcctcagtttcatcgatggagagtgaagccttaactctgcttattccgtgtcccagatctcgttgttgcttccgattctttgattcttcgcttctttcttcttctcacttcacattccgattcgtcgcagattcttttggtttctaaacatcatgatcgtcactgcctccatctgtaatcggtgattttctctcttttctctcagctcatgaatttttcctttttctttattagctgatgaatttacatgatcatcgagtaaatcactttttttccttctatttttatagtttgaattgttttttctattttcagtttctttttacacttgtcttgttattatgtttaatcctgtaaagatgattctagatttaccttagatctgngctctaggtgtggttcattttttacgattaacgggggtccggattcccgggtcgacccacgcgtccgcggagtgggcggacgcgtgggcggacgcgtggggtgaatttcgcgtgtggggcgaacaaaaccactgccctccactgtgctgcttctggtgcatctaccaaggctgttgatgccgtcaagcttcttttatcggccggggccgatgtcaattgcgtggatgcaaatgggaatcgccctattgatgtgattgctgttcctcccaagctgcaaggtgcgaaagccgttcttgaggaacttctttcggacaatgcttctgatgtgtctgttggtgaattctctgtcccggtgtctgttaattcttccagtccgggttctcctgcccattcgtcgaatgggatgccgtacactccttcggtttcaccgccatcccccgtggctgcaaagtttactgatgcagctatttgttctttgtcggagaaggcgagggaatacccgattgatccatcgctgcctgatataaagaacagtatatatgcgactgatgagtttcggatgttttcgttcaaggtgagaccttgttcccgggcatactctcatgattggactgagtgtccttttgttcatcccggagagaatgctcggaggagagaccccaggaagttccattacagctgtgtgccgtgccctgattttagaaaaggggcttgcaggcgtggagacatgtgtgaatatgctcatggggtgtttgagtgctggctgcacccggctcagtatcggacacgcctctgcaaagatggcaccagttgcaatcgaagggtgtgtttttttgctcacactgcagaggagcttcgtccgctgtatgtgtccactggatctgctgccccttcgccccgttcatctgcttcaggtcctaatgtcatggacatggctgctgccatgagcctttttccgggatcgccttcatcgggctcttccatttcactttcaatttctttctctctagacgttactttctctattctcaaagtcacacacagcactttctctctcatcttaactctctcccatgtttcctcagtttcatcgatggagagtgaagccttaactctgcttattccgtgttccagatctcgttgttgcttccgattctttgattcttcgcttctttcttcttctcacttcacattccgattcgtcgcagattcttttggtttctaaacatcatgatcgtcactgcctccatctgtaatcgctaattgaaggcatgggaggtggtccagagaaatcaaaatctccttcaacttcgtcttccctttaggtgtaaaagtcacagctaacgataaagaaatgaaatcgctaactgttaatactgaagattctttttccagtttgactggaacttgcttctaacaatgatattgaaggcttcaaggtgcttttagagaaagattcttcttcgatcaatgaggttgggctctggtatggccggcaaaacggatcgaagcaatttgttcttgagcacagaacccctttgatggttgctgcaacttatggtagcattgatgttatgaagatgatactgttgtgccccgaggcctgtttttgatggccatcagcagcgaacttagaatgacctggctgttaggtaccgccgcggcctggtaccgcttctgtgagtgcatctggtcggtccaagatcctaactccatcaattcttgacgttcgttttagtgctgagatttccactgctcccggctcatctgatccatcagcgggtaccccgtgtccaactagggacctactcatgggtctggaaaagttgattggtcagtaaatggaaatgagttaggtcgattgcagagatcatcatcatttgagcttggaaacactggggaggagcctgatctatcctgggttcaatcccttgtcaaggaatctccgtccgagataaaagagaagttgacaggttctggccctgttgcatctgttgatggaccgagttcaaatccaaagtcaaatccgcaagttgagtctgttgatcattctgttctaggagcctggcttgagcaaatgcagctggatcagcttgtagtctaatcaaatttgacccattccatcttgtgataggtatttaatttcacaacgtattctttttgtcaatttttttgggtggagcaaggagagggaatgtaatgatactgaagcgagggatggctgcaaagtacccgaatgataatctatttttccccccccattattttgtcattcattgttttactaaagagcttcagggggagtggtaagaaaccctctctctggggttgatgatatcccagtaaaaaagaaaatattcttccaaaactctagtttcaggactcttttcttcattttattcctagccatggaaaaaccaagagcctcatatttgtattcaagttcgttttcttggtaggaatctccttgtcgccgtcccactttgggcagccaatgtccccatctgcaaatggcatgccactgtcttctgcttgggctcagccaaatgtgccggctcttcatttaccaggaagcaatcttcaatctagtcgattgaggtcttccctaagtgctcgtgacattccaccagaagacttgaacatgatgtctgatcttgatggccagcagcagcaccatctgaatgacttgagctgttacatacagcctcgccccggtgccagttctgtgagtagatctggtcggtccaagaccctaactccatcaaatctggaagagctcttttctgctgagatttctttgtctccccggtattctgatccagcagccggttctgtgttttcccctactcacaaatcagctgttctcaatcagtttcaacagctccaaagtatgttatcacctataaatactaatttgctgtctcctaagaatgttgagcatcctctttttcaggcttcttttggtgtctctccttctggaaggatgtcaccaagaagtgttgaaccaatctctccaatgagtgctcgtttatctgcatttgctcagcgagagaaacagcagcaacagctgcgcagtgttagttcaagagaccttggtgccaacagtcctgcctcacttgttggctcccctgcaaacccttggtcaaagtggggttctcctattgggaaagctgattggtcagtaaatggagactcccttggtcgtcagatgcgaagatcatcctcgtttgagcgcaagaacaatggggaagagcctgatctctcttgggtccaatctctggtgaaggagtccccacctgagatgatcaaagagaagtttgcatctcctatgcctactgcatctgctgatggaccgaattcaaattcccaaattgaatccattgaccattctgttttaggagcctggcttgagcaaatgcagctggatcagcttgtagtctagtcaaaattgaccctttacatatcttgttgagataggtatttaatttcgtaaggtacatattcttttggtgaaattttttgggaagacaacaaggaaagaagtgtagtaaaaggaatggaggattggttggctgcgaagttacctgaaggatattctattttttcttctttttttaaataataattgtcattcattattttactacagagcttcaagagagttgaagaagctctctctcttggggctgaaattcaatagtaggagaaaaatcctgtcgaggttatctatttttcttccaaaacggccccgtttcaggatttttccccttgctattttacttgatttctgagttcactatcaagcaagctagtttggtttataatggaacaaaaaccattattagcctgcgtttgttttgaaagatttttctgaagttcactaagttaagccaagtcaatgatttgctgttgcctatggttgaagttgtttctttctgagggaataattagagatgatctgcactgttgaatatttacggcagataaatgagatagtgaagtttacattgttcttcctgttaagctgtgttaccttgaattgtactggttatatatatccatttcgtttctaattcaaatcaaatgtaatgtttttcttttaaaaaaaaaaaaaaaaagtggagcaagggggaatgtaatgatacttaagcgagggatggctgcaaagtacccgccacgcgtccgatttttttcccattattttgtcattcattgttttactatagagcttcaggggggaggggtaagaagcccgccctctctctggggtgcgatgatatccccgtaaagaagatgttcttccttaaaaaatctagtttcaggactcttttctttcattttattccgagccaagcaaaaccaagagcctcatttgtattcaagttcgttttcttggtaggaatctgttagtatattgctattgcatgtatagaagactagagcgtgtttcttgttaaggaattagaggtgatctgcgccattaatattcattgctggcagattgtttagatatagtgaaggctactgtgtatgtattggttatttttcaaatttaatgtaacggttcatttatgggtattattcaatggaaattatgaatattgaaaaaaatagtaaaactaaataaattaaattaatgaaaagaag

SEQ ID NO: 26527 - DNA, 2246 bp, Glycine max
  Clone ID: TF_GmC58601_1
cgaggctagatttcaaatttcacatcactctgtctttatcttttatctatggcacctacagcagcaatgcttttgctctctcacaatggcaaaacacacgcaccctcatcatcatcatcatctgcaacaacttattattctagtttgaaagcctctgcattcaaatgggttgccaaatacaaccccgtgcccaaagcaagatcagaaaataagaggatgaagtgagggagagtgggaggaactaactggggaaggaaaaggaacacatgtctgttcaccgtggctctagcattctcattcggctcgacattttcttgccccaatcccaatcccaattccaaaccctaaccaatttccatggcttcctcggagatcgaggtggtttcatcatcatcatcggtctccaaacccaacaacgaccagcctccaatcctcgacgttttcaccgcctctgctcacggcgacttcaacaaattgagaaccttcgtcgaacaagacggtgcctccgtctctcttcccgattttagcggctattacgctcttcagtgggcctcgctcaacaactttcacgacattgcgcactatctcattcagcatggggcggatgtcaatgctaaagacaacatgcaacaaacggcattgcactgggcagcggttcacggttcaactctagctgctgatgtgcttgtggagaacggtgctcgggtcgaagctgcagatgtaaatggataccgggcagttcatgttgctgcacaatttggacagacagctttcttaaatcatattgtagtaaagtaccatgctgattttgatgtgcctgataatgatggatggagtcctcttcattgggctgcatataagggatttgctgacacaataagattgcttctatttagagatgcaagtcaaggaagacaagataaagatggttgtacaccgttgcactgggctgcattaagaggaaatgcagaggcatgcactgtgcttgtacatgcaggcacaaaggaagaactgatggtgaaggacaattctgggaacacacctgtacagcttgcatatgataaaggtcatcggcatgtcgctcctttcctttcaaatcaacaacgggctagtagaaactactggaaagggaaactgtgtagtgggatagtgacagatattggttatgctcccatcttattttgtactataatctttctctcgatcctcttcatcaactcagtcgttgcagctcctaaccttaaaaagattactgccgttgttggactttgggcatggacggcgctttcttcggccgttggttccctgattatgttctacaagtgtagtagtaaagatcctggttatataaaacgaccgggagacttgggtactcaaagtgatactgaggatccgttattgaatattgatctgaatagttcctctgtttggatgggaaattggtctcaactttgccctacctgcaagataataagacctgtccgatctaagcattgcccaacttgtaagcgatgtgtggaacagtttgaccaccactgtccatggatatctaactgtgttgggaagaggaacaaaagggatttctttatttttatctgcctgggaactttgacttcttccctttctggtgccgttgcagttcaaagaatttggacatctaaaccagcattactggcaggagaaacatggatccattatgcgttagtaagacatctaggtttagttgtgtttttggtgatggatgctgttgtttttgttgcgactacgacattaacgataacccaggcttccatgatagctcgaaatgtgaccacaaatgaactagcaaattcctcccgttatgattatcttcgtggtcctgatgggcggttcagaaacccatacaaccacggttgttggaagaattgtgctgacttcttttttctcggctatacaaatgatgatgagattgcttggcctccattacagcaggtggcaacttagaacattctcccatgctgtgtccatgcatcctttgttatattatcacattgttccaattatatgtagatgatagtcattttcagctaggctttcattctctgacacatgtacattttattacagaacccaaagaaataaaacatttttattttgggccatcagaaaatacaaattattttgataccctcctgtaccagttgtgcaattgtttggtgggatacccattactttagaaggaaatgcatttaaaggattggaactag

SEQ ID NO: 26528 - DNA, 2026 bp, Glycine max
  unsure (1)..(2026): unsure at all n locations
  Clone ID: TF_GmC84_1
gaaatttacgaattacgagaagagaaaaagagtttctgagttgacattaaagatatcgttgaggtaaaggaccaacaccaaccaaaaccaaattataatagaacgcggaagaagaagaagaagtaaccgacgcttgaataaaccgaccctattccgttgttttattccaattgacttgattttctcggaaaattcttattttccgagaaagttcgtgtttttactgttgaatcgggaattcccaaatcggggtgtctgaaattttgagctgtcggaaccgttcttcgattcgggttcaagttcgaagaagaaaagcgatgagttcgggtagtagcagcagccacagcagtgagaaggagaaggagaagcagagagtgagtcgcacgtcgctgatactctggcacgcgcaccaaaacgacgccgcagctgtgcggaagctcctccaggaggatccctcgctcgtcaaggccagagactacgacaaccgcacgccgctccacgtggcgtcgctccacggctggatcgacgtcgccacctgtctcatcgagttcggcgccgacgtcaacgcgcaagatcgctggaaaaacacccctctggcggatgcggaaggagctaagaagagtaatgtgatcgagcttttgcaatcgcatggaggcttgtcttttgggcaaaatggaagccatttcgagccgaagccggtggcgccgccgttgccaaacaagtgtgattgggaagtcgagccgaccgagcttgacttctccaactcggtgcgaatcgggaaggggtcttttggtgagattttaaaagcccattggcgtggaacaccagttgctgttaaacgtattcttccatctctttcagaagatagattggtgattcaggacttcaggcatgaggttaatttgttggtgaagcttcggcaccccaatattgttcagtttcttggagctgttactgacaggaaaccccttcatgttattactgagtatctaagagggggtgatcttcatcagtacctcaaggaaaaaggcgcacttagtcctgcaacagctatcaacttttccatggatattgtcagaggaatggcctatcttcacaatgaaccaaatgttataattcatcgagacctaaagccaaggaatgttcttttagtcaattctagtgccgaccatttaaaagttggagattttggatttgagtaagcttatcacggtccagagttctcatgatgtatacaagatgactggtgaaactgggagctaccgctacatggctcctgaagttttcaaacatcggagatatgataagaaggttgatgtgtactcctttgcaatgattttatatgagatgcttgaaggtgaaccaccttttgcaagtcgtgaaccttatgaaggagcaaaatacgctgcagagggacacaggcctcattttcgggcaaagggttatacccctgaattgcaagagttaacggagcagtgttgggctcatgacatgagtcagagaccatccttcatagagatccttaaacggcttgaaaagatcaaggagaatttacctacagagaatcactggcacttgtttacctcataaatgtctaatagcattaatttgttcagaaattaagatgatttatttaacattaccattctctggtttggtgccggatttatggataggttgagcaaacaaacctgcaaagtcaatacttgttttcaactgtttggattaatgagcagaaaaggtgatgttgattgccctgacattagattctgacatgaataaagcctttggttgctattttttatatcatgttacagttactttaaccaaatagagacatatagcagcaaattctgtcgttactgttctatttttctactcttggcatctttgtgtccttttagttgcatgatgattgcttctggctcggggctggcctcaggtaccgtaaccaaatananacatanagcagcaagtctgtcattactgtttnatntctactcttngnctctgcgtgccccttcac

SEQ ID NO: 26529 - DNA, 630 bp, Glycine max
  Clone ID: TF_GmC84_6
ctcgagccgaatcggctcgagtacggctgcgagaagacgacagaaggggggggcagcaaatgcaaagcataaaagtataatataccccacgcgctttaatcccccgacgaaatttacgagcaagaataaaaaaaaataaaaattatgaggtgacattcaaaatatcgttgagcaaaggaccaaccaaaaccaaaaccagaagataacaattaaaccgttcttcttcgattcaagttcgaagaagaagcgatgagttcgggtagcagccacagcagtgagaaggagaaggagaaacagagggtgagtcgcacgtcgctgatactgtggcacgcgcaccaaaacgacgccggatcggtgcgcaagctcctccaggaggatccctcgctcgtcaaggccagggactacgacaaccgaacgccgctccatgtggcgtccctccacggctggatcgacgtcgccacgtgcctcatcgagttcggcgccgacgtcaacgcgcaagatcgctggaaaaacacccctctggcggatgcggaaagagctaagaagagtaatgtgatcgagctcttgcaatcgcatggaagattgtcttttgggcaaaatggaagccatttcgagccgaagccggtagcg

SEQ ID NO: 26530 - DNA, 2960 bp, Glycine max
  Clone ID: TF_GmC201_3
catccgaaacttatcggtcgcatatatgctgttctttatatcaggcagcgatggatcaattgggtattccttcttctccgacaaagagcaaacagctgcatcagtaaactttgccaccacaggagatggcggtgaggaggcggaagaaggagtatacggcatcccattcgaggaatggccaggagaacccagactggaagtattaacagacactgggacagagaattcaccaattgagccttcagaagcactgtccgagagaagttccattacagctgtgtgccatgccctgattttaggaaaggggcttgtaggcgcggggacatgtgtgaatatgctcatggggtgtttgagtgctggctgcacccggctcagtatcggacacgcctctgcaaagatggtaccagttgcaatcgaagggtgtgtttttttgctcacactgcggaggagcttcgtccgctgtatgtgtccactggatctgctgtcccttcgcccaggtcatctgcctcggctcctaatgtcatggacatggctgctgcgatgagccttttgccgggctcgccttcatcggttcttccatgtctccatctccctttgggcaaccaatgtccccatccacaaatggcatttctcattcatctaatgcttggccacagccaaatgttccagctcttcatttaccaggaagcaatattcaaactagccgattgagatcttctcttagtgctcgtgacatgccaccagaagacttggatgtgttgcaagattttgatggccagcaacaccttttgaatgacttgggctgtttctcgcagccccgtcctggtgccatttcagtgagtcgatctggtcggtccaagacactaactccatcaaatcttgatgaactattttctgctgagatttcttcatctccccggtattctgatccagcagcgggttccgtgttttcccctacgcacaaatcagctgttctcaatcagtttcaacagctccaaagtatgttatcacctataaatactaacttgctatctcctaagaatgttgagcatcctcttttacaggcttcctttggtgtatctccttcgggtaggatgtcaccaagaagtgttgaaccaatctctccaatgagctctcgcatatcggcatttgctcagcgcgaaaaacagcagcagcagcagcagcagctgcgcagtctcagttcgagagacctcggtgccaacagtcctgcctcacttgttggctcccctgcaaacccttggtcaaagtggggatctcctaatgggaaagctgattggtcagtaaatggagacacacttggtcgtcagatgcgaagatcatcctcgtttgagctcaagaacaacggggaagagcctgatctctcttgggtccaatctctggtgaaggaatccccacctgagatgatcaaagagaagtttgcatctcctatgcctactgcatctgctgatggaccaaattcaaattcccaaattgaatccattgaccattctgttttaggagcctggcttgagcaaatgcagctggatcagcttgtagtctagtcaaaattgaccctttacatatcttgttgagataggtatttaatttcgtaaggtacatattcttttggtgaaatttttggaaagacaagaaaggaagtgtagtaaaggaatggaggatcggttggctgcagagtcacatgaaggatattctattttttcttttataaaataattgtcattcattattttactacatagcttcaggagagctgaaaaagctctctcccttggggctgatcaattaatagtaggcgaaaaatcctatcgaggttatctatttttcttccaaaacggccccgtttcagggttttcgcccttgctatttcactagagttctgagttcacttcactatcaagcaagctagagttctgagttcactatcaagcaagctagtttggtttataatgcgacaaaaaccattattagcctgcgtttgttctaaagatttttccgaagttcaccaagttaagccaagtgaatgatttgctgtttgcctaaggttgaagaagttgtttctttctgagggaataattagaggtaatctgcactgttgaatatttacagcagataaatgagatagtgaagtttacaatgttcttcttattaagctgtattaccttgaattgtactggttatatatcatttcgtttcaaattcaaatcaaatgcaatgtttttcttttcaccaattgagccttcagaagcactgtccgagagaagttcctcgagaacggcttttgcaccttgcagcttcggaggaacagcaatcacatcaatagggcgattcccatttgcatccacgccattcacatcggccccagccgataaaagaatcttcacagcatcaacagcattggcagacccaccagaagcagcacagtgaagagcagtggttttgttcgccccacacgcgaaatttacatctgcctcggggcacaacagtataatcttcataacatcaatgctaccataagttgcagcaaccatcaaaggggttctgtgctcaagaacaaattgcttcgatccgttttgccggccataccagagcccaacctcattgatcgaagaagaatctttctctaaaagcaccttgaagccttcaatatcattgttagaagcaagttccagcaaactggaaaaagaatcttcagtattaacagttagcgatttcatttctttatcgttagctgacttttacacctaaagggaagacgaagttgaaggagattttgatttctctggaccacctcacgtgacttcaactaacgattacaggtggaggcagtggcgatcatcaagtttagaaactgaaagaatctgcgacgaatcggaatgtgaagtgagaagaaaaaagcgaagaatcaaagaatcggaagcaacaacaacgcggacgcgtgg

SEQ ID NO: 26531 - DNA, 1107 bp, Glycine max
  Clone ID: TF_GmC770_2
aagaaaaggaaaaatccaaaatgaattcctcctagtccaagccctcgtgctgtgtttctttctctgaactttcctctttctttatctgtttccacccattccttcctttatttttctaattctgcatctctctcataataatcatctccaaaacaaactcttgttcttactccactctgctctgctttcttccaccattgccatggcctcccactcaaaccaaccaggacccggagctgaagggcaaggtgagaaggacccattttgtgagatatcgccgtctccttctccatcgtcggcgacggcgccggcgctggtgctgtcgaactcggggaagcgaatcgaccaggcggggaagaagaagtacgtgaagcaggtgacggggcggcacaacgacactgagctccacctggccgcgcagaggggcgacgtgggcgcggtgaggcagatccttgaggatgtggattctcagattatgcgtactctgagtggcggcgacgacgacgttgatctgaacgcggagattgcggaggtgcgtgcttgtctggtgaacgaagagaacgaaccgggtgagacccctctgttcactgctgctgaaaaggacaccttgatgtggtgaaggagttgctcaactattccaacgctcagacggtttctaagaagaaccgatccggatttgatcctttgcatattgcagctagtcaaggccaccactccattgttcaggttttgctagattataaatccgggattgagcaaaactattggtccctccaattctactccgcttataactgcagcgacaagaggacacacagaagtggtgaatgagcttctgtcgaaggattgtagcttgttggagattgctagatccaatggcaaaaatgcgttgcatttagcagctcgtcagggtcatgtggagattgtcaaagccttgctcagtaaagatcctcagttggctcggaggaccgacaagaaagggcaaactgcattgcatatggctgtaaaagggcaaagttgtgatgtggtgaaattgcttcttgaggcagatgctgctattgttatgcttcctcttggtttgaataaattatatttacttttgttatt

SEQ ID NO: 26532 - DNA, 1061 bp, Glycine max
  Clone ID: TF_GmC150_2
cccacgcgtccgtacggctgcgagaagacgacagaagggggtaacaaaaataacgtgacactgctaagagagtgagagaaattggcggcggcggtggcggcggcatagagtggaagtagtaaggatcaatggcagttccagggaggcgcaacggcatgaacgacgacgaagaggaattagacgacaacgcccttttcgaagaacaaggtgccgtcgaagacgacgccgatacccctcctcacctccgcgacctctccgccgccgctcagctaggcgacgtccacgccctccgtatcgctcttgataacttgactggtagtattgatgagccagtggaggatggggatactgctcttcatttgacatgtctatatggccatttggcttgtgtccagctgctactagaaagaggggcgaacattgaggctaatgatgaagatggtgctattcctttgcacgatgcttgtgcaggaggatttactgagattgtccaactgctgcttagcagagctaatgatgctgaacatataaagagaatgctagaatcagttgattctgagggtgatacccctctccatcacgctgctagaggtgagcatgttgaagtaattaggttgttgctgtctaatggtgcatctcccacaaaggctaacttatacggaaaggcccctgcagatttgcctgaacaggaagctgctcggaggctgcttgaagctgcagctcttgccatggcatgccaatagcatatcagtagaaatatttagttccattttgacagagatgctacacttttcggaccataaaaactgtatttcatacacactctttcttcgaagttcaaaaagcaaaatgatttattagaggagcaccatagggagttttaactttcgagagagataaaaatgaggattcccggggattacttatagtggacaaacttgtttgtttcattagtttgcttatttgaaatgtatttactcttcaacatgtcagtgaactatgactggatagttatacttgtcattcagtttgtggcataatgttgctggttagattttgat

SEQ ID NO: 26533 - DNA, 1234 bp, Glycine max
  Clone ID: TF_GmC6697_1
atcatggtgtttttttttcccctaaaaattaattgtcaggttctttccatgttgttggacaggaatatgaacgttgacatagtgaatcacaataatcagaccccgttgatgtatgctgcaaagcagggaaagattgattgtgttaaaaagcttatccaggctggagcaaatgtattcatgattgattctgtacatggaggaggttgcttgcacgatgcagcttctcatggccacgtagattgccttaaagccattctttttgctgctcatttcacagcttttgaagattctcggggatatttaagatttgtcgactcgagagattttaacggttttgccccactgcatcttgcagccctcaaaggacaatctgaatgtgttgatgcccttttagacaatgatgctattctttgtgctagaactagtaactgtggaggcacagcacttcatttggctgcccgcagtggttccttggactgtatccggattttgcttgctcggggagctgatagacttcaatttgattatcatgggaatacaccatacacaattgccctggagcacgggcaggaggaatgtgctgccctgctaggttctacgtcgggatcatcacttgtttggccaaaccatttaaggttcatcagagagcttgataagaaaacaaaggccttactggaaaaggccttggtagaacttaacaaggagaggcagaaagccaaaaataagccacgatcatcacggaattcggagagaaataacaataatattgcctctatggccggcaaaaaggagttatgttccatttgctatgaccgagtgtgcacatttgtggtcagaccctgtggccatgaaatgtgtgctcattgtatcatgaggctatgccaaaagaaaagtgatattgatgcacctcgctcttctaattctaaaccagtttgtccattttgccgtggtgacattgttcggttacttgctaagactaagtaacaagagcagtgaatcaagggaggagtgaggaaccttgaagactaattaactactgtattttttcatgaaggcatcaaggtttcttaataggtggagatttagaatgatacacatgctatgtatttctgctgagagattattaggtcgtatattgaaataaaatttaaatgttatataagcattggctgtgactattaatatagagaacctaacagtattttcttttgtcacatcaatttatattttcaac

SEQ ID NO: 26534 - DNA, 438 bp, Glycine max
  unsure (1)..(438): unsure at all n locations
  Clone ID: TF_jC-gmX3055013C01sg22N19b1
tttggtgaagtttttaactaagttcttagttaaactaaaataccataaatatatatatatagtcattaatgtgcgggaaaaaaaatcaagctagtaatttggtgtgaattagaaggaataccaggattccgtttcagtatagctgcatggagtggagagtttccaaagcacagtggaagcttctgatctgcagagaatggaatatccaatagaagattcacgattgccacattgccactcgcagctgccaaaaacagtggtgaacacctagacttgttcaattcatggaccatatccttatctctatgtaaaatgacttgaagcacacttagatctccattattgacagcctcatgcaaaggagtatccccaagatcatctttctctcttgttatctctttgnctttcatcacatcatgggttgacttcattgatgca

SEQ ID NO: 26535 - DNA, 1620 bp, Glycine max
  Clone ID: TF_GmC157145_1
gcttcaagccacagagaaacagaaactcaactaaatatccgccaaatgcaatatgtaatggcaatgctgcaagcaacacaagatctacccgagggtgcaccgaatctccccgtgatacaaagcatgactattatacgtgtcagtggagtgagaatgcaatagtagcagcgtagcactcttggttgttagagtgggctccacaagatcaacgatatttttatttattttattttcatttttccatcacggtgaattcgttagaaaaagtgaaaaaccatgtcaaattaaaaaccgacacgtggggatgggtcgtaacgatttcagtgtcacgagactatcattttcttttttctcatctatacccccgcaccaccaatccaaatcccacagggttggtagatggaggcactagtggaagtgtgtgaacccgcagaggttcgaattgagttcgcactgaactgcaaatgtcgagccacggttcggattcggtctctaacccaaaccacaccagttgccttcaagatccaaacctcatcaccaaacaaattcctagtcaacccgcccagtggactcattcaacctctatcctccgccaccttccaagtcattctaaagccacagtcccacctccctcactcctaccctcgctccccctcggatcgtttcctagtcaaaacagccgagttctgtgctaactcgtcctgctcaactcaccccgagtcaatcaactcgtggttcgcctagcgcccctacgggttcaagactctggacatcaaactgaaggtggcattcgttggccccatcctcctcaacgacgccgtcacgcgcggagatttagacgcggttaggaacttgattaaacgacagcgttccatgctcgccgagttgtcacccacccaagccgagacgctcctcggagccgccaccaagctgctcaacccggacgacatggttcacctcctcctcgaagccggcttgagaataatccccaatcccaataatgcccctgatcaagtacacgtggcagatacaaatacaaacataaatgagggagaagaaatatttgaggcttcgaggaacggacacgtggcggaagtggaatcgctgttacggagatgtggtgggagtgtgaagtaccgtgaccagtatggtctgacggcggttcacgcggcggcttttaaagggcacaaggatgtgttgatggtgcttagtgaattatcggatttggatttggaatgtgaagaccgggaaggtcacgtgccgcttcacatggctgtggagagtggcgatgtagggaccgtgaaagtgttggttgagaagggagtgaaccttaatgctgtgaataagaggggtgctacccctttgtacatggctaaaatttgggggtatgatgatatatgtcaactgcttgttagcaggggtgccttgtattctctaacttcgacttcgggttgaaaatgtatctgtaatgaaatcttagattgtttaacaagttcagcataatgatgctgcccaatgttgttacttgttattgggacttgggagtttcccatgaataagtttctacttaaattactatttgatagaggtagtaaaaatgtgtaagggtcttcttaaaaa

SEQ ID NO: 26536 - DNA, 1759 bp, Glycine max
  Clone ID: TF_GmC84_3
ccgaggagggcggcgatcggcgatgagcagcggcggcggatcgtcagaggcggcggcggcggcgaaggagaaggagaaggagaaggcgcgtgtgagtcgaacgtcgctgattctgtggcacgcgcaccaagacgacgccgcagcggtgaggaagcttctggaggaggatccatcgctggtgaaggcgagggattacgacagccggacgccgctacatgtggcgtcgctccatggatgggttgaggttgcgaattgcttgatcgaattcggtgctgacgtcaacgctcaggatcgttggaaaaacactcctctggctgatgcagaaggagctaaaagaactgccatgattgagcttttgaagtcacatggtggcttgtcgtatggccagaatggaagccattttgaaccgagtcctgttcttcccccattgcctaacaaatgtgattgggaagttgacccttctgagctggacttctccaattcagtttgcattggaaagggatcttttggtgagattttgaaagcccattggcgtggaacacctgttgctgccaaacgtattcttccatctctgtcagatgatagattggtcattcaggacttcaggcaggaggttaatttacttgtgaagcttcgacaccctaatgttgttcaatttcttggagctgttactgacagaaagcctcttatgttaattactgagtatctgagaggaggtgatcttcataagtacctcaaggacaaaggtgcacttagtccttcaacagccatcaattttggcttggatattgctagagggatggcttatcttcacaatgaaccaaatgttatcattcatcgagacctaaagccaaggaatgttcttttagtcaactccagtgctgaccatttaaaagttggtgattttggacttagtaagctcattaaggtccaaagtgctcatgacgtatacaagatgacgggtgaaactggaagctaccgctacatggctcctgaagttctcaaacaccggagatatgataagaaggttgatgtgttctcctttgcaatgattctgtatgagatgcttgaaggtgaaccccctttttcaaattacgaaccttatgatggagccaaatatgtggcagaaggacacagaccttcttttaggggaaagggttatatccctgaactgcgagagttaactgagcagtgttgggatgctgacatgaagcaaagaccttcattcatagagatcattaaacaccttgaaaagatcaaggaaaatttgccttcagatcatcactggcacttgttcacttcatgatttttaggagcattggtgccgtgaaattcagatgattatctgctattaccattccagcgggttgccttatctactgtcgcgggtttttgaacagagccgacttggaaaacctagctaaggtcatgagcattgctttgaactgttagattcaaatgagcataacaggtttatgctgattgcctttatctggtgtttacattcaattactgttttttgtctcattaaaattcttggcgaattctattcagctatttaagtgagcagatactagttgttgcttgagtgtaatatgtagggtacaaaacccattgaggaaaaatataacacatcatgcaatctagtgtttaatattttatcttatgattaaaaattaatagcggttttcatttcttggatattgtttgaccaattcttctgttcaatgctaccaactactatgagattctctttctc

SEQ ID NO: 26537 - DNA, 568 bp, Glycine max
  Clone ID: TF_GmC411556_1
attcggctcgagctctagccgaatcatattgttcaaatcatggatcttgatcatttgaaaggtcctttcgacgatgatccaagctggaaagagagatgcaacaagaggatggaggaactgaagaacacacaattctcaagtcaagatgcagcttcacaacaggaactgctgcataaggaacttgtgggagagaaaattgttctaattcctgagttgtataaagctgttgaggaaggaaatgtgaacaagtttcttgatgtgttggagcaagaatgtaaacaaaggaaattgaatttgtctgttatctttgaacaagtcactgagacaggagattcattgcttcatgtggcagcagataaggggaaagaaaagattgtagagctgatttgttgtcactttcctgagcttcttattaggagaaatgtaagaggtggcactccacttcatgttgctgtgaggtccaagaactctactatggtcaacctcattctctcccaatatgcatcaatgaagtcaacacatgatgtgatgaatgacacagagatatcatgagagatagatgaccttg

SEQ ID NO: 26538 - DNA, 725 bp, Glycine max
  Clone ID: TF_GmC611_6
cacgcgtccggcttgttacaccaaaaagttgattagtaaggcgtagcttattgatggttttttatgggttttttttcccccccatttggggtgtttgagacaaagacaaaagacaagaacaagaagcaccgaacagaacagaacagaacacaacacaagttgcttgaaccttacacgtcaccatcgttgcgtgttgagtgttgagagatgggaaattcgttcggatgttcggcctccggcgaaaggctggtgtcggcggcgagggacggcgacttggtggaagcgaagatgcttctgaactgcaacccgtgtctcgccaagtattctactttcggtggcctcaattcccctctccattttgcagctgccaaaggccacaacgagattgtggcattgttgctggagaatggagctgatgtgaattccagaaattattgtggccagaccgcattgatgcaagcttgtagatatgggcattgggaggttgcacagacacttttactcttcagatgcaatgttataagagctgattatcttagtgggaggacagctcttcactttgcagctgtgcatgggcatgtaagatgtattagacttgttgtggctgactttgtaccaagtgcaccttatcaagctatacatgctggcacagctgttgacagggggtggtggatcaaatgtgaaaggcaaacatgagcatagtgccctttccaagtttgtaaata

SEQ ID NO: 26539 - DNA, 1187 bp, Glycine max
  Clone ID: TF_GmC311_1
agcccgtggccctcgctgcaagttcctccgcactgttcctcttcttctttttctgttttggttttttcttttcgcatagataatagttacttttttttttctttcttttctgcagcttaatggcatgagactgtgaggaatatcttatgtgctattattgaatattgtatgcaaattggcaaataagctcacttcgtttcctgtctcatctccttttcgtaggcatgcgtggcagaaattgcgtgctatgcctcctgaagatgcaatgcagaagtacattgatattgtgaccgagatctatcctacttggcttgatggttcatctttgaggaataaaagcggcgacagtggtggacatggttcagaggctaagggaccaatgggccccgtattcagcacttttgtttatgaagaggaatatggcagtgactcacaaatggaagccattcatggatttgccagggaaggagatatggctaatctgctcaagtgtattgaaaatggtgtttcaatgaatttaaaggacagtgagggccggacaccattacactgggctgtggatcgtggccaccttaatgtcacagagttgcttgttggcaagaatgctgatgtgaatgccaaggacaatgatggacaaactcccttgcattacgctgttacatgtgagagggaagccatagctgagtatttagtgaagcataatgcagacatatattcaaaagataatgatgggagttcaccacgtgacatctgtgagtcaaactggccatgcatgcagcatgtgggggaagaagtaaattgattgattgattgtttgcttgttgcagcttctggccaatacaaccttttagccaaatcccaagaggatgttcgtgtctatataacttgattttttttgtccttactcatgatggtgtatacacccttttcagtctagtgtacgcctatgcaccgcttaggtaatggttagttaattaggttgtattctgttctattattgtttcctctgctcagctctttaaatctggctctcatttcttatatatttcatggataaagatatacacggaaactagaaatagtaacagggaaagggaatcttaaacgatattctttcctcggaaaaccttctacccttctattgaaggcgatatagattttacagggttattttaggtcttcaaaaa

SEQ ID NO: 26540 - DNA, 913 bp, Glycine max
  Clone ID: TF_GmC180289_1
gccgccctttgttttttttttttttttttttttttttttttttttttttttttagcactgttgtctatcattcaaactttataaacaactttaaactgtaacacttacatagaaaagaaatttatgaactacctctacttaatacaattaattatcactgatagcttattagttgaaataattctacatgtagaaaattcagtggcttgaacagctaatctaaaataagtcagcaatttgccagcattttgtgtctttggatgcctagtattctcaacttataatctgcacagtgtgttgttttgacaagatagtgttgtcaattcgagctatgctgcaaaaacattccaattaatcattggggtagaagataatgaattgttccatcaaaactttcctcattttgaaatagctcagcagaagatcttcaaagatggctgaatgccaaggggacgatttacttgctaattagcagcagctatcaatcaactgaaacttcaatctggttctggccgattgcatctcgaacatcatagataactgtcagctggaaccgtcttcagtaatttggcaaggtcataagacttgaaatctttcccataacataagcttaaatccagggctgtttttccgtccttatttttcctagtcttatcagcaccattgactaacaatatttttgctatatctctatttctgctttgaatggcaatgtgcaaggggggccaaccttcattatcttcaacattgacatcagccttgtacttgatcaataatttcacagtcatcttggcaccaacttgaactgcataatgaagtggagcggctccatccttatccataacatgaggacttgcacctcttcgtaaaagatttctttcctcattttccttttttttttcctcctcttttt

SEQ ID NO: 26541 - DNA, 2369 bp, Glycine max
  Clone ID: TF_GmC317_1
ggctcgaggtttctatctctttttgacgcgcacttgaagatttgaagtacttccacaaagggggtaacctttttcctccgttgaaaacgaggggaagaaggtttctcaactgcccttttcacacctcaacttcccgccttcttcacttgcttctcgaacttcttcccttttgaagctattaatactagttccttattcagtttctagatatcttaggaagaggagcacagaaaaccacccctctctctctaagcacagcctaagatgtcttactcatgatttcctgctatctcaaattgctgctacaagcaagaagaagtggagtctgattgaactctgaagtgggcagaatgcgttttgaaatcaagtggaccttgagtgcttaccgtagtgtacaattttgaattgctttgccaatattgctgggtgaattgatacagtgggaggcaatcaatagttgtaacttggatattcttaaggaaatgtaaacttgataagttggagctccaccaaagtagtaaagatacattccaaagatgatgaagaaacaattgacaggcatacggggtgattctcccctacaatcggcaatccgagttggaaatttagaattggttctggaaatcatctctcagagtccagaggacgaattaaaggagttgctttcaaaacaaaacaactcttttgaaactgccttatatgttgctgctgaaaatggtcatcttgatatactcaaggaattgattagataccatgatattgggttggccagcttcaaagctagaaatggatttgatgcattccacattgctgctaaaaatggacacttggagatattgaaagtcctcatggaggcctttcctgaaatttcaatgactgttgatctgtcgaacactactgtgttgcatactgctgcagcacaaggacacattgaggtagtaaattttctcttggaaaaaggtaatagcctggtaactattgcaaaaagcaatgggaaaactgtgttgcattcttctgcaagaaatggctacttggaggttgtcaaggcccttgttgagcaaagaaccagaaattgcaatgagaattgataaaaaggggcagacagcactccatatggcagttaaaggacagaatcttgagttggtggatgagctcgtgaaattgaatccatctttggcaaatatggtggatgccaaggggaacactgcactgcatatagcaacccggaagggtcgtctacaggttgttcagaagttactagaattgcagagaaataaacacagatgttatcaacaaatctgtagaaactgcattagatactgcagagaaaaatggtcgtttggaaattgccaactttatgcaacatcttggagctcaaagtgccacgtctatcaagtcattgactacagatacggtccttgagcacaaacaaatagtgagtgacataattagtgaggttcataacacagctggaacacacaattaaaacgcaaagacgtatgcaaggtatagcgaagcgaatcaacaaaatgcacactgaggggcttaacaatgcgatcaactccaacattgttgttgctgtccttattgcaacagttgcttttgctgccatatttaatgtcccgggccagtatcctgagaaaccaagtgaactctctcctggaatgtctcctggggaagcatatattgctccagatattggattcatgatattcataatctttgattctactgccctcttcatatcattggctgttgtgattgtccaaacatcagtggttgttattgagaggaaagcaaagagacaaatgatggcagttataaataagttgatgtgggttgcatgtgtgctgatttctgtggcatttattgcaatgtcatacataattgttggggatcataaagagttggctatagcagccacagctctaggaacagtgattatggcagctactttaggaacactctgttattgggtgattgctcatcgccttgaggcctcaagattgcgaagtcttaggacaacaatgagcagtaggcagtcaatgtctatgtcaatgatgtcaggatcagagaatgagtataagacagtgtatgcaatataactttgatttctaccatttcagagttctccctccttttttggccagttacactaacattgtaggtgtttgttgcttagtaaaacaaacattaactactgcaacaaaagcatgcctttgcagaacataggcaaaagatgtaatcatagtccacttgataagtgaatgttattctaaattgaaagtattggatcatcatgcctattttaggtattttcacattagcttcatcagaatttgaatattatacaaatttactgtttaaaa

SEQ ID NO: 26542 - DNA, 910 bp, Glycine max
  Clone ID: TF_GmC315_1
gttttcatgatcccaccgcaccctcaccaatctctaacattagggtacgcacagcgcggcggccaagccatctcaagccggagctgctcttcacccttcctcctactcggtacaacacaacaacatttgttgtggagtgaatgggtgcgacggaggccaacacgacacttcaagctcgtcccgaaacgacgtcggagaatatcgaagcattgcttgatgctgcaagatacgatgacatggatgatgttaagagcttagaagccagtggtgttcctcttgattccaaggatgaacaagggaggacagctcttcatatggctgcagctaatggacatattgatattgtggagtatttaatcagtagaggggtggatcttaattcaccaaatgaggaaaagaatacacctcttcattgggcatgtctcaatgggcatgtggaggctgtgaagaaattaatcatggctggagctaatgttagtgtcttaaacagtcacgagaggactccaatggatgaagcagtgagtgggggaaagccagaagtgatggatgcgattaatgaagcagtggcactagttgaacttcgtggtgctatggtttttgcacaggaaacttgaagtttatgctacactaactagcttgtaatatgagaaatctgtgatggttatacatgttttcctataatgggtattttgttagttcgaacaagatcatgagtgttttggtatcctcctccctcccaagtttccattatggaattcctcttcggaaaatggaattgaaggagttggaatgaagtggatagttttacttttgaagttaattagttattttttttcctggaaaatcaatgaaatgccatacactcgaatatgagaaattaacattttatttatccatttctttaatcctc

SEQ ID NO: 26543 - DNA, 1857 bp, Glycine max
  Clone ID: TF_GmC6409_1
aaacgtgcgagccggtgtttgtgagctgcccgaaagtgtgagcgggcaggtccaaactccaagaagagtccaatactgtcgattatcctatctatcaccctcggggtcggaccagacacacttccacgtcaccaccaccaccgtggaaggtggagcgtgaggctgtttccggtaacctctcccggcggcgctgagtggtgatcaaggaaatgggtcagacgctgagttgcgtgcaacagcacgaggaccatggtgtgctcttccctgcacttgcaagtggagaattggaggttgttgaggccatggtggaggaagaccccactgtgttggaacacaccattggctgtgacaggctttctcctctgcatgtcgctgctgccaatggtcggatcgaggttctttccatgttgttggataggtctttcaatgttgacgtattgaatcgacataaacagaccccgttgatgttggctgtgatgcatggaaagactggttgtgttgagaagcttattcatgccggagcaaatatattgatgtttgattctatacgtcgaagaacttgcttgcactacgctgcttattatgggcatatagactgccttaaggccattctttctgctgctcattccacacctgttgctgattcttggggatttgcaagatttgtcaacataagagatggaaacggtgccacccctctgcatcttgcagctcgccatagacggtcggaatgtcttcatgcccttctagacaatggtgctcttgtttgtgcttcaaccggtggatatggttaccctggaagcacgccacttcatatggctgcacgtggtggttctttggactgtgtccggatgctgcttgcttggggagcggatagacttcaattagattcttctgggaaaataccgttctcagttgctctgaagcacaagcattgcgcatgtgcttgtttggccatccccattaaagttcatcagcgagctcaatcaagaagcaaaggccttactggaaaaggccttgcaagaagctaacagagagagggagaagaccatactaaaggagactgacatgcctccatccccactgaattctgagagtgaagatgataacattgcctctgaggctagcgatatggagttatgttgcatatgctttgaccaagcatgcacaattgaggtaagaccctgtggccatcaaatgtgtgctcattgcaccctagcgctatgctgtcacaaaaagcttgatcctgctactaccggcctttctggaccatgatcttgctacttgcgtggatccattcttcagtttgtgcattttgagattaacacaatttcaagatacggttgctaagattaacaaaatcagtgatacagaagtggaatctggccctatgaagccaaggagatcacggaaatcaaatttcagtgaaggaagcagcagcttcaagagcttgtcggccatgggctcatttggaaggattgctggccgcaattccgggaagattacagatgaaaagcaatgggaggtttcttgaagcttgataactgttgatgattattttaattccaagtcggcaagaaattatatgaatgatggttttaatttctgtggaatagctgcctatattggtatcttatttgtattcattttgtcactattgtccaaagatcactaagatcatgagagacaacagtttgtgatcggtttgagttttttacttctgtaatctgattctcagttggaattggagaatcagaacagttatgtaatttttttcccccaaatatcaaatatagtatgcatgagttaaaggaaaaaaaaaaaaaaaaaaggccggcccctttaaaggacccccgc

SEQ ID NO: 26544 - DNA, 1271 bp, Glycine max
  unsure (1)..(1271): unsure at all n locations
  Clone ID: TF_GmC6409_2
agagatggaaacgggggcctcctagcatnttgccgctcgttatatctggccggaatgtcttcatgcccttctagacaatggtgctcttgtttgtgcttcaactggtggatatggttaccctggaagcacgccacttcatatggctgcccgtggtggttctttggactgtgtccggatgttgcttgcttggggagcagatagacttcaattagattcttctgggaaaataccattctcagttgccctgaagcacaagcataaggcatgtgctgccctgctggatccctcgtctgcagcaccgcttgtttggccatccccattaaagttcatcagcgagctcaatcaagaagcaaaggccttactggaaaaggccttgcaagaagctaacagagagagggagaagaccatactaaaggagactgacatgcctccatccccactgaattctgagagtgaagatgataacattgcctctgaggctagcgatatggagttatgttgcatatgctttgaccaagcatgcacaattgaggtaagaccctgtggccatcaaatgtgtgctcattgcaccctagcgctatgctgtcacaaaaagcttgatcctgctactaccggcctttctggaccagtttgtccattttgccgtggatccattcttcaattactggttgctaagattaacaaaatcagtgatacagaagtggaatctagccctatgaagccaaggagatcacggaaatcaaatttcagtgaagggagcagcagcttcaagagcttgtcggccatgggctcatttggaaggattgccggccgcaattcagggaaaattacagatgaaaagcaatgataaagtggtggtgattattttgattccaagccggcaggaaattatataaatggtggttttaatttctgtttgataactgcctatattggtatcttatttgtattcattttctcacaattgtccaaagatcactacggtcatgagagacagctgcttgtagtcggtttgagttttttacttctgtaatctgattctcagttggaattggagaatcagaacagttatgtattcccccccaaatatcaaacatagtatccatgagttaaaggtagttttcttcactgctttaactttggtaaacatatatggattcacacacacaggtattcgttcttaaccaaaaaaaaaaaaaaaaaaaaaaaagaaaaaaaagaaagaaaaaaaaaatagaaatagcaaaaaaaaaaaagtaaatgattntggg

SEQ ID NO: 26545 - DNA, 3029 bp, Glycine max
  Clone ID: TF_700838909_FLI
agaaatgctaatgtgcggtcacgattgagagatggttttggcccatcagtagctcacgtttgtgcctatcatggtcaaccagattgtatgcgggaattactattagctggagctgatcccaatgcagtggatgatgaaggtgaatctgttctgcatagagcaattgccaagaagtacacagactgtgctcttgtgatattggagaatggaggctgtagatcaatggccatcttgaattcaaagaatctgacaccgttgcaccattgtgtggcaatatggaatgttgctgttgtgaagagatgggtggaagttgctacttctgatgagattgctgaagcaattgacataccaagccctattggcactgccttgtgcatggcagctgcttctaagaaagaccatgaaaatgaggggagagaactggtgcggatattgcttgcagcaggagctgatccatctgctcaagattcccagaatgggaggacagctttgcatacagctgctatgactaatgacgtggacttggttaaggatgatgatggtgacaatgctttccatatagcagcagagacagcaaaaatgattcgtgaaaatcttgactggcttattgttatgctaatgaagcctgatgctgacattgaagttagaaaccacagtggcaagacactacgtgacattttagaggctctcccccgagaatggttatctgaagatctgatggaagcactcgtgaataagggagttcatttgtttcctacaatatttaaagtgggagactgggtgaagtttaaaagatctgtcacaactccaacacatggatggcaaggtgctaaaccaaagagtgttggttttgtgcaaagtgttccagacagagataatctcattgtttcattttgttctggagaggttcatgttcttgcaaatgaagtcataaaagttgttccattggataggggacaacatgtacacctgaaagaagatgtaaaagagcctagatttggttggcgtgggcagtcacgtgacagcattgggacagtattatgtgttgacgatgatggaatcctccgtgttggatttcctggagcatccagaggatggaaagctgacccagctgagatggaacgtgttgaggaattcaaggttggagactgggttcgtattcgtccgactcttacatctgcaaagcatggactaggatctgtgacaccaggaagcattggcattgtatattgtatccgaccagacagtagtctgttaatagaactgagctatcttccaaatccatggcattgtgaaccagaggaggttgagcacgttgctccttttaggattggggaccaggtatgtgttaaacgatctgttgcagaacctagatatgcttggggtggtgagacacatcatagtgttggaagaataagcgagattgagaatgacggtctcttaataatagagataccaaatagacccataccatggcaagctgatccatcagatatggagaaggtggaagatttcaaggttggagattgggtaagagtgaaagcttcggtgtcttctccaaaatatggatgggaggatgttaccaggactagtattggggtaattcatagcttggaggaggatggcgatatgggtgttgctttttgtttcagaagtaagcccttttcttgctcagtcactgatatggagaaggttcctccatttgaggtgggccaagaaattcatgtgatgccatctgttactcagccacggcttgggtggtcaaatgaatcaccagctactgttggaaaaatattgaaaattgacatggatggtgctctcaatgtgagggtcactggtaggcagaacttgtggaaagtttctcctggagatgcagaacgggttccgggatttgaagttggggattgggtacggtcaaaaccaagcctgggaaccagaccaagctatgactggaatagtgttgggagagaaagtttagctgttgtgcatagtgtacaggattctggatacttggagttggcttgctgttttcgcaaagggaagtggatcactcattatacagatgttgaaaaggttcctagctttaaagttgggcaatatgttaggttccgaactggtttggttgagccaaggtggggttggagaggagctgagcctgaatctcatggggttataactagtattcatgctgatggagaagtcaggttcgcattttttggtctgccaggattgtggaggggagatccttcagaccttgagattgaacaaatgtttgaagtgggagagtgggtgaggttgaactacaatgcaaataattggaaatcaattgggccaggtagtgttggtgttgttcaaggaatagggtatgaaggagatgaattggacagaagcatttttgttggattttgtggggagcaagaaaagtgggtaggaccaagttcccatcttgaaagatttgacaaactctttgttggacagaaggttagagtaaaacaatatgtaaagcaaccaagatttggatggtcagggcatacacatgctagtattgggactatacaagcaattgatgctgatggaaagctccggatatatacaccagcaggatccaaaacatgggtcttggacccatcagaagtggaggtggtagaagagaaggagctctgtattggagactgggttagggttaaagcatcaatttcaaccccaacccaccattggggggccatacatgtattgatgttaataaacagaaggggtggaagaatggaagctgtggagataggaaaactgtcttgctgaccgagtggtggagatttaaaggcagctaaaataaatatattggcagttggcccatttatatattcattactcacaagtttgtagtcccagattttgaggtttatatcgtatgtatgtttatttcatattgtacaaattgtattcaactgtcaacttaatgcatttttttgactcgattatgcagttgcataattcttgaaatagaattgattccattatacagcttgtgc

SEQ ID NO: 26546 - DNA, 2498 bp, Glycine max
  Clone ID: TF_GmC770_1
ggaaaaggaaaaatccaaaatatattcttcctaacggcgcatgccgggttctctgatcttgcctcttgctctgtctcaactcgctctccttccacccatccccccctttattttccgcatttctcaactctctccgataatacccacccccaaaacaaactcttcttcttactcttaccccctcttccttacttccactatcgccatggcctcccactcaaaccaaccaggtcccggagctgaagggctaggagagaaggaccccccaacaagtttccagaacccgctttctgagatatccccgtcgccgtctccgtcgtcggcgccggcgccggcgctggtgctgtcgaactcggggaagcgaatcgaccaggcggggaagaagaagtacgtgaagcaggtgacggggcgccacaacgacaccgagctccacctggcggcgcagaggggcgacgtgggcgccgtgaggcagatccttgaggatgttgattctcagattatgggaactctgagtggcgatggcgatgaggatgatctgaacgcggagattgcggaggtgcgtgcttgtcttgccaacgaagagaacgagctcggtgagacccctctgttcacagctgctgaaaagggtcaccttgatgtggtgaaggagttgcttaactattccaccgctcagactgtttccaagaagaaccgatccggatttgatccattgcatattgcagctagtcaaggccaccaccccattgttcatgttttgctagattatgatccaggtttgagcaaaactattggtccctccacctccactccgcttataaccgcagcaagaagaggtcacacggtcttggtgaatgagctactgtcaaaggattgtagttggttcgatattactagatcctatggcaaaaatgcgtggcattgtgcagttcgtcaggttcatgtcggagattgtaaaagccttgattagtatagaaccacagttggctcggaggacagacaagaaaatgcaaattgcattgcatatggctgtgaaagggcagagttgtgatgtggtgaaattgcttcttgaggcagatgctgctattgttatgcttccagacaaatttggtaacacggcgttacatgtggcaaccaggaaaaagcgagtagagatagtgaatgagttattacatctgccagacaccaatgtgaatgcattaactagagaccacaaaacagctcttgacattgctgaagatcttcccctctccgaagaggcatcagatataaaggactgtctttctcgatatggagcacttagagctaacgagctcaaccaaccaagggacgaactgaggaaaactgttactcaaatcaagaaagatgttcacacccaacttgaacaaaccaagagaaccaacaaaaatgttcacaatatttccaaagagctaaggaaactccacagggaaggaattaacaatgccacaaactcagtgacagtggtggctgtgctgtttgctacagttgcttttgctgctatattcaccgtgcctggtggggatgatgatgatggctctgcagtggtagcagcttatgctgcttttaaaatcttctttgtctttaatgctatcgcactttttacatctttggctgttgtggttgttcaaatcactttggttagaggtgaaactaaagcagagaaaagggtggtagtggtgatcaacaagctcatgtggttggcttctgtctgtacttcagtgacgtttattgctgcttcttacatagttgtgggtaagaagaatgagtgggctgcaattttggttacattagttggaggggtgataatatctggagttattggcactatgacttactatgtagtgaggtctaagagaagcagatcaatgaggaagaaggagaagcaagctgccaggaggagtggatctaactcatggcatcattctgaattctccaattccgaggttgatccgatttatgcgctttgagtttgaacttgcaaccttcaggggatcatgaagaacaaattgttgtgaaaaagatgacaggtttttaggtttgctacttgctccatgttaccactttaagagttcttcactgtacaggaaattgttctcttcggcttagctgctgcttttctaggatcttatatacaaattggaatgaagcatgcatcatcattggaatgaagcatgcatcatcccggtctgtgatttttaagaacaaaatccaacattgctttaattctcaattatgtattgatgtattagcaaaatgtctcccttccctgttcgttactgttttttttctatcactagaattgtcttcggggcctaatctacacaattgacccttgataatgctgcatgctgagttctgatagagaatgaaatagtaatacgtgttaattgtatttttttttatttgttgatatattttgtgttgtgaaaactaaggcttgcaatttgcagataagggtacaaattgaaattttgataaaa

SEQ ID NO: 26547 - DNA, 2214 bp, Glycine max
  Clone ID: TF_GmC540_1
agagcgtccggcgaggtggcacagaaactgcttcttgaatctgagtccaagagagggaagaactctctaattcgtgctggatacggtggatggctaatgtataccgctgcctcggccggggacttaggttttgttcaagttcttcttgagaggaactctttgctggtttttggtgagggggagttgcagtgttactgacatactctatgctgctgcaaggagcaagaattgtgaggtttttaggctgctatttgattttgctgtttcaccaaggtttttgagtggcaaaggtgggataatggaggagaatgttggggacattccttctgtttacaggtgggaattgaccaatagggctgttcatgctgctgctagaggaggaaatctgaagattttggaggagcttcttgccaattgctctgatgttttggcttatagagatgctgatggatctactgttttacatgcagctgctggcagagggcaagttgaggtaattaaatatcttacatcatcctttgacatgatcaactccacagaccatcagggtaacactgctttgcatgtggcttcttccaggggccaattaccaacagctgaagctctagtctcagcatttccctcacttatgtctctgagaaacaactctggagaaacttttctccacagggctgtgtccggttttaaatctcatgcattcagaagattggacaagcaggttgaacttttgagaaacatgctgagtgggaagaactttcatgtggcagacattatcaatgtcaagaacaatgatggaagaactgctcttcacatggccatcataggcaacattcacactgatcttgtgcagctcctgatgactgccccatctataaatgtgaatatatgtgatgttgatggcatgaccccactagattaccttaggcaacaccccaaatctgcatcatcagatatactaatcaaaaagttgatctcagctgggggaatgtttggctgccaaggccatagttcaagaaaagcaatagcatcacacttgagaatgcaaagcattggaagcagtccagggacatcattcagagtctcagacactgagatgtttttgtacactggcattgagaatgtgtcagatgctagtggtgatcatggaagtggaggaatgagttcatcttcatctgaacacattccatacgatctgaatgccactgagaatcgcgtaccaatcgcagccaaaaggcctagtactgtgaaccatgcagcagcaagtttgaagagagttcttctgtggcctagggtgaaggacaagaaatctgaagggttcaaaaagtcttctacaacagatgagggttcagtggactcatgccggaagcggaataacagctttgatgaaactccaaccccacttagacaaagattttctaggccatcttcacttcccaacaacaaaagaactctttctgtcaggagtcagcaatcaagtccaaatgccaagaagaggtttgcttcaggaccagtgcatggagtcatacaatccatgccacatgcaaatgtttctggcagatcaaggtctagttccttttcaaagtcgtcaatttcttcacctagatcaatagacaagcaaaagggcattttcattgacaatgacattgccggaccatcttgctcaagtcaaccatcaccaccacctgatgatgatgaatcaccaaagttggtaaagagaacttctgttggaaggaagttgagggaccattatttctgttttggtgcacctggcattaatgtcaaaaactcagttcacaggcagcaagaaagccagagttacaaggctcatgttgttgcagtggcttaatgggatgagcttatataggtaattctcctgaccaggctaattcaacaaataagggatgaagctgattcatcaactttaaactttactgttaagggtcccttgggggttccttagttgcaagcttttatagattatattttgttacttaaggattagctcatcctcaacttcacttgttaatggtaaaatgctgttaaaatatgattatcatattagcatcaaattaactcaatttggtgcttagtaatgtaagaattagtgttgccaatgtactgattaaaccttttggattaagcagtcatctgcatttttgttaaatgattgactactaattccatttataagattaattccattttgaatttggt

SEQ ID NO: 26548 - DNA, 1955 bp, Glycine max
  Clone ID: TF_GmC1240_2
cccacgcgtccgctcttcaatcgttaacctttttttttttttttttcctttctttcgctcttctttcctttggtaattgaattcagcagcatgaacaacatcaacaacaacaggtctcaggatcaacgctcaagacctgccaaggcagccactatccatggctgcgccctctccggcgacctcgttggactccagagactacttcgagacaacccttctcttctcaacgagagaaaccctgttatggcacagacaccacttcatgtctctgctggtcacaataggactgagatagttaaatttcttcttgattggcaaggggcagataaggttgagatggaggccaagaatatgtatggagaaactccattgcacatggcagctaagaatgggtgcaataaagccgcacaattgcttcttgctcgtggtgctattgttgaagccagagcaaataacggtatgacacctttacatcttgctgtttggtactcactacgagcagaagagttcttaactgtgaaaacactgcttgagtacaatgctgattgcagtgctaaggatgatgagggaatgactcctttaaatcatctatcccaaggccctggaactgagaaacttagggaactattactttggcatcttgaagagcaaaggaagcagcgagccattgaggcatgcagtgaaaccaaagctaaaatggatgagcttgagaagcaactatcaaatattgtgggtcttaatgatctaaaagtacaactacgcaagtgggcaaagggcatgcttttggatgagaaacgtagatctcttggtctgcatgttggaaggagaagaccacctcatatggcctttcttggcaaccctggaacaggtaaaactatggtagcacggattcttggaaaattactccatacggtgggaattctacctactgataaagtgacagaagtacagcggaccgatttagtcggtgagtttgttggtcacactggtccaaaaaccaggaggaagatcaaggaagcagaggggggaattctttttgttgatgaagcttatagattgataccaatgcaaaagtccgatgataaggactacgggttggaagccttagaggagattatgtctgtcatggacagtggaaagattgtcgtaatatttgctggctacagcaagccaatgaagcgagtaatcacttctaacgaaggtttctgtagacgtgtgaccaagttttttcaatttaatgatttcaactcagaagaactagcacaaatccttcacattaagatgaataatttagcagaagatagtttgctatatggatttaagttgcataccgattgcagtataaaatccttagcagcattgatagagagggaaacaacagaaaagcagcgccaagagacaaatggaggtttggtagataccatgttggtcaatgctagagaaaatttggacctaaggctaagctttgactgtatggatacagaagaacttcttaccatcacattggtagatttagaagcaggccttcagttattaacacagtaatcattctttggcaatctagtagatattttggagacaagattcatttcaacttacctcaattttcaccattggatacacaggttttacatctgcacaatgagcatgtcatgaataagtttgctacaataggtcgattcttttgggaaaatttttccgtgtattttgtaatcgataatgttatatataggctttattcatgcactttttttttatctgaataatgatttgtagacacctaatgcaaatctataccttgagagagagaaatagaagagagataatttgatgagtgacatgatgttataaagaagagagagagagagagagagggagggagaaatgaggtgtcaaatgaaatgagtgtttataatgtttaagtagttatatatatcattgtttatctgcctttc

SEQ ID NO: 26549 - DNA, 1190 bp, Glycine max
  unsure (1)..(1190): unsure at all n locations
  Clone ID: TF_GmC303801_1
aaccaaacgattgagccaaattctgcgcttgaaccgtactacatttataaatcttgttcattcaaatattggagatggggcaatagttatgaacaattttctccagcatttgcaagaatcaaggtatccggggatggatgttattttggcagaaacggaggccatgcttgctcggggcaaaatggacatgcccattaccacatgctttgcagtaaccagaaatgatgatctattgttgcatcgtttgcttaagaggggttcagatccaaatgaattagataggagtggaaagacagcactggtttgttgattttctctcgaatgaacacatgcattagtatatatgtataataaacacaacactagatgcttacaactttattttctaatgtaacagcatattgcagcttccaaaggcaatgagcattgtgtaaatttccttctagaatatggtgctgatccaaatagcaaagatatggatggaagtgtcccactatgggaagcaatgaagggtaggcatgaatccgtgatgaaaattctcatagacaatggtgcagacatatcttttgccgatgcangccatctagcatgcagtgctgttgagcaaaatggttggaattgcccaggaaattattccatgtggcatggatgtgacacaacctaaaaaaaatggagccacagctcttcatactgcagtagttgaaggaaacactgagatgattaacttccttgtagaccaaggagcagacattgacatgcaagatgttaatgggtggacaccaagggttttggcagaacaaagtgaaagcgaagaaattaaaaatatattccatgacattaaagatagcagaaaaccaggtgttattccaatttcaaagaatgacaacaggagtgggaggtttcaaattgatccaagcatgcttaccataccccaagaaagcatgctactgccaccttatgatgggaggagaaggtcttccagctcttttgataattccatttttggaatgatgtcaactgccaatcgtgctaagaaagatctccaggcatctgaaagcagaagcactagaaggagtgtgaatggattagccagagtgacccttagttgtcctgaaaagggggaacatgctggaaagcttgttttgctgcccaagacccttgaaaaactgctagaatttggtgccagaaaa

SEQ ID NO: 26550 - DNA, 577 bp, Glycine max
  unsure (1)..(577): unsure at all n locations
  Clone ID: TF_GmC465104_1
caatcatggaggagttcgaggatgcagtctcattcgtatctaagaacagcggcatgaagacatcacaagatgataaattgagattctattcgatgtacaaattagccacggtcggcccgaacgatacaccacgtccaggattttttgactttgcaggtcgtgcgaaatgggacgcgtggaaatcgtgtggtgaattatcaccagaagatgccaagactgaatacgtcaaactgctagatcgattagatccgaaatggcgggaaactctgcccaaccttccaaaacattccaaagcacagagcaataatgaagatgtgggaggtcccgtctttagcatgccacagttcgaagaagagatcattccggaagaagacaggacgttagcgtattacgtcagctctggagaggacagtaaggtgctggaattgatcgccactgcacataacaaaacgtcattgatcgataagagagataaagacggtatcgcagccatccattatgcctgcgacagaggtcaccaacaactgctnaaaatactgcttgacaacggggccgatatagacataccagatgaaga

SEQ ID NO: 26551 - DNA, 734 bp, Glycine max
  unsure (1)..(734): unsure at all n locations
  Clone ID: TF_GmC611_5
cggattcccgggtcgacccacgcgtccgctttcccttttgttccgcatcagataataaaaccaccattaacaccgacctcaatcacattcctagctaccaccttcaacccttctttttgttttatccttctctgtctcacaaagttagatagatatagagaggaaggtgccacgtcaccatcacagtttcttcctcaccaaatcctaaagcaaagtttccaaatttcttcacatcataaatacacaccacaccccattgcgttaagattcgcctcctccctctcgttggattttgtttctttgttttttagagcctccattgtgaagatttgatctcacttagtgtgtgtgtgtgtgatggggaattcatttgggtgttcggcttccggcgagaggttggtgtcggcggcgagggacggcgatttggttgaggcgaagatgcttctggaatgcaacccttgtcttgcaaagtactcaactttcgggggtctcaattcccctcttcattttgcagcttccaagggccataacgagattgtggcattgttgcttgaaaatggagctgatgtgaattcgagaaattactgggggcagactgctttgatgcaagcttgtagatatggtcattggggaaggtggtgcagacccttctgctcttcagatgcantgttgggaaagcagattatctcagcggtgggacaaggtttttactttgcggccatcaatggggcatg

SEQ ID NO: 26552 - DNA, 1207 bp, Glycine max
  Clone ID: TF_GmC614_1
ggctcgagagcgtgggatttagaaccttggtattataaaggaaagcttgcgttcccccagtattacatctcccatttcgagtctatcatcttccttctcgtcattcttcgtttcaacctcgcaaaatgagcacatttgctacaagatcccttgtttctgtagaatcaacaacaacaattgaaggaactgaagctgacaatgtggatagtgactcactgttccgagggtgcgtgttggaagggagatgggacttcgttcttacagcatatagaaatgacagtaactatcacaaaataaaaatcaacgaaagcagaggcacagcactacacgtggcagtgaatgatggcaaagtggaacttgttaacacccttgttgttgcaatcttaaaccacgaagggagggaagtgctgagggatgatagtgcactgaaaacaaccaatgagagaggggacacccctttgcaccttgcatcctcaagagggttcattggaatgtgtaagtgcatcataggggagcttaaggaaaggaaggatttgattagggttaggaacaataagggtgaaacacctctcttccgggctgtgctcacatgccatacaaagacctttgtgtacctccatcatgtttccaaagatatagatgttccacttaggaactatgatggggataccatccttcaccatgccatttggagagaattcttggatttagcaattataataattcattgctatcctggacttgttgagatgcgaaacaaagatggagccactcctctcaaagttcttgcctgtaagccttcggccttcaggagtggaatcaatctcccatggtggaagaaaattctttattatggtaagtgttgcgtgcgtggtggctgagctcataagatttttcttcttctgttttttacaaaaatggaattaaatttcaggggtggctcaaccctaaagtaatattccaaacacagaaacacttgctttagtttcctcgacaaaattctcttataattattcccttaaaaaatgtttcatacgtaaaaaatctcttaaaatttaagtccaatttaaattgacttttttttttatcatttacatattaattatcgatcttactattttcttaaaaaaattattttgttgtattgcttccttccatgaatgtaaactagtctacttttccattaatttattctcattatcccact

SEQ ID NO: 26553 - DNA, 4131 bp, Glycine max
  Clone ID: TF_GmC755_1
tagaagagactcacctcctccgaagctcaattataggcatgtcatagttttaggcatcgatggactggtcgatatgaggctcatttgtgggataagaattgctggaatgaatcacagagcaagaaaggaagacaaggttcttcattattttgctctctataatctccatatagttttctgatttccttcacttatatgattatttgatttattgtcatattaattatgttgtgttggttgaaaatggctatggaaaacaactggatgcagtatatctaggtatgatttgagagtattaattaattagcttgcatatataacaaaaaccttcattatttgttccccttaaattggcggatgggggacgatttaatgattgcaataaacttgggtttgctaggggcatatgatgatgaagaagccgcagcacgtgcctatgacttggcagcattgaagtactggggccaagataccattctcaattttccattatcaaattatgaggaaaagctcaaggagatggagggccagtcaaaagaagaatatattggatccttgagaagaaaaagcagtggattctctcgaggagtttcaaaatacagaggcgtagcaagacaccaccataacggaagatgggaagctcgaattggaagggtctttggcaacaaatatctataccttggaacttacggtaatttcattgtctatgatctaatgtaaagaaagcgcatgcatagatggatgctacttcttattgaaattttatgtgaatttcgttaaataaagaataaatttatatcattgagtgtgactcacataaaatttaggattaaatgtaattttagtcaattcataattttaatttttctattttaaaattaaaacatttatttttcttattttaaaaaatttgtaattttggtttttctatttcaaaatataaatatttaatttttatattttaaaaaattgacgattctggtttccttttttagaaaatctataattttaatttaatctttaattttgtatatgctttatttcttttatttcttattttgtaactaattaaatcaaattttgatgataccttaaatgaatatattagatttataattcaattggaccaaaagaaaaaaataaaacattgataaaattgagaatttgatcaaaattacaattttttaaaataagaagactaaatatctattttaaaacgggaaagactaaaattgtatattttttaaaacaaaagtactacatgtttcaattttaaaatatgaataaaataaaatagggaccataattacatttatttctaaaatttatataataaaaaaatgtgtacagaaatatattattaacagttttgaaaagtaattttcctgcattatattattgttattcaaatctcaagatgtctcaaaataagaatattgttagttattttttaaaaaaaaattgaatatgtgattttaaagtgtgcgtctatacatataatttgtcaattatatagttcaggggacgaaatgttttttaaaatcctaatcaaaaggtcattttctatgcatttgatgtacaattctcttagacagaagcatatggccttaccttagcatttgaatgcatttacatggttcatatatagcatttcattatcatcatttatatttggttatatttgctacgaattataaaacatgcatgtgatatgggcctatgtcagcactctaaataatgaacaaattaaattgtatgtttatgtattggttgaatataaacgaaataaagtagctaatataggtgtagcgatgtttaattaattaagagaggatgtacccatacctgaaattttgaaaatgtatttgaccattctttccggttctaacaagaaagtacctacttggtttcaacatggtcccgcggatcaaaatagtaggacaaatataaaggtcaacatatgcaatcagatcatattggttgtgatatagatcaccaaacttcaactgcttaatagagctatttaataatgatatcattcttttctagtcattttaatataaaccaaatcggaagaagaaaaagagaaatcctagaccgacatatgcaaacaataatacaattaaatttgcttacatgtgtgtgtccatatgttattatgtcgtattgtagctacacaagaagaagcagccgcagcatatgacatggcagcaatagaatacagaggacttaacgcggttacaaactttgacctgagccgttatatcaattggccacgtcctaaaacagaagaaaatcatcaaactattcctagcaatgaaaatgtaaactctaatgctgaacttgagctaggttcggctagtgatgagatcacagaagagggtgtagcaccatcttcagaatcaaatccttctcgtcgcacattccctgaagacattcaaacaatttttgaaaatcaagattcaggcatctacactgaaaatgatgatatcatttttggtgacctgggctcctttggtgcaccaatttttcattacgagcttgatgtttagaattggaggacttcttctggccaatacgttatttttcaaaagggggtaatcaaccaaaaaagatgataaagaaattagggggtaagagtaaacattttagagatcgagtggaagattctttaaaagtaacatacaaggggggaagagggattggatcattttatttgcgatagaacaagatgcatggcatacaagtacaactgcctcattttaacaatttagttttattatgtatgtctccacaagcgtgggtagatgtcacaacatttagttattataagcaataagaataatatttttttaaagataaatgttaaattattaaatcatatttaatttgttaagttttaaagattaataaaaatattttttaaatgtttaatgatgatattttgtgtgtcatttaattgtaaattattattgatataatttttaagataattttattaaaattaataatttatcctaaataataattttttattgaatgataatataaaattattttatattattaacatataattattttttttcatttcttaattagtcatatgatcacgattaattttaaatttttgcctcccacaattgtattacaaacacattttgtctttttatgcaaatttgcaacgaaataattgatgtgtttacggaatcaaacccaaaacaaaactaacatagtttcatgtcactttaacattaatttacacacaggcgcactaaagctaacacattttcatgttactttaacattaattttcatttttaactatacttgtttgtctttttttataaaaaaaaacttgtatatgtaattaccaatcataacagcattaatccttattcaagcgacaaattactgtcttttgacgaggtgattgatgtgtttaagggattaaacccccaaacagttttttattttattttatgaaaagctaactcattaatcttcaaaatttacacacaggaagagtcttaactcacgtgattactttttcatattttttatttttattttgtttaaatattatgatttgttggatttacttagattaatggctgagattttgtgtaagtcatgaaacttatacttggtgtgagatgatcttatcctatatatatatatatatataggataagtgtggtaagatgaagccatgaagagccgtgaaaaaggataaaataaaaagaaattaataagtgtggttttttttttcctcttaaattattcaaagacaagttgcgtaggtaggttaatagttgtggagatatattgggctcagcaatgagcagggctccgataataaggacaagtacaactctcccaccggcgaggtattgctttcactgggatcactgacgttgtcaaccaaaatccatccaaaagaaaaaatgaaatttgaataataagttaaacttttaacaagataaagaaaaataagaattaataaaaattgaaaacaaaaaatgtttgtataagaaaataatatatttatataagcttattatatgaaagtaaattgaaatataggaatgagacacagaggattagacgggatgaatatgaaagatgttg

SEQ ID NO: 26554 - DNA, 847 bp, Glycine max
  Clone ID: TF_GmC6107_6
gactggaacaagtacgacgagtgtgtcaatgccactgcctccgtcgataagagcgttaaggtttgggacgtgaggaactatagggttcccctttgtgtgctcaatgggcacgggtatgctgttaggaaggtgaaattctcgccacacgtgcggaatttgatggtgtcttgctcctatgatatgacggtgtgtgtttgggatttcatggtggaggatgctctggtgagtaggtatgatcaccacacggagttcgcggtcggggtggatatgagcgtgcttgttgagggcctcatggctagcactggttgggatgaacttgtttatgtgtggcagcatgggactgaccccagggcaccttgaaggagtgaaaaatgaatagagagttctatagatctttaccacacattcatacaagcttcaagtatacagattatatatataattcaccatagtgaggtgctctggaaggttgaatagtctggttacagtggtgaattatggatggtaacaggtggatatgcaacttctttagctatctatatctacattcttttttaaatccattaccaaaatctgtttcttatcatgtttgaaacgaaaatgtaaactccttttgtccataccatgtcaaatctcctatctgaaatgttagataaccaagatatctgaataatgatcgttcttatgaatatgttggtggatgattgaaatctaatgtgaaccttcgaaaggtctaccacagcgaaatctgtggcattccaagttcgagctgagaaatttgcaaataggaagaggaaaaatcagtatacgggaatccgtcaacgcccttggggaaaatgggcagctg

SEQ ID NO: 26555 - DNA, 609 bp, Glycine max
  Clone ID: TF_GmC1178_4
ggagtatgtgtgtgtgttaattatgtgtatgcatggtggaagctagagtaatagaggcgcaacaagatcactgttgttgtgggggctatagccagctcctcatcataagtggatcaatacataaaaaaggttaattagtaaagtcacacgtgctttctaacggtggcgcaccagaggggtttaggttcaggttcggggaagttcttggcggcggaacaaggcggcgatgaggaaacggaagagagtactgtaggttcggttccgagccatgtggtctctgcagcttcggcccaaaccaataatcagtgggtcccggcaagtggttctccaaggatgtcacgttttatgaatgctccttcctctccaggattgtctcctctgtttggcgttggccacaagagagcccgtgaagacgacacgggtgcgggtgcaagtgtgggtcttggtgttgttgcagcagcttcttcacaaacacaagggaatgaaagtggcggcggcgagaggaggaggagatacagaagagtgaggcagaggccgtgggggaaatgggccgcggagattcgcgatcctcacaaagcggcgagagtgtggcttgggacattcgacact

SEQ ID NO: 26556 - DNA, 602 bp, Glycine max
  Clone ID: TF_701208549_FLI
gggaagttcaatatggctttgctccctctcatcttgaaagcagctttgtcataaggttggtgtgaagagagaaagagaggaagagagtgaaaggaagaacaactatgagaaaagtgagtttaacaacaatagtaatagtaataagcatgtgaagaaagaagagtgccctttgactccatcatgttggaaaggcttttgggacactgatgttatgggaacaatctttagtgtgcctcctttgtcaccactatctccactaatggttgtttgagattttgtggaacttttgctctttcaatgatgttttgaggtaaccaaactaaggggagagagagagatgatgctggtgattgtcctctctgatttaggttgctaatttgcctaaatcaaaatggtagtactaattaatctactaatagattaatttgcaagtgaatatatatatggatttgtataatgtaaatataggatagtactatgaagcaagatctttttgtttgttgaaaaaaaaaacaaaaaacccatgcttatcttcttcctttaggtaaaaaaatgtactgtacttgaagcaatattgaaatttgtttattcgtttattggag

SEQ ID NO: 26557 - DNA, 166 bp, Glycine max
  Clone ID: TF_5760111
aagatacacaggaataaggatgaggtagtgtggcaagtggttcgatgagattagagcacgcaatatgcgttcaatgatttggctcgcttcctattctacccctgtcgcagccgtacgtgcctacgacaccgtcgtctgtgacgttctaggaccctgcgcgcgtcta

SEQ ID NO: 26558 - DNA, 529 bp, Glycine max
  Clone ID: TF_jC-gmXLIB3563P053ac08a2
cctcaatatctcatggcaaactctcttgaagtttctgctctcaatcgcataaaactgcatcttctaggagaactctctccccttccactcacaacctcctctcaatctagctccatctgttcccaatcttcatgttctgactcatccgccacacttgaccaaatcttctccgaattcctctatttcccaacttcttcctcagaaaaccacttttctgcattggagtttgaggcaaaacccgaaataatttacctcgaaacccccaacccacaattggaattcacgtctctaaccacacaggacagtaagaaacctcaatctagtcgaaagccgtcgctgcaaatctctctccccaagaaaacagagtggatccaattcggagatcccgaggttactgaaacggtttcgcagagtaatccaaacgcggaagagaagaagcactacagaggagtgcgacagagaccttgggggaagtttgcggcggagatccgggacccgaacaagcgcggctccagggtgtggctcggga

SEQ ID NO: 26559 - DNA, 118 bp, Glycine max
  Clone ID: TF_7639988
acgtgtcatgcaaaggacttggggaaaatgggctgctgaaattcgggagccaaacataggctatatgctttggctaggtactttccccactgtcattggagctgcccttgcatatgat

SEQ ID NO: 26560 - DNA, 410 bp, Glycine max
  unsure (1)..(410): unsure at all n locations
  Clone ID: TF_7478255
aggaacatgtctaggatgcctgtttcacagaaacagttggcagaggtgtttttgttgttatagagattgcaatgctttcatgcangtatatatatcttgggctattcaacagcgaaatanaaactgcaagggcttataacaaggcanctatcaantgcaatggaagagaggctgtgactaactttaanccaagtacatataaaagcaagatgaaacccaaagctattaatgaaagtggcantcacaaccttaacctcagtctgggcatagcaaccccaagacatggtcccaaaaaaaacanggggcatcttcaattccantccatcccttacaacatacatcctagaaaaagttcaatgatagagactaatattaattccgttattgataatccttctttaaaaagactg

SEQ ID NO: 26561 - DNA, 127 bp, Glycine max
  Clone ID: TF_7326474
acaccccctttttcggggggttcgcaagcgccggtggggcaaatgggtcttccaaattcgggagccgaggaaaaagtcacgcatatgggtcggcttcttcccggcgcccgaaaatgggggcaaaggc

SEQ ID NO: 26562 - DNA, 310 bp, Glycine max
  unsure (1)..(310): unsure at all n locations
  Clone ID: TF_LIB4128-090-Q4-K1-D1
atcccccagcgtccatggggagagggggctgctnagattcccgacccaagagagggggggcctgtgtnggttnggactttcancactgctgagaaagctgcgaaagcttaccatgctnaggcaagggggggccctgggaanagagccaangtgagtttccctgaggagccttcaggggctgcttcctcaaaacgtgtcaaggggagtccagaggggcagccaatgaggaaaaatcccagctctgtgaggcccagaataaaccagaggtgcaattttngggagaatcgtnaggggctactacaggcctata

SEQ ID NO: 26563 - DNA, 295 bp, Glycine max
  Clone ID: TF_19935601
gataacggtacaccctgagaagaacgaggggaatgtttttttttttaaaaagaggcactgggggagatactccgcgaagatcataaatcccggcaataagaaccgcgcctggatcggaaccgtctacactttataagacgcaaagtgtgactacgacgacacagacctagagtttctcggacctaaagacaagacaaacttacctctcccttacgaaaatgttaacaactcgaaccccagacagagaacaaacaaccagacctccagccgccactgcgacataaacaccgataac

SEQ ID NO: 26564 - DNA, 1180 bp, Glycine max
  Clone ID: TF_GmC289_1
ggctcgagcggctcgagcccaaacccaaacccaaacctaaacgaagaaacagaaagaaaaaaaatgaacaaacaaattggggtttgaaaagaagccggtgctgtctccttgttctccatcgtaagatataactaattatttttatatcttcatccgtttgagaagatgcccgagctgtctctttgttctccaacgtaagttattacaacgtgatcatgtatcgtcgtcgaggtgcgccgagggagaaccgccgccgccgctgccgccgttgtggatcccacgccggaccaggccaaggagacgacgcggttccgtggcgtgaggaagcggccgtgggggcgattcgcggcggagattcgagatccgtggaagaagcagcgcgtttgaggccgaaaccaatttcccccccttccccggccccgcagaggcggaccaccactcgcagatttccgctctaccaggcccatgggctttccaccaagttcgagcccgtcgtccaggtgaaccggcccacgagcagcggcatgagcagcaccgtggagtccttcagcgggcctagggttccctcctcctcctctcgcgctaagccccttgttgtggttgttaaccctatcatccctctcaacgacgacgaagacgattgccacagcgattgcgactcttcttcctccgtcgtcgacgacggccaggactgcgtcctcatctcctccttccggcaaccgctgcccttcgatctaaacctcccaccatccgatgccgacgacgacaacgacgacgacctgccggccaccgcgctgtgcctctgatgatgaagaagaagaagaagaagaagaacctcttctcggtataatcatcattttcttcttgttgttgttattgttgttgttgttgttcaccatctctggtttaattaattaattaaaagttgttagattgtgttgtggtgttgtagagtaatattataataggcatgaatgtgttgttgtaagttatttggatccattactgtgtcatagcattggacctgatctcaaaaactggttggtgcttatgctttcttcatggatctgcttcttacccttacccccaattagaacttactcttttcttttttttttgttgttgttgttctgtacaaaaattatggctatcagatcatagaataaattacattctaatc

SEQ ID NO: 26565 - DNA, 1384 bp, Glycine max
  Clone ID: TF_GmC15818_1
ctatactataaaaagactttctctgtccacaaccatcataccattataccttaccaccccttccttccaccaccctttctttctctcctttatacacacacaagacacacacatcacaagaaagagggagaaaaataaaaacaaaaacaaaaacaaaaggtggtagatgcatgagccacaacacaacacacattatctcataccacactcaccaccttgtattccccaaaattcacataattccccttctcttgccttttccctcagatttctcaccccttctctcttctgtgttgctacccttttcaggtactcttcctactaaattgaaggaaaaagttggtattataggaagttaatcactgctttgatgacttggtaagaaaacttgaactaacaatggtaagtttgagaaggcgcagacttttgggactgtgctcaggaaacagttcctttgtcacaccacttcctctatattgtgagaatctatctggttttgaaaattcaaaccagcaagctaaacctaagagtgaacagcctgcgctttctgatgatgcaagcaacccggacagtaataatgctgtgcaagaagaaccgggatcatcaaatgcttctggttctagctcatcgaaagagcagcttattcaacaaattacaggacctcctattaaacgcagaaagcgacatagaagaaagaatttgcacaatcaagaacaatgcataatgaggggtgtctacttcaaaaatatgaagtggcaggcagcaataaaggtggacaagaaacagatccatctagggactctcgggtcacaagaagaagctgctcacttatatgatagggctgcttccatgtgtggaagagagcccaattttgagcttcccgaggaagagaagcgggatttgagcaaatttaaatgggacgaattcttggccatgactcgccaagcaatcacacgcaaaaaacacaagagaaggcttagtcccggaccaggtaatagtcatgatatgcttccactgtccaaagatgattgggacactaagcaaggagtgattgaagatgcagagcaggaaacatcagtgtcgtgaaaattatgattctggaaataacccaagagtgaagatggaaagcctctagtcctaacacttcaactctaatatcatgctagatccatttttattgtagaaaaatgcagcattatgtcagaccttgatagaattgattatccttaatttatgcaaattgctatacctaaacccaataaagagtccattcaatgttagacgtgtcaactaccaactgttgaactctatatcagtttcatcaaactagtgcaacgccattttcttcttccacttggtgggaataaatgaatttttccaaaaa

SEQ ID NO: 26566 - DNA, 510 bp, Glycine max
  Clone ID: TF_GmC5695_1
gacctcctgctctcacactccctattctccgtcaccttctccctcctctgccactccaacaaactctccgacaacctcgtctacagattcatcaacgctctcggccatcgcagcgacatcaggggcaccattcactggttccagaaagccaaaaacctaacaagaggacgatgcgcatattctgcaaggtgattagagacccgtcaaagtatcgaagaaagcgagggtttgaatgggaaccttcgattttgccgaggaagttgctcgagcctacgacgccgccgctcggactctccgaggtcccaagccaaaacaaaaatccctctctgacctttttgctacaaccccaccatcgatcctttcttctacgcgggtttccccacttaccttgaagtctgccacagcggctgccacacttcatctttcgtcaatgacgacgacactatttttaattttcttctgcttgattgttcttattttactctttgttacaaataatttgagttttgc

SEQ ID NO: 26567 - DNA, 374 bp, Glycine max
  Clone ID: TF_LIB3242-503-P1-J1-B10
cacaaacaacgttagttactactaactagtacgtaccactttcttctagtaactactaactaccccttttgcacaccttgtctcattctctcatacaacgaaactttcgaccaggtaacatgttttccatcaatcatttctccgccccagatgcgaactcgccggggtcggggtcaggaacttcccgaccggtaccggcgctgtcggacgaggattattttctggcggcgagcaatcccaagaaacgcgccgggaggaagaagttccgggagacgcgccacccggtgtaccgcggcgtgaggaggagggactcaggcaagtgggtgtgcgaggtgcgcgagcccaacaagaagtccaggatttggctcgggacc

SEQ ID NO: 26568 - DNA, 384 bp, Glycine max
  unsure (1)..(384): unsure at all n locations
  Clone ID: TF_jC-gmX3027002H12sg1M2a1
aaaaaccaattggtgaccgacccngagaagaaaccaacaggcagggtttgtttgaaaacccacgcggaacaacaaagcacggcacnaggnncccacacccaaacacaaacagacgggcgggacccggaacgagaacgaccgacaggacacggacacacaccaagagcgccacgaagccaacgcnagcaccaacacaacacccccgcagcccaccagaaacagaacaaagaagcaccacagaggagcccgccgccgaccacggggaaaagacgccgcngagacgcgcgacacggcgcgccacggcgccaggacagggcacggcaccacccaaaccgcngaagaggcngccanggccnangaccgagccgcgcacaagaagagggg

SEQ ID NO: 26569 - DNA, 678 bp, Glycine max
  unsure (1)..(678): unsure at all n locations
  Clone ID: TF_LIB4167-034-R1-N1-C6
aaaaaagaaaacaaacacaataacttttgataacaataataatacataaacattcttttattttaaatatcttaccaacatcttctatttatttttttctctctttcttctcatgtcaaaaactctatcttgcctgatttattattctcgttgcaggtactgaagaagaggctgctgaagcatacgacatagctgcgataaagttcagaggtctcaacgctgtcacaaactttgacatgagccgctacgacgtgaaagccatccttgaaagcaacactctcccaataggaggaggagctgcaaagcgtctgaaagaagctcaagctctagaatcttcgagaaagcgcgaagagatgattgcactaggatcatccacattccaatatggaaccacaagctctaattctaggctacatgcttaccctctaatgcagcaccaccaccagtttgaacaacctcaacctctgctaactttgcaaaaccatgatatcagttctcacttctctcaccagcaagaccctttgcatcagggttacatccaaacgcagcttcagttgcaccagcagcagagtggtggttcttcttcttatagctntcagaataataatataaataatgctcagttctataatggntataatcttcagaaccaccctgcattgcttcagggaatgatta

SEQ ID NO: 26570 - DNA, 1873 bp, Glycine max
  Clone ID: TF_GmC12225_4
ggtccggaattccccggtcgacccacgcgtccgcaagtttcgaaattgaaaagggtgggagagatacaaagtgttcattgatttaaacccttgctagaacccttggtaaacctatatctgttctttggccatctcttattttctttcccatctttgttttcccttgcaaaatattcatactctatagtttatatctatctgcttctttaatgtattaattagatacacaggtggtttttgattttgtgaaagggaaagcaagcacataagggctcaatgaacaacaactggctttcgttccctctttttcctactcattcttccttaccagctcatgatcttcaagcaactcaatatcatcaattttcccttgggttagtgaacgaaaacatggataaccctttccaaaatcatgattggaatctgattaacacccatagtagcaacgaaaatccaaaagtggctgattttctatgagtgagcaagtctgaaaatcagtcagacctccacgcgtccccccgcccccaaagttttggaagttaaaagggtgggagagatacaaagtgttcattgatttaaacccttgctagaaccctaattggtggtttttgatttggtgaaaggtaaagcaagcaaataagggctcaatgaacaacaactggctttcgttccctctttctcctactcattcttccttaccagctcatgatcttcaagcaactcaatatcatcaattttctcttgggttagtgaacgagaacatggaaaaccctttccaaaatcatgattggagtcttattaacactcatagtagcagcgaagttccaaaagttgctgattttcttggagtgagcaagtctgaaaatgagtcagaccttgctgccagcttgaacgaaattcagtcaaatgattcagattatctattcacaaacaacagtctggtgcctatgcaaaaccctgcggtggacacacctagcaatgagtatcaagaaaatgctaatagtagtttgcaatcattgacattgtccatgggaagtggtaaggattcaacatgcgaaaccagtggtgataatagcacaaacactactactactactactgttgaagctgcacctagaagaacattggatacattcgggcagagaacatccatatatcgtggagtaacgcgacatagatggactggaaggtatgaagctcacctttgggataatagctgtagaaagggaagggcaatcaagaaaaggacgcctacggaacctcagcaagctcttctaggcttcacgcttaccctctaatgcagcaccaccaccagttcgagcaacctcaacctctgctaactcttcaaaaccacgacataagttcttctcacttctctcaccagcaagaccctttgcatcatcagggttacatccaaacgcagcttcagttgcaccagcagagtggcgcttcttcttatagctttcagaataatgctcagttctacaatggttaccttcagaaccaccctgcattgcttcagggaatgatgaacatggggtcttcttcttcttcctcatctgtgttggagaataataatagtaacaataataataataatgttggtgggtttgtgggaagtgggtttggtatggcttcgaatgcaacggcggggaacacggtggggacagcggaggagttagggctggtgaaggtggactatgacatgccggctggaggttacggtggctggtcggcggcggactccatgcagacgtcaaatggtggggtgttcacaatgtggaatgattaaggaagggaagctagttctagtatgggacaacgtactagttagttgccatacaattttgttatgcatttttatttttttgtc

SEQ ID NO: 26571 - DNA, 378 bp, Glycine max
  unsure (1)..(378): unsure at all n locations
  Clone ID: TF_LIB3242-364-Q1-J1-B6
tcaacctcaacccgattcnnctcgattgcttacctacctatttcagaagcatcatcatcagcttccaatgaaaagctctcncattccgtagagggaccnntcccaatgctttcctttggaaagtctgtatcccaaatcctcgagcccaaaaaaaagaaccggatctggctcggcacctttgccaccgccaatatagccactcgtgcacacgacatcatcatctctctccatcaaaagcaactcctccattctcaacttcccctaactcatctcctacctgccccgacccgactccaactcgccaatagacattcattccgccaccgccaaatccacccccattgaagttaacgattctccgacaactccaacttcgtc

SEQ ID NO: 26572 - DNA, 749 bp, Glycine max
  Clone ID: TF_GmC1505_2
cccacgctttggctcgctcgcaaagtgaggccactcaaaaaacaatcacttcttagcttgatccttctcagcaagagatccaggtttttaagtttttagcctcttatttttgttttatcgaaaaagaaaaaaagaaacaatcacttgcaagtctttagttttctcctccctgttctctggttttggaattgagacaggctctacttataatttggaaaagtttttttctttttgtttgggttttcttaacttgttcttcgcatatcgtaaaacatgggaaccgctataggcatgtacagcaacaacaacatcgtaccggatttcctagatccgtatagtgaagaactgatgaaagcacttatgccttttatgaaaagtgattatttctctgcctcttcttcttcttcttcacgcgaatcacacccttctcctcttattccatctaattctctcccctcctccaaccaaatcaggctcaaccaactcacccaagaccaaattctccagattcaggcccaaatccacattcagcagcagcacgtggcccaaggccaagcccacctgggcccaaaacgcgtccctatgaaacacgccggcacggccgcgaaagccgcgaagctctaccgcggggtgcggcaacggcattggggcaagtgggtcgccgaaatcagactccccagaaccgcacgcgcctctggctcggaacattcgacaccgcagaggaagcaacattagcgtacgacaacgct

SEQ ID NO: 26573 - DNA, 998 bp, Glycine max
  Clone ID: TF_GmC92576_1
ctctctctcatcctttttccctttttcctctctcacccactccctcactccaccgttttccctactactcctttcaacgtcaatgctacccccaataatctaacaacatgactgcgccaccatccaagtacactcaccactccaaactactcattccctccgaagaagaccctcccaaacacccctatcccagactcgtcagaataaccgtcacagacaccgaggccacagactcctccagcgacgaagaacagcatacttccacgcgccaccgacacagaaagttcgtcaacgagatttctagatagtcgtcgtgcgccagcgagacccacggcgccgcttgaaattcgaggattcgaggcagaggcaccctgacgcccaggtccggggagataggcactccgtcgctacgcggcgttcggaaatggttcggagtgagcaacactgcagaggaagctgctttggtctacgacaacgcccccactcggcgccgtcggccccgcgcgcgcacctacgtcaccgcgccgctggcggccgtggtgtcccacaacgcagccctcttgccgcccgctcccctcgcgctcacctcggtcattacgccccctgcccgggaggaaactcattgcaatagcaagaatatcttttctcccacttccgtgcttcactgttgctccttgtccgaggaagctgagtccgttacggccaaagacgatgactactcctcggtgtcggagaataaggtcaaagctgagtcagcgtttccgcccgaaatagattttgagtttcgagcttgttcgactgtgccggagagtctgttgttctgcgatgatgattggtctagtgagtttctcaattcttatgaagatttcggtttcaaaagttggcatacggacagaaatcgtgactttttccaagatatcgacgatttgtttgtctcggatcccctccttgctctctgagttcttcacttcttttctataacagactattctcgtcgt

SEQ ID NO: 26574 - DNA, 456 bp, Glycine max
  Clone ID: TF_jC-gmXLIB3564P109bh09b1
cccacgcgttcgtaccaatatgaacagaatctcctctcgacacctttgctttgctgcagatcgcaactgcaacttcccacaaatataaatatatattacttcatggtcacacatagttaattttattaattactactaggtagctgggttttaataggcagtatgtaagtgtaatccttgacttcctgcaaatatggaaaaagcgcgcttaggagattgttgtttctctaatacgactattacgaggaaaagcgagaatcgaaagctgttgcaccaacaacattataagccatacctatgaataaagattatgaaatggggcaagtgggtggccgtcattatataacccaacaagagggcgaggatctggtttggtgtttataccacccccctaaacggcgcaggcgcctattaaaccggacgtttttaacttctagggcctttccctcggcttaa

SEQ ID NO: 26575 - DNA, 575 bp, Glycine max
  Clone ID: TF_GmC144838_1
cacttattcacccttcattaccaaaatggatattcatagtaatcatggtgcaacttctgaagggattcttgagaatgtgtgggccaaaattatgagcagtgatagagcagatggaagaaaaggtgatgccgcagaatgttctaactcttgggaagaacttcctaaccttgatggaagagaagggtccatggaaattctacaaaggcttccaagtttagggaggtggatatcaatgggagctgatttctgggaagaagttttagaaggtattattctacctaacacaagcaatacagaatattccggtagcaataacaacttggaaattggaagcgctaatgaaactcataacaaggtgggagatgctgtgagaatagagaagtcagttacaaaacactaccggggagttaggagaaggccatggggtaaatatgctgcagagattagagactcatcaaagaaaggtgctagagtttggcttggaacatttgacactgctgaagaagcagctttgtcttatgacaaggctgctttgaggattagaggtccaaaggcataccttaatttcccacttg

SEQ ID NO: 26576 - DNA, 1469 bp, Glycine max
  unsure (1)..(1469): unsure at all n locations
  Clone ID: TF_GmC32_1
naatacaacagcaacatgatggtttcagtttcttgagggtactaatatgaacagaatctcctctcaacacctttgccttgctgcagttcgcaactgcaactgcactcaaatataaatatatatacatatatatatatatatatatatatgtattacttcatggtcacacatagttaagtttattaattactaggtagctggttttgaatagggtagttggtagttatagttgttgtcccagatatggaagaagcaggtttaggagattgttgttcctcgaattcgacgattacgaggaagagcgataagcgaaagcagcaacaccaacaacaagagaagccatacagaggaataaggatgaggaagtggggcaagtgggtggcggagattagagaacccaataagcgttcgaggatctggctgggttcttacgccacccccgtcgccgccgcacgcgcctatgacaccgccgtcttccacctccgaggcccttccgctcgcctcaacttccccgaattgctgtcccaggacgacgacgtttcgacccaacaacagggcaacatgtccgccgattcaattcgcaaaaaagccacccaagtcggcgccagagtcgacgcgctccaaaccgcgcttcagcaatcctcgtcctcacactccgctaattccagccacgtcagcagctctgacaaaccagacttgaacgagtatcccaaacctgaagattagtaattttcttccaccttcaagattaatattgatccaccaatcacgcgtcctgatgtgacatatatatagggcttcaacttgccctcttcacctatgctaatttgaagaagaagaaaaaaacctttttatatttgtcatatgattatatatatatcttagtagatatttttcttccagtctatttattttaatattagaacgtgtaggaagaaatatacagacacacctgagaattgagatgaggctaattaacttgtttatgaggcgagtaactcctttaaatatatataaattaaggggtatatatactattacttgctcatcaccacatgaagaacaacgtttgacctttaaccaaatgagatcgtgtaattcatgctgttgacctgattttgctgttgttgctcatctcacgaagaaactcattatagtttttttttttctttcaatatgtgtatgttagctggagtcgtggactggtagctacgtaggttctcgctatgatggggggcatatcatgtggtcttttctcaggtcggtggtgtgttgtaatttgtaacgagatatccgttacacaatcggatcaaattaaccgtgttttgttgttttagattaataaaaatacatatgttctgatgaattcgataatttcacatacatgtggtgaaaatgatttcatatataagttgtatgcatagttcatgtgtgtgaactatattaattcgaccgatcctgtttatgtt

SEQ ID NO: 26577 - DNA, 827 bp, Glycine max
  Clone ID: TF_GmC32_2
cccacgcgtccgtaccaatatgaacagaatctcctctcgacacctttgctttgctgcagctcgcaactgcaacttcccacaaatataaatatatattacttcatggtcacacatagttaattttattaattactactaggtagctggtttttaataggtagtaggtaggtgtaatcgttgtcttcctgcagatatggaagaagcgggtttaggagattgttgttcctctaatacgactattacgaggaaaagcgagaagcgaaagcagcagcaccaacaacaagagaagccatacagaggaataaggatgaggaagtggggcaagtgggtggcggagattagagaacccaacaagaggtcgaggatctggttgggttcttacgccacccccgtcgccgccgcacgcgcctacgacaccgccgtcttccacctccgaggcccttccgctcgccttaacttccccgaattgctgtcccaggacgacgacgtttcgacccaacaacagggcaagatgtccgccgattcaattcgcaaaaaagcgacccaagtcggcgccagagtcgacgcgctccaaaccgcgcttcagcaatcctcgtcgacacactccattagttccagccacgtcagctatgagaaaccagacttgaacgagtatcccaaacctgaagattagtaatttccttcaaccttcaagattaatattgatccaccaatcatgggttctgatgtgacttatatatagggcttcaacttgccctcttcacctatgttaatttgaaaagaaaaaacttttatatttgtcataaaaaaaaaaaaaaaaacataaa

SEQ ID NO: 26578 - DNA, 967 bp, Glycine max
  Clone ID: TF_GmC268_2
cactatctcatttctttctattcatttcttcattccaccatcaccatggtcaaggagaagaagaacgtggtggtcaagaacaagaagccaaacaacaatgccgacgagcttcacttccgcggcgtccggaagcgaccatggggccgctacgccgccgagatccgtgaccccggcaagaagacccgcgtctggctcggcaccttcgacaccgccgaggacgccgcccgcgcctatgacgccgccgcccgcaacttccgcggccccaaagccaaaaccaacttccccgtgccccccgacgacaacaacaacaacaacgttaacgtgaacaaaaacaagagtgttaacgttaaatctcacagtcccagccagagcagcaccgtggagtccgccaccccggagcgtgaagccacgcgccgctccacctccgccgcaatcgaccgtttcccgttcctacccatccagcagcaaatcctcatgacccaccccgtcgcagcacccatgcgcccggttttctttctcgaccgggcccacttcatgacccagtctttcccgctccggttcgaacccggtccggtccagagcgactccgactcctcctccgtcgtcgtcgattgtcagcccaaaagagagctcaatctcgatcttaacttggctccgcctaatgaatattaacccttttttttatctctttattttttcataaaaaaagatagcagaaagaaaggactaaggagattttttttctctctttttttttttggaagattaatcttccattaagaagttaattagtacatcctttgatgtaaataggttgattttctcttcttttttgttttttaggtccttgatagtattatcagaggacatgatctgaaattgtctagatctgatataatttttcatgtaacatctgaatatctgatgtaattctggctaatatcaattaatcttcttttattacaat

SEQ ID NO: 26579 - DNA, 2096 bp, Glycine max
  Clone ID: TF_GmC97_1
gatggttgccaagtgaaccaagggctcgaggcgagaggtacttgctcacagatatatttttttttttgtctccatcattttctcgagagctttcagtttctgtggttcatctttcttcttcttaatctttccccccctctctgtaacatcccgcttctctgaatccctttctgctaatcatctgtctttcaagctaagattttctggggtacttactcacagatatattttttttttttgtctccatcattttctcgagagctttcagtttgtgtggttcatctttcttcttctccttccctcccccctctgtaacaccccgcttctctgaatccctttctgttaatcatctgtctttcaagctaagattttcgggtttgtctattaattcaccaagaagcaaacttagaaggatttttcgaaagccaggtgttttcagaaacgagatccaggttttattgtcgaatttcgctagtcaaattaattttcataattatttttttctttgaaaccagccaagagggttatttttgatccctcaaagctaatttctctctctctttttttatttccgggactgaagaggttgtctatttgaaatctccttcatcctttcctttcttgtagaaaactttttaaatttttttgtcagtgggtgttttaattaaccacctgttcttcaagttttagaaagacgcaggttgaattaattagtatcatggcagctttgatggatttttacagcagcagcccagagtttcaacttcactcagatccattcaggggagaactaatggaagttcttgaaccttttatgaaaagtccttctcccaactatttcccttcctccccctccctccctaatctttactcaaacgggttatccagcaacacccaaagcttaattggcttcgggcaagcgcaacccacatctcttgtgggcctgaaccacctaaccccatctcagatctctcagatccaagcccaaatccagatccaggcccagcagcatcagaatcgcagcaacaccctgagcttccttgggccgaagcccatccccatgaagcacgcgggcatgcctccgaagcccacgaagctttacagaggggtgagacagaggcactggggaaagtgggtggctgagatcagacttcccaagaaccggaccaggctgtggctgggaaccttcgacaccgccgaggaagccgctctggcatacgacaaggccgcgtacaagctccgaggtgacttcgccaggctcaacttcccaaacctgcgacaccagggttcctccgtcggtggtgatttcggggagtacaagcctcttcattccgctgttgacgccaagcttcaggccatttgcgaaggcctggctgagctgcagaaacaggggaagaccgagaagcctccgaggaagtcgcgttccaaactcgcggagaaggttgtttccgacaaggagaacaacaactcttgtaaggtggaagctgcgtcctggtcgtcggaaggttcttcgccgctttcggatctgacgtttgctgacgtgagcgaggctcagtgggaaggtgattcggataattataatctccagaagtacccctcttatgagatcgattgggattctctgtgaagtgtcctattatgtatggtctagtctaggtcttagtgtctcttaggtggctgctactgcaatggagtttttggcaattgcagggctagtactattctgtgtataatctctctaccttgctcacagctggtttttttcttgcttgaccagggagaattagtccgcttaatatgtttttcaagtgcatcgctgtaatctacttcaatttcatcatcttataaaatatattattctactaaaaaaaaaaaaaaaaaactcgaaacaatgtatacactcttcattcttcaacatagcatgcaggtctatacaggaaatacactctgttcaacagctgacattcaatgagctacatgacgtcggtcacttctctacgatgttaatcttttttcccactataacactatgtttggtttggaaaagaaagtggaaggaaagaaagtggaagtaaagaaagtgattcgtgaaggct

SEQ ID NO: 26580 - DNA, 1779 bp, Glycine max
  Clone ID: TF_GmC97_2
ccacgcgtccgccgccacgtgtccggacgcgtgccgagaggtacttgctcacagatatatttttttttttgtctccatcattttctcgagagctttcagtttctgtggttcatctttcttcttcttaatctttccccccctctctgtaacatcccgcttctctgaatccctttctgctaatcatctgtctttcaagctaagattttctggtttgtcttttaattcaccaaaaagcaaacttagaaggatttttcgaaagccaggtgttttcagaaacgagatccaggttttattgtcgaatttcgctagtcatattaatatttcatcattttttttttcctttgaaaccagccaagagggttatttttgatccctcaaagctaatttctcattttcttttccgggactgaagaggttgtctatttgaaatctccttcatcctttcctttcttgttgaaaagtttttgtttttgttttaattaaccagcagttcttcagttttagaaagacgcaggttgaattatcatggcagctatgatggatttttacagcagcagcacagagtttcaatttcactcagatccattcaggggtgaactaatggaagttcttgaaccttttatgaaaagtcctttctcaaccccttctccttcaaattcttgttttctttctacctcttactctccttcccccaacaactactctccctccctatactcaaacgggttatcatccatacccaacaccacccaaaacttaattggtttcgggcaagggcagcccacatctcttgtgggcctgaaccacctaaccccatctcagatctctcagatccaggcccaaatccagatccagaatcacagcaacacgctgagcttcctagggccgaagcccatccctatgaagcacgtgggcatgcctccgaagcccacgaagctatacagaggggttcgacagaggcactgggggaagtgggtggctgagattagactcccgaagaaccggaccaggctatggctgggaaccttcgacaccgccgaggaagccgctctggcgtacgacaaggccgcgtacaagctccgaggtgacttcgccaggctcaacttccccaacctccgacaccagggttcctccgtcggtggtgacttcggggagtataagcctcttcattccgccgttgacgccaagcttcaggccatttgcgagggcctggctgagctgcagaaacaggggaagaccgagaagcctccgaggaaaacgcgatccaaactcgcttctccgccagagaacgacaacaacaacgacaacaactcttgtaaggtcgaagctgcttcctcctcttctgaaggttcttcgccgctttcggttctgactttcgctgacgtcagcgagccgcagtgggaaggtgattcggataattttaatctccagaagtacccctcttatgagatcgactgggattctctgtgaagccgtgttttcttagtgtcctatgttgttatgtaagggtattaatcttcattatgtatggtctagtctaggtcttagtgtcttctcaggtggctgctactgcaatggagtttttggcaattgcagagccagtcttagttaattactagtattctgtgtataatctctctctaccttgggtcatagctggtttttttcttgcttgaccagggagaattagtccacttaatatgtttctcaagtgcatcgctgtaatctactacttttaattataaaaatatggatttattattgtacaaaaaaaacacc

SEQ ID NO: 26581 - DNA, 2829 bp, Glycine max
  Clone ID: TF_GmC307_1
ccctcgcttccggctaaccaaagaggcaaaggtggccctcttcccgtactcttggattggacttttctggaaagagtttccttttacttgtattattctcatttcccttttctgatgccaaactctctctctgccgtggtctcgactcacaataattaatattccaccttcttccccaaatcgccctccctcatcacccctatttactttctttcccacttagtcatggacttggatgcactcctaatactcatctttaaccatcactctacaacgctaacaaaaggttgttctgagtaattatctttcttttggactcctcgcgctgtctatttccttttcgacccagagagagacagatagacaggagatgctttttcgatttcgttaacgtgagaaagttttttaagaaagagatgcttgatgcttattggttttggtctttcctttccttttccccccatttttacccccttgcatttttatttattaattaatcacataaaaacggaaacaataaataacagtacggtgattattttaaacaatatatatataaggagtttcctcctggagaagcaaaacaaaaatagattgtcggctcgagatttatttgagtaatataaaaagaaagagagaagagattgttgaagttgaaggtgggatgctttcggctaagcttgctgaaactggcctcgtctatgctgtattgggcagttaggggaattcaaagatctttgaacacctccttctttattacctttttccaacacctactacctcttctttctctttctcactcgtcctaggtttgattttctcttccttccttctcccaatactcctccattattttattctcaaaatccaaacgaacactctagcttcgttactacttgcctttttctttttcctttttctctgcccagctatatgcttgtgtaagaaggggaactaataagccattctaaagggagctgaagaatgtggaatctgaatgactctcccgatcagagaaaggactatgaatctgaaggctgttcttcttctctgaatgatgataaaggcaagagggtgggatctgtttccaattcaagctcctctgcggtggtagttgaagatggatcggaagaagaagacagtgaaagaggtggaagcagaacattggacaagaaaaccaacaaaatattcggctttgcggtagcccatgatgacagtgaccacccacccgtgacccatcagttttttcctgttgaggactccgaactgcctgtctccgccgccgccgcaggcagtggaggcggtggcggcggaagctccttcccacgtgctcactgggtaggtgtcaaattttgtcaatcggaaacacccggcgccggaaaagcagtgaaagtgtcggagccgatgaagaaaagtcgccgaggaccacgctcgcgtagctcacagtatcgaggagttactttctacagaagaactggtagatgggaatctcatatatgggattgtggaaagcaagtgtatttgggtggatttgacacagcacatgcagctgctcgtgcgtatgatagagcagctattaaattccggggagtggaggcagacatcaacttcaacatcgaagactatgaggaagacttgaagcagatgaccaatttaaccaaggaagagtttgtccacgtacttcgccgacaaagcactggatttcccagaggaagctccaaatatagaggtgtaactttgcacaagtgtggaagatgggaggctcgaatgggccaatttttgggcaaaaagtatgtttatctgggtctgtttgacaccgaaattgaagctgcaagggcatatgataaagcagcaataaaatgtaatggcaaggaggctgtcaccaattttgatcctagcatctatgatagtgagcttaattctgaatcctcaggaggtgtagctgcagatcacaatttggatttgagtttgggcaattccagctctaaacataacaatagtcaaacatcggggaatcacttcgcaaattctgcaaccgatcagcatatgccacctgaatctaattggcggaatgggggaagcaagcctaagctggtaaatatacttccaaaaccatgtggtagaagcaacatagaagcctatgggcacggtgagagtgaaaccttgaggttgctaagccaaactcaccttcaatcccctaccaataaagaaatgcacagatatggtccgtataggtcgccagcagagccacaaaagcctcacaattttgcacatcatcttcaccaaccaagttttcatgttcctagcagcagcagcaatggaggccgtattggaagcgatctttcgttatcaatgtccgatcaacaacaatggcaagccgggcctccacatttgttagcaactgctgcagcatcatcaggattcccacagcaaattagaccctcccaaggttggctgcagaaaaatgggttccactctctcatgagaccctcatgaccatcctcaagattttttctaccatgccattttgcattttgaaaaataatctccccctactatttgttttgtgaacatgtacaagtgaaagtgaatgcagtttagattattattatgtaatgtccaacctcccccttctttaggaagcccatacataactgtaactttactattggggtgaaagacaagaagggatgaaaaaaaaatagggaaagccaatttgggaactcgctctggatttgttataggccagtcaaactaaccaacggacaaaatctttaactagatactaagatattctgggcgctgactaaagtttctgatctgatcttt

SEQ ID NO: 26582 - DNA, 3696 bp, Glycine max
  unsure (1)..(3696): unsure at all n locations
  Clone ID: TF_GmC25_1
tacaagacgacagaagggggttcaaaaccttgagagtttcaagtccaatattttgtacgtcatgctagaaagtgatgcatatgatcccaggtttgagctgtccatttcacttttngatgcatttaagatatggggcttcctgttaaattaggttctgagcatacatgacggcttacgcgtgtatgcctgagccttccttattgcctagcggagcagccaccctgtctcggagccgacaaggttgcgtggagacctcaagcaggatcagctcaaacagcaacaaacgacagagattcttcctcaacacaatcgaaaaaaaaaaagcttccgattctaaaaccagaacaacaaaaaagtaaaacacacacgtcattttaaaacatttcattttttttggttatttatttaaagagcgagtgttgtaacaaatggtgaagccgaagagcgtggagaaacccgcagaggaacaacaacaacgaagatgtttcatcgtgacagaggagtacggaagaggaagtggggggaagtacgtgtcggaaattaggttacccaacagccgtcaaaggatttggttgggttcctatgacagcgccgagaaggcggcacgcgcgttcgacgctgccatgttctgcttacgtggcagcggcgccaaatttaatttcccgagtgacccacccaacatcgccggcggggggaacatgacctcctcccagattcagatcgcggcggcgcgtttcgccaattcggagccccgaaatgagggatcagtcccacccgtggagtctttaacttcggatgaggaaacggcatcgtttccggtcatttcggatacggatacatcatctcctcctctctcagacgtgacgtatccaaaacgactgccgaattagtactgggtcgttccctgatatgttttcggatttcgggtcgggcgattttgtgcccgatttctccgattttccgagcttcgacgatttcagccgggacttcttcttgcatgaacttccgggtttcaatttcggagaagagaacttggatggattgataattcaggactcgttcttgtggaatttctaagcgggtcagggttcggataattttattatatccgaacccgatatcagaatccggatcggatccgggtttgggttgggtcaaattttgcgtgccaagccctccatgtgttagtagttagtgatgattatagttttttttttttaacgtaccaagtagtcaaatgtttcgattttttgggatgcgaatcataattcatttatttgtcatgacttatgtgattaattgtaaagtcgtctgctgaatgatagtgtaatttttttggcctttccgttccaaaaaaaaaaaaaaatgttcgtaaaaaaaaaaaaaattacaaaacagaggttggtggatcggctgagatcacatggaggaagatatatagctctccactgagatatgagaaagatatgctgtctttactggctgtgcatatggtctgacagatgcagacctgaagagcttagaattttgagggagaatacaaattattggaaagtaaaaaagataaattcaacagaacagagaattggaggattttgtccattgactccaaaggaggtgggcatttttcttcatgctcttggttatcccccatctacaccaatatacattgcagcaggagtgatctatggtggtaatactcatctttcagagctctcatcccgcttccctagtataatctttaaggaatcccttgcaactcctgaaaagctgacagatggtgccattgtcatggatgccgatgctacctcagctttgcacaaaaggggcattgtcccaacaaatgatagcttcaaatatgcttggttcaaggaccatgagagtgtggtaaaagcaatatatactggttctgagtttgttgatactgttaacaccggtgatgatattggtgtagttctggagtctacaagcttctatgctgagcaaggtggtcagatttttgatactggatcacttgagggcccacatgctttatttgaagtgcgtaatgttcaagtttatggaggctttgttcttcacattggtaatgggactggtgtctcagttggcgacaaagtagtgtgcaaggttgattatggaagacgcgcccttatagcccctaaccatacctgcacacacatgttaaattttgcccttagggaagtacttggtgatcatgttgaccagaaaggatccattgttcttgctgaaaaattgagatttgacttttctcatggcaagcctattgaagctgacaatttaaggagaattgaatcaattgttaatgagcaaattaaagctgagttggatgtaagtgcaaaagaggcaactcttgctgaagccaagggtatcaatggtttgcgagctgtttttggggaagtctatcctgatcctgttagagttgtgtcaattggacaaaaagttgaggatctccttgctgaccccaagaatgaaaaatggttatctatttcatcagagttatgtggaggtacccatatttcaaacacacgagaggcaaaagcttttgcacttttatctgaggagggaattgcaaaaggaatacgcagaataacagctgttacaactgatcgtgcgtatgacgcaatgaaagtggcagatgaatttgagcagcaagtagatgatgcggctaagttagtaggaactttgctagaagagaaagtttcatcattgaaaagcaatattgaaactttatctattcctgctgccaagaaagctgacatcaagatcaagatagttcgacttcaggatcaagtaagaaaagcacaaaagcaggtcgctgaggaaaacaagcgtaaagctgtaatgattacagcagagaaggctgaacttgctgtttcaaatgggaaaacattttgtatatctcttgttgatgttggtctggatgtagctgcagttcgtgaggctgttacaaaagtcatggaccagaagggcttatctgtgatggtttttagcacggacgaatctacgaacaaggctgtagtgtgtgccggggtgccagagaaaggaggtaaaggtaatctggatgtggcagattggctgagtaatgctttggggcctctaaaagggagatgtggtaaaggaaaaggtggtcttgcaacgggtcagggtacagaggcatcacatgtaaacgaggctatagatctggcagaaaaatttgcgtcgatgaaattgagttaatggtgtatttgcagtatatccttcctggggtgtaagcatgatatggatctttcgtttggtggtataatcataatcatacagaagggaagggcacttgaagtaattattagatccggatgagttgaacaaatttctaatttagtgcctgaatatttttttgctctgatagattatgaagatattttgaaattttaaactgtcaccgttttcgaaagcgtgtttttttattgtttatgtagctttgaattttgacgatttcagcatttcatttcgcagaaatggtctaatacatgttaatgttgggttttagcttcattttttaaacgaataaaaagtaattttatttttaaacatgttagtttttggtttatgtatagatcacaaattgttccacaatacagtagcaactgctctgatagattatggggagaattcgaaattttcaactcaccattttcg

SEQ ID NO: 26583 - DNA, 1704 bp, Glycine max
  Clone ID: TF_GmC326_5
actcacttcacacaaaccaaagttaattaattaccaacacaaaatggatggaggctgtgtcacagacgaaaccaccacatccagcgactctctttccgttccgccgcccactcatctatctttgcttccccttagtcaaacaaagtaacacaccatccatcctctctctcttctcttcttctgttctctagtttcctgctcttgtttcttagaatccgtacggtctaatcaacacaacaaaatggatgcaattagttgcctggatgagagcaccaccaccgagtcactctccataagtcaggcgaagccttcttcgacgattatgtcgtccgagaaggcttctccttccccgccgccgccgaacaggctgtgccgcgtcggtagcggtgctagcgcagtcgtggattccgacggcggcggcgggggtggcagcaccgaggtggagtcgcggaagctcccctcgtccaagtataagggcgtcgtgccccagcccaacggccgctggggctcgcagatttacgagaagcaccagcgcgtgtggctgggaacgttcaacgaggaagacgaggcggcgcgtgcgtacgacgtcgccgtgcagcgattccgcggcaaggacgccgtcacaaacttcaagccgctctccggcaccgacgacgacgacggggaatcggagtttctcaactcgcattcgaaatccgagatcgtcgacatgctgcgtaagcatacgtacaatgacgagctggaacaaagcaagcgcagccgcggcttcgtacgtcggcgcggctccgccgccggcgccggaaacggaaactcaatctccggcgcgtgtgttatgaaggcgcgtgagcagctattccagaaggccgttacgccgagcgacgttgggaaactgaaccgtttggtgataccgaagcagcacgcggagaagcactttcctttacagagcgctgctaacggcgttagcgcgacggcgacggcggcgaagggcgttttgttgaacttcgaagacgttggagggaaagtgtggcggtttcgttactcgtattggaacagtagccagagttacgtcttgaccaaaggttggagccggttcgttaaggagaagaatctgaaagccggtgacacggtttgttttcaacggtccactggaccggacaggcagctttacatcgattggaagacgaggaatgttgttaacgaggtcgcgttgttcggaccggttgtcgaaccgatccagatggttcggctctttggtgttaacattttgaaactacccggttcagattctatcgccaataacaataatgcaagtgggtgctgcaatggcaagagaagagaaatggaactcttttcattagagtgtagcaagaaacctaagattattggtgctttgtagcgttacgttactttttttgagttttttttttttttgagttttgtgactgatgaaagaaagaaggtacaagaagaacggcggtgtagtggcatagtggcatcgcaagttgctgcaaaaggtgaattgtatattacttaatattagatgctgaaatattaggtgtaatgtaacaaaaaactgtacaaggagaagaaaaaaggttctaagaaggggagaagctagaagaaaaaaaatgatgtcatcatgggataactgtttaattgtatatgttgataatattgttgaatgttgattattatgttcacggc

SEQ ID NO: 26584 - DNA, 1525 bp, Glycine max
  Clone ID: TF_GmC194331_1
tcagccatcaaaaatatttttatttaattctatcaagctcattatccacaattaacaattaatactaacaagcactaatctttcagcagcgtcgtagtcttcccgtcactctgttcacaccccttgccatcctccgatctgtgtgccccttccgtcccgtggctccgttcctttgctcttacccatcgctcgtcagtgcacttgacctacacacacgttgtattggcgaagtccccatgctagtttgggctcaccgctctctctggctcgatgcagaacggctccgttgattccctcccccttcccctgcagccatccgcgttcgccctgcacctaattggcgttgtacatccgcgccccatcgcccccaccaacctcatttttttttttttttttattttttttttctaattaattaatcaagcaattttaaactcaaatttctttaaagatcaaagaagaaaggatcattataatcccataaactaccagtgtagtcatcctcgttcgccatggaccaaaaaggcgaaaaagatccaagccccattgtccccaccaacgccagatccggatccaccgaaaaagcatccatagcagacgcaaccgaacccacgacgggggaattattcactccctccaccaccacgccattctgatgttgctgttgctgttgattcaacaaaaccccatgttgcacttgcacatgcacatgattattattactatccagaaaaccatgcctttggtacgaggttgatctaatagaaccatcaacaacaaaaacattattattcacacctaaacccacatcggattccgaattatgttggtacgatgttgatagagtatgtgccacttgcacttgcaccaattcctcgggacaacgatggtgatgaggatgatgaacttgcactatattattattgtgattatcattagggcacagaaccggtggggagtaagtgtaattgtgactattgttataagggtaaggcacggtagcggtgttaaatggaaaattgacagaaaaacctgaagggcgaggaagcaagggtcttagggtttgggtggaagaggaagaggagcgagaagaggaagattgagaagaggaaccggagggttggaggttaagctgtgccctggaaccgtagaggatgatggcggcgcggtcgtaggctctggcggcgtcctcggcggtggcgaaggttccaagccacttacgagttcgcttgcgtggctcgcggatctcggcgacccatttgccccagcttcgttgtctgacgccgcggtacctaaatttgttgttgtcgggcggacgcgtacctttgcacttacgactactgattttgttgttggtgttactgttagatgtttcgctgggagtggtttcagtggtggtggtggcggtgggtttggtttcttggggttgaggaaggcggacgcgccattggttggttgggcccagttagaggggaaagatggttgggaaggtcgttccttcagtgttgatgttgattaggctctg

SEQ ID NO: 26585 - DNA, 1514 bp, Glycine max
  unsure (1)..(1514): unsure at all n locations
  Clone ID: TF_GmC194331_2
aaaaagaaggaaatttttatagacaaactaattaagaacaatattaatcaacccaaaaaaaantaatacagcttttttccaatcattcaatttctcaacttctggtttcacagttaaaactccatgaaaacctccgaattatttgatccaagagaacaatgactacgtacatttacatttaaacatcactgatcagtgcatataacttacacatacattgaattgatgaagtccaaataatagaaagggcttaccgcataatctggcaagatacataacttcatcgttgatttgcttcccaatcaccagcagcaaaatgtatttgcactgcagttaattagtattttacaacagcactaaatctcaaccatgaaaatgattttatttaattctactacgcttattatccacaattaacaattaatactaacaagcactaatctttcagcgtcgtagtctacccagcattttattcacaacagcatcgatcaatctatantgtgatcctcttccatcacgatgaactaatactataagttcaaaccaatcgaacgatataattaacttgaacaacatatgttataattctaattgctaattaaccaagcaattttatactcaaatttctctaaagatcaaagaagaaaggatcattataatcccacaaactaccagtgtaatcatcctcgttcgccatggaccaaaaaggcgaagaagatccaagccccattgtccccaccaacgccagatccggatccaccgaagaagcatccatggaagacgaaaccgaacccacgacggaggaattcactccctccaccacgctattctgatgttgctgctgttgattcgaaaaaaccccatgttgcacttgcacatgcacaggttatgttattattaatattatccaaaaccatgccgctggtacgaggttgatctaatagaaccatcaacaacaatattattattcccacctaaaccccccaaatcagattccgaatgtggcacttgcaccacttcccggacgcgtggatagtgatgtggatgatgaacttgcactgtattaatattgtgattcttactattatcaatagggtacaacacgggtggggtgtaagtgtaattgtgactattgttataagggtaaggcacggtggtggcgggggcggagttgaagggaaaattgaaagtaaaaccagaagggcgaggaagcaagggtcttagggtttgagtggaagaggaagaggagcgagaagaggaagattgagaagaggaaccggagggttgtaggttgagctgtgctctcgaaccgtagaggatgatggcggcgcggtcgtaagctctggcggcgtcctcggcggtggcaaatgttccgagccacttgcgcgtacgcttacgtggctcgcggatctcggcgacccatttgccccagcttcgttgtctgacgccgcggtacctaaatttgttgttgtcggggccaccctttacctttgcacttacgaccggacgcgtgg

SEQ ID NO: 26586 - DNA, 482 bp, Glycine max
  Clone ID: TF_17023892
aaacgaggcatggcatcattattagttgcagtgccaccaaacacttgagaatgttgatcactgagtggcgtcgccgaggcgtggaacaatgatggacgattagtgaggtaaccaaattccttagagaaatgaaccctttctggaaaattaagcttagctttggttcctttgaatctgagagctgcttcatcgtaagcgagtgcagctgcctcagcagtttcaaaggttcccagccaaactctcgctgctttctttgggtctcgaatctccgatgcccacttcccccacggtcgttgtctcactcctctatagtgccttcttacgtttccttcacatacacacacacatgtccatacatttcaacaaaacaatttgctcccatctttgttacactattttttatttttttttaacaagttatgatatttagacatccatttttctcaaacatctatctgatactaatcatttctctttaaaaa

SEQ ID NO: 26587 - DNA, 1191 bp, Glycine max
  Clone ID: TF_GmC104_1
aattaacacaaagcaaacacctccaactacaaacaaacacacttcacaactttgctttttctctctttcaatgtcctcttcttccttctcccccgccactctcaccaccgagcaggagctttccgtcatcgttgccgcccttaccaacgtcgtcgccggctccacctccgcctccagctccttctccctccccgaattccgccttccacagacctctgatcctctcgccgccgcctgcctaatgccgccgccgccgccgccgagcatggacacttgtcgcgagtgcaacatcgcaggatgcctgggatgcaactttttcccggaggagaaaaagaagcagaagagggccaagaagaagtacagaggcgtgaggcagaggccctggggaaagtgggccgcggagattcgtgaccctcgtcgtgctgcccgggtctggctcggcacgttcggaaccgccgaggatgccgcccgggcctacgacaaggccgcgattgagttccgcggcccacgggccaagctcaatttccccttggtggacgagtcgctcactttgcagcagagcgagccagagagggttcaaacagaagaagagcaaataaagacagagaatctcaatcaaggtatggaaatggattcattcgggaacaaggataccgaattctgggacaggattaacgaagctgattttcatcagctcatgatgatgatggattttgctggagattcttccgactctgccactgggaacgctcttagttcttgaaatattcaatgaagcaaaataattagtttttgatagtgtgtgtgtttaaaaattgtacaactcgaccaaacgtatttgttaaattagcatttagctagctccactacactgcatttctgtaatatctttcttccgctaggttttttcgggaggaagctgctgcatagtacaaatcaagagttttaatgtttcatttcaccaccccaagagtaagctctgtataaagattggcgtattattattattatttttttatagcaataatagctagttttaagagcaagttatcactagtcaaaaactttcaatttgtacatttttagtatgatttaggatattaagctttgaattggtcaaattttaatttaaaaaagaacaaaattgtcttttgtttaataaaattgctctaaaagagattctaataaaaa

SEQ ID NO: 26588 - DNA, 579 bp, Glycine max
  Clone ID: TF_LIB4391-059-R1-K1-C1
cgaagatgagtctgagagggttcagaagccgagaagagtaaaaagaagcgtgttggagatgtctcttccccctctccctcaaacattcaccaccactactcctgatactagctcctgtgaggtgaatagcagcaaaaatgcaacattgaaggtttgcactgttttgtaaccccagagcaagaagagggttttgactcacactccatcaacgagaaggagcacttgtgggaaatatagaggtgttaggcagagaaaatggggtaaatgggctgcagaaattcgtgacccgtttcagtgtactcgtatatggcttggcactttcaacactgcagaagaggcttccaaagcctatgaaaccagaaggcttgagtttgaagccatggcaaagactcaaactctaaaaactggttctgaacctttgtctacaacttctgataagagtaactgctgtaactcctctgctgctgccgccgccgatgtgtctgtgtctgaaaagttttctactacttctgatgactcggaagagagtatgttgtcacacaattcaccatcctctgtgcttgagttggatacctcggc

SEQ ID NO: 26589 - DNA, 1375 bp, Glycine max
  Clone ID: TF_GmC91_1
aaatatttatatgtacgtatatacatacatacacacagagacatggagaacaataatcatcatgccatggctgcaggtgctagtagtgattcaaacactagtgatcacaccaccccaatatcttcttcttgtgttaatgataacaacaacaataagttatacaaaggggtgagaaagcgaaagtgggggaaatgggtttctgaaatcaggcttcccaatagccgtgaacgaatatggctagggtcttatgactctcctgaaaaggcagcacgagccttcgatgctgccctttactgtctacgtggccgccatgccaatttcaatttccccaacacaccttgcaacatggacactgctaccaatgctcctcctaaccaatctcttaccccaccagagattcaagaggttgctgctaagttcgcaaatcaggtgtccccgctactacaaaaacctcaagaacaacctcaacctcaacgtagtagtgatggtggtggcggtggtgctaattcttcatcgtttggatcaaagttgttatgtaaatcagacagcatagcagagagtagtactactagtactactactaattgtacccccaccaccactgcctcgtcatgttctgctactatgtacgaatgtgatggaacggagcaagtggaccgtggggacatgatggattggacattcttgaacgtctttgatttctccaatgaggtggtgcttcctgctgttggatccgactataatgatctctataattctgagctacacaagatgcactcagattcaggtgagttattgtattctactccttttgagggttacgaacaattaattgaagctgatcatgatgatgatgatcctttttctcaccaatcattcctttggaattggaacttttgatcatcatatcatcactcgctactgcatgtgctgctagaatatgatgactactagttaaaattacttgccccagcctaaatatataataaagcatccttgatcttttgcatatatgatatgtatatgggggtggctccaagtatataacaataacaagggcaagacaagacacaggctatgtcagaccatatatatattccttaccataattaagtatatgcctagctatatggctagctagtgacctcggtttttctagtgctatctattccatagattagcacaggctaccaactatatagtatcgatcgatagatgttgtcttactatatgtttccccttggcaataaaatatttgtactttataggttgttttatgtatactggttcaagtatatatttatacctaagtatatatatattgatctgtgacatgtatcccttctcctttccgtatttctctgtaaaattaaat

SEQ ID NO: 26590 - DNA, 1551 bp, Glycine max
  Clone ID: TF_GmC1423_2
aaggaaggcaagtttatctagggggttatgatatggaagaaaaagctgcaagagcttatgatatggccgcactcaagtattggggaccctcctcccatataaatttccctttggaaaattatcaaaacgaacttgaggaaatgaagaacatgacgagacaagaatatgtagctcatttacgaaggaaaagcagcggattctcaagaggggcctccatgtacagaggagtaacaaggtctcacaggctagcatttacacagcaccaccaacacggaaggtggcaagctcgaattggaagagtggctggaaacaaagatctatatcttggaaccttcagtacccaagaggaagcagctgaagcctatgacattgctgctattaaattcagaggatttaatgctgttacaaactttgatataacaagatatgacgtggaaagaattatggagagcaataaccttcttagtagtgaacaagctaagcggaaaagagagatggatgatggaactagaagcgaggctacagttaaccaaaaaccttgtactactcaagaaaccgttctgatgcagaaaagatgcagaagccaatcagaatggaagatggttcagtatccatcctcccaacagcttgatcagaatccacaaagaattgagtgtagtagaactgagtccttgtcaactgctttagataacatgtttcatcaccaagttgaggaatcgagtaacatgggaacacacttgtcaaatccttcttctctggtgacaagtttgagtagctcaagagaagagagcccagataagacaagcttgccaatgctctttggaatgccttcaacagtgtccaaattattggctgacgtggattctttggatctatcttccaatctcaggccttcgctttctattcctcagatgccaatttttgctgcttggaccgatgcataatcctatgtttttttacctccatcaaaatggcaaaagcttgttttgaatgcttgtttactaaaccagggtgtgaatttccagctagtacaatagggagcttgtgcccatgtttaaaatgttaactgttacattaaacattttcctcgtacgatgagaggaaaactcctaaagtttagtgtatcgcttagcactccaaattcgcatcatcaatttttcggtgttagaatcttatctaaaggttattttgaccctttgccaatgctttttggaatgccttccattgcatcaaaactattgggttctaatccaaataacgtgaatttttgggacccttccccccatttgaggccagcactttctttgcctcaaattccagtttttgcatctgtccaagctgcaaagttcataactcaatagtccttttaattttttgttctctcaagtgaaatttcaatcctttttattgtctttttttgcatgcatgaacaacacaagaggaaggggttgtagctagtcaaatggagggtctaaatattatatcatcacatcactgtcagcaagtttaatttaaactttcaaatcattacattttagcacacattgctgg

SEQ ID NO: 26591 - DNA, 1620 bp, Glycine max
  unsure (1)..(1620): unsure at all n locations
  Clone ID: TF_GmC1349_1
cacgcgtccgacaaaaactactatttttgtttcctatacagcagggaagaggaaccagttattttcggtgagaagtacaccggaaagtttttgcctaaagaaatcatggagggaatgcgagacacaaagtcacagcttgaaatccaagaccaagagggtactaatattgggtcctctttgtcaaagctcatattagcaagtggcagtggcacaaacacccttgactcaattttctccaattgcccacaaacaacaaatggcagcactagtagcaactccgtgttagatgatttagaaccctttaagtcttcggggtgtgagcctttggggtcttccgtgtacctccgccaaagggacatcctccaaaagttctaccaagaaagccgaggaaatgggtcttataatgttcccacttcctccttgagtaattcgttgacgaacccttgcaagaaaaagctgtacaggggagtgaggcagaggcactggggcaaatgggtggcggaaattagactcccacagaacaggatgagagtgtggttgggaacctacgacaccgccgaagctgctgcctacgcctacgaccgcgccgcgtacaagctccgtggagagtacgcgcgtttgaacttccccaatctcaaggaccccaccaagctaggtttcggtgactccgccagattgaacgccttgaagtcctccgtcgacgccaaaattcaagccatatgccagaaggtcaaaagggagagagccaaaaagaatgccgccaagaagcttcacaatagcactgaccctaaacgcggccagagtgagaagccctcctcctcgtcctcgccgtcgccgtcgccgtcgccgtcgtcgatttttaacgataattgggcgaaccagttgttttctccggccgtttcggaggatgggttttggaagggggagaattcgcattcgccggcctcggttttgacggagtgtcaaacagaggaaacagagttgttgttcgaaggttgttctctggctagattgccttccttcgaccccgagttgatttgggaggttctgaccgtttaattagttgatactgtcttcctttcttaggttactacttacagcgagcgctcatgtcatgtgtatatgaaaaatatatattattagtgtggtcttgttttgtttgtcggaatgggaagaggtcctttagcgttcaactcctcttcttgctcttcgtcatcgctgtcgcagccgttgtcgccaccttcgattttttacgataattgggcgaacgatttgttctcgccggcctcggtttcgacggagtgtcaatcaatggaaacagaggagttgttcgaaggttgttctctggctagattgccttccttcgatcccgagttgatttgggaggttctggccgtttaattcattaatactgtctttctgtctttaattaattaggttacttacagcgaccaccgctgatgtcatgtgtatatatattattattagtgtggtcttgtttttgtttgtcggaatgatgagaggtcctttagcgttttgagtaggattggtatggctgtgggttttttgctcaaggcagttgcttcctattnnncttgttgtgatagacttctccctcct

SEQ ID NO: 26592 - DNA, 1301 bp, Glycine max
  Clone ID: TF_GmC1488_1
aaaaacccttctctcttttctctctctctctctcttttagtaactcccctagtttgttacaaatatttgtccatagtgtgtgcaatgctgaaatcaggcatgggaattcaggagagaaagaaggtgaagaaacctgcacaagccagttccagaaaggggtgtatgagagggaaaggtggccctgagaatgctacttgcacctacaaaggtgtgaggcaaagaacctggggaaaatgggttgctgaaatacgtgaacccaaccgtggtgcaaggctctggcttggaacctttgacaccgctcgtgaggctgctttggcctatgatgctgctgccagaaagctttatggacctgatgcaaaactcaacctcccagaactctctgtgccttatgctgctggagtgatgaatccttctcacatgcaacaacagcaacagcaacagcaacaacctcaggttccccaaatgatgatgcaacaacaacagcctctcgtgcaccctacctttgaccttgtcaatgtcactcctcattctgatttcaacaacaacagcatcaacatcctcaacaacaaccccgtggtctcttccatggcttcttcttttcttgcagatgcagcagcacccgtgtataccagctgcgactctattgtctctcttccgttgtctgcaaccaattacaccaccaacaacacggtgccgatggaaatggacggctactactattcctccatcgctgtggagagcaaggaggacgacatgtttcgccccttctggggtccaacaatggacgacaccatgcctgtgtctgatgagtccatctggactgaagctgctatgtctcttgattatcctattgttggaggaggaggcgggttcgtaacaaccgaaaatctctttggagaagctactgcgtggactccctgcaaactccttctttctgcatgtaaattgtcatcggatgaaagagacagacagtatagcaataaagtattatgtctgtgatagtgaatatcttacatcatcatctggattatcacctttcatcatctcctggacagtctttgatatatacataaaagagatatgtgtatatataaaagtgtgtacaaaactatggggattaattgggggtgtcaagtatatagatttatgattagccagtatatatattacttagatgataatatatatttacatcttatagttaaaaactttgtctggaggacgtcgtggagtagcatggcatggatcatctattgtattgctagaatattattataaaaatatattattagtagtaaaaa

SEQ ID NO: 26593 - DNA, 1202 bp, Glycine max
  Clone ID: TF_GmC1216_1
gacacattcttggaccttcttgaccacatttttccttcactcactcccatcacaataatttcttccctccttccttcccacaatggtcatggaagaatctaaccctttagacaatgaagttcaaccaaccacttcatcatcctctttcaccattactactccctctacctcctcttcctcctccatagaagaagccactaacactactactaaggagaaaaagaagaagagagccattagtaatattgaagggaagcaccctacgtatagaggagtacgtatgcgtcaatggggcaaatgggtatccgaaattagagagccaaggaagaaatcaagaatttggcttggaacttttcccactcccgatatggcggctcgagcccatgatgtggcggctctcacgatcaaaggcagctcggcttacctcaatttccccgaattagccgccaagctgccccgccccgccagcacctcccccaaggacatccaagctgcggcggctaaagcctccgccttggatttcggtcaccaaagccatgaagccgaatccgagctgagccaagccgtttcctcctcaatccaaacacaatcatcatcatcatcatccaattcatcgttgaagggtgtggatgacacattcttggaccttcctgatctctctcttgacttgagccatggagccgatgagtttcattattcatcggcttggcttgtagccggagccgaacatatagagctgggtttccggcttgaggaaccttttctttgggaatcatattaagttaccttcctcaagtaggccaatttccctttttttgatgtttgtgctgcctctcttttttctttgttcctttcacttttgagctacttgcaagaaccttgaagaatccaatatgctctatggcagcatgacgtgggggtgtcaaacttcagtgtccatgacaaataaagaagttttactaaacccactccatagctttttttattcaagaatttatgtaaatattaaaatatcatctgtcattttcagataaggtaattaattaagttgccttgcatcatattcctcaatttgttgtaaatttcctcgcttgtcatctgtatatcctcccctttgtcaaaattcagtttaatttgtgtatgggtgaatgtggaataaagttcagctgggtaaatttgattaaaaaaaaaaaaaaaaaaaa

SEQ ID NO: 26594 - DNA, 1156 bp, Glycine max
  Clone ID: TF_GmC464_2
tccggaattcccggctcgaccccgcgtccggacgcgatcacgctgaagacccattttttgtattatttattaataatttatttttgtgtgtgtagttgaaggagcaccagaagaagaagagaaggtggtaccgccttcaattctctctctccatttctcatcctcatcatcttattatacctcttccatctccataacatccacttgtgaaaaaaacccattaatatatatcacacacacatgtatctctgagctccaatccaatccaagaccacaccttgtcgcgtcggacgaaccttggtgtctgtctttttttttttttttgtttcattagtttctccgaagagatgcggaagggcagaggaggaggagcctcggcggcggcggcggcggcggtgaacggatccgttttaaaggagcctcggtaccggggcgtgcggaagagaccgtgggggagattcgcggcggagatcagagacccgttgaagaaagccagggtttggttgggaaccttcgattctgccgaggatgctgcacgtgcctacgacaccgccgctcggaatctccgaggttccaaggccaaaaccaatttccctctctcacctttttgctatcaacaccccaccacggatcctttcttctacgctggtttccacgaccaccaaaacaacagcaacaacaacaacgacaaccttaacaaccctcaaagaccaacttcaagtggcatgagtagcaccgttgagtccttcagtgggccccgccctcccaccacaaccacaaccaccacgacgccgtttttgaccactacgcggagatacccgcgcactccccctcttgtccccgaagactgccacagtgactgcgactcttcctcctccgtcgttgacgacagcgacgacaacatcgtttcctcgtcgtttcgacctcccttgccgttcgatctcaacgcgctgccgtttgatgatgatgctgccgtcgtggatgatgatctacgctgcaccgcgctttgtctctgatgattatcgtgcgatgatgatttttaatttctcattttttttatctcttcaacttgattttttgttattgctatgagggaaaaaatatattaaaaaaatgatcagatgtaagattatggtaatatgatcttaattctgtc

SEQ ID NO: 26595 - DNA, 1914 bp, Glycine max
  Clone ID: TF_GmC826_11
gaaactcaattatacaaaaccctgaagaaagacacagccattgtttacttttcattgattgagccaaagctttgtattttctgcgataattttccattgggtggaagaaagtctcaacctttattcgaaagagcaaggatctgagttgagttgagtgatcatgtgtggtggtgcgattatctccgacttcataccggcaggtcccgccagcggggcgcggcgcgtgaccgccgacatcctgtggccgagtttgaggaagcgcttctcgaagccgctgctggacgatgatttcgaggctgggttcagagaattcaaggatgattcggaaatcgaggatgttgatgacgaggacgatgaagacgaggaggagttgaagaagaagccctttgggttctctcgctccagcaacaaggctgcttctaagcctctctctcgtggatcagcaactgtggaatcaaaggggcaagctgagaagtgtgccaagagaaagaggaagaaccagtatcgtggaatccgtcagcgtccatggggaaagtgggctgctgagatccgtgacccaagaaagggggttcgtgtttggcttggaactttcagcactgctgaagaagctgcaagagcttatgatgctgaagcaaggaggatccggggcaagaaagccaaggtgaatttcccggatgagccttcaggcgctgctgcttcctcaaaacgcctcaaggtgaatccagaggctcagccaatgaaggaaaatctgaacaccgtgaagccgaaaatgaaccagatgttcaattttggtcacaatctggagggctactacagcccaatagatcaggtggaacagaaaccactggttaaccagtatgttaaccctgccccgttccctggaaacggagttcaagtctcacctgttactccatctgctgatgttactgcttacttcagctctgagcattcgagcaactcgtttgattattctgaccttggatggggtgaacaagtccccaagacccccgagatctcatccttgctttctgctgctcctttggagggtgctgctgatcaggttcagaagaccaacaactcgcaggatgtggtggctgcacaagatgattctgcaaaaaccctttccgaagagcttgcagacattgaatcccagctcaagttctttgagaccccttcttttcttgatgaagcctgggctgatgctacattggcgtctttgctcggcggagacgcaactcatgacgccgccggaaaccctatgaacctttggagcttcgacgacctgccttccatggcaggagtcttctgaacaccctttatctccccttttatgtaaataaagctacaagaattgtgatcgtgatgttggtgatggagtccacagcaagaaacctgcttaaagcttatgtggagtttattttatcttgtagctaatgcagtagtataggactatatataggtttttattatagggtatccttttgtgaactcaaagacctcgttttcaggggattttctgtttgatgtccttaaggattatcaattatgttatatatggtcttggatacagtcttgactgctgatacagtttttttttaacttggttgttttcattttcattattattattatggcaatttgattatgactttgagaccagccatttctcaatgctctgtgtggtggcaatttgatattattctgctttctggtttggtgatttatggacgtggaaaacttttttttttttcttttctttctaaaccaatctttctgcaataattggctttgtttcagagttcaagtgctggaaatctaggtgtgagggaagaagtgttaaatcgatgatttatcatcattggatcgaatctgataagttcataaatcgttttccgaattacttttccagattct

SEQ ID NO: 26596 - DNA, 1889 bp, Glycine max
  Clone ID: TF_GmC826_12
gaaactcaattatacaaaaccctgaagaaagacacagccattgtttgtttactttccattgattgagcgaaagctttgttttttctgcgatcattttccattgggtggaagaaagtctcaacctttagtcgaaagagcaaggatctgagtgagtgagcgatcatgtgtggtggtgcgattatctccgacttcattccagcgggtcccgccggcggggcgcagcgcgtgaccgccgacatcctgtggccgaatttgaggaagcggttctcgaagtcgctgctggacgatgatttcgaggcagggttcagagaattcgaggatgactcggaaatcgaggatgtcgatgatgaggacgatgaagaggaggaggagttgaagaagaagaagccctttgggttctctcgctccaacaacaaggctgcttctaagcctctctctcgtggagcaacaactgtgaaatctgtggaatcaaaggggcaagctgagaagtgtgccaagagaaagaggaagaaccagtatcgcggaatccgccagcgtccatggggaaagtgggctgctgagattcgcgacccaagaaagggggttcgtgtttggcttggaactttcagcactgctgaagaagctgcaagagcttacgatgctgaagcaaggaggatccgtggcaagaaagccaaggtgaatttccctgatgagccttcaggcgctgcttcctcaaaacgtctcaaggcgaatccagaggctcagccaatgaagaaaaatctgaactctgtgaagccgaaaataaaccagatgttcaattttggtgacaatcttgagggctactacagccctatagatcaggtggaacagaaaccactggttaaccagtatgttaaccgtgccccgtttgctggaaatggagttcaagtctcacctgttactccatctgctgatgttactgcttacttcagctctgagcattcgagcagctcgtttgattattctgacctcggatggggtgaacaagtccccaagacacccgagatctcatccatgctttctgctgctcctttggacggtgaatctcagtttgtgcagggtgctgctgatcagaatcagaagaagaacaacctgctggatatggcatctgtgcaagatgattctgcaaaaactctttctgaggagcttgcagacattgaatcccagctgaagttctttgagaccccttcttttcttgatgaagcctgggctgatgctgcattggcgtctttgctcagtgaagatgcatctcaggatgctgctggaaaccctatgaacctttggagcttcgacgacctgccttccatggcaggagtcttctgaacaccttcatatccctttttatgtaaataaagctacaagaattgtgatcgtgatgttggtgatggaatccacagcaagaaaaccaacctgcttaaagcatatgtggagtttatttatcttgtagctaatgcagtataggactatatataggtttttatagggtatcctttgtgtgaaactcaagagacctcgttttcaggggattttctgtttgatgtccataaggattatcaattatgttatatatggtctgggatacagtcttgacttacagtttttaacttggttgttttcattgttatggcaatttgattatgatttgagaccagccatttttcaatgctttgtgtggtggatgattgcatatcgcctctattattttgcttactggttactcaggccatctttaatagatcgtccttggtgtaaagttttagctattaatggatgtggaaaagcttttttttttttctaaaccaatgttctgcaataattggctttgttgcagagattttaagtgttggaaatctagttgagagggaagtttt

SEQ ID NO: 26597 - DNA, 951 bp, Glycine max
  Clone ID: TF_GmC847_1
cacgcgtccgacagacgaaagaagcaagcatgtgtggcggagcaatcatcgcagatttcatacctcggcagcgtccccgcaccctcacagcctccgaactctggcccaagcgcagcgaacctcaacctcaacctcctcctcctccagttaagaggcagaggaaaaacctctacagagggatcaggcagcggccctggggcaaatgggccgcggagattcgcgatccacgtaaaggagttcgtgtctggcttggcaccttcaacaccgccgaagaagccgccagagcctacgacaaagaagcccgaaaaatccgcggcaagaaagccaaagtcaatttccccaacgaggacgaccctctgccgcaatacggatcttgcaagagcctcaacttggagttcggttacgatctcaaccaaacagggcttttcccttcttctaacgctgatgagaattgcgggtcccacgtggcttactccgttacggaagccaacaacaaagtagagaagctttccgaggagcttatggcgtacgagaatttaatgaggttttatcagattccggaaaacgtcgttggggatttgtgggcctttcctgacacctctccacctctctgatttctgtcacatcgtttcttctatcattaattctccaattctgttcttaaaatatgatatgtacaatcagcaatttcaatttgcatgtatttaactttcagactcttaggagatgtttggttcggttgttttctgttttcattttcactgaaaataaaaaacggtgatgaaaatgtatttgattggatttctgaaaacattttcaggaaaaatgaaaacaggaaacaaccagaaaatgaaaacaagaaatcaatataacaaaaaaaaccagtatttttatttcatgaaaataaagaactctaaatcaaatcaaacataatttcagaaaaaaaaaaaa

SEQ ID NO: 26598 - DNA, 808 bp, Glycine max
  unsure (1)..(808): unsure at all n locations
  Clone ID: TF_GmC847_2
cccgggtcgacccacgccgtccgaaagacgaaagaagcaagcatgtgtggcggagcaatcatcgcagatttcatacctcggcagcgtccccgcaccctcacagcctccgaactctggcccaagcgcagcgaacctcaacctcaacctcctcctcctccaggtgagtcaatatcttcttctctttcaacattaatttcccaactaacaaaacaagctcacgtgacgtgacagttaagaggcagaggaaaaacctctacagagggatcaggcagcggccctggggcaaatgggccgcggagattcgcgatccacgtaaaggagttcgtgtctggcttggcaccttcaacaccgccgaagaagccgccagagcctacgacaaagaagcccgaaaaatccgcggcaagaaagccaaagtcaatttccccaacgaggacgaccctctgccgcaatacggatcttgcaagagcctcaacttggagttcggttacgatctcaaccaaacagggcttttcccttcttctaacgctgatgagaattgcgggtcccacgtggcttactccgttacggaagccaacaacaaagtagagaagctttccgaggagcttatggcgtacgagaatttaatgaggttttatcagattccggaaaacgtcgttggggatttgtgggcctttcctgacacctctccacctctctgatttctgtcacatcgtttcttctatcattaattctccaatnnctgtcttaaaatatgatatgtacaatcagcaatttcaaattgcatgtanttaaacttcagactcttagg

SEQ ID NO: 26599 - DNA, 762 bp, Glycine max
  Clone ID: TF_GmC982_1
cgaattcggctcgatattgatgtgcagcatcagtgagaaagccaaaaggaagcgccaatctgcattccgcggagtgcgcaaacgcagctggggacgctacgtctctgagataaggctcccgggccagaaaacacgcatatggctcggctccttcggctcgcctgagatggcggctcgcgcttatgactccgctgctttcttcctcaaaggaacatctgccactcttaatttccccgacctcgtacactccctgcctcgacctctctcatcttcccggagggacatacagtccgccgcagctgaagccgctctccactctccgcctcccaaagaagaacaagaatctattttcacttccaccaccacctcgtcctttcacgatgtcatggaagctcctcttatgagtccccttagggtggactccactttcggagatttctcatgggaccaactcttcgatttcaacgatgacattctcatcgtgggatcaacttctgccactcttgtcccttaacgctgcttttgcaattcgccacccactgcttctagaaactagctggattttctttcactttctgttaataactcttctctgcttttctaagacttgcttctgaactcttgtacaaaggagctctccaagacaaatatatatatatatatatatatatatatatatatatatatatatatatatatatatatatgtttactgagagactgatttcactaagcaccttaattaaataagtgtttctgaat

SEQ ID NO: 26600 - DNA, 1112 bp, Glycine max
  Clone ID: TF_GmC3803_1
gtaagtgtttaacaagtgtttcctgagtctgaacggaatcccacttaaaagtcgttctccttcctcttcgcagctgttatatagtactattttcatttcatatgtttatgcacctctatatatacatagacacatgtaaatggttgcaaaggaagataagataggtaccagctatcacatagtttatttaatccgttatatgccacctgatatataggcatattagctagttaggtaggtatagtagtttaagttaattcaaccatggaagacagggatcactgttgttccaacaattcaacgatgatcacaacaacaaagaaaagaacgggtagaagaagtccaacatcggataagctcaagaatcaacaccgcgagaagcagtcgatgaaaccttaccgtggaataaggatgcggaagtgggggaagtgggtggcggagatcagagaacccaacaaaaggtcgaggatatggttgggttcttacacgacacccgtggccgccgcacgtgcctacgacaccgctgtcttttacctccggggtcccaccgcgcgccttaacttccccgaactcttgttccaggacgacgaccaggagggcagtgattcggtgcagcacggcgcagcagggaacatgtccgctgattccattcgccgaaaagccacgcaagtcggcgccagagtcgacgctctccaaaccgcgcttcaccaccacgcgccaagtaccaactctctcaatctcaagcccgacttgaacgagtttccaaaactcgaagagcttcaagattgatataaatcaaatatcaatatcaatcaatatatttaatttcctaagttctttattaatatatagttttatgtgtgtatatatagatgatgatgcctcggagttggggcttgaaactaattaaccccttcccttccccttaatttagatatatcccttttcttgtttttccgtatcttcaatcataatatcaaatcaaagaagtattattattttctagggtttttgctaattgatatattattatcatatggttttgatacggtgtaacgtaacaattactaacatattaagtggccagtattcgtggtgagatagaaaaaaga

SEQ ID NO: 26601 - DNA, 598 bp, Glycine max
  Clone ID: TF_GmC2485_5
attgacggtgcccttaattggtccctcttttccaaaccccaactgggtatcacaaagtttccaaattgaacgcaaaaacggaaatttcttcttcaaatgccttctgggtcgctcttctttgcatccagattacgaagtttttggtcgccagtctgtgattcaagtgctattttagcatttttttttttttcctggacggtgagggtcaacttgcatgcacatgttagtgaaaaaccacaataagggggatggatctaagtccctcgccgatacactggcgaaatggaaagaatataatgcttggctggagtctaacaatgaagctgagaagccggctaggaaggtccctgccaagggatcaaagaaagggtgtatgaaaggaaaaggagggcccgagaactcacgctgtaactacagaggagttaggcaaaggacttggggaaaatgggttgctgaaatccgagagccaaacagaggaagtaggctctggttgggtacttttcccactgccattagcgctgctctcgcttatgatgaagcagcaagggcaatgtatggttcctgtgcgcgcctcaactttccccacgttcaagtttca

SEQ ID NO: 26602 - DNA, 1233 bp, Glycine max
  Clone ID: TF_GmC464_1
tacggctgcgagaagacgacggagagaggtagttgaaggagcagaagaagaagaagagaaggtggtaccgccttcaattctctttttctctctccatttctcatcctcatcatcttattattcctcttccatctctattctccataacacccaccacaccacttgtgaaaaacctcattaatatcacacactgacatgtatctctgagctccaatccaatacaagaccacaccttgtcgtgtcggacgaaccttggtgtctgtttttttttttttttcattattttctccgaagagatgaggaagggcagaggtggaggcgcctcggcggcggcggtggatgtgaacggatccattttaaaggagcctcggtaccggggcgtgaggaagagaccgtgggggagattcgccgcggagatcagagacccgttgaagaaagccagggtttggttgggaaccttcaattctgccgaggatgctgctcgtgcctacgacgccgccgctcggactctccgaggtcccaaggccaaaacaaatttcccccctctctcacctttttgctatccacaccccaccaccgatcctttcttctacactggtttccacgatcaacaccaccaccacaacaacaacaaccttaacaaccctcaaagacccacttcaagtggcatgagtagcaccgttgagtccttcagtgggccccgccctcccaccaccaccactaccaccacaaccacaactgcgacgccgtttttgactgctacgcggagatacccgcgcactccccctcttgtccctgaagactgccacagtgactgcgactcttcctcctccgtcgttgacgacggcgacgacaacatcgtttcgtcgtcgtttcgacctcccttgccgtttgatctcaacgcgctgccgtttgatgatgctgccgcggatgatgatctacgccgcaccgcgctttgtctctgatgatgattatcgtgcgatgatgatttttaatttctcatttttttacttgatttttttgttattgctatgcagaagaaatatatatttaaaatgatgatcagatgtaagattatggtaatatgatcttaattctgtgagaggaagattccgtgttggttatattttcttctttttattattttttaaaacatttttatttagaaggaaatattgaatgagaagagaaaagagaaagtaattatgatcaaaaaaaaaaaaaaaaaaaaaa

SEQ ID NO: 26603 - DNA, 1136 bp, Glycine max
  unsure (1)..(1136): unsure at all n locations
  Clone ID: TF_GmC1324_1
ggagatcgctcaatcccacacgcttcttactcctctcataacttttctgctccccgttgagaaagatttgccacacgcttcctactcctccctttcaccacttttctgctcccccttgagaaagaatttgaatcatcaaaattaaaaactcgcaccaacaatggccccaagagacagccgagccaccgcgttcgccggaccaggcccaggcccatcaccggcccacaaagagatccgctaccgaggcgtccggaaacgcccctggggccgctacgccgccgagatccgcgaccccggcaagaaaacgcgcgtctggctcggcaccttcgacacagccgaggaagccgctcgagcgtacgacaccgcagcgcgtgagtttcgcggtgccaaggccaagaccaattttccgacaccctcggaactcatccttaacaacaacattcgcagtcccagccagagcagcaccctcgactcttcctctcccccgtcaccgccaccgccgcttgaccttaccctaacccctctctccgtggccgtcaccgtcttcccggtggctcgtccggttctattctttgacgcgttcgcgcgtgcggacgccatgatcgccgtctcccgccgcgagatgtgtggctttgaacgccccgccgctgatttccgccgtaacgactccgattccgattacaaccgccgcgtgctccttgatcttgacctgaacgtgcctcctctcccggaggttgcctgattcatgcagggagatctggttttccgcaatttttttcgtactacttttttaagcatctgggaacactactacgcatttttttgtgacgaaattgccctcgagaaattatagtgttacggagagggagcagcagctaagtgtgagtagtggatgacatgatgctcggaattgttgttgaccattttgtgatgaagatataatcggcacgttatgtaaatacacgttataaccgaaaagcaaacgcgctttttcttgcttttttttgcaactgagaacttaacagagtatctcatggttgtttctgtaatttctcaaaatatataaatatttccatttccatccttttattattaatatttatgttatccctggngaggcaaacatgaaaaaaata

SEQ ID NO: 26604 - DNA, 1002 bp, Glycine max
  Clone ID: TF_GmC1324_2
ccggctcgagcaatcccacacgcttcttactcctctcataacttttctgctccccgttgagaaagatttgaatccaaaggaaaaataacgctaatggctccaagagacagccgagccaccgcgctcattgggcccggcccaagcctatcaccggcccacaaagagatccgctacagaggcgtcaggaaacgcccctggggccgctacgccgccgagatccgcgatcccggcaagaaaacccgcgtctggctcggcactttcgacaccgccgaggaagccgcgcgcgcctacgacaccgccgcgcgtgagtttcgtggcgccaaggccaagaccaatttcccgacaccctcggaactcatccttaacaacaacaacataaacgctcgtagtcccagccagaccagcaccctcgactcatcctctcccccgccaccgccaccgctagaccttaccctcacccctctctcctccgctgtcttcccggtggcgcgtcctgttctattcttcgacgcattcgcgcgtgcggacaccatggtcgccgtctcgcgccgcgagacctgcggcttcgaacgccccgccgccgatttccgccgcggcgactccgactctgattataaccgccgcatactcctggatcttgacctgaacgtacctcctctcccggaggttgcctgattcatgcagggagttctgtttttttcgcaattattgtttttttggttttttaagcatctgggaggtactactacgcatcttttttgacgaaagtgccctcgagggagcagcaaagtgagtagtggatgacatgatgctcggatttgttgaccattttgtgatgatgaagatatataaccggcacgttatgtaaatacacgttataaccgaaagcaaacgtgcttttgcttggttgctttttttttttgcaactgaggactcttattcagagtatctcatggttgtttctgcaatttctcaaaatatataaatattccaatttccatc

SEQ ID NO: 26605 - DNA, 542 bp, Glycine max
  unsure (1)..(542): unsure at all n locations
  Clone ID: TF_uC-gmroLIB3259P226c09a1
cttcctactcctttctttcaccacttttctgctccccgttgagaaagaatttgaatcatcaaaatcaaaaacacgcaccaacaatggccccaagagacagccgagccaccgcgttcgccggcccaggcccatcaccggcccacaaagagatccgctaccgaggcgtccggaaacgcccctggggccgctacgctgccgagatccgtgaccccggcaagaaaacgcgcgtctggctcggcaccttcgacaccgccgaggaagccgctcgcgcatacgacaccgccgcgcgtgagtttcgcggtgccaaggccaagactaattttccgacaccttcggaactcatccttaacaacaacattcgtagtcccagccagagcagcaccctcgactcttcctctcccccgtcaccgccaccgccgcttgaccttaccctaaccnctctctccgtggccgncgccgtcttcccggggctcgtccggttctatttttgacgcgttcgcgcgtgcggacgccatgaatcgcgtctcccgcgcgagacgtgc

SEQ ID NO: 26606 - DNA, 1029 bp, Glycine max
  Clone ID: TF_GmC1702_1
ctacccccctctcttaacatttctaaagctccttctcctctcaatatctcatggcaaacgctcttgaagtctctgctctcaatcgcatcaagctgcatcttttaggagaactctctcccctcacccaatttcaggaaccaaacacaacctccctctgttcccaatcttcaacttccgattcattcaccacagttgaccaaatcttctccgaattcctcgatttcccaactactactacttcttccacagaacaaaaccagttttctgcattcgagtttgagccaaaacccgaaataattgagccacaattggaattcagttttccaaccacacgctgcaaatcgagtcgaaggccgtcgctgcaaatctctctcccgaagaagaccgagtggatccaatttggagagcccgaggttaccgaaacggtgtcgcagagtaacccgaacgcggaagagaagaagcactacagaggagtgcgacagagaccgtgggggaagtttgcagcgggagatccgggacccgaacaagcgcggctccagggtgtggcttgggacgttcgacacggctatcgaagccgccaaagcctacgaccgagccgcgttcaggcttcgcggctccaaagccatcctcaacttccccctcgaagccggcgccgatgaccgcaaacgccaaagggaagagaaggtggagccggtgcttgaagtcgtcaagagagaaaagataggggaatccgacgttagtcttattaagaataatcctttaacgccgtctagttggttagggttctggggtagtgatgcaaacggaatattcaccgtgccgcccttgtcaccgttatctccccacccggcgttgggttttccacagcttatggttgtgtgaaatcatttttttttcttctttccttgtcgaatatggagataatttattcatttatttattatattgaaaaaaaaaaaaaaaaaaaaaaaaaaaaaaaaaaaaaaaaaaaaaaaaaaaaaaaaaaaaaaaaaaaaaaaaaaaaaaaaa

SEQ ID NO: 26607 - DNA, 403 bp, Glycine max
  Clone ID: TF_7591397
agcgatcgactcatgtctgttgctcttgatccttgtgtcacatgtttccacgacatattgttcttgtttggttttggtaccttttctgttgttgacaagattctgaatccgcgaagcgagaggggaatcaagggacacacgtgtgatgaagttggtgcgagtgttggatccacgaaggaggcatgcagcttcatcataagcccttgctgcttcctctgctgtctcatatgtgccaagccacattcttatcttttgtgttgtgtctttgatctcagcaacccatttccctgatgctctttgcctcaccccaacatacttgcttgtggttgtgttgttgttgtatctccctgtgcctccttttgatgtgcttgctctcaagtgcttctttggatgctggaattga

SEQ ID NO: 26608 - DNA, 1124 bp, Glycine max
  Clone ID: TF_GmC751_1
ccgcgcgtatctccctgcgcctccacacaacaaacaacaacctcaccattcttaacttcactcacttacaaatcacaatgacacaacaagcaacaacctcttccgaaacaacaacttcctcttcttcttcttcttcctcctcctcctccacattttcaccctcgcagcattcgggcccaaaggcccaggcccagaaacagagcaagaggcccagggactgcagcaagcacccggtgtaccacggcgtgcggaagcgcaactggggcaaatgggtgtccgaaatccgcgagccacgcaagaagtcccgaatctggctcggaacattcgccactcctgaaatggcggcgcgagcccacgacgtggcggctctcaccatcaagggcgagtcagcaatcctcaatttccccgaaattgcagacctgctccctaggcccgtcacgtgctccccacgtgacatccagaccgcggccacggccgcggcctccatggttaagttcgaccctgtgacacaatcctcagactcggagactccagagtcttcggagctgagcgagattgtcgaacttcccaacattgaagacagcagcgttgactcgacaccggagttcgtcttggtcgatgttgttgacagttgggtgtttcccccaatgggaatgggttcagagggaatcgagttctgtgccgctttttctgatgagttatttccgcaacagagttttattggttccgagatagagatactacccatttgggattgaatggtgagtgggattcatgtgccttttgctcgcttcacgtgggattggcaaatactagcattcatggctgttttgctgtcaatggtccagggccacttcaatttactctctactgtgtctgtgtgcactatatttttcacactgttacttatagttatagttagttagccttagcatttagcaagttccattgtcttcaacttcaatccctttcttccttccttccttccttctaccgagtaatttcctctgttttatacaagtagaaacagaaaatatgtgaatgcctaataaatttttaccacattaccttactgtacagaagaactatagtgttttttaagaatgttcccaaattttccaact

SEQ ID NO: 26609 - DNA, 945 bp, Glycine max
  Clone ID: TF_GmC751_2
caccattcttaacttcactcacttacaaatcacaatgacacaacaagcaacaacctcttccgaaacaacaacttcctcttcttcttcttcttcctcctcctcctccacattttcaccctcgcagcattcgggcccaaaggcccaggcccagaaacagagcaagaggcccagggactgcagcaagcacccggtgtaccacggcgtgcggaagcgcaactggggcaaatgggtgtccgaaatccgcgagccacgcaagaagtcccgaatctggctcggaacattcgccactcctgaaatggcggcgcgagcccacgacgtggcggctctcaccatcaagggcgagtcagcaatcctcaatttccccgaaattgcggacctgctccccaggcccgtcacgtgcgctccacgtgacatccaggctgcggccacggccgcggcctccatggttaaattcgaccccgtgacgcaatcctcggactcggagactccggagtcttcggagctgagcgagattgttgaacttcccaacattgaagacagcagctttgactccgttgactccagaccggagttcgtgttggtcgatgttgttgacggttgggtgtttccgccaatgggaatggggtcagagggaatcgagatctgtgccgctttttctgatgagttgtttccgcaacagagttttgttgatgagatagagatactacccatttgggattgaatggtgagtgggtgcgtctttggtttttttactaaattagacttggcttaatttgggatcaccatcatatgctctcaagtctcaaattgaattcgctcttcacttccaaacatgtgggattggcaaatagcattaatgggtgtttggctatatttgctgtcagtggtccaagggtacttaaatttactctactatgtcagtgtgcactatatttttcacaaaaa

SEQ ID NO: 26610 - DNA, 1104 bp, Glycine max
  Clone ID: TF_GmC289_3
attggggtttgaaaagaagccggtgctgtctccttgttctccatcgtaagatataactaattatttttatatcttcatcaagatgcgccgagggagaaccgccgccgccgctgccgccgttgtggatcccacgccggaccaggccaaggagacgacgcggttccgtggcgtgaggaagcggccgtgggggcgattcgcggcggagattcgagatccgtggaagaagcagcgcgtttggctggggaccttcgattccgccgaggatgccgcgcgggcctacgacaaggctgcccgatccttccgcgggcccaaggccaaaaccaatttcccccccttccccggcccggcagaggcggaccaccactcgcagattccgctctaccaggcccatgggctttccaccaagttcgagcccgtcgtccaggtgaaccggcccacgagcagcggcatgagcagcaccgtggagtccttcagcgggcctagggttccctcctcctcctctcgcgctaagccccttgttgtggttgttaaccctatcatccctctcaacgacgacgaagacgattgccacagcgattgcgactcttcttcctccgtcgtcgacgacggccaggactgcgtcctcatctcctccttccggcaaccgctgcccttcgatctaaacctcccaccatccgatgccgacgacgacaacgacgacgacctgccggccaccgcgctgtgcctctgatgatgaagaagaagaagaagaagaagaacctcttctcggtataatcatcattttcttcttgttgttgttattgttgttgttgttgttcaccatctctggtttaattaattaattaaaagttgttagattgtgttgtggtgttgtagagtaatattataataggcatgaatgtgttgttgtaagttatttggatccattactgtgtcatagcattggacctgatctcaaaaactggttggtgcttatgctttcttcatggatctgcttcttacccttacccccaattagaacttactcttttcttttttttttgttgttgttgttctgtacaaaaattatggctatcagatcatagaataaattacattctaatc

SEQ ID NO: 26611 - DNA, 2116 bp, Glycine max
  Clone ID: TF_GmC88_1
ccacgcgtccgtataaatcaactcatcaccttctctttctctctctcccacgcgcccgctcaaaaccagcaaccccaccttgcatgcattcaagtacttcttctttgtaaccaaactaaaacctcttgatttattgtttcatttaatcaaatagtagtaataatatcaccaccgcaccgacatggagtagaagtagctcttcattcaaagagtaacgcctctccagagactagtacttcattttgcaccattgatatctcaaatggctcgtgcttcgactaactggctatcgttctctctctcccccatggaaatgctccgaacccccgaacctcagttcgttcaatacgacgccgcttccgacacttcctcgcatcactactacctcgacaacttgtacaccaacgggtgggggaacgggagcctcaagtttgagcagaatctgaaccacagcgacgtgagtttcgttgaatcgtcgtcgcagagcgtcagccacgcgccgccgaagctggaggattttctcggcgactcctccgctgttatgcgttactccgacagccagacggagacgcaggactcgtcgctgacgcacatctacgaccaccaccaccaccaccaccaccaccaccaccacggttcttctgcgtacttcggcggtgaccaccaggatctcaaggccattactggattccaagctttttcgactaactctggctccgaggttgatgattctgcatccatcggaaaagcgcaggccagcgagttcgggactcactctattgagtcctccggcaacgagttcgccgcgttctccggtggcacaaccggaaccttgtcgctcgccgttgcactgagctccgagaaggccgttgtcgcggcggagtccaatagctcgaagaagatcgtggataccttcggccagcggacttctatttacagaggtgttactaggcaccgatggacaggaagatatgaagcgcatctatgggacaatagttgcagaagggagggtcaagccagaaaagggcgtcaagtttatttgggtggatatgataaggaagaaaaggccgcgagagcttatgatttggcagctctaaagtactggggtcccactgctaccaccaacttccctgtttccaattattcgaaggaagtggaggagatgaaacatgtaacaaagcaagaatttatcgcatcattgcggaggaaaagtagtggtttctccaggggagcttccatatacagaggtgttacaaggcatcatcaacagggtaggtggcaagcaagaattggccgtgtagctggaaacaaagatttatacttgggaacattcgcaaccgaggaggaagcagcagaggcatatgatattgcagccataaagttcagaggtgcaaacgcggtaaccaactttgagatgaatagatatgatgtggaagctataatgaagagttctcttccagtgggtggggcagcaaaacgcttgaggctttcccttgaatcagagcagaaagctcctcctgtgaacagcagcagtcagcagcagaatccacagtgtggtaacgtgagtggtagcatcaatttctcagccattcatcagccaattgcttcaatcccttgtggaattccgtttgattcaacaacagcatattatcctcacaaccttttccaacattttcaccctaccaacgctggtgcagcagcgtctgctgttacttctgccaatgcaaccgcactaactgcactgccagcatcagcagcaactgagttctttatttggcctcatcagtcttattgatctaatcaaaactagaatcaaaatctttttctaatttcctggttatgctaacaaatcaaacgccatagtctctggcacagtttagctgaccccccctcctctattattaacctaaactaaaaaaggaaaaagaaaaagaaaaaaaagaggaggtttttgagttggctagtcttggttacagtaggaagctggatatgtaactaactgcttaagaaatgagaaatatttcgtgcatcataattttgcacaagaatttcctcaatggcttagcttgcagcattagtatgatcgcttttgtttaaaaaaaaaaaaaaaaaaaaa

SEQ ID NO: 26612 - DNA, 381 bp, Glycine max
  Clone ID: TF_LIB3106-046-Q1-K1-E9
aataggcgtttgaaaagacacttgtgctgtctccttgctctccatcgtaagatgtaagaaggatgaagacatgtctcgtggttattcaattacagagattactaaccatcaataaaataaatgtgaatctcacattaaacatcaccgaagtgataacgctgattccggtcactaagaccaaaccgtgggggcgattcgcggcggagattcgagatccgtggaagaagcagcgcgtttggctggggaccttcgattccgccgaggatgccgcgcgggcctacgacaaggcatcaaggaggctcaccctacccaaggccaaaaccaatttcccccccttccccggcccggcagaggcggaccaccactcgcagattccgttct

SEQ ID NO: 26613 - DNA, 593 bp, Glycine max
  unsure (1)..(593): unsure at all n locations
  Clone ID: TF_6846032
aaccgnngagagganngcatcatacatacgcanngacgatnnncgnnnnaaatgatctttttttttcacagcaatatactaatcaaagcnnntaaccaatattgagtcccctttctttcagcatgcagattggggcatgttgaaggagcctaattcggatattttgtttgaatcattttcaagcaaaggagttgatcatgaccctttccatgattgtctttcctttgatatgattgataactcaagggatccacaggaagaaagtcatcatcaagtgattgaagaagctatgaaaacaaagaagaagtcttatattggggtaagaagaaggccatggggaagatttgcagcggagatcagagacacaacaaggaagggtataagggtttggcttggaacgtttgatagtgctgaggaagctgcattggcttatgaccaggctgcattttccatgagnngctctnntgcagtgctgaattttccggtcaaaagngtcaaagagtctttacaagagatgaactattctggttgcagccgaaggtgctctcctgcattagaactcaaagagaggcacaacataagaagaaaanngt

SEQ ID NO: 26614 - DNA, 1895 bp, Glycine max
  Clone ID: TF_GmC877_1
gtttacttcagtccaaactgaacacactactcagaccgataacgaacaagaactctactattactattaatcaaccaaaatctctcttcactccaaacagaacacactagcgagaaaaaaagtgataagcccaaaaactctgcgttctctcacaaattaaacagcgtcactatcgcatagtgattgagttttgcggtgtactgtgttgcgaagtctgtgtatcagatttgtggacatgggtgcttatgatcaagtttctcttaagccattggattcttctagaaagaggaaaagtaggagcagagggtatgggactagatccgtggctgagactattgcaaagtggaaggaatacaacgaacacctttattctggcaaagatgatagtagaacaactccaaaggcaccggctaaaggttcgaagaaagggtgcatgaaagggaagggaggacctcaaaactctcagtgtaactacagaggagttaggcagaggacatgggggaaatgggttggtgagattagggagcccaatagaggaagcaggctttggttgggtaccttctcttctgcccaggaagctgctcttgcctatgatgaagctgctagagctatgtatggtccttgtgcacgcctcaattttcccggcatcacagattatgcttcttttaaggaatcgttgaaggaatcttcgatggccgcatcgtcctcttgttcttcggcagaaactgcaacatctgacactactactacaacatccaaccaatcggaggtttgtgctgttgaggatgttatcgagaatcctcgacttgtcaatgtgaatgataaggttaacgattgtcataaggcttacgtatctgcctcaccaactagtagaatgaagcaagagcctaaggatgaggctgtggaccacatggacacaggggctggggaaattcaagatgtcggactagaaggaacacatgatactgggcaggttgcagagaatgtaaataaagatcagatggatttgtcatggattgatggctttgactttattgacgattacttgaagagcttttccgcggatgagttatttcaggtggatgaacttttggggcttatagataataacccaattgataactctgtgttgatgcaaggtttggattttggacaaatgggttttcctggagatggtaatcctcaggttgacgatactccttcaagctttatttatcagttgcaaaatccagatgccaagttgttaggaagtttgccccatatggagcagacaccatcgggtgttgattatggattagatttcttgaaaacagtggagtcaggggattataatggtggaggggaagaaccgcgatttcttaatttggatgatgatctgaaccctgattcaaatggcatgcaagcaaggaaggatgactagagaaggcgacgtgcataagtctatcatctgcctcattttcaactggttcgagcatctgctagtaatctgtctcttaggttgttgtcccctttttagctatatacaggtgcataagaggaatacaactatacaactaatacaagaaatttgatttgtttatgttcttttaatatgctaattctctgtaagattttttaaaatggagaatttagctgtgacaatatttgttaattctttttacttacatgttttttgggattcaaattggactgcctttaactacataggtggagctgaggagtagactgtttgaagtcgtttggctgactatagttgagcactgatttggatacaaaatttctttgttatgtaccatggagaactattatatctcgagtatattatatcgttgctcactttttgtgtataaaaactgaacaagtagtggaatgtatatatatataataactattct

SEQ ID NO: 26615 - DNA, 1346 bp, Glycine max
  unsure (1)..(1346): unsure at all n locations
  Clone ID: TF_GmC122477_1
gaacatctctgtctctctctcctctttcccgccaacctcactctataacaacatttctctctcttccttacccctggaataaccaccctagcaaattactaccatcatcttattttttcttcatcatccaccactctatttgtcacttgctttcatgcaattaacacttctaccaccttttttcattttctcactctcttcactaaaatgagtgacacacaccaacctttcatgtccgtacaaccacccatgaagctccaccacccctttaacccacaagcctcaagctcaaattttgacggcgacccaccatgcaaaaccgccggaaaaaccaaaccacctcacacgaagctactccgggtcattctcaccgaccatgacgccaccgattctgactcctccggtgacgacgacgacccaaaaaacccaccgaaacacaaaaaggtgaaaagacaaatcacccacatcaccataaaccttccctctttctcagaagccccaactccagcaccaataccaacaccttcttcgtcttcttctattgatccgacccgtttaaccctacccaagaaacgacccgccgtgcctcgccgccgtagcaagttccgcggggtccggcagcggccatggggacggtggaccgcagaaatccgtgacccgaatcagagaaaacgggtctggctcggaacgttcgacacggcggaggaagccgccgccgtgtacgacgacgccgccttgaagctcaagggccccaacgccgtcactaacttccccctctccgccgccggaaaaacggaacatgataccgcgccgccggaggcggctttctccggcgaaggtttttcatctcccacttccgttctcacttactttgacggagactcgacgccactttacggtttccgttacggcgaggtcgacgcgttcgggtttgacatcgatgcgccgtttagtttgacagacgttaacttaggggtgctgagtcagcggttcgggaaggaagatttcggcgagtttgacccggacgagttcttgacgtggccgagttaaggggcgtatttatcatttcgaaaaaaatacagggaatgtttagtaattctaatgaagtttttttgtcgtattctgcattgaattccgaaactaccctcgtgactaagtttttgtgcagcttagtagagtgttagagagcaatagagtgatccaagtagtagtagagaattttgtcctatgttaatttgtgtaattaattgtattgttatggagaaagaggatatgatggaaagtattagaatgattctcttgtagtttcttatatnnttttataaagtaaagtattagaattaatt

SEQ ID NO: 26616 - DNA, 1316 bp, Glycine max
  Clone ID: TF_GmC280_1
taagaaaagtagaaaactacacttttgaggtccattctcaatcttgttaatatatttttgcgcagatgaagatcaagagaaggaggcgtcatgctaccttccttcaaccacaaaccctctctccctctaccacccattctcttttctctctctttctttccccctccctctctcacctactcaatctcatcaccaccaccatcatcatcatgatcttctccaatctctataaccttcaatcactcaaaacctcaccattaaaccaaatgagttgacccatttgtgagaacaattctccctaagaaaaggtcaaaggctgcaactttttcttaaccaatctcacaacattttgcaacgttttttctggttcggtttggttttctgggtcgtcttggaattcaaaaaagattccaactttgaagatgggtaggggcggaaccgccgcggcggcggtggagatcgccgaacccggttcaaggccggtttttttcaaagaaccgcgttataggggcgtcagaaaaagaccgtggggccggttcgccgccgaaatcagagaccctttgaagaaagccagggtttggctcggaaccttcgacaccgccgaggaggcggcgcgtgcctatgacacggcggcgagaaccctccgggggccgaaagcaaagaccaatttcccactttctccgccgttctaccaccccgatccgttttccgatcaccggtactttgacggcgctggcgccggcgaagatttccaggatcaccggcgacccacctccagtggtatgagcagcaccgtagaatccttcagcggcccacgcgccgccgtgccggcgaaggcgccggtgattgtcaaccggagatatccccggacgccgcccgtcgttcccgaggactgccgcagcgactgcgactcgtcgtcatccgttgtggacgacggagacggcgacaacgtggcgtcgtcgttccggcgagaaccgttgccgtttgatctaaacgtgttaccgttggacgatgctgacgtggcaaccgatgatctgttctgcaccgttctttgcctctgaagagaagaaattgaaaacggcacgaaatgatgtatttggttcgttgaaggaaaggaattattaatttttttctatttttactctttattatctacttgaatatttttttatctttctctttttccccacttattttaactatgcggagaaaaatgaaaaagaaaaatatgattgatgatcagttatgaagattatggtaatatgatcttaatttctgtgaaaagtaaaacttcagggtattgtttcaaaaaaaaa

SEQ ID NO: 26617 - DNA, 1096 bp, Glycine max
  Clone ID: TF_GmC319_1
tacggctgcgagaagacgacagaaggggaacacaatactcctccacccgtcctctctttaccttcttaacgcaccaagcgaagcgaaaagcgctttctaacttaagtgatggcgaacgcagctgaagtttcagccttgaaccgcatcaaactgcatcttttgggtgaactctctccactggccactcccctaaactattttgatgaatcaaaccctagcccctctgaatcttccaattcccaatcttcttctgtttctcttaaccactacttcactgacctcttcgaattcgactccaaaccccaaataatcgacctccaaactcccaaaacactaacttcagctcagaagaaacctcaattgaatcggaaaccgtcgctgctaatcgctgttccaaagaagaccgagtggatccagttcgggagcccggatccgaacccggtgatggctgcgccggagaacctgccgcagaagaatcactacagaggtgtccggcagcggccctggggcaaattcgccgccgagatccgcgacccgaacaagcgcggctctagggtttggctcggaaccttcgacaccgccgtcgaagccgccaaggcctacgaccgagccgccttcagactccgcggctccaaggccatcctcaacttccccctcgaagttagcgccgtggcggagaccgtctccgtcgccgccgccgaaggcaacgtcgagagaaagcgccgccgcgaggaagaggaggtggtggtggaggaagtaaagccggtggtgaagaaggaaaagataacggaacaggatgtgagttgttttagggggatgccgttaacgccgtctatgtggaccgggttctgggacagtgacgtcaaggacattttcaacgttccgccgttgtcgccgttatctccttttggattttcaccgctcgtggcggtgtgaaatttctaatttagcactgcgttttttcgtgtttaagttacagcgtcctgtatggggatgagtacagtgtacatttgacgaatttgttaattcaacaatcttttattcacttttatttgctgaaaaaaaaaaaaaaaaaaaaaaaaaataaaaaaaaaaa

SEQ ID NO: 26618 - DNA, 1206 bp, Glycine max
  Clone ID: TF_GmC286149_1
atgaaattaagtaatatccagctttccatcacattgtgagagctgaaacactttctgctcctcttgtctctttttgatatatcttcatcataatttctccaactcacaccattttgtttaataaaacttgtgatggaaattcaattccaacaaccaaacctgcagcatcagaaatcaggcattgcaatcaccaaaggtggcaagttcaaagggagaagcagaaacaacaacaccaacaaatttgctggggtgagacaaaggccctcagggagatgggtagctgagatcaaagacacaactcagaagataagaatgtggcttggcacatttgagacagctgaggaagcagcaagagcctatgatgaagccgcgtgccttcttcgcggatccaacactcgcaccaacttcatcactcatgtctccttggattcccctcttgcttctcgaattcgaaatcttcttaacaacagaaaaggtatcaaaaaagaggaagatgctaatgctaatgctaataatgcacctgccccaagagttagcactactagcagtgctactagcactggtactagtagtaattcaagcaatggaaatgacaacaatgaccagtctctttctaccgtaacaactcaaagttcaaatctgtttgatgatgcctataaaccagatttgagcaattgcagggaggagtttgagtcaggtcatcagtccaatacttcatggtgttttggacctgtctttgatcgtttccctatggctcaaatattcgatataccaaagattgatgatggcctcactaatgcagctgatttggatctttcagaatttgaaagaatgaaagttgaaagacaaatatcagcttcactctatgcaattaatggggtgcaagagtacatggaaactgttcaggactccaatgaaactctctgggatcttccacccttatgctcattgttctgttaatcttgaaggtttaaatgatcctgcaattattccttctcaatgtcctatttattttactattattgaagatttgaggaaggggtgtgggatctaaggattgattgaaatattacaataacaatatagctttggtgagatataattttgtttttctaactgcttaatgtcagcaggaagatccatgagttgcattttgtgaaagctctttttcaatcattattatgtaaaaagtctaagcagttagtt

SEQ ID NO: 26619 - DNA, 458 bp, Glycine max
  Clone ID: TF_7590215
acgagaacactctatccctcgttctttctctctctctctctctctctctctctagccagctttggttagacaacatagttctgaccaacatggtgcaatcaaggaaattcagaggtgtgaggcaacgccattggggctcttgggtttctgagattcgtcacccattattgaaaaggagggtgtggcttgggacattcgagacagctgaggaagcagcaagagcatatgatgaggcagccattttgatgagtggaagaaatgcaaaaacaaacttcccagttggtgaaaaccaaatagtgggaaatcacagttcaaacacttcctcttcctccactacaacattgtctgcagttctgagtgcgaagctgagaaagtgttgcaagtccccttcaccttccctcacttgcctgaggcttgacactgagaattcccacattggtgtgtggcagaagcgagcg

SEQ ID NO: 26620 - DNA, 646 bp, Glycine max
  Clone ID: TF_LIB5119-054-A1-PF1-G2
atttcacttcacttcagtcaccttttccttttctctgatagaggacgaaacacgtttctctctctctcttttttttcctcatcatcatggccagaccccaacaacgctatcgtggagtccgccaaaggcactggggctcttgggtctctgaaattcgccaccctttattgaagactagaatatggctaggaacttttgaaacggcagatgatgcagcaagagcatatgatgaagcagctaggctcatgtgtgggccaaaagcacgcaccaatttcccatacaaccccaatgagccacattcatcctcatctaagcttctctctgccactttaacagctaagttacataagtgtcacatggcttccctttctcttcaaatggccaagcagaaaccaccacagaacaaagagcctcaaccatcacacgggtccaatccatttgcctctgccaatgccattgctggatcaagcgctgacacgagttttcgatggccagataatagacatgaggaattcaggtggcttgaagggaattgggttggtgttgaaggccaggttgaagtttccaatcaacagtttcagccagttcttgaagatgatcacatagagcagatgatacaggagttgcttgattatggatcaattga

SEQ ID NO: 26621 - DNA, 1424 bp, Glycine max
  Clone ID: TF_GmC1399_2
ggccggagtttaagtttatcttccaagttcacgtaccatcgcttttataaataccctcatccagtttcccttccaagttcgaatattcaattcaacaccttccctcattctcttctccaaacacgacacaaacattaagaagaagaaacataccacgaaatgtacggacaaagtagctatgagtccgatttggcccttttggactccattcgccgccacttacttggcgactccgaggagcacaaattcggagccccgaatgttagttcgggtaacactccagcgtactctcggagctcctgtttcagcaggttgtacccttgcttgagtaacgattggggagaacttcctcttaaggaagacgattcagaagacatgcttctttacggtgttcttcgcgatgcaataaacgcagggtgggtcccatctctcgatgcatcctcaccggagagtttctcgtcgggtttcatcccggcggtgaccgtgaaatccgaaccggatctatttccggcgccagagcctgtctatattcctccggcggctcagaaggctgagccggcggtggttccggcgaaagggaagcactaccggggcgtgcggcagcgaccgtggggaaaattcgcagcggagatccgcgacccggctaaaaatggggctcgggtttggcttgggacttttgagacggctgaggacgccgcgctggcttacgatcgagccgcgtatcgaatgcgcggctcgcgggctttgttgaattttccgctccggattaattcgggcgagcccgaaccggttcgagttacggcgaagcgggcttcagcagaaccgtgttcttcgtcggagagtggatcttgggtgaagaagcggaagaaggtggtgggttgagaacggggcacgtggagagcagttgttggtgaagttagttctttttctttgttttttctttgtctttcgatcgagacgttcggcgcattggtgtagccgaggatgcccttgagctgctgctcggaggcttcatcgccgcgttggattctaaaattggtattgtgtttattaaatacaaaaaatccaatactcttttgtaattatgtaaggtgcgtgtgtagtcctatacccatcatccaactcaatcttgcaacagagaaaaaaaaaaggtgaaagatgagacaggtgattttagtatatcaaatttcaaatggtgagtggtgaacccaccacgggaagaaaaaaattaaaagatgatgatgagtgatgacagaggtgaggatatgtaatttagctttgtgaatactaccaaatttgtttgttcaacattatgaattatgaatgggttaaatgtgacaaatgagttgaggccttaaaatcatgatccttgaggagcaaaagaaaatctaatcatatgtacctgttggaatgaacaaaataaa

SEQ ID NO: 26622 - DNA, 1265 bp, Glycine max
  Clone ID: TF_GmC31_1
ggcatcccggacccaaccacctactgcttcaaaaaattcttaaggatggccacagcagaagaaatttcaactttgaaactgttgcgccaatatctcttgggggatatttcagacccttttctcaccaatctcattccagtaaaacttgaagacccctcatcaggacttgatatgggttcaaacttctcagaacaaagcagcttctgcaagtttctggagtgctttgattttgaagcagaagtggtaggtctcacttctcatcataaggtccaaagctccattgcaacaagtccaccccagaatttcaattttccagaagaaccaatggtgtcaatgaaaaaggaagcaacatgttatgcaacaaggcattacagaggagtgaggagaaggccatgggggaagtttgcggcagagattcgcgaccccaaaaagaaagggagcagggtgtggcttggcacatttgacactgagattgatgctgctaaggcttatgattgtgctgccttcagaatgaggggtcataaagccgtgttgaatttccctctagaggctggaatgtctcatccagagcccaacagcagtggcaggaaaaggagaagagagtacacaacagctgccacaagttcaaggcatgttatgtcatgagaaataattcagtgtgggagaaccatgtttttcttttggcattttttgccagttacacaagttaaagcaaggttttatagttacactacagttgagcatgatgagatctgttatttaaatccttgagttatggttaagggtgaaattgaattaaacccaagaatgaaacagctcataaagaaacctacttctacttttttatacaaggctctcaaagtagaatgtgtgatagtcaccactcaccttagttcattagataatgaggaaaattcttattgcatcttaacttaaaatataatctcaggattactaaccatatcgatagtggcttgttttcatcatttactgtaatagtcagcttttttcacaaggataaggtattatgggatgttcagtggagtatttaagtggcttggctttcccttcttaattggcagctaagttataagggagggtttcccaagtgcttggatatgacaatgatttttgctttcctagttacttaattataattataggatttattagaatttatcatttcctattttttactcaaattttacttgtaaagaatgtacaacgacttgtgaatataaatgaggaaaataatcttgtctcct

SEQ ID NO: 26623 - DNA, 304 bp, Glycine max
  Clone ID: TF_6134020
gctccgagggagaaccgactgcgccgctgccgccgatgtggatcccacgccggaccaggccaaggagacgactcggttccttggcgagaggaatcggccgtgtgggcgattcgcggctgagattagagattcgcggaagaatcaacgcgtttggctggggaccttccattcctccgaggatgccgcgcggtcctactacacggctgcccatatacttgcgcgtgcccaaagccggatgcaattttctgccatcatacggcccgacagaggcgagaccaccactctcagattccgctctaccagg

SEQ ID NO: 26624 - DNA, 2342 bp, Glycine max
  Clone ID: TF_GmC56_1
ttgtctatatattatgggtaacactatctctaacgttttctctctttttggtcagagggagagtggggtgtgtgtgtttttgttgggatttgtgaggaatccattgaaggaggaagagtgggagatttatgtcgtcttggttttatttggaagtagtgattggagctttgttgaagctcgggttcggttacgcttgtatttgctgcatgctactctggctggtgttgaattctgctgaccagatgagtttgattttttaatttacttttgatttttctgttaacccagacacaggtgatagatcggtcataaaaaaatatattttgggacagaaaaatcttggccatagatttgtaatcttttcatctcaaaaaatttctcagtgtgttgtcactcaattcaccatcttctgtgcttgatttggatacatctgctttcaatttcagagggagagtagtgtgtgtgtgtgttttttgtttggatttctatgaggaatccattgaaggaggaagaacaggagatttatgtcgtcttggttttatttggaagtagtgattggagctttgttgaagctcgggttcggttacgcttgtgtttgctgcatgctactctggttggtgttgaattctgctgtttcgatgagtttgaggtcaaaaaggacatgttatggaattctggtttgttatggaggctttcagataaaaaaattctctgctttcttcctcctttggagagtggatctcacttgatgttcttgaaattatgagggattttttttttggtttattaaaaaaaattattttgttttgttgaacaatttttctgggtattttgaggggttttgacccaattttttttaccatggtggagcctcttaatcaatcgactcctaggacgaaaaaaatgaaacacaagcgaaatccgattcatgactcgaaaatgacgaggaaactgcgcatcatttgcaatgatcctgatgctactgactcttcatctgatgaggatgagtattttgggaatgttaggaagatgatcgagccgctcgagccgctcgagcggctcgaggttccggttaaccctgtggttgcagatgaaactagtactgagagcacaaacaatgatgaattgaaccagacgaagagggttatggcgaaaaccccctcagtgaagaggcaatcttgtgggaaatacaaaggtgttcggatgcggaaatggggcaaatgggccgcggagattcgtgaccctttcaagggcacgcgaatctggttgggcactttcagcactgcagaagaggcttctcaagcctatgagaccagaaggcttgagtttgaggtcatggccaaggctctatctgatgagaagagcaacaatggcagcagcaacaacaatgttgttgcttctgctgaaactgaaactgtggctgcccctgaaaataacagttcaaactattatgtttcttctgctgcaggttctgtatcagactccaagtctgcttctatggatgaatcagagagtgtgttgtcactcacatcaccatcttctgtgcttgaattggatacatctgctttcaatttgattgggagtggtaaggtttcaagcaatgaagttgttgagactaaaggattggaggctgaagttgctgagactaaaaatttggcagctgaatttgccgagctggaaatgctggaaatgccggatttgagtatgctgaatgtgccatccccatctgctgtcgctgctactgctgccgctccatctgagtttgaattggatttgttggcatttgttgattccgagtatggatttcatgatgagcatgactttgatgatgatcttgctgccctggaagactttcacatttgcggtttcgatgacaatgagcctagcgagcttcccgattacgattttgacgactttggtgctgatgagtttgctggttggattgaagaacccctcaatataccttgcgtatagattttgcagcttcataggaatgagttctatccaagagactagtactactacaacattacaagttgtgtcattgcttaaaaatgctatagttttttgagatctcaggaaaaaactagttcctgggagagttgttttgtcaggtttgttttaatttatttgtttctttagggatggaagatcaatgagaggttaagagacaatgccttggtttttcttgtgctattagagccgtccaagggtttttcaatttctattatcgtgaaagttgagtgtgtagatgtctatcaaacttgaaatctactatctttatcagaaattctatggtatccttggaaaagtaccccgcagaaaaaaaaaaaaaaaaataa

SEQ ID NO: 26625 - DNA, 752 bp, Glycine max
  Clone ID: TF_GmC1684_2
tcgttctgctgcgagaagacgacagaagggtacggctgcgagaagacgacagaagggtacggctgcgagaagacgacagaagggtacggctgcgagaagacgacagaagggagaacaagaggaacagagaatgtaaagaaggaggagggaaggagaaaatatagaggggtgaggcagaggccgtggggaaaatgggcagcggagataagagacccattcaaagcagcaagagtatggttaggaacatttgagacggtagaggcagcagctagagcctacgatgaagctgcccttcgttttaggggcagcaaggccaaactcaacttccccgagaatgtcactctccgacaacctcaattcactgtttccacatcaacagacccatttcaactctcgggtaccaacctttatgatcataggatgtttctgacttctaataccatggcttctcatcatcttcaatcttctttgccgctgccaccagcaacctcctcttctctaacttctcctcctcagaacatcacttcactttcttccttgtattctgcccagttgcccccatggtcggcctctggtcatagctcttcttcctccccatgatccttttttgtttctttgtttttattgagtctatattttcccgtcttttatcgtatctctccatttttttcaaacactaattaataataataataataattattcctctacaaaaaaaaaaaaaaaaaaaaaaaaaaaaaaacgccgttaga

SEQ ID NO: 26626 - DNA, 845 bp, Glycine max
  Clone ID: TF_GmC78516_1
aattcggctcgagcgaagacgcttcacgaacaagtttgaagcaatctccatccatatcatggctagaccccaacaacgctatcgaggtgtccgccagaggcactggggctcttgggtttctgaaattcgccaccctcttttgaagactagaatatggctgggaacgtttgaaaccgcagaggatgcagctagagcgtacgatgaagcggcaaggttgatgtgtgggccaaaagcacgcaccaatttcccttacaatcccaatgagccactttcatcttcatcgaagctcctctctgctactctgactgcgaagctacacaagtgtcacatggcctctctttcccttcaaatgagcaagcagaaacaatctcagacagagcctcatcaaggatcatccagcgactcaggcaatgccattgcgggaacaagttcagacaacaccggctttagatggccagaagaggaagcacaagttgaagtgccaccagcacaacagcaacaatttcagccagttcttcaagatgatcacattgaacagatgatacaggagctgcttgattatggctcaatggagcttagttttgttgactcagcctaagctctatattataaattaacaatgcagaccccttttcagggagagggattctactatttactaatgcgccatgtaataaaatatagcgagctttagaccttagtaccataggataggagagtttcaccatgagtttcaattaatggtcaagcatgtggaaccagaatgtaatcaatcatacaaaaaacaacgcatgcatatatggtgtggactatattatagtagataccattagtaacatcaaaaa

SEQ ID NO: 26627 - DNA, 1230 bp, Glycine max
  Clone ID: TF_GmC1816_2
tttactacctccacaccccagtttctccacatacaccccctctgcctacttattggaaaaccaagagagaatagagggagttgaggaacaaccaagttcccttctcgggctcaaccacctaagcacgtctcagatttcccagatccaagcccaagcccaagcccagaactcgctctctcttaatttcttgggcccgaagcccgttcctatgaagcacgttggtgggccggcgaagcccacgaagctgtaccggggcgtgaggcagaggcattgggggaagtgggtggcggagataaggctaccgaagaaccgaaccaggctttggctcggaaccttcgacacagccgaggaagccgctttggcttacgacaaagccgcgtacaggctccgaggcgacttggcgaggctgaacttcccgaacctgaaaggctcgtgccccggcgaggagtacaagcctatgcaggctgcggtggacgctaagctcgacgcaatctgcgcgaacttggcggaaatgcagaagcaagggaagaacgagaagggtgccaggtcggggaagaagtcgaagcaaggtccgaacctggaggcgaagcccgaacctgaagcttcgggttccggtgctgctgctctgtctcctgaaagtgagggttctgcggattcttctgctttgtctgatcttacctttgatgtaaccgagccgcaatgggaggatgcttcagcacattttaatttgcaaaagtttccttcttatgagatcgattgggattctctctgaagactctttgtttttttatttttatgtctagtcttgtgggtaattaataatttagttataattaggattgctcttgtggctgctgcaattgagtttttgaagattgcagtgctacttgtaggatttggattatgttagtcttttttctttttcttttttttttttaaatttgcttattggctattcgatggtcaatatgatgtaaatctctctaccttggtcagctggttttttttttcttgcttggccatggagaatgattccgggttaggtctttgtctatgttttagtgttcgtccaagtactattattgatgtaattcaattctatttgtatctcaatttatgaatgtatttgtatttcagcttacatattgtactagtttgtttcacattttggaccatgtggtagttgtgtttggttcttgtatgaacaatcgattttattttctttgtggc

SEQ ID NO: 26628 - DNA, 621 bp, Glycine max
  Clone ID: TF_uC-gmflLIB3275P137g09b1
cccactcggctttgacgcgtgggcctcaggaaggtgggtggctgagatcaaagactcttctcagcacgtgaggttgtggcttggaacctatgatactcctgaagaagctgcaagggcttatgatgaagctgcaagagctctgagaggtgaaaatgctcgaaccaactttgcaccagtgagtcaactagtcaatggccaactgggtcaacaatcagggtttaataataataacaaccttctttcaactgggtctgatattgggaagcatggtttgagctttgcatccttgaaggccaagttgagcaagaatcttcagaacattatggctagggcaagtgatcacaacaacaacaacaacaacaagtcctcaaagagtagggtgagtgaccacttcacctttgccagcatcttccaccgtaggagttaccaaatccctgaaggtgacatgatgaagaacattgagaaagtggtgcagcctagtattattgtgcctcctatggaacaaagtggtggtgattataattcttgtgttgccaactgggaaagtgcttctagtgtctctgattgcagctctgagtgggtagggtttgggaataataattcgaaacctcggttggagtc

SEQ ID NO: 26629 - DNA, 1443 bp, Glycine max
  Clone ID: TF_GmC2485_24
catgattgacggtgcccttaattggtccctcttttccaaaccccaactgggtatcacaaagtttccaaattgaacgcaaaaacggaaatttcttcctcaaatgccttctgggtcgctcttctttgcatccagattacgaagtttttggtcgccagtaaggtctgtgattcaagtgctattttagcattttttttttttcctggacggtgagggtcaacttgcatgcacatgttagtgaaaaaccacaataagggggatggatctaagtccctcgccgatacactggcgaaatggaaagaatataatgcttggctggagtctaacaatgaagctgagaagccggctaggaaggtccctgccaagggatcaaagaaagggtgtatgaaaggaaaaggagggcccgagaactcacgctgtaactacagaggagttaggcaaaggacttggggaaaatgggttgctgaaatccgagagccaaacagaggaagtaggctctggttgggtacttttcccactgccattagcgctgctctcgcttatgatgaagcagcaagggcaatgtatggttcctgtgcgcgcctcaactttcccaacgttcaagtttcaactttgtctgaggaatcgtcgagaaattctccagctgctgctaaccggtcgagaaattctccagctgctagtcaatccggtcatgcgttgatgatattagagagttctgagtgcatgatattgccgaacaactctggtggagacgcagcagaggatgatgacatggaagacctttccttatccttaagtgtgaaacgtgtgaagcacgaggaaggggaggatgaatcagggaccagttcttcctatctttcattgtcttgatgtatgttccacatacactgatttggccgcggctagaaatcttagccttcatagcggtggatggattagcttaggatgaatggatcttgctattagtacctggagattagctgttgtaaaattcacttggttgagaagtgttccattcttctggaattgacctaatgcagctggatatcttgtcatgttgtaagatgtgaaatgtattctgccatgcatgatagatgactagtttcttgtgtctattttactttggataatgttatctagtctttgtttccctgctagtgcgggttattgaaatttctactactttccttgctaatgtaaatttctatttcaagtgctttggattagcaatggatggttaggttgtgctaggattggcaacccaattgcagtcacaacatcaagacttttagtctttgtagctgcattgagttcacaattgtagctgcctcagtcatatttatctgcagttttttgtaacaatgacttacgcatcttgtttaaccgactgagttagactaattcatgtatcttgtttaatcaactaagttagactctcttgacaac

SEQ ID NO: 26630 - DNA, 999 bp, Glycine max
  Clone ID: TF_GmC6701_1
ggctaaccacacaacctacgaaagcaacgaaacatcaaacttgtacggagcaatgagctctcatgctttaaacaccaatgtgaatgctcttgatcactttgagatacccgtaacgacgccgtttcaggacgtttctgcatcggtgccgtccatagcagcgttctgccggagttctagcttccggaacattttcttgacagagaattgggcggagctgccgttgaaggagaacgacaccaatgacatggtcatctacggtgctttgcgtgatgctgctgccaccggatggttccccgccaatggaaatgaggtgagtaatgttagtgtagctgtgaaaatggaaaatgagggtcaaaatagtaaaactacagccgcgcgtggcactcgcacgcctccaaagaaggggttgagctaccgaggcgtgcggaggaggccgtgggggaagtatgcggcggagattagggacactaagaggaatggtgtgagagtgtggcttggaacctacgaaaccgctgaggatgcagctttagcttatgatcgagctgcatttaagatgcggggctcaaaagctaagctgaattttcctcatttaattggctcggatcatgagccaattaaggttacgctaaagaaacattgaaacatttgtcggatgtttctttatagtgtcctttgtcatccacggtagccataaagcggagtaaagatagctccttgacagatttggagctggatatatgattcaaatatgtggcagttttcaatagacacgaggtggcaataataaaagggaatatatatatatatatatatatatatatatatatatatatatatatatatatatgaaatgtattactactatcttgccattcttatggcattgcagaagtgtgaggatagtttgtcatagtattttttttttcctttttctttgtaatatgaatagttgtatctcatgacaatgaaaataatgaagaatatataacaaattgatgg

SEQ ID NO: 26631 - DNA, 1554 bp, Glycine max
  Clone ID: TF_GmC400_1
aattcggctcgagcctctcaattctcaaacttgttacagataaaaaccctttcttgaaacctttctccaaaatttctcacaacccacttctactctactcattccacacccaacttacaaaaacccattcttttgctcactcattttcttaacgtagattaatcattatgtgtggcggtgccatcatcgctgacttcataccccgccgtggaggccgccgcctcacggcctccgagctctggccaaactccttcgccaaagacgatgactttgacttggattactcccacatcgctacccaacaaccctccactctcaaaaggtcccaacctcccaaagttagcgagcaggttgagaataagccggtgaagaggcagaggaagaatctctacagagggattcggcagcgtccgtggggcaaatgggccgcggagattcgcgatcctagaaaaggggttcgtgtctggttgggcacctttaacaccgcagaagaagccgcgagagcctacgatcgtgaagctcgaaaaatccgaggcaaaaaggctaaggtgaatttccccaacgaggacgacgaatattccattcaagctcgtaatccaattccaccccttcctttcgctccacaacaccctcccctgtaccagcaacagtaccgttgcgatctcaacaatgcccctaaaaatctcaactttgagttcggttacgacctgaaccacgcggaggcgttcccatcccgcgtggacgccgtcaacgctgactcggtggttgtctccgttgatgaaaattcggggtcagcgtcgggttcagagggtgcttattcgacaacggagttcatggggtccgttcagaacgggaacggttatttgggtggcacggtaatggagaagaaggagaaagagacagaggttattgaagctgaagaagaaaagaacaaagtgctggagctttctgaggagctgatggcgtacgaaaattacatgaagttttatcagattccgtactatgatggacaatccacgacgaataatgttcaggaaagcttggttggggatctctggagtttcgattagcgaggaatatatcaaggatgttcttttcatgcatgtgttttgtttcttcgtcaatgctgtgaaagcttttgctttctccctccattctgctgactaaactaacatctctggcgttttggcagggatgcacaggaatttaaattgagtgcttcggtagaaatggtctcattagttagtgctatgctatcatctggttttgttgaattgtaattttttgttttggtggtatgttgaacagtaattttactggatatattcaagtctatttgaattccaattccaattattctttcagtgaattttataccttaattcgaattcctagttgtttatgaaaatgtcgtctccatccctaattcgaggatggagaacagtcaagagcatgactcgggcaagcattaccgcgtgaggtcctacaatgggaataatattccaagcatttttggttacgcgccggaaaaaacatttaatatactgtctcgac

SEQ ID NO: 26632 - DNA, 1415 bp, Glycine max
  Clone ID: TF_GmC400_2
taggctgcgagagacgacagaaggggacgtcctatcgctctcagacttgtgttacaaacaaaaacccttcttcaaaaccttttctctaaaatttcccacaacccatttctactctctactcattccacacccaactcacaaaaaacccattctttcttttgctcactcattttcttaatcatgtgtggcggtgccatcatagccgacttcattccccgccgtggaggccgccgcctcacggcctccgagctctggcctaactccttcggcaaagacggtgactttgacttcgattactcccacatcgccgatcaacaacgttccactctcaaaatgtccccacctcccaaagctagcgagcaagtggagaataagccggtgaagaggcagaggaagaatctctacagagggattcggcaacgtccgtggggaaaatgggccgcggagattcgcgatccaagaaaaggggttcgtgtctggttgggcaccttcaacactgcagaagaagccgcaagagcctatgatcgtgaagctcgaaaaatccgcggcaaaaaggccaaggtgaatttccccaacgaggacgacgaatattccattcaagcacgtcatccgattccaccccttcctttcacaccacaaacacaaaaccctcccctgtaccagcaacagtaccgttgcgatctcaacattgcccctaaaaatctcaactttgagttcgggtacgacctgaaccacgcgggggcatttccgtcccacgtggacgccgtcaacgctgactcggtggttgtctccggcgatgaaaattcagggttagcgtcgggttcagagggtgcttattcgacaacggagtttatgggatccagtcaaaacgggaacgggtatctgggtgttaccgcaatggagaagaatgagaaagagacagaggttattgaagctcaagaagaaaagaacaaagtgcaggagctttctgaggagctgatggcgtacgagaattacatgaagttttatcggattccgtactatgatggacaatccacggctccaccgaataatgttcaggaaagcttggtcggggatctctggagttttgattaacgaggaatatatcaaaggatgttcttttcatgcatgtgtttgttccttcgtcaatgctgtgaaagcttctgctgactaatatctttgcgttttagcagggatggacaaaaatgtaaattgggtgcttcggtagaaatggtctcatgattttccgactttttttttttttttttaccaatttatttaatattaatttatttgtttctagaacttagggctatcatctggttttgttgaattgtaatttttcttttggtggtatgtcgaactgtaattttactagatatattcaaccgtgtttgaattccaatttttctttc

SEQ ID NO: 26633 - DNA, 1094 bp, Glycine max
  Clone ID: TF_GmC319_2
ttttacggctgcgagaagacgacagaaggggaacacaatactcttcaaacactttaccttcttcttaagacaacaagctaaaagcgcttctaacttaagtgatggctaacgctgctgaagtttcagcgttgaaacgcatcaagttgcatcttttgggtgaactctctccactggccactccccaaaacaaatttgaccaaacaaaccctagcccctctgaatcttccaattccgaatcttcttctatttctcttaaccactacttcactgacctcctcgaacccgaaattgaatttcctctcttcgaattcgattccaaaccccaagtaatcgacctcgaaaccccgaaaaccctaatttcagctgagaagaagcctcaatttaatcggaaaccgtcgctgctaatcgctgttccgaagaagaccgagtggatccaattcggaaaccctgaggtggcggcgccggagaaccagcctgagaagaagcactacagaggtgtccgtcagcggccgtggggcaagttcgccgccgagatccgcgacccgaacaagcgcgggtctagggtttggctcggaaccttcgacaccgccatcgaagccgccaaggcctacgaccgagccgccttcaggctccgcggctccaaggccatcctcaacttccccctcgaagttaacaccgcggcggagaccgtctccgtcgccgccgtcgacgtcgagaggaagcgccgccgcgaggaggaggaggtggtggtggaggatgtaaaggcggtggtgaagaaggagaaaataacggagcatgatgtgagttgttttagggggatgccgttaacgccgtctatgtggaccgggttctgggacagtgacgtcaaggatattttcaacattccgccgttgtcgccgttatctccttttggattttcaccgctcgtggctgtgtgaaattccaatttaggactgcgttttttcgtgttttagtacttacagcgtcctcctgttcagggatgagtacattgtacatttgacgaatttgtttattcaacaatcttttattcacttttatttgctacatagggccctgaatttttttgaagtttg

SEQ ID NO: 26634 - DNA, 1210 bp, Glycine max
  Clone ID: TF_GmC2485_15
attgacggtgcccttattaattggtccctctcctccaaaccccaactgggtatcgcaaagtttccaaattgaatgcaaaaacagaaacttcttcctcaaatgccttctgggtcgctcttctttctatccagattacgaagatttcggtcgccagtgaggttgtgattcaagtgctattttagcatttttttttacctggacggtaagggtcaacttgcatgcacatgttagtgaaaaaccacaataagggggatggatctaagtccctggccgatacactggcgaaatggaaagaatataatgcctggctggagtctaacaatgaagctgagaagccggttaggaaggtccctgccaagggatcaaagaaaggatgtatgaaaggcaaaggaggacctgagaacttgcgctgtaattacagaggagttaggcaaaggacatggggaaaatgggttgctgaaatccgagagccaaacagaggaagtaggctctggttgggtacttttccccactgccattagcgctgctcttgcttatgatgaagcagcgatggcaatgtatggtttctgtgcacgcctcaactttcccaatgttcaagtttcaactttttccgaggaaccgtctagaaattctccagctgctgcttaccagtcaagaaattctccatctgctaaagaatccggttctgcgttggtgatattagagaggtctgagtgcatgatgttgtggaacaattctggtggagatgcagcagaggatgatggcatggaagacctttccttatccttaagtgtgaaacatgaggaaggggaggatgaatcagggaccagttcttcctatctttcattgtcttgatgtatggtttgcatactctgatttggccgtggctggaaatcatagccttcatagaggtggatgattagcttaggatgaacgaatcttgatattagtacctggagattagctgttgtaaaattgacttggttgagaagtgttccattcttcaggaattgacctaatgcaatctggatatccagtcaagttgtaagatgtgaaatgtattttgccttgcatgatagatgactagtttattgtgtctattttacattggataatgttatctagtctttgtttccctgctagtgtgggttattgattttctactactttccttgctaatataaatttctatttccagcgctttggatta

SEQ ID NO: 26635 - DNA, 1119 bp, Glycine max
  Clone ID: TF_GmC1772_1
tcgactcgagccgaatcggcaacaaaacaactcaactaagcgcaaaccaaaccaacacaaacaaaaacatctctcagcaaatgaatattctcggacaatcactccaccaatcaaacaacggcagctactcttgttcgtcgccggagactgcaaactcctctaaccttccgaccactccgaaagccgttcactccgacgaggaagtgaacacattagcatcggctcatcctaagaaacgtgcggggcgtcgaatttttaaggagacaaggcatcccgtgtacagaggagtgcggcggaggaacaacaacaagtgggtctgcgaggttcgtgttcccaacgacaagtccacgaggatttggctcggaacgtatccaacgcctgagatggccgcacgtgcgcacgacgtcgccgcgctctcgcttcgaggtaagtcggcgtgtctcaacttcgccgactcggcgtggcggttgcccttgccggcgtcgaccaatgcgaaggagattcggcgcgtggcggcggcggctgctgtagcgattgcggcggaagacagccgcggcaagcagttgcggactaatgcgattgatgccgttgctgattgcgaagttagcagcagtgacataggcgtcgatgaaaattgcaataacaataaagcttcgcagaggttttgtgatttggatgaaattacaatgccagatgcaccggtttttgaggacatgcatgagtggcttcagactatggctgctgaaccattaagatcacctacttttgtaacatatgttaatgttagggatgtctggaactttgtggaggatgatgctgaggtttccttgtggagcttcaccgtctgaagagcatgcaatttaggctttaggtgtatttagtgtgtttagctttctttctcttcttttggtttttgtacataattaggaacggaggactacgaaaatgtacaaagaccgaaacgatataaggagatagctatctaggtaggaacataaaagtgtgaaacattgtaacttttctcattcggttgtttttgtaaaataaaaattctattttcatcaatacattatcaaagacactcactgttagcaaaaaaacaaaaaaaagagagagaaa

SEQ ID NO: 26636 - DNA, 1031 bp, Glycine max
  Clone ID: TF_GmC268_1
caggctcgagcgtaactgcgtgcactctctctctctctacaacaagaattcatctattcatttcagcccatcagcatggcgaaggagaagaaaaacttgtccaacaagaacaagaagccaagcaatgcagacgaggttcacttccgcggagtccggaagcgcccctggggccgctatgccgccgagatccgcgaccctggaaagaagacccgcgtctggctcggcaccttcgacaccgccgaggatgccgcccgcgcctacgacgtcgccgcccgaaacttccgtggccccaaagccaaaaccaacttccccttcctccccgacaacaacaccaacgttaacctcaacaagaagaacaacaacgttaacgttaaatctgacagtcccagccagagcagcaccgtggagtcctccaccccggagcgtgaattcacgcgccgcgccgcccccgccgcaatggatcgctttccgttcctacccatccagcagcaaatcctcgtgacccaccccgtcgcacccatgcgcccggtttactttctcgaccgggcccacttcatgacccagcccttcccactccgattcgaaccgggtccggtccagagcgactccgactcgtcctccgtcgtcgtcgattgccagcccaaaagagagctcaatctcgatcttaacttggctccacctaatgaatattaacctttttttttaatcttttaatttttcataaaaaagacagcagaaagaaaggaaaggactaaggagatttttttttctcttttttttttttttggaagattaatcttccattaaattgtcgtgtagattagataagatgttgttaattacatcctttgatgtaaataggttaatttttctgtttttttaggtccttgatagtattaacaaaggacatgatctgaaattgtctagatctggtataattttcatgtaacatcggaatatctgatgtaattctggctaatgttaattttctcttattacaataaaatctgctattctcgagacctcgtgcc

SEQ ID NO: 26637 - DNA, 1002 bp, Glycine max
  Clone ID: TF_GmC28_2
gtcctcatcaaatctaagcaaccgcaaaccctccttgaaaaacatcacaatcccttccataacctctggtcttgcaacagctatgtcacaaacaacagcaacaacaacaacaatagctacaaccatgtataacaacaaccaagtttcttcttcttctttttcttcagatgaaaccaacaataccaaagacgacaagcactatagaggggttagaagaaggccatgggggaagtatgctgcagaaatccgtgaccctaatagaaaaggctcaagggtgtggcttggaacctttgacacagccatagaagctgctaaggcttatgacaaagctgctttcaagatgagagggagcaaagccatattgaacttccctttggagattggatcagatcagtctaaagaagagtcatcatcatcatcatcatcagtttcaagcagcagcatcgtcatcaaggttggtgtgaagagagaaagagaggaagagagtgaaaggaagaacaactatgagaaaagtgagtttaacaacaatagtaatagtaataagcatgtgaagaaagaagagtgccctttgactccatcatgttggaaaggcttttgggacactgatgttatgggaacaatctttagtgtgcctcctttgtcaccactatctccactaatggttgtttgagattttgtggaacttttgctctttcaatgatgttttgaggtaaccaaactaaggggagagagagagatgatgctggtgattgtcctctctgatttaggttgctaatttgcctaaatcaaaatggtagtactaattaatctactaatagattaatttgcaagtgaatatatatatggatttgtataatgtaaatataggatagtactatgaagcaagatctttttgtttgttgaaaaaaaaaacaaaaaacccatgcttatcttcttcctttaggtaaaaaaatgtactgtacttgaagcaatattgaaatttgtttattcgtttattggagg

SEQ ID NO: 26638 - DNA, 1691 bp, Glycine max
  unsure (1)..(1691): unsure at all n locations
  Clone ID: TF_GmC1839_1
ctagagtccggtttccaccgagcaaacccaaacactctcttgtgtttttttttttttatctcactccacccccttcgctcttctagctgcatgaaattccctcctatattgttaggggtttcgttcattcactcgctcactcacacacacacgcgcgcattgaacaaatgatgtgaattcgttgttgttgccgttgcaaattggatcccactctctcgcagactcacttccgttgtaactaacgttacttttccctccaaacggtccctaacagcttctaccaaacaaactcacgccgcgatgttggatctcaacctcaacgccgattccgcctccgacttgcaaatggagagctccggcagcttcaattcctccgtcgtcaatgccgccgacaccgacgactcctgctcctacggcgacgccgttgcctacaactttgccatcctcaacaacgccgccacctccgacgggcttcccctcggcgccgccggagaaccgtccgttcgcaccatccagctctttccggcggccgattcgggagcctcggcgccgctcttgcttgatttctcgtcgaaggtggatcagcacggtgctccgccggagcagaggatcactccccggcaacagcaggtgaagaagagccgaagaggaccgcggtcgcgaagctcgcaatatcgcggcgttactttctatcgcagaaccggaagatgggaatcgcacatttgggactgtgggaaacaagtgtacttgggtggatttgacaccgcgcatgttgcggcaagggcttatgatcgagctgcgatcaagttccgtggcgttgatgcggatatcaattttaacgttagcgattacgatgaagatataaagcagatgagtaacttcacgaaggaggagtttgtgcacattttgcggcgacagagcactggtttttcgaggggaagctccaaatacaggggagttactctgcataagtgcgggcgatgggaagctcgtatggggcagtttcttggtaaaaagtatatatatcttgggctattcgacagtgaattagaggctgcaagagcgtatgataaggcagctataaaatgcaatggaagggaagcagttacaaacttcgagcccagcttgtatgaaggggatgtaagttcctcccgtgccaaattgggcatggcaagtccaaggtccttatggcagggcaactcttgctccacccttctctactgcagcatcatcaggattcccttcaacaataataccatcagctgcggatactcaaattcgttttccaaacatgacattcctccactcgcattttccatcatcaatcactaactccggcaccatatcccctttcttcttcggtagctgaatgcattgctaggtagaccaaagcaattgcaaatcttcttgatttcaccatatggttgacaaactagtaggactagttacaagtagcaattgaatttgcttggttctacagcttttactatttgccattctactagttttcttcaatatatgtaaagaaatgccatgccccgatggcttcttgaactctgcttttactgatttttgagactaagcgtttactttggtatctccaacattcaatctcggtgcttttctatctagaaaatacttgaaaagatgagtttgatctttttgaaaaanaaaaaaaaaaaaaaaaaaaa

SEQ ID NO: 26639 - DNA, 909 bp, Glycine max
  Clone ID: TF_GmC4678_8
agttcctcattcgtcatggaacagattcactctctctctctttagagatttgattgacaaacacaactaattccaaagctaacaactttatagagagagagagagagagagagagagatggagggtgaaggaagaagaagagaaggaggagagagagaaacagcaacagcagcagcaacgaggaaggtggtggagggtgctgatcagagaagatacaaaggaataaggatgaggaagtggggcaagtgggtcgctgaaattagagaacccaataagcgttcaaggatttggctcggttcctattctacccctgtcgcagccgcacgtgcctacgacaccgccgtcttttaccttcgaggaccctccgcgcgtcttaacttcccggagcttctcatcggagaaggcgccgccgccctcaccggcggctgtgacatgtcagcagcttctattaggaagaaggcctccgaggtcggtgctagagtcgatgctcttcaggcaacccttcaccaccatcaccaccatgttgtgccaccacggcagcttctctctgccagctgtggcggtgggtccggtgattttgcagtgcgggttgttgacctgaataagatgcccgaacccgagagctccgactgtgagtggaacgtgaattgaaggaaaaagaaaaaaggtgcatgttttcatattcaggtgatggtggttgttaacgtgcgccggctgaggcaaaatgatgttgttgatgaggcctgtggtggtggtggtggtggtgcggagtactgtactgtatctttttttccttcaaccttctctcttgggtagttttttttaaaatttttagatattacaaaagaatttttggcttgtaaaaatatgttaaatgtaaattaactagtccggtagcagtttcttttt

SEQ ID NO: 26640 - DNA, 428 bp, Glycine max
  unsure (1)..(428): unsure at all n locations
  Clone ID: TF_uC-gmroLIB3259P225d12b1
acccacgcgtccngaataacatattttttatacagccgcaaacgcagtttttgacactgaaggggggagaaccgaagcttaccggcagcgactccacctaaaacaagaaagaggccacagggaagagaccggctgcaactaaccccgtaggcatcatgcccttgggaaacagacaggtcagaaatggttgctgcgcaagaaaaaccgtgggaaactagcactgaacacccagacgtgccgcatataaacgccgtcgctggaacaactcccgtgggccaagagtaacttcaaccggacccatttcaacctgctcaagaccaagaagtgagaaagaagccacactacaaacgcctgaggcagagaccacgggggaaatgggcagcagaaatccgcgacccaaacaaagcagccaaagcgtggctaggaac

SEQ ID NO: 26641 - DNA, 531 bp, Glycine max
  Clone ID: TF_GmC6107_7
gacgtgaggaactatagggttcccctttgtgtgctcaatgggcacgggtatgctgttaggaaggtgaaattctcgccacacgtgcggaatttgatggtgtcttgctcctatgatatgacggtgtgtgtttgggatttcatggtggaggatgctctggtgagtaggtatgatcaccacacggagttcgcggtcggggtggatatgagcgtgcttgttgagggcctcatggctagcactggttgggatgaacttgtttatgtgtggcagcatgggactgaccccagggcaccttgaaggtgaagggtctaccacagcgaaatctgtggcattccaagttcgagctgagaaatttgcaaataggaagaggaaaaatcagtataggggaatccgtcaacgcccttggggaaaatgggcagctgagattcgggatcctagaaagggggttcgtgtctggcttggaaccttcaacactgctgaagaagctgcaagagcttatgatgctgaagcacggaggattcgtggcaagaaagc

SEQ ID NO: 26642 - DNA, 884 bp, Glycine max
  Clone ID: TF_GmC700_2
cggctcgagctcgagccgaatcggctcgagggctgagctacctagctcagaagcatcatcatcagcttccactcgcaagcactcgcattccgtctacagaggggtccgaatgcgggcctgggggaagtgggtatccgaaatccgcgagcccagaaagaagaaccggatctggctcggcacctttgccaccgccgagatggccgcgcgtgcacacgacgtcgcggcgctcgccatcaaaggcaactccgccattctcaacttccccgaactcgcctcctccctgccccgacccgactccaactcgccaagagacgttcaggccgccgccgccaaagccgccgccatggaggttaacgatgctccgacgacgccaacttcgtcgtcgtcggcgtcactgtcgcagtcgtcatcttggtcgtcattggcggttagttcttcctccggcgaagacccgtcgacgccggaggagcttggggagatagtggagctgccgagtctggggacgagttttgaaatacccgacccgagtggggagttggtatttttcgacccgtggccgtattctcaggcgtggagtcacggcatttatgatgagagtgagagttatttttttggggatcagatttcaatgcaggactcagagacagagagcatggttctttgtggctttgcctttgaggcttcattgtggcagcattaatacatgggtgctgttaacatgtgcccttagggcacatgttaatgtgtaataaatgatggttggtccccatttattatattttggaaaaaacagcatcataaatgtgggaccacttattatactttgaaagttaattttctctttgtccaaaataaaataggtgggaccatgagccatttattaa

SEQ ID NO: 26643 - DNA, 1623 bp, Glycine max
  Clone ID: TF_GmC130895_1
gaaatacatgccaaacctaaccagttgaaatgacactccctttataatatatacttatctcccttcaattaatctccatcttaggtttgtgtctatcttacaataatggtgttgatttgttgagacaactagttcggtatttccagtgatcagcaatattttccattggcactttaatttcctaccctagctagttgatgttgtgttttcataaatgacaaattggaccaagccaaaaaaaaatattctgcctaactaaagcatgattggtattatttatttgtatgcaataattaattgatatattgacggctgcgagaagacgacagaagggggatattggtttcgttcaatattctatgacttttctctttaagaaattctagatctgctttatatgaaggcatatatagcttgaagttcaccatcaagcttacacatagagagaaaagaggctaatttattgtgttcatagatacaagacaatgaagaacctttcatagagttgaacaaggtggatcgaaggcatgggaagaggcctctcccttctgatcatgcatcaagggagagaagggaaggtttcaacttttctgttaaccaatctccacctaagagccaagggggagaagcttctcaattctcctttatgcatccaatcaatactggtgatgatagcaccctttcttcaccaattccacaatatgggcaaataagcaattcttgcttgattgagactcaggacccatccctacagcctttaaatcaaggaggaaatgggagaaaaagacattatagaggagttaggcagagaccgtggggcaaatgggctgccgaaatccgcgaccctaaaaaggctgctagagtgtggcttggcacgtttgacacggcagaggctgctgctgctgcttatgatgctgctgctttgaagttcaaaggctccaaagccaagctcaatttccctgaacatgttcttcttcctcctcctccaatatcatcatcatcaccaccttgcaataataataataatcatcatagttattattatggttcttcagctcttgcacctcttgcaccaccaccacaacatgtttatgatcaaacaccaccaccacaacaacaacccttgctatcatcatcagcacaagaagaagggtttccaaatctaatgcagtacgcgcagcttctttggagtagggatgatgatgatctacagcgtattgcttcaggccttcatcaacatcatcatcacaatgaggctttttatgattcaagttcttcaactttgttctcatcaacttccactacttattctatgactgtgtctgatcaacagcagaatattggagatgacacgagtactcccatgggggcagaatataattatggtggctgcttttttagagggagtgattttcatgacaagaattgaacattatgctaagtgtaagtatgatgtgtgtgctgctaaaaacctacctttttctgtattgttttcataattcaaaatttcaaataatgcttcttgaacttcaggtataaactcccatttcttcacatcggaagtgatatatatatatatatatatatatatatatatatataaacatgaaatttttagaaaca

SEQ ID NO: 26644 - DNA, 449 bp, Glycine max
  unsure (1)..(449): unsure at all n locations
  Clone ID: TF_13252405
gatcatgcctcaagggaggagagggaaggtttcaacttttctgttcttccatctccacctaagagccaaggggaagaagcttctttttttcctttntacatcctatcaatggtgctagtgntgatagcaccccttccacaccanttccacantctgggcanataagcaattcttgcttgattgagactcaggacccatcccaacagcctttaattcaaggcattgggagaaaaagacactttataggagttaggcagagaccgtggggnttatgggctgccgaattccgcgaccctaaaaaggctgcttgagtgtggcttggctcgtttgacactgcatangctgctgctgctgcttctgntgctgctgctntgaagttcataggctcttangccaatctcaatttcccagaacacgttcttgttcctcctcctccatttcntccttcc

SEQ ID NO: 26645 - DNA, 511 bp, Glycine max
  Clone ID: TF_GmC1684_4
ccagcgtccgcccacgcgtccgcccacgcgtccgcccacgcgtccggcgagaagacgacagaaggggggggaaatgggcagcagagataagggacccattcaaagcggcaagagtatggttaggaacatttgacacagcagaggcagcagctagagcatacgatgaagctgctcttcgtttcagaggcaacaaagccaaactcaattttcctgagaatgtcactctccgacaacctcaattcactgtttccaatcctccatcttctcttgtatctattacaacatcaatagacccagttgttcacagtactcgacctctccttcttccttctcaggcttcaactgcgaccaatgtttacgagtattttcaactctcgggcttccccaccaacaccaacctttatgatggtaataggatgtttgtgacgtctaatgccatggcttctcatcatcttcaatcttcgtcttcgttgttggcgtcttcttcttctgcgtttggttcttctgtaac

SEQ ID NO: 26646 - DNA, 1746 bp, Glycine max
  Clone ID: TF_GmC152_1
ggaaaagtaatggtaaaagaaaagggaaagtttataactttttaagagtttcttaacttgagaaaagcaaactcataaataagtaaataaaattcattagacagaacaatcaaactcaccctgatcctatcagaccttatcacagtcctcacggtagacacatggacacatatatggcctttcgcggtttccagaaaatcaataatagccattagcaaccatcccatcaaaaaagataaaacattattttctgaagataaaaaagaagtatgtacgtattaataatttcatgtaataattaattattgtgtataaaaagtttataaacttttatttaataatcttaaaagagatatcaatcataatatatgtgactttgtgcggataagtatgtgaaattgattgaaaggtgtcacatgatgatagatggattaacacagtgtttgtatgtggcccacgcgtccgggctcttggtttgtttgtctgtcacgagactcatacattgtgctgccaattatagtaactctctatttctctttccatctctcaagttctgaagaagaaacatgtgtggaggtgctatcatctcagacttcattggtgtgaagcgtggccgcaacctcgccgcgcaggaactatggtctgagcttgaccctttctctgacttccttggcttcgataccaccaattccaaaaaccaaccacccctgcagaaaattccagacaaaaaagtggtgtcatcatgtgagaagaagaagaaaagcgtggtgggtgcagaaaagaagaagagtgatagtgggcgagctcgtaaaaacgtgtacagaggaatcaggcaaaggccatggggcaagtgggccgcggagataagggacccacacaagggtgttcgtgtctggctcggcaccttccccaccgccgaagaagccgcccaagcctacgacgacgccgccatacgcatccgcggcgacaaggccaagctcaacttcccggccaccaccatttccgccgccgccgctccgccaccttccaaaaagcaacgctgcctcagccctgacaccatcactgaacaaagcagcagcagcagctcacaatccaccactggatccaccggcgaacgcagccggaggaaagacgaactcgacctgaaacaaattgaaaggtttctaggtttggagaaagagctaccgaacacaacaacattggtgctgagtgggacaacatggatgacctgtggatgctggacgacgtcgttgtgcccaaccgtcacttaatttactagaagtttaacggtttctagggttggacaacatgggtgctgagtgggacaacatggatgacctgtggatgctggcgacgtcgttgtgcccaaccgtacttatttactagagggagataattaattaattaataaatggcgttttcttaagttatagttttataaaactatgttgaaaactatgttggtgtatgtgttcttagttttctgttttgtcttgtcctctcgctttggtaatttctgttttgtacggtcgaattatttcaaaattaggtgcaacgtatcatgagagggatgattatatgttatcattatgattataaataaaggccaattagggtgtgttagcgtttgggtcgtgcatgtttatatgtagtttatgcgttgtatataatatatttggcatgacattatttggttctacttgttaagcaaatattatatagtatggttctacttgtcgtttttgc

SEQ ID NO: 26647 - DNA, 1132 bp, Glycine max
  Clone ID: TF_GmC152_3
gtttgtttgtctgtcacgagactcatacattgtgctgccaattatagtaactctctatttctctttccatctctcaagttctgaagaagaaacatgtgtggaggtgctatcatctcagacttcattggtgtgaagcgtggccgcaacctcgccgcgcaggaactatggtctgagcttgaccctttctctgacttccttggcttcgataccaccaattccaaaaaccaaccacccctgcagaaaattccagacaaaaaagtggtgtcatcatgtgagaagaagaagaaaagcgtggtgggtgcagaaaagaagaagagtgatagtgggcgagctcgtaaaaacgtgtacagaggaatcaggcaaaggccatggggcaagtgggccgcggagataagggacccacacaagggtgttcgtgtctggctcggcaccttccccaccgccgaagaagccgcccaagcctacgacgacgccgccatacgcatccgcggcgacaaggccaagctcaacttcccggccaccaccatttccgccgccgccgctccgccaccttccaaaaagcaacgctgcctcagccctgacatcatcactgaagaaagcagcagcagcagctcacattccaccactggatccaccggcgaaagcggcggaggaaacgacgaactcgacctgaaacaaattgaatggtttctaggtttggagaatgagctgcctgttagcaacaacattggtgctgagtgggacaacatggatgacctgtggatgctggacgacgtcgttgtgcccaaccgtcacttaatttactagaaggctaataattaataaatggcgttttcttaagttttagttttactttataaattgtagtataaaactatgttggtatttgtgttcttagttttcttctgctgttttgtctcttctctggctttggtaatttctgttttggacggttgaatgatttcaaaattaggtacttgattccaccttttctgttttgtcttgaccactcgctttggtaatttttgttttgtacggtcgaattatttcaaaattaggtgcaacgtttcatgagagggatgattatatgttatcactatgattataaataaaggccaattagggtgtgttt

SEQ ID NO: 26648 - DNA, 1433 bp, Glycine max
  Clone ID: TF_GmC28_1
cggctcgagctgtttggctcaagatcgaagcgctggcccacctctactatcttctcaactttcctaactttagcaaccatccaagaagttgatcagttccttgtctctccttgaattataaaaccattcacagtcttgaacccaatttcactctttgcacctcaaacaccttataagcctcaatttcacaaccaaaaatgcaaagttcaatctcacaatctgagatttgcatcactgattaccttctaccccaagaagttccatctcaatttcaatttccagatatgagcaacaataacataccaatgaaccataccaaccttcaaatgcctcaaatcacatctttctccaagcctccaaggtcctcatcaaatctaagcaaccgcaaaccgtccttgagaaacatcacaatcccttccataacctcaggtcttacaacaactatgtcacaaacaacaacaacaacaacaatagctacaaccatgtataacaacaatcaagttacttcttcttcagatgaaaccaacaacatcaaagagaacaagcactatagaggggttagaagaaggccatggggcaagtatgctgcagaaatccgtgaccctaatagaaaaggctcaagggtgtggcttggaacctttgacacagccatagaagctgccaaggcttatgacaaagctgctttcaagatgagagggagcaaagccatattgaatttccctttggagattggagagtcagaggaatcagtctcaagctgcatcaaggttggtgtgaagagggaaagagaggaagagagtaaaagcaacaactatgagaaaagtgagtttaacaacaataataatagtaataagcatgtgaagaaagaagagtgttctcccaaagctgtttgccctttgactccatcatgttggaaaggcttttgggacactgatgttatgggaactatctttagtgtgcctcctttgtcaccactatctccactaatggttgtttgagattgtggactttcgctatttcaatgatggtttgaggtaaccaaattaaggagagatgatgctggggattgtcctctctgatttaggttggtaatttgcgtaaatcaaaatggtagtactaattaatctactaatagattaatttgcaagtgaagatatatgggtttgtataatgtaaatataggatagtatgaagcaagatttttttgtttgttaaaaaaaaaaaagctctcatgcttatcttcttcccttagttatgtttcatttggtcaagaaatgtactgtacttgaagcaacattgaaatttgtttattcgtttattggagaaaaaacaatattgaaatttgtttattcgtttattggagaaaaaaaaaaaaaaaaaaaaaaaaaaaaaaaaaaaaaaaaaaaaaaaaaaaaaaaaaaaaaaaaaaaaaa

SEQ ID NO: 26649 - DNA, 1410 bp, Glycine max
  Clone ID: TF_GmC1051_1
tcaccatccatctttgttctttctcgtgcatggtgcaaccttctccatggccaaaaaatcacagctgcgtacccagaaaaacaatgttaccaccaatgacgataataatcttaacgtaaccaacactgtgaccaccaaggtgaaacgaacaaggagaagtgtccctagagactccccacctcaacgcagctcaatataccgaggagtcactaggcaccgatggacaggccgatacgaagctcatttgtgggacaaacattgctggaatgaatcacagaacaaaaaagggcgacaagtctaccttggcgcttatgacaatgaagaggcagcagcacatgcttatgatctagcagcactgaaatactggggtcaagataccattcttaattttccgttatcaaactacctgaacgaactgaaagaaatggagggtcaatcacgggaggagtatatcggatcgctgaggaggaaaagcagtggtttttctcggggaatttctaaatacagaggtgttgcaaggcatcatcataacggaaggtgggaggctcggattggcaaagtttttggcaataaatatctttacctcggaacttatgctacccaagaagaagctgctactgcctatgacctggcagccatagaataccgtggactcaatgctgtcaccaatttcgatctcagccgttacattaagtggcttaagcctaacaacaacaccaacaacgttatcgacgaccagattagtattaatctcactaacataaacaataataataattgcactaacagcttcaccccaagtcctgatcaagaacaagaagctagcttcttccacaacaaagattcactcaataatactattgtagaagaagtcacgttggtgccacatcagcctcgtccagcgagtgccacgtcagcattggagcttctacttcagtcatcaaagttcaaggaaatgatggagatgacatctgtggccaatctttcatcaacacagatggaatctgagttgccacagtgcacatttcctgatcacattcagacgtactttgagtatgaagattccaatagatatgaggaaggagatgatctcatgttcaagttcaacgagttcagctccattgtgccgttttaccaatgtgacgagttcgagagttgaagaagtcaggtttatataatgcatggaaaaaagaaactctgatatgtttgtttatttgtttaatttgttgattatgttaaagaccatattcataaatctttagctaattaaggtttaagtttttagaagagagatcatgtcattcacaactattataataagtggacttgttttcaatttgtgaacatgaaagtttattctttttatagcaacgtcgtcattaatcacataaaaatgaatattaatgcggc

SEQ ID NO: 26650 - DNA, 930 bp, Glycine max
  Clone ID: TF_GmC320890_1
aggaacagaatataacgttggatcctagtgatgaaagaattacaaagtaaaaaattgtttacgaacaattcgaaaaacagagaactggaaaacagagaggctgattaagaagtcaaagtcaaaagctgttttaggtactcagcacccaaattcttgaacacaagcacattttgcgaagttctgctgaagtctaattgttccctctgatcaaccttggtcttcttcttagaattggactttgttctcatagtgtgttttctcttaagagccaaaacaggggaggaaccttcttcccatggcttacttggcatgtctttaagggactccctcaccacttcctctgggaaattcagcaccgcaagagaccctcttgtagaaaacgcggcttgatcataagccaaagccgcggcttcggccgtgtcaaaggttccgatccacactcgaacgccgtttcgagtggaatctcttatctcggccgcgaatttcccccacggcctcttcctcactcctctgtacatcctgggctccttggcaacttgttgtgaaggtagtggtggtgatggtggtggtggtcgtacttttttcacttccttgtaagtggtgttagatgagacttcttgtaactcaacgctaccaatacaactggaaacattggacgctgaggatgtttccttggtttgtgattgtgacgaattgtcgctcaagttgttgaagatatcatccaaaacaaagttgtagtcccaagaaaaagtgtctccaaaaatagaggagttttctgggaagaaactaaggttttggtttaggaaaaaagtggaatcaaaatctaaatccatctcaaggaatgccagtgcacacaacaattttgatgtttgaagaaatgtaaaggtagctagttaagtgtcactaaattctcgagccgaattccgggct

SEQ ID NO: 26651 - DNA, 151 bp, Glycine max
  Clone ID: TF_701207375H1
atgccaagacaaagaagaataaccagtatcgcggaatccgtcagcacgcatggggaaagtgggctgctgagattcgcgacccaagatagggggttcgtgtttggactggaactttcagcactgctgaagaagctgcaagatgttgcgatgc

SEQ ID NO: 26652 - DNA, 2147 bp, Glycine max
  Clone ID: TF_GmC1595_1
aattcggctcgaggcagtttccaaagaacccaactcaacttcaaaaccccataataatctctctttgacattcataaaaaacacacaccatggactcttgttcatcaccgccaaacaacaactccctcgctttctctctttccaatcactttcccaacccttcctcctctcccctctcccttttccactccttcacctatccatctctctctctcacaggaagccacacggcggatgcacctcctgagcccatcgccggcggaggagcgaccaacctctccatattcaccggcgcccccaagttcgaggactttctgggcggttcctccgcaacagccaccgccaccacgtgtgcaccgccacagcttccgcagttctccaccgacaacaacaaccacctgtacgattcggagctgaagacaacaatagccgcgtgcttccctcgcgcctttgccgccgaaccaaccaccgaacctcagaaaccctctccaaagaaaaccgtcgacaccttcggccaacgcacctccatctaccgcggcgtcacccgacatagatggacgggaagatacgaagctcatctatgggacaatagttgtagaagagaaggccaaagcaggaaaggaagacaagtttacctgggtggttatgacaaggaagataaggcagccagggcttacgatctcgcagctctcaagtactggggtccaactaccaccaccaactttcccatttccaactatgagaaggaactggaggagatgaagaacatgaccaggcaagagtttgttgcttctctacgaaggaagagcagtggtttctctaggggggcctctatatacagaggagtgacgagacaccaccagcatggccgatggcaggcgagaataggcagagttgccggaaacaaagacctctaccttggaactttcagcacccaagaagaagctgctgaggcctatgacattgctgctatcaaattcaggggattaaatgcagtcacaaactttgacatgagtcgctacgatgtaaagagcattgcaaatagcactcttccaattggaggtttatctggcaagaacaagaactccacagattctgcatctgagagcaagagccacgaggcaagccgatccgacgaacgagatccatcagcggcttcatccgtgacctttgcatcacagcaacagccttcgagctccaccttaagctttgccatacccattaagcaagacccttcagattactggtccatcctggggtaccataattctccccttgacaacactggcatcaggaacactactagtgttactgcaacttcttttccatcctccaacaatggcactactagtagtttgacacccttccacatggaattctcaaatgcccccacaagtaccggcagtgataacgatgccgcgtttttcagtggaggaggcatctttgttcagcaacaaagtggtcatggtaatggtcatggaagtggaagcagtggttcctcctcttcttctttaagctgttcaatcccattcgccacgcccatcttttctctaaatagcaatactagttatgagaacagtgctggttatggaaactggattggacctaccctgcacacattccaatcccatgcaaaaccaagtctctttcaaacgccaatatttggaatggaatgagctcatgcacgaggtgggatgagaatctgtgcatataatgatgaaaggggaagggcaatagtggtgatggtgttttagcatgcaaaagaagcaaggacgaactagtacctttagctgatgcagtatttgaatgagttggactgacagtcataatttcatgagaagcgtagctatacctagcagcagctgacactgtactaactcaaagttcctttgttatgttttggatgaattttcttttttttctttttcgcccctttattagctttttggtcctgttaatatactgacattatatcaaatgaggataatgggaagaaaaaaaaaatccttttgtaatccctttcatctcattttttgttagtatcaacttgccatctatgtgaaaggcattcaatgcctatatatattgatgtacctttggaaaaaaaaaaaaaaaaaaaaaaaaaaaaaaaaaaaagccgattcccc

SEQ ID NO: 26653 - DNA, 699 bp, Glycine max
  unsure (1)..(699): unsure at all n locations
  Clone ID: TF_GmC135444_1
ccggnattcccgggtcgacccacgcgtccgctagccacttcacacatgacacataaaaacaacacaagaagaaggaaccaaactacatgcttcttcaatagcaaaagcacatgaagactaataacaacgtttctggggagaggaaatcgcggaagagacgcaacggtggaagtgattatgtggaagacacacttgaaaagtggaaggagtacaacaggcagcaacaacttggctctagagaaaatggggtggaagtgattcacaaagctcccgcaaaagggtcgagaaaagggtgcatgagaggaaagggagggcctcagaactccgattgcaagttcagaggtgtgaggcagaggatttggggtaaatgggttgctgagattcgcgaacctatcaatggcaagcttgttggtgagaaagcaaataggctttggcttggtactttctccactgcacttgaggctgctcttgcttatgatgaagcggctaaggccttgtatggcccttgtgcccgttttgaatttttccgagtcaatagactctaatggatcatcatcttctagtggaagtgataaaaaatcaccaagtggttcttcggagaatggtggtgatgttgcaatagctgaggagttggaggtgaaccatcgtcggtgtcatgaagacagaccaagattttctaaggttggtgtcttgagaaag

SEQ ID NO: 26654 - DNA, 1155 bp, Glycine max
  Clone ID: TF_GmC289_2
ggctcgagaacgaggaaaaaaaaaatatggaaaagaaacaagattaagaattggggtttgaagaagccggtggtgtctccttgcttgttctcgatcgatcttgttattgtaaaatataataacttttttatatcgtgatcaagatgcgccgagggagagccaccgccgccgtcgtggatccgacggcggagcaggcgaaggagacgcggttccgcggcgtcaggaagcggccgtgggggcgattcgcggcggagattcgagatccgtggaagaagcagcgcgtgtggctggggacgttcgattccgccgaggatgccgcgcgggcttacgacaaggctgcccgatccttccgcgggcccaaggccaagaccaatttcccctccttccccggcccgacggaccaccactcctcgcagcagattccgccgctctaccaggcccacgggctttccaccaagttcgagcccgcccaggtgaaccggcccaccaccagcggcatgagcagcaccgtggagtccttcagcgggcctagggttcccccctcctcctcctcctctcgcaagccccttgtggttgttaaccctatcatccctctcgacgacgacgacgacgattgccacagcgattgcgactcttcttcctccgtcgtcgacgaccaggactgcgtcctcacctcctccttccggcaaccgcttcccttcgatctaaacctcccgccgcccgatgccgcctacgacgacgacgacgacgacgtccccgccaccgcgctgtgcctctgatgaagaagagcctcttctcggtataatcataattttcttgttgttgttgttgttgttgttgttgactatctctggtttaattaattgaagttgttagattgtgttatggtgttgtagagtaatattataatataggcatggagatggatggatggatggaaggttgtgttgttgtaagttatttggatccatagcattggacctcatctggaaaactggttgctgcttctgctttcttcatggatctgcttcttacccttacccttaccccccaattagaacttactctctttttcttacttttctgtacaaaaatcatggcaatcagatcatagaataaattacattctaatcaattactctttccctgcttgct

SEQ ID NO: 26655 - DNA, 1127 bp, Glycine max
  Clone ID: TF_GmC1733_1
aattcggctcgagaacaatcttagaaataaacctacatatccaaccctcatataaatacgccattaccctacaaccatatattatacacatagctagacatggtgaaaccagccatggctagtgttgattcttcttccttttcttcttgtaaaaatgattcattttcctctaactacagcattgatacttgcaagatgtacaaaggggtaaggaagagaaaatggggcaaatgggtgtccgaaattcggcttcccaacagccgtgagcgcatatggttggggtcctatgacacccaagtgaaggcggccagagcatttgatgtcgcactttattgcctacgtggcaaaagtgcgagtttcaactttcctgacacacctcgacacttggaaattaatatggtgttaccatgtgacatacaacaacaacctctctcccatccggagattcaagagatagcctcgaagtttgcgaacaacgaccacgtccctttggaggaggagagtgcttttcaagaacaagaacaagacccctcgatggagtcacaaagtgacgagtctaaatctgccaatacaataacggagatgagcaacttccctaatatttatgatggtggaactcatactaatgtacaagtggatcaattacaaggggattgggacagcatggattggacattttttaacatgttggatgacttgaatggctcggattttggcctctatttggggccagacaagttgcacccgggtgagtttttgtgtcccactcaagctccaatgctttttcatgaggatgaaattgaaggtgatgatgatcatgatgctttttctaaccattccttactttggagttggaacttttgattcacctgcaaattaacttagataccctctactttgcataagtttcaactagtaaataattactagcaagcaagcctctctattatgtttttttgtagccatttatacatggctgtttctcaattataatagttaggctatgactagagtttatgtcaaatggaccataaagacaaaaagaaaaaagaccatataccatgccataaataatattatagaaagtggcccggtttttattgccatctttctgtttttttttaaaa

SEQ ID NO: 26656 - DNA, 1578 bp, Glycine max
  Clone ID: TF_GmC1447_1
tggggaacaaccacaacaacaaattttccaattagccactatgagaaagagttggaagaaatgaagcacatgactaggcaagagtacgttgcgtcattgagaaggaagagtagtgggttttctcgcggtgcatccatttatcgaggagtgacgagacaccaccaacatggaaggtggcaagcgaggattggaagagttgctggcaacaaggatctttacttgggaacttttagcacccaagaagaggcagcggaagcatatgatgtagcagcaatcaaattccgaggactaagtgctgttacaaactttgacatgagcagatatgacgtgaaaagcatacttgagagcaccactttgccaataggtggtgctgcaaagcgtttgaaggatatggagcaggttgaactgagtgtggataatggtcatagagcagatcaagtagatcatagtatcatcatgagttctcacctaactcaaggaatcaataacaactatgcaggagggggaacagcaactcatcataactggcacaatgctcatgcattccaccaacctcaaccttgcaccaccatgcactacccttatggacaaagaattaattggtgcaagcaagaacaacaagacaactctgatgcccctcactctttgtcttattcagatattcatcaacttcagctagggaacaatggaacacataacttctttcacacaaattcagggttgcaccctaatgttgagcatggattctgctttcattgacaatagctattcatcaactacagctagggaacaatggcacacacaacttctttcacacaaattcatgcctatgggaactactactgctgttgttgcaagtgatggtgatcaaaatccaagaagcaatcatggttttggtgataatgagataaaagcacttggttatgaaagtgtgtatggctctgcaactgattcttatcatgcacatgcaaggaacttgtattatcttactcaacagcaatcatcttctgttgatacagtgaaggctagtgcatatgatcaagggtctgcatgcaatacttgggttccaactgctattccaactcatgcacccagatcaactactagtatggctctctgccatggggctactacacccttctctttattgcatgaataggtggaaaactagggagagaaggaagagtcaaaaaggtgatgaagaagatgcatatattgctgacttgtttcttcctcttgtgaagttgctaatttgatagtgtgcacttttgaagatgaggatatataggatttctttcactatctctaacttgcaggatccttatttcactagggtctaagtaatctagcctcaagtttagtcatggcagaagcatttgctgtgaattttgggaattaactttggagaatgtgtggacagatcattgggatgtttttattatcagcggactttttaattctggaataacaacgatcataccaagggtggagttttcctcaatgtatatgcatggcacttgtttttagttttttaaccaaattctttttatacattatgcatggtaatgggtgttagtg

SEQ ID NO: 26657 - DNA, 867 bp, Glycine max
  Clone ID: TF_GmC6851_1
tgttttattttacatctctctctctctctctatatatatatatataatcaacaccatccactactttctcacgcgccattaacaaagatatggtacaaacaaagaagttcagaggagttaggcaacgccagtggggctcctgggtgtcagaaattcgccaccctttactgaagagaagggtgtggctagggacatttgagacagctgaggcagcagcaagggcatatgaccaagcagccattttgatgaatggtcagaatgcaaagaccaatttccccacctcaaagaaccaagctgaagctgatgacaacaacaacactgacactttcttatctccaaaagctctttcagaacttctcagcacaaagctgagaaagtactgcaaagaccctgctccttccctcacttgtctgaggctagatgctgataattcccacattggagtgtggcagaaaggggcaggaccacattctggctccaactgggtcatgaggttagagcttggaaagaaacaaattaccgaggagggtagtgagtcaacggagtcaccacaaagtagtactaatggtgctactgaaaataatgaagtagaagaggaggatagagtggctttgcagatgattgaagaactacttaattggaactagaagaagaagaaaaaaaaaagggaaccttaatccgtgtcatatatagttcttgaatagtagtccttttttcatgctatccttttcaattcgtttacttttgtgctttctgtaaaaaaaatgtttgtcaaagtgctgatatctatatgatgatggccagtttgatagttacttatattatacactttttaagatatattgtgattgatggtaattatgcatc

SEQ ID NO: 26658 - DNA, 924 bp, Glycine max
  Clone ID: TF_GmC320_1
aaataaaaaaaattgttttcgtgtggaaacaaaaaaacaattcaaaaacaaacatatgatggtgaagccgagtagcgaaaagccagaggagcatagggattccaagtactacaaaggggtccgaaagagaaaatggggcaaatgggtatccgaaataagactacccaacagccgtcagaggatttggttgggatccttcgacacccccgagaaggccgcgcgtgccttcgacgccgcaatgttctgcttacgtggccgcaacgccaagttcaatttccccgacaacccacccgacatcgccggcggggaatccatgacgccgtcacagattcaggtcgccgccgcacaattcgccaacgctgggccccacgagggacattcgggtcgacccgaacattctcccatgcaatctctatcgccttctgtttcagaagggaccgttctaacggacagtgacgtcaccacacttaacggttcgctaacggatttgttcactcccgttgggtcgagtggttacgcatccgattacgggattttccccggtgttgatgatttcagtggcggtttttatgtgccggaaatgctgaactttaattatggagaagaaaacggggaagggttcatagttgatgagtctttcttgtggaatttttgaggggcaatcaaatccagtattaaccggcaaaaccggtcacggttgcggatagttttattgtttccggaaccgtggcaatgacccgggtttggattggttattttttagacgaccaaacctataaccaagaaactatgatatccatgcaactgtagcaccaaaagtaatgcaatttgtccagatagttgtgatttcttttttttaaacaagatatttgtaatttgtaaagctcttataacagatattgtgaaaaaaataatttctgattc

SEQ ID NO: 26659 - DNA, 1136 bp, Glycine max
  Clone ID: TF_GmC288383_1
ggctcgagaatctagccgagctccttctccttcacttcagtcacctttcctctctgcgtttgtttcccattctcaaagacacttcacaaacacgtttctcttttttctcatcatcatggccagaccccaacaacgctatcgtggagtacgccaaaggcactggggctcttgggtctctgaaatttgccaccctttgttgaagactagaatatggctaggaacttttgaaacagcagaagatgcagcaagagcatatgatgaagcagctaggctcatgtgtgggtcaaaagcacgcaccaatttcccatacaaccccaatgagccacattcatcatcatccaagcttctctctgccactttaacggccaagttacataagtgtcacatggcttccctttcccttcaaatggccaagcagaaaccaccacagagcaaagagcctcaaccatcacatgggtcatccaatccatttgcctttgccaatgtcattgctggatcaagcgctgacaccggttttcgatggccagataacagacatgaggaattcagatggcttgaagggaattgggttggtgtggaaggccaggttgaagtttcccatcaacagtttcagccagttcttgaagatgatcacatagagcagatgatacaggagttgcttgattatggatcaattgagctttgctctgttggcttaacctagactctaaagtataatagcattcaaggttttaaaaaacggtctgcaactgtgttttcagccgcaacataaaggtttttggagtgtctgctactgcaatgcagtcacaattgtggtgactgcattagttgtatttgtctgcaattttctgtaatatcaaggaacacgataaactgcgatcgcgatcgttttttaaaaccttgatagcatattctcaactggcaagtgcaaacatctctttaggggtactaattcaccatgtaataaataaaggtataagcttcgtttagtaccaatggaaaatcttagtcacctttagtttctgttacttcaccaattagtggacaacaatatgcggaaccagaatgtagccaatgatgcgaatgaaatatcgtgcatatgatggactataatagagaatttgtatcaatagagt

SEQ ID NO: 26660 - DNA, 884 bp, Glycine max
  Clone ID: TF_700943089_FLI
aagcaagcgcatccgcggcgacaaggccaagctcaacttcccggccaccgctccgccaccctccaaaaaagtggtgtcatcatgtgagaagaagaagaagaaaagtgtgagtgcagaaaagaagagtggtgggcgagctcggaagaacgtgtacagaggaatcaggcaaaggccgtggggcaagtgggccgcggaaataagggacccacataagggcgtccgcgtctggctcggcaccttccccaccgccgaggaagccgcccgagcctacgacgacgccgccaagcgcatccgcggcgacaaggccaagctcaacttcccggccaccgctccgccaccctccaaaaaacaacgctgcctcagccctgacaccaccaccgaacaaagcagcagctcacaatccaccactggatccaccggatcgccgccttccgccgccttccacggcggaggagatgaactcgacctgaaacaacttgaacggtttctagggttggacaacatgggtgctgagtgggacaacatggatgacctgtggatgctggacgacgtcgttgtgcccaaccgtcacttaatttactagaagggagataattaattaattaataaatggcgttttcttaagttatagttttataaaactatgttggtgtatgtgttcttagttttctgttttgtcttgtcctctcgctttggtaatttctgttttgtacggtcgaattatttcaaaattaggtgcaacgtatcatgagagggatgattatatgttatcattatgattataaataaaggccaattagggtgtgttagcgtttgggtcgtgcatgtttatatgtagtttatgcgttgtatataatatatttggcatgacattatttggttct

SEQ ID NO: 26661 - DNA, 1390 bp, Glycine max
  Clone ID: TF_GmC152_2
cataagtgaagaaaagtcagcagagctttaagacgatgggaccaatgtgtcatcttgacttatccgagagaaattcgtgaagaaagaaagtgtatcattttcctttggattaataagtttggtcttgtggatagaaatgaagggcaaagcacttcaaaataaggctgtttggattgatgtaaaaaggaacaatactatgttctattgtttgaattgtttacaatagaattttacctcgtaaaaaaaaaaaaaaaaaaaaaaaaaaaaaaacctatgaagaaccccaaagacttacgcaccctagggccggtctctcacgtccccacattaatgtgtgtttgtcacgagacccatagtgctgccaaattatagtaactctctttctctatctgaagaagaagaagttctgaagaagcatgtgtggaggtgctatcatctcagacttcattggtgtgaagcgtggccgcaacctcgccgcgcaggaactgtggtccgagcttgaccctttctctgacctccttggcttcgataccaccaccaccaccaccaaccaaccaccccttccagacaaaaaagtggtgtcatcatgtgagaagaagaagaagaaaagtgtgagtgcagaaaagaagagtggtgggcgagctcggaagaacgtgtacagaggaatcaggcaaaggccgtggggcaagtgggccgcggaaataagggacccacataagggcgtccgcgtctggctcggcaccttccccaccgccgaggaagccgcccgagcctacgacgacgccgccaagcgcatccgcggcgacaaggccaagctcaacttcccggccaccgctccgccaccctccaaaaaacaacgctgcctcagccctgacaccaccaccgaacaaagcagcagctcacaatccaccactggatccaccggatcgccgccttccgccgccttccacggcggaggagatgaactcgacctgaaacaacttgaacggtttctagggttggacaacatgggtgctgagtgggacaacatggatgacctgtggatgctggacgacgtcgttgtgcccaaccgtcacttaatttactagaagggagataattaattaattaataaatggcgttttcttaagttatagttttataaaactatgttggtgtatgtgttcttagttttctgttttgtcttgtcctctcgctttggtaatttctgttttgtacggtcgaatgatttcaaaattatgtgcaacgtatcatgagagggatgattatatgttatgattatgattataaataaaggccaattagggtgtgttagcgtttgggtcgtgcatgtttatatgtagtttatgcgttgtatataatatatttggcatgacattatttggttcta

SEQ ID NO: 26662 - DNA, 840 bp, Glycine max
  Clone ID: TF_GmC5876_1
ggctcgagccaaaaccacttgacacaccttgccaacttgcccttccttcaaaaaccaaagagagacagaacgactccgagaagaaacaaagaaacaaacatgggaagcaacaaaacctacgaggaagaagaaagcacggttctattttcccattcccaaacacaaacagagttgttacccttcaacgagaacgacccgcaggacatggtcatataccaagtcctcaacgaagccaatgctctcaccaacacatttctccctcagaggcttcaccaacctcagttgtgcctcgagcccaccagaaacataacaaagaagcactacagaggagttcggcgccgcccctggggaaaatacgccgctgagattcgcgactctgcccgccacggcgccagaatatggctcggcaccttccaaaccgctgaagaggctgccatggcttatgaccgagccgcgttcaagatgaggggctccaaggctttgctcaatttcccagctgaaattgttgctgcaacggagttatctttcaataatactaatagtaacaatcacgatgctgtttctgattccagtgctggtagctcttgcacgaacaattccgttcagctaaataggaatcagtcagaaagctgcacaagtagcacaggttagctaaatggggttcaacaattaattgtagaaatctttttttttttttttcgcaattgggttggtttgttataattattataattatttgtatctgtctgtcttacaggacaccgaaaattaattcatttaatgtgataccatgttcatgaatgggtttaccatgatcatgcatgggttaaaattataaaa

SEQ ID NO: 26663 - DNA, 518 bp, Glycine max
  Clone ID: TF_GmC5876_2
cttcaaaaaccaaagccagaccgaccctaagaagaaaccaacaaacatgggaagcaagaaaacctacgaggaagaagaaagcacggctctattttcccattcccaaacacaaacagacttgctgttacccttcaacgagaacgacccacaggacatggtcatataccaagtcctccacgaagccaatgctctcaccaacacattcctccctcagcccaccagaaacataacaaagaagcactacagaggagtccgccgccgtccttggggaaaatacgccgctgagattcgcgactcggcgcgccacggcgccaggatatggctcggcaccttccaaaccgctgaagaggctgccatggcttatgaccgagccgcgttcaagatgaggggctccaaggctttgctcaatttcccagctgaaattgttgctgctgctactgcaacagagttatctttcaaaagtagtagtaataataataataataataataataacaatcccgatgctgtttctgatt

SEQ ID NO: 26664 - DNA, 1839 bp, Glycine max
  Clone ID: TF_GmC1763_1
tacgaatgcccaaaaagtaaggccaccgcagaatgaaacttgcaaaaagtgaggccaccccaaaaacaaagtgagattataggaaacaaaaatttctttgcttaatactagttcctcctttctcctagcctggtagtcttttgaaaattctttatcttgatcacataattttcattttgaacttgaagaaagttttagtgtatttttttttccttaaagaaacagaacatatcctgttctttctttctctgtttgcatttttgttcacttctttctttctttcttattatctagttaagcatgacaacatttatggacatgtacaacactactagtagcatcatgacaccggatttcttagaccagtgtagtgatcaagagctgatgaaagcacttgagccttttatgaaaagtgattcatctagcactacttcctcatcaataacaacatacccttcattctcttctttttcttcttctcccaacttgtcctcaacaacatggagcacccaattttgctcctcaagctaccaccaaaagggtccaactccaacccaagctagttccttcaaactgaaccaactcaccccatcacaaatatttcaaattcaagcccaaatccaggttccacgaggccagtttctgagcccaaagcccattcccatgaagcacgtgcgggcttctccttcttcaaagcccacgaagctttaccgtggggtgaggcagagacactggggcaagtgggtcgctgagatcagactccccaagaaccgaacacgtctctggctaggtacatttgacaccgcagaggaagcagcgttggcttacgacaacgcagcgtttaagctaagaggagaaaacgcgaggctcaacttccctcacctacgtcaccatggagcacgtgcgtacggtgagtttgggaactacaagcctctcccctctgcggtcgatgcgaagctccaagccatttgtcaaagcttagggaccaaattgcagaaactcaaaactcaaaaccctattgttctagatacacacaaggcagagacagagacatcggagtttcaggattttaataaggttgagaattaccaaacatcatcatcctcggcgttgtcggatgaatattcttcttcttcttcttcttcttcgcccgaatccgatattactctcttggatttctcggattcttgtgaaacaatagacaatcttgggttggacttggagaagtacccttccgtggagattgattgggcagctttatctgactcatgaataatcagtggttaacggtttagatttgatgtgttttaggttttttttgcatgtttttttcttgttaatcagtgttttagatattgttttggaagttcttctaaatcacagcgcattataatgtcactgtgactgataaattattaagccattaatcgaataaaattttacacaatcacttgctatgctgagtcaggttgctaactttagtgtactgctgtagatggatgggtcacagcggtttggttattatggttttcttggtctgctggtattttttattcctgcatgaccaagctagcttcaactcttttttttctttttaaattgatagaaaacaaggtagcttcaactacttgtttgcagttcgaatgtaatttaagtgccttaatgcaagttttggaagttcttgtaaaaaacagggcatgtgacagtcttttattcataaggaaaataatttaattgaaatttgaaatataatgatcgtgtaatgattttttacacaatcaattaatcattgttatattttttaaaatattgattttattaataatttttaaaaaaaaa

SEQ ID NO: 26665 - DNA, 356 bp, Glycine max
  Clone ID: TF_LIB3056-008-Q1-N1-G5
ctgtgtgcactctctctctgtctacaacaagaatgcatctatccatttcagcccatcagcatggcgaacgagaagaaccacttggacaacacgaacatgatgccatgcaatgcagacgaggctcacttgcgaggagtccagaagcgcccctggggccgatatgccgacgagatccgtgaccctggaaagaagacccgcgtctggctcggcaccttcgacaccgacgaggatgccagaccgcgcctacgacgtcaccgtcagaaacttccgtggccccatgagtcaaaaccaacttccccttactgcccgacaacaacatcaacgttaacctcaacatgaagagcaacaacgtttac

SEQ ID NO: 26666 - DNA, 3075 bp, Glycine max
  Clone ID: TF_GmC326_1
tcgatctttgcttcccctcagtcaaacaaagtaacacaccagaccggtccaccggggacacctatcaatttcgtaggtttgtacatcttttggtttggggcgaaagttcagccttttcagatttgcatcaatttcaacagagaacaacgtgatttgtggattgctgtaaagtgcattatttggccattagctaatggacaagggggtgcctcctagcctcttcgtcaatgatggttctttcatggagaggttcaagcaacttcaacaagagcaggataaagggaagaatgtcaaattggaggattctaaaccaattaaggttatttcagggtctttgtctcccaatccttcctttaccaaaacgcccgtggacttgaaggttaatgacacaaggaaaatatcccagggtggttccagtggaaagctagctttcagtttaaaacaaaagtcaaagctggtgccaccctattctcaagtttctctctgtttcttcctacttcatgctatagcacttacaatactcaacaataacctaaccaaaccaaaccaaaccaaaacccttatctgcactcacttcacacaaaccaaagttaattaattaccaacacaaaatggatggaggctacagaaaccaccacatgcagcgacctgttccaggatctatctttgcttcccctctctttgctacctcttagacaaacaaagtaataaaccattctcccctctcttctcttcttttgttctctagatttcttctctcttgtttcttagaatccgtacaatctaatcaacataacaaaaatggatgcaattagttgcatggatgagagcaccaccactgagtcactctctataagtctttctccgacgtcatcgtcggagaaagcgaagccttcttcgatgattacatcgtcggagaaggtttctctgtccccgccgccgtcaaacagactatgccgtgttggaagcggcgcgagcgcagtcgtggatcctgatggcggcggcagcggcgctgaggtagagtcgcggaaactcccctcgtcgaagtacaagggcgtggtgccccagcccaacggccgctggggtgcgcagatttacgagaagcaccagcgcgtgtggcttggaacgttcaacgaggaagacgaggcggcgcgtgcgtacgacatcgccgcgcagcggttccgcggcaaggacgccgtcacgaacttcaagccgctcgccggcgccgacgacgacgacggagaatcggagtttctcaactcgcattccaaacccgagatcgtcgacatgctgcgaaagcacacgtacaatgacgagctggagcagagcaagcgcagccgcggcgtcgtccggcggcgaggctccgccgccgtcggcaccgcaagctcaatttccggcgcgtgctttactaaggcacgtgagcagctattcgagaaggctgttacgccgagcgacgttgggaaattgaaccgtttggtgataccgaagcagcacgcggagaagcactttccgttacagagctctaacggcgttagcgcgacgacgatagcggcggtgacggcgacgccgacggcggcgaagggcgttttgttgaacttcgaagacgttggagggaaagtgtggcggtttcgttactcgtattggaacagtagccagagttacgtcttaaccaaaggttggagccggttcgttaaggagaagaatctgaaagctggtgacacggtttgttttcaccggtccactggaccggacaagcagctttacatcgattggaagacgaggaatgttgttaacaacgaggtcgcgttgttcggaccggtcggaccggttgtcgaaccgatccagatggttcggctctttggggttaacattttgaaactacccggttcagatactattgttggcaataacaataatgcaagtgggtgctgcaatggcaagagaagagaaatggaactgttctcgttagagtgtagcaagaaacctaagattattggtgctttgtaacgttacgttaggttttttttttcttttttttttttcgggagtttttgtgactgatgaaagaaagaaggtacaagaacggcggtgtagtggcatggcaagttgctgcaaagtgcaaaaggtgaattgtatattacttaatattattagatgttgaaattaggtgtaatgtaacaaaaactgtacaagaagaagaaaaaaggttttaagaaggggagaagaaaaataaaaataaaagatatcatatgaaaactgtttaatggtatatgttgataatattgttgaatgtatgttcatggcctgatgttgtttttttggcaaatttgatttgcagatttaaaaaaaaaaacccctgtaagttgagtgctgatgaggctgatgaagaaacagaagctgggtatgtttcaaacgatgcaccactaaaacggattgccaagacgaaggcattgacatcattaagacaacttgatgttgcagcacctcattccccaagtgatcctacagtgaaggaaagttgctgacaaattggcaagttttgtggctaaaaatggaaggcaatttgaggatgtaacacgtcaaaaaaatcctggggatacacctttcaaatttttgtttgatgagagatgtgctgaatacaagtattatgaatatcggcttgctcaagaagaaaatgctcttgtgcaatcaagggaatcacaggtgcctcgtaatgggggtacaagcacttcatcttccaaacagactaatggtcatcagagatcatctcagcagcatacataccaaattcctgcatctgctttatatgaaagtgctgacaatccaagagcttctggattttcaattcaaacatcatcagtaggaagcagtggtaattgttatattgttgtatctttgtttgttttgttgttttcgaatttgataaatttgattttttcaaattgctgctctaatggagagctacatgaaaaaagctgggcgggaagagaagtataaacctaagcataagcccttggttcgcctcagtcttctaagcaaaaattgtcatcacatgggtgatttcattcctccaaa

SEQ ID NO: 26667 - DNA, 1258 bp, Glycine max
  unsure (1)..(1258): unsure at all n locations
  Clone ID: TF_GmC1209_1
tcccggggtcgacccacgnncgtccggaaaaccaaaaagtcacaaactcatcacaagagtgcacaggagagaaaaacctcttcaacaaaaacacccctttttattcacaccaatcttcactcaacactttcattcagaatgggtaagtcagagaacaagatccacccagaacaaccatcatcatcatcatcaaagccaatgagaccattatcatggtgaagtgacaacaagaagaagaagtacaagggggtgagaatgagaagctgggggtcatgggtgtcagagattagagcaccaaaccaaaagacaaggatatggttgggatcttattcaactgctgaagcagcagcaagagcctatgatgctgcacttctatgcctcaaaggctcctcagccaatctcaacttcccttcttcaagctcctcctcacaacactatatcatccctcaagacactgccatgatgtccccaaaatcaatccaaagagttgctgctgctgctgccaacaatttcttggacaataatgctattgctattaataatgctaccaccccaccttctcctcctcttgcttcaacctcttcttcatttgtatcgtcaccatcaatgtcatcatcatctcctttagaccaaattgatgatgatgtctctcttctgacaccatttggggcctacactactactactgctactactatctgtgacgaaacaaatgaatcaatggccatgatggaatcttggtatgacttggaggggttgcaatccccaaagtatgttgatcaaatgctaagtggggcattctttgacattgattcaacacagttgcttgatgatctgtatgaagaaagtgatattcgcttgtggagtttctgctgagagtgattcattaatttcaagccaaacccatttttgtttttttttgctcacaaattcatattcgtttgtcaggtggtgttatatgaagatatcaatcactgactgaccaaattataattacatattctagggaagaaattcacaaaagggataagacaatttttggtctatcctttgtggatttctacatatgtattattgatgcaatatttgttatgtcgaatttattaatggttttctatgtattattgtgtagtttataaatgaaagggggaaaaagatggtttccaatgtctcagttgctgataaatgctcaaaagataactatcatccttaattttcatttcttttttataatcaaaccgttatatacagaacgcgg

SEQ ID NO: 26668 - DNA, 795 bp, Glycine max
  Clone ID: TF_GmC8074_1
gttcaaggcacacacacattggtgtttccaccaaatacagtgagcaaagttagctgaaaattaaaacatggtttccgccaccgtggattccgattttgcattcttggaatctgttcaacaatacctacttggacatgattccatcaatctcatgtctgaaacccaccaagctgcatctcatgatccattttcagaccctaataaatgtgatggtgattcagggaacattgctttccgaagtgaggatgcaacggctgtggtagcgcgtgatcatgcgccaccaacatggaagcattacagaggggtgaggcgtagaccgtggggaaagtttgcggccgagattagggatccaaagaagaacggagctagggtttggcttggcacgtatgataccgaagagaaggccgctttggcatatgacaaagccgctttcaaaatgcgaggccaaaaggccaagctgaattttcctcatcttattgattccgacaattccgatgaattgtcggagccagtaatgatgacaacttccaagcgaagtttgttagaaatttcatcaccgtcgtcctcgtgttcagatgatagctcagaatcacaagggacaaagaggaggaagagcctggctgaactactgaataaattagccaagaatagaagccaagtcaaggtggaatgttgaagtggctagaggaatatgcatgttgtacaatttgatcaatcattaatatgagacttcaacgattgtaatgtaatctggtgttcatagaattaatgcaattttgttcccaaaaaaaaaaa

SEQ ID NO: 26669 - DNA, 466 bp, Glycine max
  Clone ID: TF_GmC120748_1
taaatttctagcaaataggtggacgaattctaagagcgtcatggattcacagagtgagacccaacaacttgcggtgccaaaaatggaagatttttacttcggtgatcaccagcaagatctgaaggcgatgattgttcctgggttcaaagcgttgtctgggaccaactcggggtccgaggtggatgactcgacctccaacaagacggtgactcgggttgcacccgctgcgttgggcggtgctcactctggcgaatctaattgtaaaggatcagctttgactttatgcgatgttgctgcgaatggttctgatgatagtaataataaggccgttgttgccgtggggtttgatactcggaagaaggttgctcatacgtttggccagcgaacttcaatttacagaggggtcacaaggcaccgatggacgggaagatatgaagcgcatctatgggataacagctgtaggcga

SEQ ID NO: 26670 - DNA, 669 bp, Glycine max
  unsure (1)..(669): unsure at all n locations
  Clone ID: TF_LIB4281-010-R1-K1-F12
cggaattcccgggtcgacccacgcgtccggttttaaattgtggtatgtaattaccaagattttaaattgttgtcacaatccttaatattgtagaatattacagacaaatgtagtagatgtagttgtgattgcggtcgcaatgtgatggcaaagatcccaaaaaccttgacattgtggccacaattgtggttgcttatggtttttcaaaacctttgcaattgttgatgtgatggattttggggtctactgaaaccacgcagtgaccataattgcagtcacattttgcctagaattttgctaactaccatgcaaccataacttaaaaccatgaatgcagtaatcttaattattgtccttgctgtcataattagttgtttggtggtctggtctgggttgacatcattgagtttttgcttttattgaatgcagggattgtgggaagcaggtctatttgggtggatttgacactgctcaagctgctgcaagagcatatgatagggctgcaataaagtttcgtggagtagaggctgatataaactntagtttaagtgattatgaggaggatntgaagcagatgagaggtttgagtaaggaagaagttgtgctcttacttcgtcgacaaatcaatggaagctcgagaagttcaacatacaaaggtgcattagcccc

SEQ ID NO: 26671 - DNA, 1338 bp, Glycine max
  unsure (1)..(1338): unsure at all n locations
  Clone ID: TF_GmC995_9
actgattcatccgaagatgagactgagaaggttcagagcccgagaagagttaaaagaaacgtgtctgagatctctcttccccctcttcctccaccattcaccaccactcctgaaaccagctcctgtgaggtgaatagcggcaaaaatgcaacattgaagggtttcattgaaggtcaaccccagagtaagaagagggttttgactcaccccccatcaacaaggaggaacacttctgggaaattcagaggtgttaggcagagaaaatggggtaaatgggctgcagagattcgtgacccctttcagagtactcgtatatggctcggcactttcaacactgcagaagaggcttcccaagcctacgaggccagaaggcttgagtttgaggctatggcagaggctcaagcttacaaaactagttctgtttctgaacctttggctacaatttctgataataagagtaactgctgtaactcttctgccgctgctatctccgccgctgccgtctccgccgctgatgtgtctgtatctgagaagttttctactacttttgatgacttagaagagagtgtgttgtctcacaattcaccatcctctgtgcttgagctggatacattggcttccaaatcccttgagaagggtaatgtttcaaccgaggaagctattgaggctaatgatttggtggctgaacttgcagggttagaggtaccagatgtcagtctgttaaacttgttaccaccaccatctgattcntggtggtgcagctgctgctgtttcatctgggattgagccaaactttgggcttgattttgattggctatcgtttaatgattatggacaaggttttgatgatttcggtggcttggaagatattcatattggtgggtttgatgacaatgagcctactgagcttcctgattttgattttggtgattttggtgctgatgagtttgctggttggattgaggagcccctgaatataccttgtgcctaagttttgcagaactacgtaggaatatgaggctagatttctacaatattataagttttgttatttataagttagtctttctgtgagatctcaggaatgatgagttagtttttctgtgggatctcaggaatgatgagtgagtgaatggttactatatgcgttttacatttcatttgtttttgatggagttgttagttagagcagtgagatggtgagagaatcctttgggttttcccgtgctgttaaagagccgtccaagggaatctcgaaccatgatactatgtcgtaatttcaaggttcttcaatggcagagtattaatggaatgaaagttaatgttttgcatcgtttt

SEQ ID NO: 26672 - DNA, 440 bp, Glycine max
  Clone ID: TF_jC-gmX3056002C06sg22N22a1
cgcgtgcgtgaagctcggacattcgtgctcgaggaatcgcacaaagtttttttttttatcctattatatatacatatgtctacacattagtgtctcttcgagtccgacggaaaagagagcaagggcggcaccccgcaccgatatggcagaggtgcattgcgagggcaagaactacaaaggggtccgaatgagaaaatggggcaaatggggatgcctaataagactacccaacaggcgtcagaggatttggacgggatcctacaacaccgccgagacggccgcgcgtggctaacacgcggtaatgctctggtcacgtggccgaagcgcccagtttaatttccccgactacccacccgacatggccggtggtacgctcatgacgccgaaacaaagacagatggccgccgaacaattcgccaacacggggccccaccagggac

SEQ ID NO: 26673 - DNA, 468 bp, Glycine max
  Clone ID: TF_GmC6107_8
tcgcgatctagaacttttgttattcttcgagtctctgagagagatgtgtggaggcgctatcatctctgacttcattctcctttttgagacttctaatatcctcagggttttttgggagaattggctaaaaaatggttatatgatccgtgtttgtgctatgatgttatttttattttttctttgtttaatggttctgaatgtctctgttcttactgcgatttttacacttttccaattatattaaagggtctaccacagcgaaatctgtggcattccaagttcgagctgagaaatttgcaaataggaagaggaaaaatcagtataggggaatccgtcaacgcccttggggaaaatgggcagctgagattcgggatcctagaaagggggttcgtgtctggcttggaaccttcaacactgctgaagaagctgcaagagcttatgatgctgaagcacggaagattcgtggca

SEQ ID NO: 26674 - DNA, 871 bp, Glycine max
  Clone ID: TF_GmC112_1
tgggatttttagtccattgaattggatatatttatcctcatacatgatcttaggagacatttgtttttggtaaccactcgtcccaagcctaaataagttaaaacacagaagaaaatgcagaagcggagggcagggaggaagaagttccacgagacacgacacccggtgtacaagggagtgaggcagaggaacgggaagtgggtaagcgagctgcgacaacctaacaacaaaaacgcgcgggtgtggctcggaacattcgcgcaccccgacatggctgctatagcgtacgatgttgccgccttggctttcaagggcgacagtgcttccttaaacttcccgaacgccgccacctcgtttccccgccttaactcgcggacgtgttccgttagggccattcagtttgcggcgacgcaggcggcggagaagcatttttcttgtgtagagtctcaacaactccaaagggagggatcaggctccggaagcttctctttggacgatgattcttcggagttttcgtcccaaggaaggttcttttgggatgaagaggaagtgtttaacatgccggagttgctgaactgcatggcggaagcgctgattatcacaccgccggcgttggaaagagggttcaattgggttggtggcgaaacgactgtggatttgactctgtggtgaaactgatgaccacttaggttctctgcaaaccagagaggaacttgcaatttcgatctgttgcaaaatattatatatactaatagtctaaagatgtagttcatcatatatactagtactgatacattcaaaagttatatagcgtttgctgtatggttgagattttcgtcaaaaacaagctgtatcataaatcttttctgtt

SEQ ID NO: 26675 - DNA, 554 bp, Glycine max
  Clone ID: TF_16347094
cagtggcttccctagcatcttcttctgccagaccaaaatttccaaacttgactttgtttttgccggaaccctccatggtgtactcatcaatatcatcctcaaatataaaaggtggtgaagtcatgtcagctacttcagacccctcatatcatgtgtctcagtttggccaaaaccagcatcaagcaggtagtggggatgcacacaaaatgaacaacaacctaacaaattcgcggtccaagtctttcaacgagaattggttgagtgccactaggactcagcctttgaagtatggtggaagaggcaagctgtttaaaggtgtgaggcagagacactgggggaaatgggtagctgagattagattaccaacaaacaggacaagggtttggctagggactttcgactccgccgaagatgctgccatcgcatatgacacagcagcatacatactacgaggagaatatgctcaattgaacttcccagaactcagcatgtaattcaagcaaattctctgaaaggctaccactgctgcacttgtggaggcaaaatacaagcaa

SEQ ID NO: 26676 - DNA, 1723 bp, Glycine max
  Clone ID: TF_GmC6807_1
caagtttgttcactccacacaaaagcaaccatatttttcagttttcacacctaaatcctttgacccatcatcactattaatctacaagctccatgttttgtttgcaatccgcttagtcaacttgttggtatcatcagagctttgtgaaacataaagttaaagcagggcatattgcagagggagcaaaccgaatatttcaaaacttgttctactttttattatcactgttgcatttatttcagatatttagtatttgcctacaagtttgttctttagtttaaacacagacaagacgactctttatggcggctataaccaatttgaacttttcttccttgtgtaaaaaaaggttttgtgtgcgtttgtgcgtgttggagttggctttttgaagtgggtgcatgctgaagttatatgtgtatgtgaaagatgaagaacaatagagataaagaaaagggtaacgacgttgaccagagttacagacagcatcacacgttgtcaatgccaatgatgttttctggtttgaacagagagaaggagatgtcagccatgatctctgctttgacacatgtggtttgtggagaagatgagcatcatggtgctgattactctcttcttaatcacaatattaataatactaatagtgcagttgttggtgatgatgattttactgtaacatcaaatatggcttctggttctatgccaccttcttctacttgttcatctcaaggtggcaactctgttctcaagagaagacgggaatatgataatacaaatgatttctcacgtggaggttcattccctgctatttcaacaattgctgaaagttcaagcacggtaacaagaagaacggcgaatacagtatacgattacgaatacagaacagagaacgtgaaagtagtggaggaagaaccgaggagaaaatacagaggagtgagacagaggccatggggaaaatgggctgcggaaataagagaccctttcaaagctactagggtgtggttaggaacatttgaaaccgctgaggacgcagccagagcctacgatcaagcttcattgcgtttcagaggcaacaaagccaaactcaacttccctgaaaacgttagactcagacaacaacaagaacctccgttgaacttgaaccctccaccaccacctaatcatggggctattttgtcaattccttcaaccactgttcacactgaggctcttcagggttcacttggttcaagcaatttttatgagcattcttattcgcatcttcatgagtttcccgtgagtctctacgatcagattgcagagtcaacatctactactatggcttctcatcatcttcaatttttgccgccagcttcttcctcaactatgactatgacatctccgcaggcaccaccttcgatttatcctacgcatccagcggcatggtcttctggttatagttataatagctcttcttctgcttcggggtgatgtaaattgcgttttatttcaagtctctctcgtttttgccccttgtattgtatcattgttactctcctctgttttttgcatttgcaccacgaccatttccatccaggagtggttttttgtgaccatgttattatgatcaagcaaatcatataattcacagttaacagtttagtatctgtgtataatagagttttatttatcctcccatcacatttctccaaacaaccatatcaatcttatatctcttccttcttct

SEQ ID NO: 26677 - DNA, 1949 bp, Glycine max
  Clone ID: TF_GmC1423_1
ctgtgttacaagttcacctgctatcactaatactgttgccactgataccaagaaaagggggcttcaaatggtggaccagaatcagaagcaaataggtcataggaaatccatagatacctttgggcaaagaacatctcaatatagaggtgtaacaaggcataggtggactggtagatatgaagctcatctatgggacaacagctgcaagaaagagggccaaggaaggaaaggaaggcaagtttatctagggggttatgatatggaagaaaaagcagcaagagcttatgatatggccgcactcaagtattggggaccctcctctcatataaatttcccattggaaaattatcaaaacgaacttgaggaaatgaagaacatgacgagacaagaatatgttgctcatttacgaaggaaaagcagcggattctcaagaggggcctccatgtacagaggagtaacaaggcaccaccaacatggaaggtggcaagctcgaattggaagggtagccggaaacaaagatctatatcttggaacctttagtacccaagaggaagcagctgaagcctatgacattgctgctattaaattcagaggagttaatgctgtcactaactttgatataacaagatatgacgtggaaaaaattatggagagcaataaccttcttagcagtgaacaagctaagcggaaaagagagatggatgatggaactagaagcgaggctacagttaaccaaaaaccttctactactcaagaaaccgttctgatgcagaaaagatgcagaagccaatcagaatggaagatggttcagtttccatcctcccaacagcttgatcagtatcctcaaagaattgagggttgtagaactcagcccttctcaacagctttagataacatgtttctcaaacaagttgagaggaagagaagaacatgaccagacaagactatgtcgctcattttggaaacaaaagcagcggattctcaagaggggcgtccatgtacaaaggagtaacaagggctcacaggcaagcatttacacatgaccaccttcatggaaggtgtcaagctcgagatggtagagtggaaactaacaaagatctatatcttggcaccggtactcaacatgaggagcagctgaagcctatgatattgctgctattaaattcagaggagcgaatgctgctaccaacttgacataacaagatatgacgtggtaatgaacatggcaagcaaaaaccacccaagtagtgagctggttcagcgtccccgcccccagcacaatgatcctcagtgcagtgatgagagtcatagaactcagcccttctcaacggacttagataacatgtttctcaccaagttgaggaacggagcaacatgggaacacacttgtcaaatccttcttctctggtgacaagtttgagtagctcaagagaagagagcccagataagacaagcatgccaatgctctttggaatgccttcaacagtgtccaaattattggctaacgtggattcttgggatctatcttccaatctcaggactgcgctttctatgcctcagatgccaatttttgctgcttggacagatgcataatcttatgttttttacctctatcaaaatagcaaatgcttgtttactaaaacaggatgttaatgcctagctagtacaatagagagcttgtgcggaattttaaaatgttaactgttacatcaagcattttcctcgtacaatgagaggaaagcctcctaaagttttatatcctaggactccaaattcgtatcatcaatctcaagtgaaatttcaatcctttttattgtctttttttgcatgcatgaacaacacaagaggaaggggttgtagctagtcaaatggagggtctaaatattatatcatcacatcactgtcagcaagtttaatttaaactttcaaatcattacattttagcaaaa

SEQ ID NO: 26678 - DNA, 531 bp, Glycine max
  Clone ID: TF_GmC1388_2
attgcttccatttttcaagcctacatatacaacactactttcagttttttctgtctctgaatctcaaactcttcggaaagattaacattaatggctccaagggatatcaatagatccaacgttgttgttgttgccggagtatccaacccgacccataaagagatccgttaccgcggcgtgaggaagcggccgtggggccgctacgccgccgagatccgcgacccaggcaagaagacacgcgtgtggctaggaacgtttgacacggcggaggaggcggcgcgtgcgtatgacacggcggcgcgtgagttccgcggcacgaaggcgaagaccaatttccccacccacgcggcggcggcgcgtagtcccagccagagcagcacgctggactcctcgtctgcgccgccgctggaccttactcttgccggcccactcaccgccgcgggcgcgttggttttctccggtggcgcgtcccgtggtgttcttcgacgcttttgcgcgtgccgaggtgcgcgcgtcgttcgatcttgccgt

SEQ ID NO: 26679 - DNA, 451 bp, Glycine max
  Clone ID: TF_jC-gmle01810047f08a1
tgcttgtttatcattttcttacttacctatcacgctctgccacacaacttcgtctgcgcaataacggaataaaaaaacaagactgattactattatggcgccgagggatcataccacaagcaacgctaagcgttaacggtaacggcaacagcggcctgaaggaggagcattttcgaggagtgagaaagaggccgtgggggagatacgacgcggagatcagagatcctggcgagaagagccgtgtatgactcggaacatttgagcacagaggactgatgcagccgcgtgtatacgacgccggagcacgagagttatgtggtcatacggccaacgacaacacttccctgaggccttgggaaaatgttaagaactctagccacatccagagcaggaccgaacagtccttcagccgctagcgctacatcgtcgccgatgccttgcactagacctt

SEQ ID NO: 26680 - DNA, 424 bp, Glycine max
  Clone ID: TF_21994429
cctcgtgccgaattcggcacgaggctgtcattcattttcacattcacacatcaaacccaagaactttctattccttaaaacaatggtcgagcctcctgcggcagcagcaacctcagaatcagacacaacaggaaacaccaacactccttcaccgtcttcttcatcctcgtcgtcaagttctaagaagcgagcaagagacaacaacaataatagtaacagcagcagtaacaagcattctgtgtatagaggtgtccgaatgcgcacgtgggggaaatgggtgtcggaaatccgcgagccgcgaaagaagaacagaatctggctccgaaacgtcgcccacacccagatggcggcgcgtgcgcacgacgtgggcgccctgaaaataaaaggctctcccgcattctttaacttcccgaaactgggggca

SEQ ID NO: 26681 - DNA, 968 bp, Glycine max
  Clone ID: TF_GmC945_1
attcggaaactccaaatacctcactccacagttgaacaacaacaccaacaccaacttctggaatgaacattttcaaatccccactggaccatgatttgaactgtggtggaatattccacgactcagcagaagcatcttattcgtctgaaacaaggagcaccccctcagacgaagaagtgattctagcgtcagcgcggccaaagaagcgagcgggaagaagagtcttcaaggagacaaggcaccccgtctaccgaggagtgcgtcgcaggaacaagaacaagtgggtctgcgagatgcgagtccccaacaacaactcacggatttggctcgggacatacccaacgcccgaaatggccgcacgtgcgcacgacgttgcggcgctcgcgctcaggggaaagtccgcgtgcctcaacttcgcggactccaggtggcggctgacggtgccggcgaccaccaacgcggaggagatacggcgagcggcgggggaggctgctgaggcatttgcagttgcagatggggacgacgttaatattgaacaacagcagagtgtgatggccacgaatgatgatgaagttcaagagcctctccagcaggaggaggttcaagacttgcatgatttgcttttgagtattgcgaatgagcctttgatgtctcctccaccctgtgcaagagatggtagggactggaatgacgtggacatatttgatgatgatgaaatctcactatggaacttctcaatttgacgcgtacgtcattaagagtatgactgtatgcatgtttgatgataagcgaaaacacctttttgtgtatgtgattttctatatttttagggacctgttgtgtgtagataaattaagtagcactcgattgattaagttgagtggagttaaacatattgtagttgtatctatgatttgtttcgtgattaaattttaatgacaagtacagttggcaaattcaaaaaaaaa

SEQ ID NO: 26682 - DNA, 1910 bp, Glycine max
  Clone ID: TF_GmC1811_1
ggtacttgtttgtgccttattccctctgattctggaacaagttcccgttctttcttatctttctccactgttttattttctccctgatcttcctctaccttaatttctgtcctatttgttcttctgacagctactcttttaccttcaccagctcattcttcttctatcttcttctgctatatatgctcaacctttaaagggtatttctctctctctctctcaactagtttgagtttcattgtactttgatatcactgcagaagtacatgagactcttaaaagagggtatgctttaaagaccagaatcagaagctgattaaaggagagaacctttccaagacatggctatgtttgatctcaatgttgacatcaaccactgtgatgctgatgctgactcaagctgtgatcaaaagggattggtgctgcaaagtttcccacctgaaatctcagattccaggacctccagctcctctgtgtggaaccctgtagaggaagattcctcaaacaattcctctcccttgatttttgacatactcaagaaagagagggatgagtcagagtttgatgcagccactgaaagggtcaataaggagcaaaacatggcaccacaagaggcagagatagtggcaaggacacttttccctgtgactgctgctgttgataaaggagttagagtgcctgatttcaaattggggctgtgggggaagactgaatgcttgaacttgtccttaccagagcctgatggacaaaatggactcagaaccttacagcagaaggtacctcctgtgaggaaaaataggagaggaccaaggtctcgcagctcgcagtaccggggtgtcaccttctaccgcaggactggtagatgggagtcacatatttgggattgtgggaagcaggtttatttgggtggatttgacactgctcaagctgctgcaagagcatatgatagggctgctataaagtttcgtggagtagatgctgatataaactttagtttgagtgattatgaggaggatttgaagcagatgagaaatttgagtaaggaagagtttgtgctcttacttcgtcgacaaataaatggaatctctaggagaagttcaacatacagaggtgcattagcccttcgcaaagatgctcaaggagaaccacgaatgggaccatttgttggcatgacatgttatcctaagccatccatcaattgtgatgatggaaaagcggaggcaagttttaagccctgttcctataagggagaaataattgtgaattccaacatgacaggcacttgccataatcttgatttgagcctaggaatttctccgtcttctaaaagattgaagaataatgactatagtggagggtattcctttggatgtatgacttgtaagatacccgaggaaagaggaccaatggagaaggtcatggtggacagaataaaaaatgttcctttgcaaaaaatttccaacttggcttggcaactttgcagcaatggcagcattgtcccaaggccattccaaccaaatgcagcatcatcaggattcgtctcttcttctagctgtctcatcacccgcacttccaatcagcacacatattaattatgccaacaatttggcattaattggctcaaccacagtactactactagttgaaaccaccagaaacaaagcatatttaccctgcttttttgaagattagatgagcaagagtacttcataaccacatgtacctatagtataagattctattgatttcatcaagcatgatggtatttaataatattgctaagcattgcttacaatggctacccgatattttctgtattcattatcgtgatgtagaacacaatattgccttgtgtaaaagacccttgttgaagtatgtatatatttgttggttcttgttaatcattagct

SEQ ID NO: 26683 - DNA, 1265 bp, Glycine max
  Clone ID: TF_GmC1707_1
ccagcgtccgcgacaacctcggctcagtgtctctctgcactgcaaaacccctataacccttcccttcctcgcacttcattcttttatttcatttatttatactcttcatgaaaaattaagggaattttcagagagagagagagggagagagtagttatggaaggagaagaaggaggaattgcaacaaagaagagagggaaagagggtgaaactgagacgacgcgctacaaaggaatcagaatgagaaagtggggcaagtgggtcgctgagattcgagaacccaacaagcgttcaaggatttggctcggttcttactccacgcccgtcgcggcggcgcgtgcttacgacaccgccgttttccacctccggggcccctctgcgcgcctcaacttccccgagcttgttgccgcggagggccccgccgccgacatgtccgcagcctccatcaggaagaaggccaccgaggtcggcgccagagtcgacgctctccaccgccagcacccccacgcgctgcctgctggagaattcgccgaccgggttgaccttaataagatgcccgaacccgagaattcggattgtgactactgggacagggattaggagtgttgtttagttgttaatttggagtttttcaaaaacaaatataaaattataaccttgttttaattaattttttttttattggggaaaaggggttagagggcacagcaatggcctatgatgccagggagttgggttgaaaaagagggagtgagccatgttaaccactcaagtaattataatattataatagctactattctactgaagagtaaaaaaagatggatgttaggtgtttttatgagttgtatatgtgaagagaagggaccattggggagggaagacgctgttgtggtcactactctgtttcgatgataacgatgggtgatgcatggggtcggttaatcggttctgcgtctcagatttttgtctagttggagtcaaatctcaaacgacattgtatccaacaaattggaaaatagaaaaccagaaaatatgaaagaaaagcaaccgaaaatgtaagaaagaaagagatgtgtcttcaatgtgaaaccaaaattgtagctcctcaaacctcgatcgttgttccacaattaactattacaaacatctcccccaaaggttgtgttttatatttgttttgtgatccgctgtagatattatttcttattttatttaaaagatgtaggttaaagtataagtaatttaataacagtttggttctg

SEQ ID NO: 26684 - DNA, 280 bp, Glycine max
  Clone ID: TF_LIB4167-012-R1-N1-B8
aaagggaaatctccacaagccattatggggttgtcacaaatacacaaaataaagatatgggtatgcttctttcattcattagcctctgaatagcatattttgttgagcaacataggcacccaagaaaaaactgcgcatgcttatgacataacagccattgagtacagaggaattcatgctgtaacaaactttgatttgagcacttacataaaaaggttaaagccttcaggaggagggaccccaaaagcaaatcttgaatcacatgcggggctagagcatg

SEQ ID NO: 26685 - DNA, 1987 bp, Glycine max
  unsure (1)..(1987): unsure at all n locations
  Clone ID: TF_GmC6107_1
tgccaaaactgaggcttgcgttattcttcgagtctctgagagagatgtgaggaggcgctatcatctctgacttcattctcctttatgagacttctaatctcctcagggttttctgggagaatggactaaaaaatggttatatggacccgtgcancgcgctcttctatggaggggtgtgaccnacttagtctaatggttctgaatgtctctgttcttactgcgatttttacactgttccaattatattaaagggtctgccaaaactaaggctttattgttacaccgtttagctgaggatcgcctatttctgttttcttatagttccatctttcctcccttgggaacggacgcttttgttattcttcgtgtcttgttgtgtttttcatctgagatgtgtggaggagctatcatctctgatttcattccggcggcggcgatcgccgggtctcgccgcctgaccgccgattacctgtggccggatttgaagaagcggaagtctgacttggacgttgacttcgaggctgatttcagggattttaaagacgattctgatatcgacgacgacgacgacgatcaccaagtcaagccctttgctttcgccgcctcttctcgtctgtctacggcagcgaaatctgtggcattccaaggtcgggctgagatatctgcaaatagaaagaggaagaatcagtataggggaatccgtcaacgcccttggggaaaatgggcagctgagattcgggatccaagaaagggggttcgtgtctggcttggaaccttcaacactgctgaagaagctgcaagagcttatgatgctgaagcacggaggattcgtggcaagaaagccaaggtgaattttcctgaggcaccaggtacttcttctgtaaaacgttccaaggtaaatccacaggaaaatcttaagactgttcagcccaatctgggtcaccagagttcagtgctggcaacaatcacatggactcctggtggaacagaaacccctagttagctcagtatgctaacatggcttccttccctggcagtggaaatgggctaagatcccttccttcgtctgatgatgcaaccctttacttcagttcagatcaagggagtaattcatttgattatgctcctgagatctcatccatgctttctgctcctttggattgtgaatctcattttgtgcaaaatgccaaccagcagcagcctaactctcagaatgtggtatctattgaagatgattctgcaaagacactctctgaggagcttgtggatattgaatctgagttgaagttctttcagatgccttatcttgaagggagctggggcgatacttcattggaatccttgctatctggtgacacaactcaggatggtggaaacctcatgaacctttggtgctttgatgacattccttccatggctggtggagttttctgaaccgctttttctttggtctccctgtgtgtaaataaagctacaagttgtttttctctgtttttgatttttgttgcatttgttgttctcttgttggacacatccccccatgtgtctgaaaaaaaaaatgtaatttccatttttgttgctttctggaatggttgtcatccgtgttgaagatggagttaaaacaattaactcgctcaagcatctcttgtatctaaagtatggggctatatagttatttaggtgtcctttgccttgtcaaaggccttagttttggggaaatctcgattgttgttcgagggtgattatatatgatctgtgaaacaatcttggctgctgataatttttaactgggttgtttctctaaaagaacaaaagaagagagaacaggagcacccttctgaaaccaaggtacaagagtggagccatttggttcctccaagatctaaagggccaggctgctagcttgcgtcaatcaaaattaagaccaggatatataatactaatagagattgggtctgagcctaacccgcgaagttatgaatcaagg

SEQ ID NO: 26686 - DNA, 998 bp, Glycine max
  Clone ID: TF_GmC1772_2
cggctcccacgcgtccgctcaacaaatgaatattctcggacaatcattcaacgaatcaaacaacggaagctactcttgttcgtcgccggagactggtagctcctctaacattccaaacacttttcactccgacgaggaagtgcacacactagcttcggcgcgtcctaagaaacgtgcggggcgtcgaatttttaaggagacaagacacccggtgtaccgaggagtacgaaggaggaacaacaacaagtgggtctgcgaggttcgtgttcccaacgacaagtccaccaggatttggcttggaacgtatccagtgcctgagatggccgcacgtgcgcacgacgtcgccgcgctcgcgcttcggggcaagtcggcttgcctcaacttcgccgactcggcgtggcggctgcccttgccggcgtcgacaaatgcgaaggagatacggcgagtggcggcggcggctgctgtagcgattgcggcggaagacagctgcggcgagcagttacagaatagtattgtgaatgatgccgttgctgatgattgtgaagttagcagaagtgacgtcagctttgatgaagattccaatagcaacaaaggtttgagagttttttgtgatttggatgaaattacaatggcagatgcaccggtttttgaggacatgcgtgagtggcttcagagtatggcggatgagcctttaagatcgcctacttttgtaacatatgttaatgttagggatgtctggaactttgtggaggatgatgctgaggtatccttgtggagcttcacaatttagtgcgtttagtttgttctttgtcttctttcgtttttggtttttgtacataattaggaacggaggagtacgaaaatgtaccaagaccgagacgatataaggagctagctatatagggaggatcataaaactgtaagacattgcaaattttctcattcagttgtttttgtaattctcataatcatatagataaaggaaaggtttgtaaaat

SEQ ID NO: 26687 - DNA, 2405 bp, Glycine max
  Clone ID: TF_GmC55_1
acgacagaagggggagtttttggttatctgagttctgaattctgaatcctttccccaaatcacacttgcgagcccactctagtgccccatttcatgtcatgcttgctagattcagctacacagctaagctaagatatatagatatagctcatcacacgctttcaagtttccaaggcacatagacacagacaccctcagaacctgaccaaaatacttactactatatcctactcacattttacattcccacctctttcctttcccccttaccattctcgagattctcgcttttactacattactctctccttcatactgggtttaaggtagggtttatttaactaggaagaaatttttaacaaaataatagagagataggcaaaaacgaaaagacgtggtctttctcattgatatatacatacacagatccctatggaatgaagtgggtgctccccaatcttcgcttgcgataattcattctttttgcttagtttaaagagaccagttttgtggtgttcggagggagacagatttgtgtgttgagcgcatagaacgatgagtttggttggtagaggagcaagttttgcattgtagtagttgtagcaatagccacacaacaaaagaaaacaaaaaaccaagtcttcgtcatcttcgtatgcagagatttttcttcaacatgatgatgatgattagtttatttaccaaacaatgattgccttgccttccttcgtgagatactggtagcaatttcaaaccttttcgagtaaccaaaaagaaaagaaaagaaaaaacaaaagctagaagatgaagcgcatgaatgagagtaacaacaccgatgatggaaacaatcataactggttggggttctctctctcgccccacatgaaaatggaggttacttcggcagccactgtttccgacaacaatgttccgacaaccttctacatgtccccttctcacatgtccaactccggaatgtgttacagtgtcggggaaaatggtaacttccattctcctcttaccgttatgcctctcaagtctgatgggtcacttggtatcttggaagctctcaatagatcacaaacgcaagtgatggtgccaacttcgtctccgaaattggaggacttcttaggtggtgcaactatgggaactcacgaatatgggaaccacgagagaggtttgagcctagacagcatctattataactcacaaaacgcagaggctcaacccaacagaaaccttctttcacatcccttcaggcaacaagggcatgtgaatgtcgaaacacacccttattactctgtatttgcttgtcgaggtttgtatcaggcaccgtcggaggaagaagcaacaaaggaaacgcacgtttcagtaatgcctcaaatgacaggaggaggtttgcaaaactgggtagctccaacaagggagtattcaactcatcagcagattctggagcagcaaatgaactgtggcatttggaatgagagaagtggggtatctgttggaactgtggggtgtggagagttgcaatctctaagcttatctatgagtcctggttctcagtctagttgtgtcactgctccttctggaacagattctgtggctgtggatgcaaagaagagagggcatgctaaacttggtcagaagcagcctgtgcatagaaaatctattgacacatttgggcaaagaacgtcgcagtatagaggcgtcacaaggcatagatggactggtaggtatgaagcgcatttgtgggataatagttgcaagaaggaagggcagactaggaaaggaagacaagtatatttgggaggttatgatatggaagaaaaagctgcaagagcctatgatctcgcggctcttaagtactggggaccttcaacgcacataaacttttcgatagaaaattaccaagttcaaaaaaaaaaaaaaaaaaaaaaaaaaaaaagcggctgcgttgcacacttgagaagaaaaagcagcgggttttctagaggtgcttcaatatacagaggggtcacaaggcatcaccaacatggaagatggcaagcgaggataggcagagttgctgggaacaaagacctttaccttgggacgttcagcacccaagaggaagcagcagaagcatacgatgtagcgccgatcaaatttcgcggcccaatgtcgtcaccaactttcacactttcagcaacgatggtggagagagccagggcagttgcaatctcctcgctggggtgcgggcagggcgtatgttggagatcgagcctagctccacgggcctatggcacccaagaggaagcagcagaagcatacgatgtagcggcgatcaaatttcgcggcgcaaatgcagtcacaaactttgacatttcaagatacgatgtggagagaatcatggccagtagcaatct

SEQ ID NO: 26688 - DNA, 2027 bp, Glycine max
  Clone ID: TF_GmC601_1
gccccctctcactcactcccactcccacacttcactccattccactcccaatcaaaaacaaacaactcatcttcccaaattcaaatcacacacacttttctctctgtctctcagattagagttggggttagtgtttggttcgatcatggcttcgtcttcctccgatccaggaaagtccgcggagacgtcggaggcggcgttggtggtggcgaacgaccagctcttgctctacagaggattgaagaaggccaagaaggagagaggttgcacggccaaagagcgcatcagcaaaatgcctccgtgcgccgccggcaaacgcaggtccatataccgcggcgtcacgaggcacaggtggactggtcgttatgaagcgcatctttgggataagagtacgtggaaccaaaatcagaataagaagggaaagcaagtttatttgggggcgtatgatgacgaggaagcggcggctagagcatatgatcttgctgctctcaaatattggggtcctgggactctcattaactttcctgtgacggattatacaagagatcttgaagaaatgcagaatgtgtcgagagaagagtaccttgcatctttacggcggaagagcagtggtttttcaagaggactagcaaaatatcgtggactctccaggtgcgaatctatcattttttttgctgaaattgtttggcagttaaattattatttgtatccacatctgagtctgtgtggggtatgtgtgtgtggagctagttcttctgtgctctgctacacagcttcagttttttatgatctactttagctgtcataaagtacatcgattccaacatggatttgactgctaacttaaactcttcatttcattttgcatgtgttgctaccaaaactagtcgatgggatccatcgtatggccgtatgtctggatctgattacttcaatagcatgcattatggtgcaggggatgattctgcagcagaaagtgaatatgtaagtggtttctgcatagaaagaaagattgatttaacaagtcacatcaaatggtggggatctaataagagtagacattctgatgttgggacaagattatcagaagaaaagaaacttggttctgctggagatatttgcattgaaattaagcaattggagcagaaagttcaacctacagcaccttaccagatgccacagttaggaaggccccaaaatgagaaaaagcatagaagttcttcagtttctgccttaagtatcttgtcacaatctgctgcttacaagagcttgcaagagaaagcgtcgaagacactggaaaatatcatagataatgatgagaatgaaaacaaaaatacaatcaacaagttggatcatggcaaggcagttgagaaaccatcaaatcatgacggaggcaatgaccggcttgacattgcaacgggaatgagtggaacaatgtctcttcaaagaaatgtttacccattgacaccattcttgtctgcaccacttttaacagcctacaatactgttgatccattggtagatcctgttctctggacatctcttgttcccatgcttcctgctggcctttctcatacagctgaggttacaaagaccgagaccagctcaacgtacacgatgtttcggccagaggaatgaatggttggacatttggatttccaattgaagaagaaaggctcaaaggcaagcatctgaaagctgagcttgtaccgaacaaagaacagaatataggtctgaagtgctcaaccaggtctaagagaattctcccatggcttttttttgccagattacatgggttatagaggtcagagaaaagaaaatatttacatcgatgataaatatagaattagcacgaatcttttcatttcaagtcagatatgtatcagttgacatctctttcatgtatatgcagtcagagttatagataaattttgaatttacgcggaatattctgtacagaataagaggtggaattatgcaaggacgtggtaattaatttaattgattagcgtatggtttttttcaaa

SEQ ID NO: 26689 - DNA, 1201 bp, Glycine max
  Clone ID: TF_GmC90_1
gttattatcaccttcaactgccaactgcaaaaatctatcttctttcgggatcacttgaccgagagtaagagactaatccctcgagatactgatactgaaacctatcgttcttcacatcataaccatgccgttccagcaacggtgcatcaagcagcagagcctccaatgctaacactgggcgccaccctgtgtaccgtaagttactcaccttcaccttcaccttcaactgccaactgcaaacatctaactactttcaggttcacttagccgagaatcagagactaatcactagagataccgagacctacttttcctcacatcaccaccaacatgcgttccagcaacggtacatcaagcagcagggcctccaacggtaacacagggcgccaccctgtttaccgtggagtgaggcgtaggagtagtggtaaatgggtttctgaaatccgtgagcccaaaaaacctaacaggatttggttagggacatttgccacccctgaaatggctgctattgcctatgacgtggcagcgcttgctcttaagggtaaggatgctgagctcaacttccctaactcggcttcctccctccctatccctgcatcatctgcagctcacgacattcagatggctgcagcactagctgcaaccgctgtcggagcagcgaatgatgcactggaaggaagccaaggaggaaatgtttcggtttcattggcggaagagttttcagggggaaacttaaatcactttgtggatgaggacttgatctttgacatgccgaatattctggtcaatatggctgaaggaatgctactcagccctcctcgttttgataattttgctgctaccgactatgaatacatggatgaagatcctaacctctgggggttccctaattactagttactacccatgggataattaaaagactttttatattactaatgcaaaaatcttaagaaggaaaggtaagtaagctgtaataataaattatgggagaactcttacatccagactttgcttagacaccaggaaagggtatggtgtgtgtgtggaaagtgtatctttctttccatatgttttttttccacctagtgtacagtggtaccttctagctatagtgaggtttgctgctgttgcacctcaaactcaaatatgtatgtaatgtttatataatgtgttaattaaataatcttttttggtcatt

SEQ ID NO: 26690 - DNA, 998 bp, Glycine max
  Clone ID: TF_GmC90_2
ctcaccttcaccttcaactgccaactgcaaatatctatcttctttcgggttcacttgaccgagagtaagagactaatccctcgagatactgatactgaaacctatcgttcttcacatcataaccatgcgttccagcaacggtgcatcaagcagcagagcctccaatgctaacacagggcgccaccctgtgtaccgtggagtgaggcgtaggagtagtggcaaatgggtttctgaaatccgtgaacccaaaaaacctaacaggatttggttagggacatttgccacccctgaaatggctgctattgcctatgacgtggcagcgcttgctcttaagggtaaggatgctgaactcaacttccctaactcggcttcctccctccccgtccccacatcatctgctgctcgcgacattcagatggctgcggctagcgccgcagccgctgtcggagctgcgaatgatgcacttgaaggaagccgaggagggaatgcttcggtttcattgacggaagagttttcagggggaaatttgaaccactttgtggatgaggacttgatctttgacatgccgaatattctggtcaatatggctgaaggaatgctactgagtcctcctcgttttgataattttgctgctaccgactatgaatacatggatgaagatcctaacctctgggggttccctaattactagttactacccatgggatgataaaaaaaaactttttatattactaatgcaaaaatcttaataaggaaaggtaagtaagttgtagtaataaattatgggagaactcttacatccagactttgcttagacaccaggaaaggtatagtgtgtgtgtggaaagtgcatctttcttttcatttggttttttttcaccttgtgtacagtactaccttctagctatagtgaggtttgctgctgtatgttgcacctcaaatatgtatgtaatgtctatataagttgttaattttaaataatctttttttggttgttt

SEQ ID NO: 26691 - DNA, 1530 bp, Glycine max
  Clone ID: TF_GmC718_1
cgccgggtcgaaaggtttcgtggcagtggcgagtgaagaagctatgcctgatgagtgagtcatttttttctctttcacttctgctttgagatggcaaagtcgaagaatcacacagcacacaatcagtcctaccaggcctgcaccttcaccttcccttcgagatggcaaagtctaagaatcacacagcgcacaatcagtcctacaaggcccacaaaaacggcatcaagaaacccaagaggcatcgccacacttccaccaaagggatggatcccaagtttctgaggaatcagaggtacgcgaggaagcacaacaagaagagcggcgaaattgccactgaggaagagtgaagtggcactttctaacggaaccattagggtttttttttaagctcggttttttttttgttttattttgtttttaatggttgactttgtttgaaatcaacgttcagtagtataattaaatttgttttcagagaatgcagtgctcttatagcaattattttcctggtttctgctgaagacccttgaattatttatttatcagtgaaatgaatgttaaggtgttttgtgtttcttagtcaagagaccaaaaagaaaagaaactcacagctattgaatttcacttcacttcacttgcatgccaaatgaaaacaacctcttcccagaatcttgtcggtatttaactccctcgatttcacaacaccaataacaatgagagtttcaacagagacagagccggagactaaaaagataaaacgcattcgcggcggcggggactcgagcaagcaccctttgtaccgcggcgtgcggatgcggaactgggggaagtgggtgtcggaaatccgcgagccgaggaagaaatcgcggatatggctaggcacattccccacgccggaaatggcggcgagagcgcacgacgtcgccgctctcagcatcaaaggccccgccgccattctcaacttccctcacttggccaactcgctcccccgcccggcttcgctggcgccgcgcgacgttcaagctgcggcggcgaaggcggcgcacatggacccttcctccctctcctccttggtctccgcaatggacttgtcctctgcctctgacgagttgagccaaatcatagagcttccttctttggaaagcaccgatgatggctctgttgacttaaagaaggagtttgtttttgttgattcccttgatgcttggatgtatcagccaccctttggttttgacaccgaacaagacactggtttcgagggtttgatgtggaattactaggttcgatccaagtttctattctatgtcttatgttgtataaattaatatcgatctcttttatgttttgctttgcgtgtgtgtctataagcagtaagcagccacttgttgtttttctttcgggggctgcccgtgccactcgatcgctgtcgtattcatcatcgagtctatctgtcgtctgtcttttttcctgattcctctgtttttaattgtaaatggctagatgaataaagtaagaggagaaattttcttt

SEQ ID NO: 26692 - DNA, 1497 bp, Glycine max
  Clone ID: TF_GmC718_2
tacggctgcgagaagacgacagaagggtacggctgcgagaagacgacagaagggggctggtcgcaactgcactttcacttttgctttgagatggcaaagtcgaagaatcacacagcacacaatcagtcctacaaggcccacaaaaacggcatcaagaaacccaagaggcatcgccacacttccaccaaagggatggatcccaagtttctgaggaatcagaggtacgcgaggaagcacaacaagaagagtggtgaaacagccaccgaggaagagtgaaatggcactttctaacggaaccattagggtttttttatgctcatttttttggttaaactttgtttgaaatcaacgttcagcagtataattaatttgtttacagagaatgcagtacttttatagcaattttcctggtttctactgaaaacccttcaattactttttatcatcaatggaatgttaatgtgttttgtgttttttagtcctctttaaaaagaaaagaaactcacagctattgaatttcacttcacttcacttgcatgccaaatgaaaacaacctcttcccagaatcttgtcggtatttaactccctcgatttcacaacacccataacaatgagagtttcaacagagacagagccggagactaaaaagataaaacgcattcgcggcggcggggactcgagcaagcaccctttgtaccgcggcgtgcggatgcggaactgggggaagtgggtgtcggaaatccgcgagccgaggaagaaatcgcggatatggctaggcacattccccacgccggaaatggcggcgagagcgcacgacgtcgccgctctcagcatcaaaggccccgccgccattctcaacttccctcacttggccaactcgctcccccgcccggcttcgctggcgccgcgcgacgttcaagccgcggcggcgaaggcggcgcacatggacccttcctccctctcctccttggtctccgcaatggacttgtcctctgcctctgacgagttgagccaaatcatagagcttccttctttggaaagcaccgatgatggctctgttgacttaaagaaggagtttgtttttgttgattcccttgatgcttggatgtatcagccaccctttggttttgacaccgaacaagacactggtttcgagggtttgatgtggaattactaggttcgatccaagtttctattctatgtcttgtgtttgtataaatttatatcgatctcttttatgttttggtttgtgtgtgtctataagcagtaagcagccacttgtggtttttctttcgggggctgccagtgctactgatcactctcgtattcatcatcatgtctctgtgtctttttcttaattcctctgattttaattgtaaatggctagatgaataaagtaagaggagaaattttctgtaacttgttttggtacaaaatgtttttactcttcttaagattgcgtaatccatgaaatggagtttgagatgggaagtacta

SEQ ID NO: 26693 - DNA, 515 bp, Glycine max
  Clone ID: TF_uC-gmroLIB3259P226b12b1
agccgatgagtatgataaatcagactctagcaaattttgcttcaaagtctttgtcaatactcttatcggcttcagaggcgcgtgagaaccaatgaggtgaggaaaatttaacttagctttgctgccacgcatctcaaaagcagctctatcataagctaaacccgcttcttcttcagtttcgtaagtcccaagccatatcctagcaccattcttcttcggatctgttatttccgccgcgaacttgccccaaggtctacgcctcacaccccggtaacgcttccatgctggtggcgcgtgaacttcacgctccaccttagggtgttctcttttgcatgctaacgacccttctgcatcatggacaccttccaagcggaacgtagtagagcttgggaatgaattgtacgttggagaatagcaaatttcgtgattggaagcgttcatgagtgtgttggaatcgtgctcaagctcaagacgacagtggtgaatagattccactgaagagaaatcacaagata

SEQ ID NO: 26694 - DNA, 1331 bp, Glycine max
  Clone ID: TF_GmC55771_1
ctcggtagcagcactgagctcgagccgattcggctcgagttcataacataaagagtatagagcagcaaacgtaaaagtggatccaagaaggctacatggcaagcttccactatcttcacaagcatcagaggagaaagaggacacagtagaagagtttgatgcttataataattatgcatcttggtcttcagaaactgacatgtctgaaatggtttctgctcttgctcaagttatgggaactaccaatcggaacccatacatgccacaatcaacctcctttcctttctcaacttccgtggtcaaagatcaacctcaaccgtacccatctcaacctcctccagatcaagaggtggcaaagaagccacactacagaggagtgaggcagagaccatgggggaaatgggcagcagaaatccgtgacccaaaaaaagcagccagagtgtggctaggaacctttgaaacagcagaggatgcagcacttgcatatgacaaagcagcactcaagttcaaaggcacaaaagctaagctcaatttccctgaaagagttcatcaagatgttccctttatgcaacaacaccaacaacgttcatcaaacagaaacgtttttcccatccatgcaacttccaccactagtagtgctactgggtctgtttcttctgttgatgctgttgctcctccttcgttgtccactcatgatcaacatggccaccaagttttcccaaatctgtatcaatatgcacagattctttcaagtgatgatgcacagttaccttatttcacatcccatcttttcaatcaacaacaacaacagcaacagcaacaacctttcaattctcaattctctagcactttttcttcaacctcatcctacttttacaaccagcaacaacaatatgatcaacaaggacatgatcactcaaaccactagcatgatactattaatctctgtgatttccaaccgtaacattaaagtttttcaagtcttaattaatttgtaatcacagtgttgtaactgcaatattgacaacatgcatgggcattaattagtcgtccccaattttccttttctcaaaagagtaagattttttaggtatgtaacggtggcggcaatttaggggcaaagcaattttaaagcttgaatagctagttagtatatgcatctgtcaattttgttgtagaatattgagtcagggatcaatgtatgtttctttaagcgtgcacaaaacatggatcctacatttaatttccaatttaattatggatatggataaactttttgttggaaaaaaaaaaaaaaaaaaaaaaggggcggccgatttagaggatccaag

SEQ ID NO: 26695 - DNA, 578 bp, Glycine max
  Clone ID: TF_GmC3803_2
ccacgcgtccgatttggttgggttcgtacacgacacccatggccgccgcacgcgcctacgacacagccgttttctacctccgaggtcccaccgcacgccttaacttccccgaactcttgttccaggacgaccaggaggagggcaatgattcggtgcagcacggtgcagcagcagggaacatgtccgctgattccattcgccgaaaagccacgcaagtcggcgccagagtcgacgctctccaaaccgcgcttcaccaccacgcgtcaagtaccaactctctcaaacccgacttgaacgagtttccaaaactcgaatcccttcaagattgatatcgatcaatatttaatttcctgagtcctatatcaatatactatagttttatgtatataggtgatgatgatgatgatgcctcggagttggggcttgaaactaattaaccccttcccttccctttaatttatatatatccttcttcttgtttaaacggatcttcaatcataatatcaaatcaaaaaagtattattattttccaaaaaaaaaaaaaaaataaaaaaaaaaaaaaaaaaaaaaaagaaaaa

SEQ ID NO: 26696 - DNA, 1143 bp, Glycine max
  Clone ID: TF_GmC188491_1
cttgatggcatttgtttatacaattggcggattccttactcattcttctctctctcattactttatgacgacaccggaaaaaacaaatcaccaccaagagagagataacgatgaaaagtggcgaatcccaaatgccaacaacaacaaatttaccaaattaaattaattaatgaacaaaattcaatatgcaggaaattacctaattaattaaattaaactaatcagttattactagcataggaaataatcatcatcagaagaagaagtcaagctgagaagttgctccaagtactcagaacccaaatcctccaacaccagcacattttgtgaaataatattcacattttgtgattccattccatggtcccttttgttttttttgttggtagcctggattttcttctcatggtgtgttttctcttgagtgccaacactggagaggaaccatcttccaatgatattggcttattattactctgcatgtctttgagtgattccctcaccacttcttctgggaaatttagcactgccatggaccctcttgtggacaaagcagcttgatcataagccagtgctgctgcttcagcagtgtcaaatgtgccaatccaaactctaacaccatttctcgttgagtctcttatttctgcagcaaatttcccccatggccttctcctcactcctctaaagggtctcttgtctttgttagtttcctttggtggttgtggttgtggtgatgcatgtgtttctttgagttgatggcttgcatgagttaaattggatgacacttctagttgtgatgactcagtgctgctgaccaaggagcctgaagagttggaataatctgaggatgatgattccttgatttgtgattgtgaggagtggtcagtgatggtgaaggaatcaagggcggtggtggtggtggtggtgttttcttcattgaagaaaagaaagtcttcccaagggaatggttctgcacaaacagaggaatttacaaaggaagagttaaagttttggtattggaagaaagatgaatcaaaatccatctcttgaaatcttaatgtagactgacaccaaaattcagctgttttgtttttgttttctttccctctcctcttatgtgcgtggctctgtggtatgctttca

SEQ ID NO: 26697 - DNA, 857 bp, Glycine max
  Clone ID: TF_GmC768_2
aacgcctgaagagacaacagcagaaaaaacttcaaacttggatctcatacgccaacacctctttggtgaaaacatcatctcagactcctcctcctttgtctccaatctccatcatcatcctgtgaaacttgaacccccctcatcaccagaatttgagtgcacctcatatatcttagataacaacacaagcagcaacttcttcacattccttgaaggctatgatttggtggcagacatgaagtttgtaattgattcagacaacaccaccaccatggtgatcccttcaaaggaggttataaagaaatgcaatattaattctcctgaagaacaaccaatggtgtcatcatcatcagaagagaagccaacaatgaaaaagtcagaacattatgatgaggcaaagcgttataggggagttaggagaaggccatgggggaaatttgctgctgaaatccgtgaccctacaaggaaagggacaagggtttggcttggaacatttgacagtgaaattgatgctgctaaggcctacgattgtgctgctttcaagatgaggggtcagaaggccattctgaacttccctcttgaggctggagagtctgatcctaaacctaataacagttgtggcaggaaaaggagaagagatcagaaccatgatcatgaattcgagcttccataagttcaagttcatcatggtgtttcatgagaaagtgagaagaatattagagttagcttaattagttgtgtggctagcattaagtttgttacttacctaggaaaataattaatatgcctgtgaaagtctgtacatagaaacaatgctaatgtgaaatgtctatatgaatctatgcaaagtatgttat

SEQ ID NO: 26698 - DNA, 1410 bp, Glycine max
  unsure (1)..(1410): unsure at all n locations
  Clone ID: TF_GmC887_1
gttcttttcctccactatgttttttttttttgcaattatctttcttatttaaaagatgaagcaagcaaacagaatcccctcttttgatcttggtttcaatattcatcatatcactggttctcctccttttataatcttagatcagcttttaacacaacaaggttttggtggagaagaagaagcaaagacgacggtgtataaatacaagagtagaagaagaagaagaagcaattagagggagagttagtgagcaaggtggatcgaaggcaagggaagaggtctctccctcctcatgaggagaaaaaagaagctttcaacttttcctattattcatccaacaccatctcaaaatcgaaaggaacaagcttcaccatcacccttttcactcctcatgagtaacaacaaaaacaccaccttcttccccaccccacatggccaaataaggacttctgaatttgttaatagccaaaatccgccccaggctacaaatcaaggcattgatgatattaggaaaaagcactatagaggagttaggcagagaccatggggcaaatgggcagcagaaataagagaccctaagaaagcagctagagtgtggcttggcacctttgacacggcagaggctgcagctatggcttatgatgctgctgcattgaggttcaaaggaaacaaagccaaactcaattttcctgaacgtgttgttatgccaatacaaccacaaacaaataacaataattccacttcttcatcagctcctactacacaatcatcttcttctcttccaccaccacaatctctacataataatagttctctttcagcagaagggtttccaaatcttgaggagtatgcaaggttgctgagttgtagcgatgatgatgattttcaacgtgttgcattggggctctaccagcatcacaataatgaggattttatttgtggttcatcacaaccaccaccagtgccgttttttgtgtcctcttcttcttcttcttctgcaatgacatcgtcatattctgattttttgggccaaggagggagtactggttttgatgaagggaacaagagggggtcgtagttttatgtctctgaattttgagcactgcatgcaggttgcttccacaacaattaaggaagttcaaatctctcatctcttatatgttcttttgtttttattattccaattacaaaataacacctgaggtataaaatctataatactcatctttcgtctttaatctgactctttgatatttttaggcaaactggttagtgcttattaattttatcaatctatcgaaaaatttaactcactatttttaattagttgagtttctcttctcaaaannnaanannnnaaaaaaaaaaaaaaaaaaaaaaaaaaaaaaaaaaaaaaaaaaaaaaaaaaaa

SEQ ID NO: 26699 - DNA, 687 bp, Glycine max
  Clone ID: TF_GmC23803_1
cccacgcgtccgcaaaaacactcatcactctatctctctcaaaagtgaaaatgtgtgggggtgctataatttctgatttcatagacgtgaatttgaacagtggtcggaaattgaccacccacaacacccatcatcagcttcacactttctctgatttccacgccacctcttcttccaaacatcaaccatcctaccaggatccaaacctccctaggcctcctccgcttccaaacaaccaaggagtgaagttgaaggctttgactttgaacactggtcgagtacggaagaacgtgtacagaggaataaggcaaaggccatgggggaagtgggctgcagaaataagggacccacgtaagggtgtgcgtgtgtggctgggtactttcaacactgctgaagaagctgctcgtgcttacgacaatgccgccaagcgcatccgcggagacaaggccaagctcaactttcccgacagcaagaacccatgtcttaatccctttcaactcaaacacctcttttccaacctcgaatccttccttggtttggactcgctctaatcactcccattcttgtctgcttcttttccttaactctttcaaattatcctactgtaatatttataactatgtctacatctttcctcctttttcttgcctcttctttttcactaataatgagtattgtttatataaa

SEQ ID NO: 26700 - DNA, 2397 bp, Glycine max
  Clone ID: TF_GmC1761_1
gtctgggtggatttgagcgtccgcggacgcgtgggcggacgcgtgggcggacgcgtgggcggacgcgtgggcggacgcgtgggcggacgcgtgggttccttctcacaattcccaacctcgcatctcccattattttattctcaaaccacgacaacaaaagcacaaacttggtttctcaatttcttcctctcgatcctacccgagttaaattaaaaacaagaggagagaaaacaaaacagaacaaaataaaggtttggtcttttgaagtgggagtgaggaatcagacatctgggttggttgcttgctaggttcggttaatgttagaatgtgggatctcaacagactcacccgatcagaggattaacaaggacgaggaatccgaagaagggtgttcttccctcaaaataacttccttcgatggagatgacgagaacaacaacaacaaaggcaaaaggctcgagtctgtttccaattcaagctcttcagcagtagtcatcggagacgggtcagaagaagagtacgaggaggaagaagaagatgaagaaggtgttggtgttggtggtggaagaagtatgaagaaacgtagcagcaagattttcgggttctctgtgacccaaaatgaagaagagtccatggacagtgaccatccacctgtgactagacaattttttccggtggaagatgctgacgtggcggttgcaaccggtggtggtggaaccggtgtaagctcaacgttccctcgtgctcactgggtaggtgtgaaattttgccaatcagaaacacttggcaccggaaaatcatcagtggaagtttctcagcctatgaagaagagtcgccgaggaccgaggtcaaggagctctcagtatagaggagtcaccttctacagaagaacgggtcgctgggagtctcatatatgggattgtggaaaacaagtgtgtctaggtggatttgacacagcacatgcggctgctcgtgcttatgatagagcggctattaaattccgaggagtggaggctgacattaacttcaatattgaagactatgaagatgacttgaagcagatgagcaatcttaccaaggaagagttcgtccacgtgcttcgccgacaaagcactggatttccgagaggaagctccaaatatagaggtgtcactttgcacaagtgtggaagatgggaggctcgaatgggccaatttttagggaaaaagtacgtttatttgggtctctttgacactgagatagaagctgcaagggcttatgacaaagccgccataaaatgcaatggcaaagaggctgtaacgaattttgatcccagcatctacaacaatgagctcaataccgaatccacaggtaacgctccagatcacaatctggatttaagtttgggcaatgcaacttcaaagcctggcaataatcaagcgttggggaatcacgccacaaatgctgtaacccatgatcagcacctgccatctgagtctaattggcgtaatgggggaaacaagcctaagctggtgaatatactccccaaaccatgtaatagaagcaacaacaaggactcacatggaagggatgtgcacggggagagtgaaacactgaggatgctaagtcaaacccaccttcattctccagccttcaatgaaatgcaacaaagatatggtccctacaggtctccgggaggagagtctcaaatgcttcaaaattttgcgcacattcacccaccaaattttcattttcccagaagcagcattggaggccgaattgggagtgatctttcattatcagtggctgatcaacaacagtggcaaaccgggccttcacgttatttagcaactgctgcagcatcatcaagtttccaacaagagataagaccctcttctcaaggttggctgcagaaaaatgggctccacagtctcatgagaccctcatgatccctattataaatagagaattttctgcctcgccaagtactagttacattcaaataatcgtaatctgctccctaagtaatattattattgttacccttccagggtttcacccccaaaaaattattattttcttttcttagcatgtaaaataggatgcagtgttagattgtgtccatgtccaacccagacccctcgtcacacaaggccacaactttactattgaggtgaaaaagaaaaggataaaagaaaagaaaaaaaaaagaagagaaaatccaaattgggaacttactactggtctggggtcagtcaaactaacaaacggacgaaatctttaactagatattctgggctctgactaaaattttaggatcttatataactctgattttattgcttttctgcggttgtggtatatttatgacagcacctattcgtttcttgatttgggatgtattgctatcacatataa

SEQ ID NO: 26701 - DNA, 734 bp, Glycine max
  Clone ID: TF_GmC194109_1
cccgggtcgacccagcgtccgaaatttccttcttcattctcccttttttcgtccggttttggtaaaccactttaggtaaccagattgctactactagtactactgctactacatatacaaagatgctatcataaaaagagagaaacttgggaagtgggaacacattcaaaatccttgtttttttgtttgtggtctagtattcatctccaaacacacccattgagtatttttcattttttttgttcttttggggcaataaaggtgggtgtttttggcattgattgagacagaggctccaaatgaagaggtctccagcatcttcttgttcatcatccacttcctctgttgggtttgaagttcatcatcccattgaaaaaagaaggcctaagcatccaaggaggaataatttgaagtcacaaaaatgcaagcagaaccaaaccaccactggtggcagaagaagctctatctatagaggagttacaaggcataggtggacagggaggtttgaagctcacctatgggataagagctcttgggacaacattcagagcaagaagggtaaacaagtttatttgggggcatatgatactgaagaatctgcagcacgtacctatgaccttgcagcccttaagtactggggaaaagatgccaccctgaatttcccgatagaaacttataccaaggacctcgaggaaatggacaagggttcaagagaaggaatattagcttctttg

SEQ ID NO: 26702 - DNA, 983 bp, Glycine max
  unsure (1)..(983): unsure at all n locations
  Clone ID: TF_GmC884_5
cacgcgtccggttcgaaataccggggagtgacacttaccaaatgtggccgttgggaagctcgaatgggacaattccttggcaagaaggcttatgacaaggcagctatcaagtgcaatagaagagaggctgtcactaactttgagccaagtatatatgagagcgagatgaaacctgaagctattaatgaaggtggcagtcacgaccttgacctcaatctgggcatagcaaccccaggacatggtcccaaagaaaataggggccatcttcagttccagtccatcccttacaacatgcatcccggaagaagttcaaggatggagactaatgttaattcggttattggtgatccttctttgaaaaggctggttgtaactgaagagcgtccttctgtatattccactttctttcccaatctggaaagagcagagagaatgggcatagatccttcaaaaggagttccaaactgggcgtggcagacaaatggccaggttaatgccaccccagtaccaccgttctctactgcagcatcatcaggattctcaatttcagctacttttccatcaactgccatctttccaacaaaatccatgaacccaattccccagagcttctgtttcacttcacacagcacaccaggtagcaatgcacctcaattctattacgaggtcaagtcctcgcaggcaccatcccagcctctatcttgtaatacaagtataaatggtagccccccacacaagttctgaagttcaattctcaaaacgacagttaaaactttttttttttttttcctgtttgcatgatttagggatcggtacaatgttgttgctcatggtatgtttgtatgtgatgaaaagatttttttcttcagagagaaagtgaaaagaaaaaatgcatgatgtgttttaaaaaaaaaaaaaaaaaaaaagggcgcgccgctnctagaggactcccaaggcttagcgtacgcgtgccatgcgacgtc

SEQ ID NO: 26703 - DNA, 920 bp, Glycine max
  Clone ID: TF_GmC1366_1
tggtaccacaacaattcggctcaccaccactcaaacatttctcactaaaacacacactttctgaaaagaacaaggatccattttcttttccccaacatggccagaccacaacagcgtataccgaggtgtccgacaaaggcattggggctcttgggtctccgaaattcgccaccccatattgaagactaggatatggcttggtacatttgaaacagctgaggatgctgctagggcctatgatgaagcagctaggctaatgtgtggtgcaagggcaagaacaaacttccctttcaatccaaatgtgtcacactcatcatcttctagttcaaagcttctctcatcaactttgactgcaaaacttcacaggtgctacatggcttctttgcaagtgacaagacaagctttggcatctgagtctcagagaacaccaccctcagtgcaaaatgcaacaacctccacaaccacaccaattagcaacaacttcagtgtgaagagtgagcaaactcatgcagtgttgccacataagagaccagaggaggagcaagagtcagaggcaaataggggtgtgaaaagggttaattctgtggaaaatgttcctctgcaattcaagcctcttgaggaagatcacatagagcaaatgattgaggagcattcttgattatggatctattgaactctgctctgtcatttcaccccaggccctctaattgaatgtgcatgtttttgagctgaatttaaagtcacaattgtaggttgccttgtgattaacaaaattatgggtaaaatttgactgaaattgctgctgtggttgtgaagagcacaaaaagagtggccacaattgcaattacataatgcaatttatatcggacggtctgccggccgcccatgttgaaattgtgcatttgttctgttctcattct

SEQ ID NO: 26704 - DNA, 350 bp, Glycine max
  Clone ID: TF_LIB3242-517-P1-J1-E5
gggcacgctgagaagtgtgccaagagattgatgaagaaccagtatcgcgcaatccgccggcctccatggggaaagggggctgctaacattcgctacccatgatagggggtccgtgtttggcttgcaactttcagctctgctgaagaagctgcaagaccttaccatgcttaatcacggaggatccatggccagaaaccctatgtgaatctacctgatgagccttcttgcgctgtttccttaaaacctatgacggctattccatatgctcaaccaatgaataaatatctgtactctctgaagccgaagataaaccacatgttacattttgcagacattcttgagtgcttcta

SEQ ID NO: 26705 - DNA, 1340 bp, Glycine max
  Clone ID: TF_GmC6807_2
cgaccacgcgtccgcaacttgttggtatcatcaaagcttttggaaacaagttaaagcagggcatgcagagggaacaaaccaaatatttcaaactccttaaactttttattatcactgttgcatttatttcagatatttagtatttgggtacaagtttgttctttagtttaaacaccgacgtctctccgtggcggctatacccaatttgaactttaattttcttccctttgtgtgaaaaggttttgtgttggagttggctttttgaagggcgtgcatggtgaagttatttgtgtatatgaatgatgaagaacgatagagaaaagggtaacgaggttgaccagagttacatacagcagcaccactcgttgtcaatgccaatgatgttttcgggttttaacagagagaaggagatgtcagccatgatcactgctttgacacgtgtggtttgtggagattattctcttgttcatcacaatattgataatactaatagtgcaattgttggtggtggtggtggtgatgatgtttcaaatatggcttctggttctatgccaccttcgtctacttctttatctcatggtggcaactctgttctcaagagaagaagggaagatgataatacaagtgatttcttacgtggaggttcattccctgctattttaacaactgcggaaggttcaagcacgataagaagaagaagagcgaatacggtatacgattacgaatacagaagagagaaggtgaaagttggagaaggaagaagaagcgagcaggaaatacagaggagtgagacagaggccgtgggggaaatgggctgcggaaataagagaccctttgaaagccagaagggtgtggttaggaacatttgaaaccgctgaggacgcagccagagcgtacgatcaagcttccttgcgtttcagaggcaacaaagccaaactcaacttccctgaaaacgttaggctcagacacactgagactcttcagggttcacgtgcttcaagcaatttttatgacaactcttattcgcatgttcatgatttacccgtgagcctctacgatcagactaccatggcttcttcatcaactatatctatgacttctccccaggcaccaccttcgatttatcctacgcatctactaccggcatggtcttctggttatgcttataatagctcctcttcttctgcctgatgtaaattgctttttatttcgagtcgacataggctatacttttatctcacacaacttagtttgtcattatatctacctatgtttgacactaaactgagttttacttggaagcaacatatgaattgcttctaaaaattcatttttcgttg

SEQ ID NO: 26706 - DNA, 807 bp, Glycine max
  Clone ID: TF_GmC243461_1
ggctcgagttttcctcaatgcctgttcacgcgcttccattttcaaaggactctccgccgcccaaacccaaggaggctcatttccggggtgtccgcaagcgtccctggggccgctttgccgctgagatccgtgacccctggaaaaagacccgaaagtggctcggcacctttgacactgccgaggaagccgccagggcttatgacgccgccgccagaacactccgtgggcccaaggccaagaccaacttctcctacatccttgctcccgctttccacctccctcccccggtgctcactactcccgaagcccatgccctggcccaagcccaagcccaggaacaactcgccagacaggtcgagttctgtggcccaccgtttttctttgcaactgatgtagcttccaccgcgccggtgaggtcggagtacaagggttacaagttagagaatatcgcgggttttgtggtgagtaaggaggagcagaaagagaaaaataagcccttcttatttgaccttaacctgccggcgccgctcttctgaagccgccggcggagaatgacggcgccgggggcttagtgtttctatcttaaatgtctttgaatttgtctatatgacttgttttgagggggaattttaggtgctactccgcccttgttttgatgtacagtttagtttattataggttttgagcagcaagcattttggttattacggtggcataggtttaaagttcatttaacgttgtttttgtttgtcgtttgtttcttccttggattctcactgaatctatgttaatacgtacagctgcata

SEQ ID NO: 26707 - DNA, 599 bp, Glycine max
  Clone ID: TF_LIB5118-012-Q1-PF1-H7
aattacacagctcaagtttccaagaccaagccaatggaaaacctttcaccattgatttacaaaaaccccattagaagaacttctaggcgatctacaatgtatcttggtgtgagaaaaaggccatggggaagatatgctgctgagattaggaacccatacaccaaagagagacactggctaggcacatctgacactgctgaagaggctgctatagcttatgatctttcatctatcaagatttgtggcattaatgctcgaactaattttcactacccttttgtgtctcttccaccacttcctatgtcgtcattgcctcctccaccgccaccgccgaccccagagttggatccaagtgttgaagtttgtctagagatgatgaatgctgcttcttacgatggtgatgatgaatctcttgttattgcttccattttgcaaagtttttctaattctggtaactgttctttttagtttttggttccaatgaggctatggcctgcctcttatcaaatcaataattctatttttttttctttgctatattcagtagtcgttaatgtaaggcttctaccaaaatttctacatatttaattacttgtact

SEQ ID NO: 26708 - DNA, 930 bp, Glycine max
  Clone ID: TF_GmC636_1
cggacccttgggcggacccgtgggcggctgcaaaccacgcacagaaggggacgtccgcccaccggtactactgatatgtacattaaaatctacgaataatggagcaagagcttccacgcagcagtgtccccgacgacgacgccgccaccaccacgagctccgttgacaagcccgccatccctcacgccggaggcacccgccacccgctctccggcggcgtccccgcgcgccgctggggcagatgggtctcacaccccctcttccgcggcgttcgcaagcgccgctggggcaaatgggtctccgaaatccgggagccgaggaaaaagtcacgcatatggctcggctccttcccggcgccggagacgcacggcaacttccccgacgaggtccaccgtcttccgccgctcccctcctcctgcaccgcccgggacatccaggccgccgccgccaaggccgcccacatgatgatggtccaggctgccaccgccgactcgccggagaaaagcagcagcattacctccgactgcggcggccgcggtggagacgacttctggggcgaaattgagctgccagatatgttcgacggcaagtggtgggcctccgaccacgacgtcacgccgtggcctgagctggagctgccgccccagccgcccttcaccacggcgagcttgtagtcacttgtaataatcaataatgctcttcgcacgctcagccgacttggttggtatattagtagtttgtaataatcaataatgctcttctctcaagctccgacttggttggtatattaattatatatattagtattttgctcatataattaagtaactctctttgtgttctcttcacaataattaattattttaattgtgatgattagtgttagtgctgttaaaaaaaaaaaaaaaaaaaaaaaaacaaaagcggccg

SEQ ID NO: 26709 - DNA, 1031 bp, Glycine max
  Clone ID: TF_GmC120268_1
ggctcgagctcacaccatcttcacctcattttcatcattctctgtcactgtcatagggacatacatacattttcaccttcacacatcaaaccaacaagaactttctattccttaaaccatggtcgagcctgcagtagcagcaagctcagaattatcagactcaacacgaaacaccaacaccaacaccccttcaccctcttcctcatcgtcgttatctccgtcgccatcaccgtcatcatcaagctctaaaaagcgagcgagagacaacaacaatagtagaaacaacagcaacaagcattctgtgtatagaggtgtccgaatgcgcacgtggggcaaatgggtgtcggaaatccgcgagccgcgaaagaagaaccgaatctggctcggcaccttcgccaccgccgagatggcggcgcgtgcccacgacgtggcggcgctgacgataaaaggctcatccgccatccttaacttccccgaactcgccgcctccctgccccggccggcctccaactcgccccgcgacgtgcaggccgcggcagccaaggcggcgtccatggaggcgccgccgcggacccctccgtcgccggccgccacgccggaggatgacctcggcgagatcgtggagctgccgccgctcggaacgagtttcgactcgcccgaccggagttccgagtttgtgttcctggacatggacgacgggtggccctattctcacccgtggtaccacagcatttatgatggtgggtacttcattagcgacatgaacaacatggtttcgatgcaagagtcagagagcatggttctttccctgtggccttgaagttaagccaatgctactcattgcagtatggttatattttggttctttttttttttttttgcgtgagacagataatcatgtttctgttcttaagtatgcgattagggattggattttcatgtccgtatatatgaaataacatttatttgccgatatcaatctcttgaatgaacatcaatacattgagaaattagtctctcattatcgactc

SEQ ID NO: 26710 - DNA, 671 bp, Glycine max
  Clone ID: TF_GmC755_2
aagagactcacctcctcaacgaagctcaatctataggggtgtcacaaggcatcgatggactggtcgatacgaggctcatttgtgggataagaattgctggaatgaatcacagagcaagaaaggaagacaaggttttcattattttgctctctataatctttagtttaattttctgatttccttcgctttatatgatttattgtcatattaattatcttgggttggttgacaatggcaatggaaaacaactggatgcagtatatctaggggcatatgatgatgaagaagccgcagcacgtgcctatgacttggcagcattgaagtactggggccaagataccattctcaattttccattatcaaattatgaggagaagctcaaggagatggaaggccagtcaaaagaagaatatattggatccttgcgaagaaaaagcagtgggttctctcgaggagtttcaaaatacagaggcgtagcaaggtacttgaaccctgctctgttcactgcaaaatgctaggttttgcaatttttcaatctgttttacggtagatcatcatggtcaacaaaataaaccattgatatctttgttgaattcagaaagtggggcgtgcacgaatatatatatacacacacgagtgtacgaaatgtttttagaacataaaattgtggt

SEQ ID NO: 26711 - DNA, 1284 bp, Glycine max
  Clone ID: TF_GmC321_1
tctggctcgactccgtctctgcaattacgatggcgcccagggacaagactagtgccgttaagcctagcggtaacgccggggtgaaggacctgcattttcgtggagtcaggaagagaccgtgggggaggttcgccgccgagatcagagatcccgccaagaagacccgcgtctggctcggaaccttcgacaccgcggaggaggcggcccgtgcctacgacgccgccgcgcgggagtttcgcggccctaaggcgaagacaaacttccctctcccttcggaaaattttaagaacgcgagccctagccaaagcagcacggtggagtcctccagccgcgaccgcgacgtcgccgccgattcctctccgctcgacctcaacctcgcccccgtcgccgtctcctccgctcgattccccttccggaaccagttcccggttttccccggcgcggtgccggcggcgaaccaggttatgtacttcgacgccgtcctacgcgccggcatggccggtccacgtggcttcgcgtttggctacaatcctcatcccgtcgcggcgagtgagtaccacgcgacgacgagcgactcggactcgtcctccgttatcgatctgaatcataacgaaggcgttgttaaggggaacggttctagaatgttcgatctcgaccttaaccatcctcctccacatgagatcgcttgatccagaatctgactcatgccttgagtttttctttttctaattttgttttttaaagtagagaaagtagcagcgttcgataaggaaggaagggaagggaaggtaaagaaatactatgtgaatacgtagtcggtatgattgtctctatttttttgcgacagaggaaccaccagtttcatgctgttttttcttaaatcacgaagcgctcatccggtttttctttcgttttgattgatattttactacggtgtaatgttttttggttgcagccataatttggttcaatgaaattaacacggaaagtttgaattattttgattgtgatatacattttcaattaaatacgaatggggaaggaaagaaaagctgtgggtgaagcgtacttggtagtaatggtcgttgttgttggcgttgatttgattgacaggtggctcttgttacctctcccttcaaggtgactccaacgtccaatggtgcgtgggctatgtaactacacgactggtggcacagtgccacattctcaattcgctcccatcttcatgatgaaaatgaatttcatggtaaaaaattaactaaagtatgcaaaagtcatttaatt

SEQ ID NO: 26712 - DNA, 2169 bp, Glycine max
  Clone ID: TF_GmC12225_1
ttccggtccggattcccgggtcgacccacgcgtccgcaagtttcgaaattgaaaagggtgggagagatacaaagtgttcattgatttaaacccttgctagaacccttggtaaagcaagcaaataagggctcaatgaacaacaactggctttcgttccctctttctcctactcattcttccttaccagctcatgatcttcaagcaactcaatatcatcaattttcccttgggttagtgaacgagaacatggataaccctttccaaaatcatgattggaatctgattaacacccatagtagcaacgaaattccaaaagtggctgattttctaggagtgagcaagtctgaaaatcagtcagaccttgcagccttaaacgaaattcattcaaatgattcagattatctgttcacaaacaacagtctggtgcctatgcaaaaccctgtgttggacacacctagcaatgagtatcaagaaaatgctaatagtaatttgcaatcattgacattatccatgggaagtggtaaggattcaacatgtgaaaccagtggtgaaaatagcacaaacactactactactactactgttgaagttgcacctagaagaacattggatacattcgggcagagaacatccatatatcgtggagtaacgcgacatagatggactggaaggtatgaagctcatctttgggataatagctgtagaagggaagggcaatcaagaaaaggacgccaagtttatttgggtggatatgataaagaagaaaaagcagctaggtcttatgatttagctgcactgaagtactgggggacatccaccactaccaactttccaattagtaactatgagaaggaattggatgaaatgaaacacatgacgcgacaagaatttgttgctgccattagaaggaaaagcagtggtttctccaggggtgcatcaatgtatcgtggagttacaaggcatcaccaacacggaagatggcaagcaagaattggcagagttgcaggaaacaaagatctttacttgggaactttcagtactgaagaagaggctgctgaagcatacgacatagctgcgataaagttcagaggtctcaacgctgtcacaaactttgacatgagccgctacgacgtgaaagccatccttgaaagcaacactctcccaataggaggaggagctgcaaagcgtctgaaagaagctcaagctctagaatcttcgagaaagcgcgaagagatgattgcactaggatcatccacattccaatatggaaccacaagctctaattctaggctacatgcttaccctctaatgcagcaccaccaccagtttgaacaacctcaacctctgctaactttgcaaaaccatgatatcagttctcacttctctcaccagcaagaccctttgcatcagggttacatccaaacgcagcttcagttgcaccagcagcagagtggtggttcttcttcttatagctttcagaataataatataaataatgctcagttctataatggttataatcttcagaaccaccctgcattgcttcagggaatgattaacatggggtcttcatcttcttcatctgtgttggagaataataatagtaccaataataatgttggtgggtttgtgggaagtgggtttggtatggcttctaatgcaacgtcggggaacacggtggggacggcggaggagctagggctggtgaaggtggactatgacatgccgactggtggttacggtggatggtcggcggcggcggcggcggagtccatgcagacgtcgaatagtggggtgttcacaatgtggaatgactgagggaagggaagctagttctagtaatgtatggcacaacgtacgagttagttaccatacaattttgttatgcttttttctttttttttgtttttgggttttttaatattctcgcaattggaaaagaaaataggtgctgattttctgtgactaaggaagtgagcaaagaccatatatctatttatatttatgtctcttgttatggcgaatgtttgtgagacttttgcttgatttaggtaaactaatcaaacactgacttatatgtactaatgttttatttgtttagcattggattacctcccagttctatcactttttaataaaataaaaaaaactatatgagaaattatatat

SEQ ID NO: 26713 - DNA, 1159 bp, Glycine max
  Clone ID: TF_GmC1399_3
agcccacgcgtccgcccacgcgtccgcccacgcgtccacctcgtcttccaaaatatccacgtttcttttcccacacactatcttaaatcttaaaaacattttttttttcaaagcaattagaatttagaccacaaaaggaacaccgaagagatgtacggacagagtagtagtagcagtagttcttacgaatcggatttggcgctgttggattcgattcggcaccacttgctgggcgagtccgaatccatattcggcgccccgaatttcgggtcgggtcggagctccagtttcagcagcttggactcgtgtttgagcgacaattggggcgagcttccgtttaaggaggacgatacagaagacatggtgttgtacggcgttctccgtgacgccgttaacgtcgggtgggtcccatctctcgatgccgggtcgcccgagagcgtgtcgtcgggttttccggcggtgaagctggagccggacttgatgccggcgctgatacgtctcgagtgaagtgttcggattgcggcggaggagaagaaggttgttccggcgaaggggaagcactaccgcggcgtgcggcagcggccgtgggggaagttcgcggcggagatccgcgacccggcgaagaacggagcaagggtttggctggggacgtttgagacggcggaggacgcggcgttggcgtacgaccgcgccgcctaccgggtggggacggtgcaagagcaagtggggagtcaagtggcagagtgtacacgtggcgagcagttattggttagctgaggtggattctaaaactggtgttgtgtttattaaatacaataaatacaatacacttttgtaattatgtgatgtgcgtgtgtgtgtaaagcacttagctatattatagccatcatccaactcaattttggaacaaagaaaaaaaggtgaaggatgaggatagatgattttagcacatcaaatggtgagtggtgtgaccccacgggaagaaaaaaaaaaaagagggggagaaaaaaattcaaagaagttatggaatttggaagatgatgaggaatgacggggtgaggaactgaggatatgtaatttggctttgtgaatactaccaaatttgttatttgtttgttcaacattatgaactatgaatgggttaattgttaattgcttg

SEQ ID NO: 26714 - DNA, 585 bp, Glycine max
  Clone ID: TF_9564630
ccaggcaccagtgaccctattattcctctcacaaatatcatatcctccgattaaactagtgaaactaaacaagttccaaattatttcattcccctttcctagctagacccacctacttcctattccttaatttctcatttcattcatttccccacgtgccaaaaaaaaaccttgcttttcttgcaaacaacaccaccaccaaacatggcatcatcatcatcattatcatcatcaaagaggcatccattgtaccatggaatccgttgccgtggaggaaaatgggttactgaaatccgcgaaccgcgaaaaacaaaccgcatatggctggggacgttcctgactccggagatggcggccgcagcctacgacgtggcggcgttggccctgaaaggcggcgaggcggttctcaacttccctgactcggttggcgggtatccggtgccggcatccaaatcgcctgcggacattcgcaccgctgccattgctgcagcagaactcatgaagcctgaagcaagccacaacaacaacaacgttaatgcatcaacaacaaatgaggcagaagtagttcagtatgataacaataac

SEQ ID NO: 26715 - DNA, 2314 bp, Glycine max
  Clone ID: TF_GmC1816_1
ctagggcgtgtgtgtaaaaattggggtgtggagaaagtaaataagaggaagggaaattaaaagatgaatatgaaggtgaatctgaagagagaataattgagggagttgttgaggaaggactatttttcataaaaggttctagaacttccatgagctcacctctgaatggatctgactcaacttgttcttgtgatgttccgctgtagaaattcatcgaagctgccatataaaaattttccaactacaccacacagatcttagattaaaaaaatcaacctgcgtttcttttaaaaattacaaaaaaaaaataataatttttttttaaaaaaaaaaagggatggaagaggtttaaaatagacaccccctttaatccaagaagaaagaaaaaaagcttaaagggatcaaaaacaaccctcttggctgaatgaaagaaaataataattccttaacaaaaggataaaaaaacaccggatctccattctgaaaacaccacgcgtccgcccagagagagtttctcaccaaacacacacttctcttctcttctcttctcttcattttctgtggttctcactttcttttctctaatcttctaatctcttattttcttcccccctctgttactccccgcttctctgaatccctttctgttaatcatctgtctttcaactcgtgattttttgggtttgcctcaccaaaaagattcaaactttgaaaatttttctcgaaagccaggtgttttcagaatcgagatccagctttttttttgtttgtttttaaaaaattattattttctttcgttcagccgcgagggttgtttttgatccctcaaaagctctctttctttttttctttcttggatttaaggggttgtctattttaaacctctcccatccttttttgttgtaatatttaaaaaccacaggttgatttttttaatctaagatctgtgtgtgtagttggaaaattgaatttttatatggcagctacgatgaatttctacaacgaaacatcacaacaagttcagtcagatccattcagaggagagctcatggaagttctagaaccttttatgaaaacttgtccttcctcaactccctctattctctcctcagattcaccttcaccttcacctcttaatttcccttcctcttctttactttctccacaccccaatttctacacacacactccccccccttcctacttactccaaagccaacaatccttaataggctttgagcaaccaccgagttcccttctcgggctcaaccacctaagcccgtctcagatttctcagatccaggcccagatcgaggcccaacagagccaaaaccagaacccacactctctcaactttctcggcccgaagcccgtcccaatgaagcacgtgggcgggcctccgaagcccacgaagctgtaccggggcgtaaggcagaggcattgggggaagtgggtggcggagatcaggctcccgaagaaccgaaccaggctctggctcggaaccttcgacacggcggaggaagctgctttggcttacgacaaagccgcgtataggctccgaggcgacttcgcgaggctgaacttcccgagcctgaaaggctcgtgccccggggaggagtacaagcctgtgcattccgcggtggacgctaagctcgacgcgatttgcgccaacttggcggaaatgcagaagcaagggaagacggagaaaggtgccaggtcagcgaagaaatcgaagcaaggtccgaaccaggaggccaagcccgaacctcaagcttccgctgaaagtgagggttctgcggattcttctccgctgtctgatcttacctttgatgtaaccgagccgcaatgggaacattttaatttgcagaagtttccttcttatgagatcgattgggattctctctgaacttcgtctttgtttttatgtctagtcttgtggctaataataataataatttaggttagtcttgctaggtggctgctgcaattgagtttttgaagattgcagtgcttcttgtaggatttcgattttttttttttttagcatttggttattggctatttggtcaatatgatgtaaatctctctaccttggtcagctgggtttttttttttttattattattttcttgcttggcctgggagaatgacttctagccttctaggtgttgtctatgctttgatgttcatccaagtatgttattattattattattgttgttgatgtaattcaattttatttgcatctcagaatttatgaatatatttgtatttcagcttaaaaaaaaaaaaaaaactcgagactagttctctc

SEQ ID NO: 26716 - DNA, 1083 bp, Glycine max
  Clone ID: TF_GmC1388_1
tctacgttgagcacgcaacccgccccctacagcactactttcagttttttctgtctctgaatctcaaactcttcggaaagattaacattaatggctccaagggatatcaatagatccaacgttgttgttgttgccggagctcgagccgcagcactactctctgatcagttttttcttggtctccgaatcacaaactcttcgaaaaaactaacattaatggctccgagggatatcaatagatctaacgttgttgttgccggaggatccaacccgacccgtaaagagatccgataccgcggcgtgaggaagcggccgtggggccgctacgccgccgagatccgcgatcccggcaagaagacgcgcgtctggctaggaacgttcgacaccgcggaggaggcggcgcgtgcgtacgatgcggcggcgcgtgagttccgcggcgcaaaggctaagaccaatttccccacccacgcggagctgacgcacgcggcggcgcgtagccccagccagagcagcacgttggattcgtcctctcccccgacgccgccgttggacctcactcttgccgccccactcgccgccggtggcgcgttggtgttcccagtggcgcggcccgtggtcttcttcgacgcgttcgagcgtgccgaggtgcgcgcgtcgttcgatcttcccgtggcggcgttcagcgactcggactcgtccacggtcatggattacgagcggggctcacgtcggagagtgttggatcttgaccttaatgtccctcctccgcccgaggttgcctgaaccggaaaaaagatccggttttttcgcagctcggtttttctctctctatctgagtgagtggcgattatcaatttatcgtagtagctgacacggtgctagagtttatgtaaatatattataaatagattacaattaaccaaaccaaaaagaaaaagcaggcttatgtttttttttctctattctgcttttttttttccttttcgcaaaggaagaaggaatttcttacctcactgttgcccggtgatgttaactttttatatatataatgccatttctatattaattaaaaaaaaaaaaaac

SEQ ID NO: 26717 - DNA, 1745 bp, Glycine max
  Clone ID: TF_GmC88_2
ccacgcgtccggggactttggtgcatttctggctgtcattaaactttttgactcttctacagtttatttgggtggatatgataaggaagaaaaggccgctagatcttatgatttggcagctctgaagtactggggtcccactgctaccaccaacttccctgtttccaattattcaaaggaagtggaggagatgaaacatgtaacaaagcaggaatttatcgcatcattgcgaaggaaaagtagtggtttctccaggggagcttccatatacagaggtgttacaaggcatcatcaacagggtaggtggcaagcaagaattggccgtgtagctggaaacaaagatctttacttgggaacattcgcaaccgaggaggaagcagcagaggcatatgatattgcagccattaagttcagaggtgcaaacgcggtaaccaactttgagatgaatagatatgatgtggaagctataatgaagagttctcttccagtgggtggggcagcaaagcgcttgaagctttcccttgaatcagagcagaaagctcttcctgtgagcagcagcagcagcagcaatcaacagcagaatccacagtgtggaaacgtgagtgccagcatcaatttctcatccattcatcagccaattgcttctatcccttgtggaattccctttgattcaacaacagcatattatcatcacaaccttttccaacattttcaccctaccaacgctggcacagcagcgtctgctgttacttctgccaatgcaaatgcactaactgcactgccaccaacagcagcagctgagttctttatttggcctcatcagtcttattgatctaatcaaaactagaaatcatcttttgttaatttcctggttatgctaacaaatcaaaagctatagtctctggcacagtttagctgacccccctcctctattattaacccctttaggctgctaaaaaagaaaaaaaatgaggtttttgagttggctagtcttagttactgtaggaagctggatatgtaactaactgctcaagaaatgagaaatatttcgtgcatcataattttgcacaagaatttccttaatggcttatagcttgcagtggagtatgaccgcttttgtttaaaaataaaaaaaaaaaaaagttttaaattacagtttataacattcgcttgacactttcccttgaatcagagcagaaagctcctcctgtgaacagcagcagtcagcagcagaatccacagtgtggtaacgtgagtggcagcatcaatttctcagccattcatcagccaattgcttcaatcccttgtggaattccgtttgattcaacaacagcatattatcctcacaaccttttccaacattttcaccctaccaacgctggtgcagcagcgtctgctgttacttctgccaatgcaaccgcactaactgcactgccagcatcagcagcaactgagttctttatttggcctcatcagtcttattgatctaatcaaaactagaatcaaaatctttttctaatttcctggttatgctaacaaatcaaacgccatagtctctggcacagtttagctgaccccccctcctctattattaacctaaactaaaaaaggaaaaagaaaaagaaaaaaaagaggaggtttttgagttggctagtcttggttacagtaggaagctggatatgtaactaactgcttaagaaatgagaaatatttcgtgcatcataattttgcacaagaatttcctc

SEQ ID NO: 26718 - DNA, 1079 bp, Glycine max
  Clone ID: TF_GmC331_1
ccacgcgtccgcttcttctctcagaatacacaacacaaagtcaatataattatagtatatccctatgagtaggagttcggcgatgcatggaattacaagcacaaacaacaagttgaagggagttcggcgtcgaaaatggggcaaatgggtgtcggagattcgtgttccgggcacgcaagagcgtttgtggttgggaacctacgccacgccggaggctgccgcggtggctcacgacgttgccgtctactgtctaagtaggccttcttcgttggacaaacttaacttccccgaaaccttgtcttcgtacagtgttcagctcagggacatgtctccgaggtctgtgcagaaggtggcttccgatgttggcatggatgttgatgcaagaaacattgttgcgggcaaaacttcaacggtgggggcagaaactaattgcgagagtgatgagaggactagtactgcgtctgtgtgtaatgttgttggagaaggtggtgctgatcattcggatgtgttttggtgggatgatgatggtgggtcttggcatggaagtggtggagattctacggaaagggatgccttgagcatttccattgaagattatctttagctgttctaggtttcaactttagttatctttttttttttttttttgagttatgatcgatgcgcatagttagtagttacagataattactgctagtgttggtgtttaaacggtcagagatgatgatatataatttgatgtgcgctagctgccttttgaagaaactaaaaaaaggtaaaacaagaaagattgtacccccaaaatgaacttggtcaatttcacactttcacgccatttgcattttgtgcacgttgttagttttcaaattgttaattcccttgctaaacccactcaaacttgagtgcgttcaccttttattaccacgtagtaactgagagttaacgaaaatatttctttataaaaattatttaccatttagtgtctttcgtttacttgtaattattcaacttgtcaataagatgaaagttctaattttagatataataaaattcagctagtatttgtgaattactcactt

SEQ ID NO: 26719 - DNA, 747 bp, Glycine max
  Clone ID: TF_GmC1399_5
cccggctaaaaacggggctcgggtttggctgggaacgttcgaaacggctgagaacgccgcgctggcttacgaccgagccgcgtaccgaatgcgcggctcgcgcgctttgttgaatttcccgctccggattaattcaggcgagcccgaaccggttcgggtcacggcaaagaggtattcgccggagccgtcgtcttcttcgtcggatagtgcgtcgtcgacgaagaggcggaaaaaggtggtggggtccacggtgacggctcaaagtggattgagaaaggagcaagtgggaagtcaagtggcacacagtgcacacgtggagagcagttgttggtcaactaatgcgtgatgctgacgtgggatgcattgcggttttgctctttttttttaaaaaaacactctgtgtggcagtggctagaagttattataaaaattagaaataataacccaaaaaggggtggacagtgccacagtgtaaaaaatggatagggattctgactcattactcaagtgggggagtgataaaatttaaagaaaaaaaaaaaaaaaagagaccagttggaaaaagttattagggtggaggttttgtttggatttgtgaatacaattacatgatttgttattttttggttcaatatttatgaaatttgtgaattgtgttgcatgaattgaagcctccactctttatccccccaactacacacgctgatccaaatgaaccatcaatcaactaactataaggcgataatt

SEQ ID NO: 26720 - DNA, 717 bp, Glycine max
  Clone ID: TF_GmC566296_1
ctaacacacataacaataacttagcaacattttttccttccttctttctttctttctatactttttgttgttaattctaagttctaagagaagaaaaatggagggtggaagatcatcagtttcaaatgggaatgttgaggttcgttatagagggattagaagaaggccatggggaaagtttgcagcagagattcgtgaccctacaaggaaaggaacaaggatatggcttggaacatttgacactgctgaacaagctgcacgagcttatgatgctgctgcttttcattttcgtggccacagagcaattctcaacttcccaaatgagtatcaatctcataatccaaactcttctttgcctatgcctctagctgtgtcagctcctccttcttattcttcttcttcttccacttctaattattccggtgatgataataataaccaccttgtgagaccagctttttctggagaaataatgcaaggtggtgatcatgatgatgatacttttgagttggagtacttcgataataagttgctcgaggaactccttcagatgcaagataacagacacttctaaaagtaaaatataacacaagccagctatgttgtgttagtcactggcatgaaataaaatgcaaagaaatattgttgattttatttaatatattttgtttgatttttttttttttttttgtagctgatcaaagttcttcgaaatga

SEQ ID NO: 26721 - DNA, 745 bp, Glycine max
  Clone ID: TF_GmC31_2
agttgttagaatgcattgattttgaagcagacacagaagtggtaggtctcacgtctcatcataaggtcgaaaactccattgaaacaagtcttccacataattccaatttgccagaagaaccaatggtgtcaacgaaaaaggaagcaacatgttatgcaacaaggcgttacagaggtgtgaggagaaggccatgggggaagtttgcggcagagattcgcgaccccaaaaagaaagggagcagggtgtggcttggcacatttgacactgagattgatgctgctaaggcttatgattgtgctgccttcagaatgaggggtcacaaagccgtgttgaatttccctctggaggctggaatgtctcatccagagcccaacagtagtggcaggaaaaggagaagagattatacaacagctgtcacaagttcaagtcatgtcatgtcatgagaaataattcagtgtgggataaccatgtttttcttttggcattttttgtcagttacataagttaatgcaaggttttatagttctactacagttgagcgtgatgaggtctgttatttatatccttgacttatgattaagggaagcaaatggggtgaaattgaattaaaccaagaattaaacagttcataaagaaacctagttctacttttttatttaaagctctcaaagtagaatgtgtgatagtcagttagtcacgactcaccttagtcattatataattagaaaaattctcattgtatctt

SEQ ID NO: 26722 - DNA, 1348 bp, Glycine max
  Clone ID: TF_GmC106_1
gccagtgattcttcttcacttctacatcaacatcatcatcatcaacagcagcatcagcagcaccagcagcaacttcttcagtattggagtgacgcgttgaatctaagtccaagaggaatgttaacaagattgggaccagatggaaggccattgtttaggcttccaacacagcccataaacacaacaaaactctatagaggagtgaggcaacgccattgggggaaatgggtcgctgaaatccgtcttccacgaaacagaacgcgtctctggctaggcacatttgacacggccgaagacgccgccatggcctacgaccgagaagccttcaagctacgaggagagaatgctagactcaatttcccagaattgttcctcaacaaggacaaaaaagaagaacaacaacaacaagaacaagaagcttcttcgccagttctttcagctattgcaaagcagcatgaaccttctagtgaacaccgtgacgtccccatagaagagtctaatgagaatgattcgggtgacgccacggtgagcgatgaccaggttcatgctactactgagagttccgaaggagtttctcaggaaatggtttggggagaaatgtctgcatggttcaatgctattcctgctgcttggggtcctggtagtcccatgtgggatgatttggatgccaccaataatcttctttgccaatcacacattcctttttccaatcccaatcaacaagaactcaatgatgctgagagacaagaacaaaacactggaccaggttacttgtggaaggatcaggattgaaatttgaagttaattttctatataccttgcttctttctcttcctggttgcatatccatgattatcatttatccatcatccactccttcattacattttaggacactttgatggttccttagttacttacttctcactcactggttgcagatattttcaccacacaacctgtgaaccttgcctactactactcctatattcatttcctttttaacttcttttctgaaaccttctgctgaactaaggctccgtgtatttcaaggccttgcagcattttttttcttttacttgactattttacactatttttgcttttgtttttttttaatattttaatgtagtaagtaaaggtagattggcatgaccagggaagaaggagacggttttgtgatttccttctcggttgctccatccgttatgagctatgtttttcagctccaaggatggttcatatatatatatatatataatcatattacttcatttgtagtttgtacgctatcatgttatgtatcattttttttgttgttatattacatatccagcactttacagta

SEQ ID NO: 26723 - DNA, 346 bp, Glycine max
  Clone ID: TF_13787956
gatatacagaggggtaagaacgagggactgcgtgaagagggtggctgatatacaacggcctaagaaccagaccagggtatggatgggaaccttgaacaccgactatgaagccactctggcgtactacaagggcgcacacaagctcgggggggactacgccaggttgaactcgaccaagctgcgacaccactgttgcgacactgggggcgacttaagggagtataaccctgttcattccgtccctgacgccaagcttaatgccatgagtgagggcctgtctttgctgcagatacaggtgacgacagggaatcctccgaagaaaacgcggtccaaactcaatagtgcg

SEQ ID NO: 26724 - DNA, 549 bp, Glycine max
  Clone ID: TF_GmC36407_1
agcaactctgtttactcatctggtgttagaatggatagttcctctcatcagctcctccccttcaacgaaaacgacccagaagacatgcttctctatggcatcatcacttcatgccaagaaaaaaaagtgaccatcaaccaagagcaagtgaataagaagaggagcagcttccgcggcgtgcggaggcggccgtgggggaagttcgcggcggagataagagactccacgcggcatggcgtgagggtgtggcttgggacattcgacaacgccgaggccgccgcgctggcgtatgaccaagccgcattctccatgaggggctccggcgcggtgctcaacttccccgtggagaaggtgaaggagtctcttagagacatgaagcttgatggatgctctcccgttgtggccttgaagaggagacactccttggctgctaagaggaagaaggaagatgtccttgttttccatgaccttggggctgattatttggaacacttggtgatgtgctctgatctacctagtacaaccattgtttaatctttcatgacttgc

SEQ ID NO: 26725 - DNA, 838 bp, Glycine max
  Clone ID: TF_GmC636_2
gagagacaagagccgctactactaatatgtacattaaaatctacgaataatggagcaagagcttcaacgcaacagtgtccacgacgacgaagccgccaccaccacgagctccggcgacaagcccgacacccctcgcggcggcggaacccgacacccactcttccgcggcgttcgcaagcgccgctggggcaaatgggtctccgaaatccgggagccgaggaaaaagtcacgcatatggctcggctccttcccggcgccggagatggcgggcaaggcctacgacgtcaccgcctactgcctcaagggccgcagggcgcagctcaacttccccgacgaggtccaccggcttccgccgctcccctcctcctgcaccgcccgggacatccaggccgccgcagccaaggccgcccacatgatgatggtccaggctgcctccgccgactcgccggagaaaagcagcagcattacctccgactgcgacggcagcggtggtgacgacttctggggcgaaattgagctgccagaactgctcaacggcaagtggtgggcctccgaccgccacgtaacgccgtggccggagactgagcttccgccccagctgcccttcaccacggcgtgcttgtagtagtttgtaataatcaataatgctcttcccatgctctcatgacttggttggtatattagttacatatattattgctcatataattaagtaactctctttgtgttcacttcacaataattaataattttaattgtgatgatcaatggtagtgctgttaatgataacactttcactaactatttttgctaccaatttatttagcagcacattaat

SEQ ID NO: 26726 - DNA, 800 bp, Glycine max
  Clone ID: TF_GmC157860_1
aattcggcaccaggttagttactactaactaccccttttgcacacgttgtctcattcactcaaacaacttcaaagaacgaagcttttcaccaagtaacatgttttccatcaatcatttctccgacccagatgccacctcgccggggtcgggaggaagctcccgaccggcgctgtcggacgaggatttttttctggcggcaagcaatcccaagaaacgcgccgggaggaagaagttccgggagacgcgccacccggtgtaccgcggcgtgagaaggcgggactccggcaagtgggtgtgcgaggtgcgcgagcccaacaagaagtccaggatttggctcgggacctttcccacggcggagatggcggcgcgtgcgcatgacgtggcggcgatcgcgctgaggggaaggtcagcctgcctcaacttcgccgactccgcgtctcggctcccggtgccggcgacggcggaggccagggacattcagaaggctgcggcggaggccgcagaggcgtttcgccctgggaaggatgatgatgcggtggcggagagggtggcagcgacggcgacggagcgtgaagaagaacaagaagaagggatggtgccggagtatctgaggaacatggtgctcatgtcgccgacgcattgcttcgggagtgatgagtatggaagtgctgacgtggaatttgacgatgctgaagtttctctgtggagttactccatttaatttaactcagttattggattttttttttactattttgagtaatgtaaagattgttcgtatgggacaagtagaatagtg

SEQ ID NO: 26727 - DNA, 773 bp, Glycine max
  Clone ID: TF_GmC1595_2
cccacgcgtccggttggtggtgttgttgaagattctgaccgtgctttcttttgtttctttgcgtggcttttgtacctggggaatgattactgactcgtggggatcttttgctcattatgcggtttcagtttacttgggtggttatgacaaggaggataaggcagccagagcttatgatctcgcagctctcaagtactggggtccaactaccaccactaactttcccatttccaactatgagaaggaactggaggagatgaagaacatgactaggcaagagtttgttgcttctcttcgtaggaagagcagtggtttctctagaggggcctctatatacagaggagtaacgagacaccaccagcatggccgatggcaggcgagaataggcagagttgccggaaacaaagacctctaccttggcactttcagcacccaagaagaagctgctgaggcctatgacattgctgctatcaaattcaggggattaaatgcagtaacaaactttgacatgagtcgctacgacgtgaagagcattgcaaatagtactcttcctattggtggtttatctggcaagaacaagaactccacagattctgcatctgagagcaaaagccatgagccaagccaatccgatggagatccatcatcggcttcatcggtgacctttgcatcacagcaacaaccttcaagctccaacttaagctttgccatacccattaagcaagacccttcagattactggtccatcttggggtaccataatactccccttg

SEQ ID NO: 26728 - DNA, 1037 bp, Glycine max
  Clone ID: TF_GmC1970_1
cggtccggaattccggggccggccagccgacaatcgtgccggccagccgacaattacgggaggttatgtgggtccctccacttttatatacacaacaacaacacacatactagtcatttgttgttgttgtgtttgtgtttgtgttctctcctttcattaacgttgtgttgggtttgctagtgtacttggttttcattatggcgtcttcttcagcctctcgtgagggacactacagaggagttaggaagcgaccatggggacgctacgctgcagaaataagagatccgtggaagaagacacgtgtctggctgggcacattcgatactcccgaggaagccgccctcgcctacgacggcgccgcccgctccctccgcggcgccaaggccaagaccaacttccctccggcgccgcctctctgcctcgacctcaacgtcccttcctccgatcaccgctggccccacgtcccccctcgcagcctcgtcctcagcgagttcctccacaccgccgttctcagagacattgaaccgccgcaactaccttttccacccgccgccgccatcgtcgctcaccgaagcccccacgccgggggagttcaggtggtggagagttctccaacggcgtcgtttttgggtctcgttaggcgcggcatccccatcgacttgaacgaacccccacccttgtggctatgaataatgaatgaaccctgactaggtttctttcgacgtcgttttatgttccctagtattatctactactactcccatgttttttcattttaattttccctcagcatgcttaggtttttattagtagcgttgtacgttcatcgtagagggagtagtcgtatgtatctgtccatgtgagtctaacattaggttaatggaaggggaaaaaaactgctatgatattttgtatatacagtacattttttttatattttcctttatcaatgtctctacgcattttgtcgttgtacgtagtactatgttattcgccgatctaatttagtggattatgttgggatttttttcatgatt

SEQ ID NO: 26729 - DNA, 864 bp, Glycine max
  Clone ID: TF_GmC1970_2
gaagggctcgagccggtgccggccagccgacaatcacgggaggttatgtgggtccctccacttttatatacacaacaacaacaacacacatactagtcatttgttgttgtgttctcctttcattaaggttgtgttgtgtttgttgggcttcgttactgtactttggtttcattattatggcgccgtcttcttcagcttctgcttctcgtgagggacactacagaggggttaggaagcgaccatggggacgctacgccgcagaaataagagacccatggaagaagacacgtgtctggctgggcacattcgatactcccgaggaggccgccctcgcctacgatggcgccgcccgctccctccgcggtgccaaggccaagaccaacttccctccggcgccgcccctctgcctcgacctcaacgtcccttcctccgatcaccgctggccccaccacgtccccccccgcagcctcgtcctcagcgacttcctccacaccgccgttctcagagatatcgacccgccccaacaacctttcccacccgccgccgcagtagctcaccgaaatccccacggcggagctatgcccgttggcggcggggttcaggtgatggagggttctccaacggcgtcgtttttggggttcgttaggcgcggcatccccatcgacttgaacgaacctccacccatgtggctatgaacgaatgaaagccctgactagagtcaaactatatatagagatatctctgcctacggatgtgacggaagcaaatgaaggattcctgatggggggtgacttgaagcccattgattgttcctttccttgcgtctccaaaggtaacagtccctttactaatcttatatattgg

SEQ ID NO: 26730 - DNA, 571 bp, Glycine max
  Clone ID: TF_7233004
ttacattgttgtctgctgaaataaaaaacagaagagtgaaatggagcttgcacctgtgaagtctgaactaagtccaaggagccataggttgctcatgatagatggtagtgaggttattggcactaagtgtgtcaaaaggcggcgaagagattcatctacggccgtgttaggtggctatggacaacaaggtgaacagttagaagaacagaagcaacttggtggccaatcaactgccaccactgtgaatagaagctcaaggttcaggggtgttagcagacacaggtggactggaaggtttgaagcacatctatgggataaagggacctggaatcccactcagaagaagaaaggaaagcaagtatatttgggagcttataatgatgaagaagctgcagctagagcttatgatttggctgcactcaagtactggggaatatcaactttcacagatattcctgtgtctgattatgagaaagaaattgagataatgaaaactgtaaccaaagaagaatatcttgcttcatagagaaggaggagcagtggtgtttccagaggtgtatcgtagtataga

SEQ ID NO: 26731 - DNA, 1352 bp, Glycine max
  Clone ID: TF_GmC699_1
aattcggctcgagcggctcgagctcgagccgattcggctcgagggagtatcaaaaccaaagggccaaggagggtagattctgtgagaaactcaagatcaagaataggccaaagtttgtaggagtgagacaaagggcttcagggaaatgggcagcagagatcaaagacacatcaaagaagattaggctttggcttggaacttatcaaactgctgaggaagctgctcgagcttatgatgaagctgcatgcctccttcgaggttcaaacactcgcaccaatttttctactcaagggtgtggcgttgctacaaattctcctatatctctcaaactcagaaacctccttgatcgtaaagccatgtcaaatcaaagtcaaagtcaaattcaaaggcaatcctctatgataagttccactttccaaggtgctgatacttcagctagtccaaatgttagtgccatcaataagatcatggttatggaaaactactctgcttgtagtagtgaaggtaagtctttgtttttggttcagaaccaccaagtctgtgataacccgtatggactagatatgaatatgatcaactgttcaacgggtatcacaccaaatacatcgcagtttgattattcttggccattagcccaacaaaggattaacgaattgccaatatcaaaagatgattttggtttgaatgcagaaaggcaattgtcaggatatgccaccaatgagtgccatgaggaggatacgtatgcatatgatgtcaattatcctctctcccactttttctgcttcacttgatatctatcttaatcttcctatctcttcttaaaacatagtttgtataatattaccttgtttccgtgtcattttccctgagaggataaaccaagagtcaagaccattgaatttctaaactcactctgctttaccaagtgcttataggaatcagtaacaagattttcggtacaatggtactttgcccagagtgtaacaattcttttcaactcctcaaagttaacccattggatattttgcaagctcgtgatcacttacagtcacaccccatctcagtataataaggaagactaatgtgtgaagtcaaatgtgtacgcactatatatcagtcttcattcttctacaaatgtacttagtgcttacgatatattcaatcccactccttatggttggataattagatgaaaacggatattaagatgtattttacttttttgtgttatatatcacctttaaaataatttctgcacacacatataagtgcatctcctagctaggttcacttgggggtccatattattttgtgatcaagtcatgtataatacaagtatttttgtttaaaaa

SEQ ID NO: 26732 - DNA, 1825 bp, Glycine max
  Clone ID: TF_GmC603_1
gggacataccatatatacatatattatagtttagtttgcactattttaatggtggctggctaccttaattccacatgctaaaattttgcacccctttattatataaccgtttcattctctatagcatctcaaagggtgtcctgagaaggaatcacacaagagaaattttgggtggatcttggcaatttaaatttggtccaaaaatagtaagaaagaaaaccatagtttatatagttttcatgtccttgctaacggtggcgcaccaaagggggtcaggtgagtttatgcggttcacggaaagtcatggcggcggtggtggcggtgacggcgatggtgaatatggttatggacatgatgatggtagaggtggtgggggtggtggttcactagggttgaattttaaccaagtgatgcaacaaggtgaggttacaacgcaaggaggtactttggtttcagggtataacaggggtgatccagatttgagagaaatggtttccgctttgacacatgtggtggtgtcttcagggtcaggccagaggagcaccgaatggatccagcaaagtggttttcctatgatgtctgcatcttctctttcatgtttgtcttctttctcttctccttcttcttctggagcctcttgggttggccacaaaagaggcagagaagaagaagagagtagctcttcccataacatgatccaacaacaacaacaaagtgctccaagactcttcagaaacattggtgacttcatggtgccttctcaaggagactcatcttcagcgacagaagaagcccccacctccacaactacaagtgtaaccgctgtggcaacaacggttactgaaaccccacccccaccgggaggtggggaaaggaggagaaagtacaggggagtgaggcagaggccatggggaaaatgggcagcagaaattcgtgatccacacaaagcagcaagagtttggcttggaacattcgacacagaagaagcagcagcaagagcatatgatgaagctgcattgaggttcagaggcaacagagcaaagcttaacttccctgaaaatgtaagagcagttccacccattcaaccttttcaagccaccactaggctaaccgtttctgattccaccacctctcaattccggccactcgtcacggaggcgccgcccttcattcagcagccacagattcagggctcctctgacttgatcagagattacttgcaatactctcagcttctacagagtgattttcaacagcaacaaatacaacaacaacagcagcagcagcggcagcagcagcagcggcagcggcagcagcggcagcagcagcagcaacaacaacaacaaccatctagtttgcttcagcagttgtactataatgcacaatttgcttcacttcaatcaccttcaatgctatcatcatctccttcattttcttcttctgtgtctccagcaccattcccattattcacaacctctgcttctttccccttgttttcaagtcaacaaatgggctatttccagccaccggaaagccgcaatcccgctggcggcgtgccggagtttccaacgtccacatggtcggataccagtagccagccaccaccttctggttgatacagtgttttagtttccttcatattttcctttttcttttttctttctttcattcttagcataaaaaaaaaagacttgttatacttatttcttttttcaagggtgaaactatgatatagttttttttaagtatttttggtactattctcgtatcagaattagagtttcagtaatttatgttgatattcaatacaaatctttattatgta

SEQ ID NO: 26733 - DNA, 1527 bp, Glycine max
  Clone ID: TF_GmC603_2
ctcaaagggtgtcctgagaaggaatcacacaagagaaattttgggtggatcttggcaatttaaatttggtccaaaaatagtaagaaagaaaaccatagtttatatagttttcatgtccttgctaacggtggcgcaccaaagggggtcaggtgagtttatgcggttcacggaaagtcatggcggcggtggtggcggtgacggcgatggtgaatatggttatggacatgatgatggtagaggtggtgggggtggtggttcactagggttgaattttaaccaagtgatgcaacaaggtgaggttacaacgcaaggaggtactttggtttcagggtataacaggggtgatccagatttgagagaaatggtttccgctttgacacatgtggtggtgtcttcagggtcaggccagaggagcaccgaatggatccagcaaagtggttttcctatgatgtctgcatcttctctttcatgtttgtcttctttctcttctccttcttcttctggagcctcttgggttggccacaaaagaggcagagaagaagaagagagtagctcttcccataacatgatccaacaacaacaacaaagtgctccaagactcttcagaaacattggtgacttcatggtgccttctcaaggagactcatcttcagcgacagaagaagcccccacctccacaactacaagtgtaaccgctgtggcaacaacggttactgaaaccccacccccaccgggaggtggggaaaggaggagaaagtacaggggagtgaggcagaggccatggggaaaatgggcagcagaaattcgtgatccacacaaagcagcaagagtttggcttggaacattcgacacagaagaagcagcagcaagagcatatgatgaagctgcattgaggttcagaggcaacagagcaaagcttaacttccctgaaaatgtaagagcagttccacccattcaaccttttcaagccaccactaggctaaccgtttctgattccaccacctctcaattccggccactcgtcacggagacgccgcccttcattcagcagccacagattcagggctcctctgacttgatcagagattacttgcaatactctcagcttctacagagtgattttcaacagcaacaaatacaacaacaatcaccttctagtttgcttcagcagttgtactataatgcacaattggcttcacttcaatcaccttcagtgctatcatcatctccttcattttcttcttccgtgtcaccaacaccattcccattgttctcaacctctgctcagttttcctctgcttctttccccatgttttcaagtcaacaaatgggctatttccagctgccggaaagctgccctcccgctggcggcgtgccagagtttccgccgtccacatggtcgggtaccagtggccagccaccaccttctggttgatacagtgtctcagtttccttcatattttccttttttctctttctttcatacttacgataaaaaaatgatttgttttacttatttcctttttt

SEQ ID NO: 26734 - DNA, 505 bp, Glycine max
  Clone ID: TF_jC-gmfl02220146c10a1
ggctcgagctcgatcccattttaacacatacacttctctttatctgtgtcggatcgcatgaacagcacttggaggaggaagaagatcaccaccgtgcgggtgctagtcgtggaccaaatctgaagagacggggcggggggggtggactgtttctctgtgaccctacatgaacaagagtccatggaccgtgaccattcacctgtgactagacaattttttccggcggaagatgctgacgcggcgggtgccaccttcggtggtggacccggtctcacctccacgatcccttgtgctcactggctacgtgtgaaattttgccactcatattcactttgcaccggaaaatcatgaggggaagtttttctccctatgaagaagagtcgtcgaggaccatagtcaatgagctctcagtttagaggagtcaccctctaccatataacgggccgctgggagtctcatatatggcattggggaaaacaagtgtatctatgtggatcttacacat

SEQ ID NO: 26735 - DNA, 815 bp, Glycine max
  unsure (1)..(815): unsure at all n locations
  Clone ID: TF_GmC445884_1
gggggtagctttttttaattttttttttttttnnttttttggagaagaaaaaagtaagcatttattatgctgcagtaagttatcaagcaaaattagaaaagctttgttcaagcttgaaaaaccacaactcaatactcctcaacttagagaagttacttacataatccattccctacagttactatgactcggactttccgagcaaaaaacctatctttcttctcagcaaaagggttaaagaggggtcagacccagaagcaggtcaagctaaattgcaccataaactagctttctatttgttagcagaacagaaaattagctagttgatcatttccacaattcaatagttctgatgaggccatacgaagaacccaggaactgccagtggtggaagggtagcgagtgcgattgcatcggtcatagttgcagcaaattctgcagtgctactttcaccgttggtgggattaaaatggtggaagaggttgtgggggtaacatgtgattgcagaatcatagggtatagaagacactggctgaatggttgagaaattgatgctgctactggcgtttgtgttctgaggtggttgaatggtgctgacaagagctttgttctccgtttctggggaaactttaaagcgttttgctatgccgccaactggaagagagttgttcaatatagcgtcgacgtcatatcgcctcatctcgaaattggttacggcacttgcacctctgaactttatggctgcaatatcatatgcctctgctgcctcctcttcagttgaaaatgttcccaaatatagatccttgtttcccgca

SEQ ID NO: 26736 - DNA, 452 bp, Glycine max
  Clone ID: TF_uC-gmrominsoy058g08b1
cttaaactgacgctaaaaagtatcttagagagatgtgtggaggcgctatcatctgtgacttcattcctgacgcggtggcggccggggctggccgcctgaccggccattacatgtggcctgatctgaagaagcgtaagaatgacttggacgttgacttggacgctgacttcagggattttaaagactattctgacatctactacgacaacgaccgccacgacaagccctttgctaaggcctcctcttcttgccgctctaccacagcgaaaactgcggcattacaagtgcgagctgaaaaacttgctgataggaagaggaagaatcagagtaagggaatccgtcaacgcccttgtggaaaatggtcaggtgagatgtcggatcctagaaaggaggctcgagagtggcttggaaccttcaacactagctaagaagctgctagagcttatgatgct

SEQ ID NO: 26737 - DNA, 635 bp, Glycine max
  Clone ID: TF_6724385
gcacgagccacattggcatgcctagaagaagaggctgaggatgatgatgaagcagcagaggaataagtggcagcattagtggcaccaccagcagtcatagggtactcatcaggaaagttaaggattgcaaatggacctctcatggcataagcagctctatcataggctctggccgcttcctccgcagtgttgaaagtccccagccacaccctctgaccctgcctcgtggagtctcgaatctccgccgcgaacttcccccacggccgcctccgaaccccccggtaccggacatctccggcatcctccttagccctccccctcgacccttcttcatccatggttgcacttttggtaaggtactaatttttgtgttttttgcatgcatggtaaggtatgacaaggttggagtatatatatatggttgaaaaggcacaatctgattaggccacgcaagcattgttgccacgtgacgattagaagtttctgctattgaaaccaatgaccaatattgaaaagttcttgtgtccattgtatctggatggtcaaggtggtgggctttgcaaggtatagagattcttgtgccgcgctagcactcgctctttgaaacgccttctgcacatcgttgtttgggaatc

SEQ ID NO: 26738 - DNA, 1469 bp, Glycine max
  unsure (1)..(1469): unsure at all n locations
  Clone ID: TF_GmC1593_1
cggctcgagagctattgaacttatctctcttctcacttctgttgttataagtaacttccctcatcattacaaaacaatcctccacaggtttcaaaatgctgaaatcgggcatgggaattgaggagagaaagcaagtgaagaagccagcacaagccagctcgagaaaagggtgtatgagagggaaaggaggtcccgagaatgctagttgcacctacaaaggtgtgaggcagagaacatggggaaaatgggttgctgaaatccgtgaacccaatcgaggtgctaggctctggctcgggacttttgagacctctcatgaagctgctttggcttatgatgctgctgcacgtaagctctatggctctgatgccaaactcaacttaccagagctctctatcaaatcacaatctcagtgtccaccaccaccttcttctgtttccaacaacactcagattcctcaaatggagaacctgcagcagcagattcaaaacaattacatggacatggctacatgttctaataatttcaacaacaacaccaataatccttcagaagtttccatggcctctcagcaggttggagttggagtaccaatttacaccagtgactccatcgtgtctcttcccttggacaccaatcccaagcctgtggagaatgatggtgactttcgtccttcgtggggtacaatgaatgagggtttgccagtttttgatgattctatttgggctgaagctgccatgtctctagattttcctcaaattgcagcagagactgcgatttattcatcgggtaacaacttggccgatgtgggtgtgtgggactctctgcaaaccccatggtgcatgtaatttcatcactttcaaaagggcaagggaaagccacaagctatagcttttcttctcatgccagctggactgatatctgcttgttaaaatatatagtgtatatataagaggggtaagtaagtactttgtaaagacatatatgatacccaaattaagactagtttagttaaataggatactatatcatatcatatatatggtgtctaccttggagtgtatggaaaaccatgacgtgcttattttcgcacgacgtcgttttctgccttatagtctatagtaatattatgttatatgtaaatattacttaatacgataagggatggtggtgatgctctatcgccccgatattaataagttgtgttagcttttgtgcagtttattgtgagttttatgtaagcatcttgtgagttatatatgtcaataagaatgtacaactagtagttgtgtagtaataatggtgtacatataaaatgtattattgtagtctatgtttatgtttagaaaatttcgttttaaatttcttatgatttgatccanaacaaaaaacatggagaaggaaatggaggaattaaagatgatgatgttgtgaaaataaggaaagagagttaataaaaaattactaaaggg

SEQ ID NO: 26739 - DNA, 375 bp, Glycine max
  Clone ID: TF_LIB3242-641-P1-J1-G1
accaaaactgacgcttttgttattcttcgagtctctgagagagatgtgtggaggcgctatgatctctgacttcatgctcctttttgagacttctaatatcctcagggttttttgggagaattggctaaaaaatgggtctaccacagcgaaatctgtggcattccaagttcgagctgagaaatttgcaaataggaagaggaaaaatcagtataggggaatccgtcaacgcccttggggaaaatgggcagctgagattcgggatcctagaaagggggttcgtgtctggcttggaaccttcaacactgctgaagaagctgcaagagcttatgatgctgaagcacggaggattcgtggcaagaaagccaaggtgaattt

SEQ ID NO: 26740 - DNA, 1315 bp, Glycine max
  Clone ID: TF_GmC953_1
gcgtggtttgtatatcctcgaaaatgatgaatgaagcggctggtgaaccctaattagttgtcggtgtttgttggaagagctcatctctgttttcttcgtcatcttccccaaccagagatgcgccccacaacacatacttactaaagctttcaactttccaacaccctttcagatgttagccaaggcccataacaaaggggatggatctaagtccctggctaagatactggcaaaatggaaagaatataatgcccagattgattccagcagtgatgcggataagccaattcgcaaagttcctgccaaaggatcgaagaaggggtgcatgaaaggtaaaggggggccagagaactcacggtgtaactaccgaggtgtcaggcaaaggacttggggaaagtgggttgctgaaattcgagagccaaacagaggcaataggctttggctaggtactttccccactgccattggagctgcccttgcatatgatgaagcggccagggcaatgtacggttcctgtgcccgtctcaactttcccaatgtttcagtttccagtttctctgaagaatcttccaaagattctccgtctgcgaatcattgtggttcctcaatggcagtgtctgcaaacgagtccatgatttcacctagtaactctggggtagatgcagaagaggatgttgatatggagcccatttccttatccttaagtgtaaagcatgagaatggggaaggtgaatcggggataagttcatcccctccttcttcctcatgatgtacattgggacatggctaaattttttagcacatgtacttgttaatggttagcttagatttgatcacatttggtcctggagattagctgttgtaaaactaaaatgaactccgttgcaaaaatggtcaattcttttggccgcctaatttgcatggatatctgtctatttttaactcgttagggtgtgaatcatacttacctttgtcatgttacatgctctcttccctcacctctacatctccaaacccatttgttattgtctctatcttgcccggtttattttactgtgagaatgtggttttcttaattttaagagcttacatttctcatgtaagtttctatttacataacacttgacttgccatgcatgattgggttataggggatggaagcttttggaaataggaatagtctataggaaatctccatgggtctctagaggaacaaattaggaagtatttcagcacgtttggaaccgcgatgtgaactcatggtaactttaaagctagcctctggtgtggtgtagtaactttctgtaatcatgtt

SEQ ID NO: 26741 - DNA, 1150 bp, Glycine max
  Clone ID: TF_GmC768_1
tcctcacaacaatattgtttcatcactcagatcccttaaagatgacaacagcagaagaaacttcaaacttggatctcatacgccaacacctattaggggaaaatatcatctcagactcctcctttttctccaatctccttcatcatcctatgaaacttgaagcaccctcatcaccagaatttgatttcacctcatatatctcagacaacacaagctttttcactttccttgaaggctatgatttgatggcagacatgaaatttgttgattcagacaacaccatcccttcaaaggaggttaagaaatgcaatatttctcctgaaccattggtgtcatcaaaagagaagccaaagaagttagaatacgataaggcaaagcgttataggggagttagaagaaggccttggggaaaatttgctgctgaaatccgtgaccctacaaggaaagggacaagggtttggcttggaacctttgacagtgaaattgatgcagctaaggcctatgattgtgctgctttcaagatgagggggcagaaggctattctgaacttccctcttgaggctggactgtctgatcctaagcctaacagttgtggcaggaaaaggagaagagagagccatgatcatgaattggagctgccacaagtccaagttcatcatggtgtttcctgagaaaaagtgagaagatataataatagatttagttgttttgtgagtagcattaagtttgttgcctagaaaaataaggttgctttgccttttagtttgtacgtagaagcaaggctaatgtgaaatgtctatatgaatctatgcaaaaagcatgttacgaaagttttactaactttgaggagttttaaaaaaatattaatcatgttatgaaagttttactaacttttaggagttttagaaaaatattaatcagtttatgtttttttttaaccttcaatttatcagaaaattttttttctgactaatccaaaatttgattaggagatcaaataatctgataaaacattattttcactgaagataatcaatttatgtttgaagatacaccgaataaaatgaacaaacacattttcttttttgttgtttgtctctgtttttgagggaaacatgcaaattcttttcagttcaccttcacttttgtc

SEQ ID NO: 26742 - DNA, 1295 bp, Glycine max
  Clone ID: TF_GmC307_2
cctgttgaggactccgaactgcctgtctccgccgccgccgcaggcagtggaggcggtggcggcggaagctccttcccacgtgctcactgggtaggtgtcaaattttgtcaatcggaaacacccggcgccggaaaagcagtgaaagtgtcggagccgatgaagaaaagtcgccgaggaccacgctcgcgtagctcactttatcgaggagttactttctacagaagaactggtagatgggaatctcatatatgggattgtggaaagcaagtgtatctgggtctgtttgacaccgaaattgaagctgcaagggcatatgataaagcagcaataaaatgtaatggcaaggaggctgtcaccaattttgatcctagcatctatgatagtgagcttaattctgaatcctcaggaggtgtagctgcagatcacaatttggatttgagtttgggcaattccagctctaaacataacaatagtcaaacatcggggaatcacttcgcaaattctgcaaccgatcagcatatgccacctgaatctaattggcggaatgggggaagcaagcctaagctggtaaatatacttccaaaaccatgtggtagaagcaacatagaagcctatgggcacggtgagagtgaaaccttgaggttgctaagccaaactcaccttcaatccccaaccaataaagaaatgcacagatattgtccgtataggtcgccagcagagccacaaatgcctcacaatttcgcacatcatcttcaccaaccaagttttcatgttcctagcagcagcagcaaccgaggccgtattggaagcgatctttcgttatcaatgtccgatcaacaacaatggcaacaagccgggcctccacatttgttagcaactgctgcagcatcatcaggattcccacagcaaattagaccctcccaaggttggctgcagaaaaatgggttccactctctcatgagaccctcatgaccctcaagatattatttctaccatgccattttccatttgaaaaataatctccccctatttgttttgtgagcatgtatgtacgagtgaatgcagtttagattattgtttatgttatgtccaacctcccccttctttaggaaaagcccatacataactgtaactttactattgggtgaaagaatagggagagccaaattgggaactcactctggacttgttataggccagtcaaactaaccaacgtacgaaatctttaactagatactaagatattctgggctctgactaaagtttctgatcttatataactatgatttcctgcc

SEQ ID NO: 26743 - DNA, 1886 bp, Glycine max
  Clone ID: TF_GmC6126_21
ccacgcgtccgggaatctctctctctctctctctttctttccctttttcactttctcattcattcttattagtatttctatttcacttcaccaacccactccaccgtttcccctttccttccatgctattatggcttcatcttccatcaaacacactcaccaccttaaccgcacaaaactcttcatgaaagaagaaacccttttgaaaaagaagcatcactatcccaaaatcatacgaatacgtgtcaccgacgccgacgctaccgactcctccagcgacgacgacgagccctccatgtcctccacgcgccgcagagtaaaaaacttcgtcaacgaaattaccatccaaggcggcggcggtggtggtggcgacgttaacgttgtttctaagaaaagaagattcaagtccggtgccggagctccgttatgtcggcggaagacgggggcgaagaagttccggggagtgaggcagcggccatgggggaagtgggcggcggagataagagacccgtcgcgccgcgtccggctgtggctgggaacctacgacaccgccgaggaagctgccattgtgtacgacaacgcggccattcagctgcgtggcgccgacgcgctcaccaatttcataacgccgccgccggagaacagaaaaaccggttactgctccggcgaggagtctcgcaacaacgacgacttgcgttcccccacttcggttcttgggcgctgttcggtgtccgaggaagctgtaactgcaaacgacgtatttggaggctctagtgagtgcgagtattcatgcgtttcggagtcagtgtttcctattcctaacgaggtggtgtttgactttgaaagcacgttagatatgtttgatgaagggattaataatgttgtggcagagactagtatattcttggcggaggatttagatttgggttttacgagttggcatagagagtgtgataatttccaagacattgggggggatttgtttgtttgggatcctcttgtcgctctttgattgagacacagacaccattctctcgtctttgtaattctattgccaacgaaaatgggttgctatcagttttgtttcttttgggggtttaggcaaaaaccttgtgtctaaggagaggttttctaattttttattctagcagtatatgtttattaaccactagttgtaaaaccgtgcttcccacggtgttgccgtctttttgtttcttatataaaattatgtctcataaaaaaacccacgcgtccgtggttctatttgtttgatggccatcttgcacgtcctgatcttattgtgttcaagtgacagacaaatcagaacagggaagagagatttgaaatgtaaatgccaagtgaaagtgaaaagtacagtccagttttagtgatctctttaatttatttgttcatagattaatatgatggtgtatgattgcttttctatttattgtggcatttttgtgttgtaccctgttgttgtgtttgcaataagtattagtaataaagcagcaaattcaatttcaaaaaaaaaaaaaaaaaaaaaaaaaaaaaaaaaaaaaaaaaaaaaaaaaaaaaaaaaaaaaaaaaaaaaaaaaaaaattaaaaaaaaaacaaaaaaaaaaaaaaaaaaaaaaggggggggcccttttaagggatccaactttacgtcccgggccttgcaaggtaatagtttttttttggggcccccaaaatcaaattccggggccggggtttaacaacgccggacttggaaaacccttgggttaccccaatttaatcccttggaaaaaaatccccttttccccagttgggtaaataacaaaaaggccccccccattcccctttccaaaaatttgcccaccctaaaggggaaagggcacccc

SEQ ID NO: 26744 - DNA, 1135 bp, Glycine max
  Clone ID: TF_GmC320_2
ctcgagccgctcctattaagttttcagttctcacaaattaaaaaataaaaatattatatatacatatatatatatatatatattctcttcgagtccgtcgaaaaagaaaacaatggcgaaacccagcagcgaaaagccagaggagcatagcgattccaagtactacaaaggggtccgaaagagaaaatggggcaaatgggtatccgaaataagactacccaacagccgtcagaggatttggttgggatcctacgacacccccgagaaggccgcgcgtgccttcgacgcggcaatgttctgcttacgtggccgcaacgccaagtttaatttccccgacaacccacccgacatcgccggcggaacgtccatgacgccgtcgcagattcagatcgccgccgcacaattcgccaacgcggggccccacgagggacattcgggtcgacccgaacatcctcccatggaatctccatcgccttctgtttcggaagggaccatccaaacggacagtgacgtccccactcttaacggttcagtaacggatttgttcacgcccgttgggtcgagtggttacgcatccgattacgggattttcccgggctttgatgatttcagtggcgatttttatgtgccggaaatgccgaacgttaattatggagaagaaaacggggaagggttcatagttgatgaatctttcttgtggaatttttgaggggcaatcaaatccagtattcaccaccggccaaatgggttatggttcaggactacgagagaggcgtaaccaagtttaagaataaagtttttttatttatacatcaaatagtttattaaaattattattattttatttaaaatttatttttaaatataattttataatatttttttttaggtatattaatactaaaaaataaaatttaaaactatttttttagctaaagtccttacatggattgtttgatccttaagtcgatcctgtcattgttatggttgcagatagttttattgattctggaaccgtggtaatgatccgggtttgaattcgttaatttttggacgaccaaacctatatgattaatgagtttctatgatattgatatcgatgctactgtcaagattattgtttcattcaataatg

SEQ ID NO: 26745 - DNA, 2198 bp, Glycine max
  Clone ID: TF_GmC4678_2
cccacgcgtccgtacggctgcgagaagacgacagaaagggataccaaggtggaggcttacccagatgacaagcttagtgcgcgagtctctctcccttataacccttcttccacttccgtgtcttttacgagttagatttctcattcgtcatggaacaacacattcactctctctctctttagtgattttttcgatttgattgacaaacacaacgaaccaaagttaactactttagagagagagagagagagagagagagagagagagagagtggagagtgaaggaagaagagaaggaggagagagagaaacaacagcagcgacgaggaaggtggagggtgctgagagaagatacaaaggaataaggatgaggaagtggggcaagtgggtcgctgaaattagagaacccaataagcgttcaaggatttggctcggttcctattctacccctgtcgccgccgcacgtgcctacgacacggccgtcttttacctccggggaccctccgcacgcctcaacttcccggagcttctcgtcagagaaggcccggccgccctagtcgccggctgcgacatgtcagcggcttctattaggaagaaggccaccgaggtcggtgctagagtcgatgctcttcaggcaacccttcaccaccactacgtgcccccgcggcaacttctctctggcggtgatggtgggtccggggatttcccggtgcgggttgttgacctgaataagatgcctgaacccgagagttcggactgtgagtgggatgtgaattgaaggaaaaaaaagtacatgttttcttattcggttgctaagcgcgggttgaggcaaagtgatgttgttgatgaggcctatgggtggtgccgagtactgtactgtatcttattccttcaattttctctcttgggtcttggctagttttttttttttagatattacaaaagaaattttggcgttgtaaaaatatattaaatgtaaattaactagtccagtagccaaaccattttccataacttccgcccctgatgatgattaccttagcgttcacataaaaatacttggtgattggactcgaagtctgaaagccaaattcacacaggcgtgccagcaacccctcaatggacagagtggactcctaagagctgaatgcttgaaaggagataacagcccaagttcctttcctaaggttctggtggatggtccatatggggcgccagcgcaagactacagggagtatgaggtggtgttgctagtggggcttggaattggggctaccccaatgataagtatactaaaggacatggtgaacaattttaaggccattgatgaggaggagggaataggtggtgctaaatcaccaacgaggttgagtgacttcaagacaagtagggcatacttctactgggtgactagagagcagggttcatttgactggttcaaaggggtaatgaacgaagtggcagaagaggaccgaaggaaagtgattgaactccacagctactgcaccagcgtctacgaagagggtgatgctcgctctgctcttattgctatgttgcagtccctaaaccatgcaaagaatggagtggacattgtctctgggacacgagtcatgtctcactttgcaaaacccaattggcgcagtgtctacaagcgcattgcgcttaatcatccagatgcccgagttggggtattttactgtgggccatcagccctcacccatgagcttcgtcagctagcattggatttctctcacaacacatccaccaagtacgacttccataaagaaaatttctgacaagatcgagctaagccgtccaccacctagatcattccactttgttttttgcctataaataattaagtttctacatgtggttcttatttatggctttgtaaaagcaccaaggcaggtgggagctaaatggttaaaatagagttgcctaccaattataaaaggtgtggacgtctgttaatgtctctgcgtgtctttatgtccatgtaaatttaaggagaaataaccactccttggaaacaccttgggagaaactagaaagtaatacagaagagagaataatgtctagctggagcgcacttgatactttgtattaatccccgatgccttttagctgatcaattgcagaattcaggagattcatttataaatattataaataatttgtgcacccgcaatatttatt

SEQ ID NO: 26746 - DNA, 2355 bp, Glycine max
  Clone ID: TF_GmC1178_1
ggctcgaggttttcaaccagaccgtccttcgtcagttaactatgggctaatcacaattcaggaagcccaaaactattaaagtatgtatatctgctctctcttttttgtttgtttcccgactgagcatagtcattcaactcaaagatgatcactgttctctaatctcaaaatcaaaaaggaaaccgacaacacaaaggatttgcagaaagtgcagctacttagttccattttcatcctctctccattaactttcagtcaaaacaaaacaaaacctctttaggtgtgaaattccacgtgccaaaatcatctccgaggcaccaacatcggcagccacatatttctttatttattggtacagtattgtttttttcttcttcttcttcttcatttttcattaacatatatttctttttcgaagaatcaaaggtagaatctacaatattaaaaaaaactgtataagaaattaaaggtagtggtagtggagtgtgtgtgtgtgtgttaattatgtgtatgcatggtggaagctagagtaatagaggcgcaacatggtcactgtttctgtgggggctatagccagcttctcatcatgttcgatttctcttattcttacccatcttcttatatataaatatttataataacgtgtttcagtttctttctcagaaggaatcagtatataaaacacctgctttctaacggtggcgcaccagaggggtttaggttcaggttcggggaagttcttcgcggcggagcaaggcggcgatgaggaagcggaagagagtactgaggtaggttctgttccgagccatgtggtgtcagcctctgcagcttcggcccaaaccaatcagtgggtgccgcggggaagtggttttcccatgatgtcacgttttatgcatgcgccttctcccgttctgtcttcttcgcatcctcatttgggagttggccacaagagagagcgtgaagatgacactggcgctggtgcgagtggaggtgttgctattgcagcagcttcttcacaaacgcaaacacaagagattgaaagtgctggcggcgacaggaggaggagatacaggggagtgaggcagaggccgtgggggaaatgggcggcagagattcgcgatcctcacaaagcggcgagagtgtggcttgggacattcgacactgccgaggctgcggccagagcctacgatgaagccgcattgaggttcagaggtaacagagcaaaacttaatttccccgaaaacgttgtaccggttccacctcctcctccggttcccgatttaccggcaagtgcggtagccggttccgattccatttccggttccggttcagtggtggcaggtttttcgccgacgctgatgcagggagcgccgtttcagggctcctctgcttttctgagagattattgggggtattctcagctgctgaggagtacaggggacttccatggactcgaccagtggttctttgattctcaaatggcagcgtttcaatcttcttcatcgtcgttgttgccatcgccgccgccgccgtcgttttcgccttcctctgcttcgtatcctctgttttcttccagccagcaaatggggattttccggccgccgggagagcagggtcatggcggagaagacggtggtagtgggtcagagttttcggagcttccaccttcgacgtggtcagataccagtggctatcctcctccaccacctggttgacatggaatacacatttttttctttattctattttttctctttctttggttaaagaaagaacaaggctttcttctgtttatttattttaatttatctgtttttgcttttttagattatttggagtccagttcactgaatttttatgtggttttgggttaaactgttactatttgctgctgttatttgaataaatactatttgaagagtagggagtagggaatgggaggttggaggatgcatgataaaggctttaagcctttgaggtagatacgaatggagtttaagtggtacgaggcagcactttgaagaattgtttagagataaagacaaagcagtacttaggttggaagctgagtttattccagattatcaactcaatggatttgatgttaacattttgtcaacaatccacgcaaaggtgaagaaaccaatatcttttataaaacctgttcccaataaaccaacttttttattaaggaatgaggattgagggatgtatttagaagatataatactaatttagtgtgatatgcataattttggtttttaagctggtgttaattgtttggtaagtgtattaaaatgtctaaatagtaatatttggaagtttgagtctagtactgtcaataattaaactcgt

SEQ ID NO: 26747 - DNA, 1455 bp, Glycine max
  Clone ID: TF_GmC1178_2
gttttcaaccagaccgtccttcgtcagttaactatgggctaatcacaattcaggaagcccaaaactattaaagaaaccgacaacacaaaggatttgcagaaagtgcagctacttagttccattttcatcctctctccattaactttcagtcaaaacaaaacaaaacctctttaggtgtgaaattccacgtgccaaaatcatctccgaggcaccaacatcggcagccacatatttctttatttattgaaggaatcagtatataaaacacctgctttctaacggtggcgcaccagaggggtttaggttcaggttcggggaagttcttcgcggcggagcaaggcggcgatgaggaagcggaagagagtactgaggtaggttctgttccgagccatgtggtgtcagcctctgcagcttcggcccaaaccaatcagtgggtgccgcggggaagtggttttcccatgatgtcacgttttatgcatgcgccttctcccgttctgtcttcttcgcatcctcatttgggagttggccacaagagagagcgtgaagatgacactggcgctggtgcgagtggaggtgttgctattgcagcagcttcttcacaaacgcaaacacaagagattgaaagtgctggcggcgacaggaggaggagatacaggggagtgaggcagaggccgtgggggaaatgggcggcagagattcgcgatcctcacaaagcggcgagagtgtggcttgggacattcgacactgccgaggctgcggccagagcctacgatgaagccgcattgaggttcagaggtaacagagcaaaacttaatttccccgaaaacgttgtaccggttccacctcctcctccggttcccgatttaccggcaagtgcggtagccggttccgattccatttccggttccggttcagtggtggcaggtttttcgccgacgctgatgcagggagcgccgtttcagggctcctctgcttttctgagagattattgggggtattctcagctgctgaggagtacaggggacttccatggactcgaccagtggttctttgattctcaaatggcagcgtttcaatcttcttcatcgtcgttgttgccatcgccgccgccgccgtcgttttcgccttcctctgcttcgtatcctctgttttcttccagccagcaaatggggattttccggccgccgggagagcagggtcatggcggagaagacggtggtagtgggtcagagttttcggagcttccaccttcgacgtggtcagataccagtggctatcctcctccaccacctggttgacatggaatacacatttttttctttattctattttttctctttctttggttaaagaaagaacaaggctttcttctgtttatttattttaatttatctgtttttgcttttttagattatttggagtccagttcactgaatttttatgtggttttgggtt

SEQ ID NO: 26748 - DNA, 409 bp, Glycine max
  Clone ID: TF_jC-gmst02400023c03a1
ggctcgagcacagcaaaggttggttacggctggctgtgttgtagctgtgaagtgtgccatgagggagaggattaaccattctcgtggaatccgtcagtgttcatggggaaagtgggctgctgagatccgtgacccatgaaagggggttcgcgttaggcttggaactttcaactctgctgaagaagctgcaagagcttatgatgctgctgctgggaggttcctgggcaagagagccaatgtgaatctcactgatgagcctgttggcgctgctgtttatgtgtaacgcctcaaggagaatgcagaagctgagtcaatgaaagaaaatctgaataccgtgaagccgaatatgaaccagatgctcaattctggtcacaatctgcagggctactacagcccagtagatcatgtg

SEQ ID NO: 26749 - DNA, 1116 bp, Glycine max
  Clone ID: TF_GmC1169_1
caattaacaaactctaacaacatcatggtgcaatcaaagaagttcagaggtgtcaggcaacgccattggggttcatgggtatccgaaattcgccacccgcttctgaagagaagggtgtggctagggacatttgaaacagcagaagaagctgctagagcctatgatcaagctgcgattctgatgagtgggagaaatgccaagaccaatttcccaataactcaaactccagaaggtgatccaaagagcactaccagtgaggacactccctccaccacctcgaaggatctggaggaaatcttacatgcaaagcttcgaaaatgtgggaaggtaccttcaccttctatgacttgtttgaggcttgacccggagaactcccacatcggagtgtggcaaaaacgtgctgggaggcgttctgattcaaattgggtcatgacggttcaactgggaaagaagagtgttaatgttaataataatgacactcatcatcaagctgatagtagcagtagtagttctctttcttcttctctaccttcttctgaacatcaccacattgagtctccatcactggctgtgacaggtaatcttcatcatcaagaagttgtgagaggagagattgacgaagaggagagaattgcccttcagatgattgaggaactcctcaacgacagaaactgccctagcccatcatttaacaacaacattcaagaaagggatggtgctgatcatgaccacttttttctttaagcttcttttttccacacagcgttatggtattcacatgcatgtttaatcttcatcttcaacaagggttgtcattatttgggaaaaaaagggaagtggtagttataggctaattatatataaccacatcatatctatcatatcatatctgttttcatgtatgtcatatttattataagtgtagataatatatatatacacatacatattacatgcatgcataggaaaatatacataagaaaataagagagatgtatacagaatattattttcagagttcatatgtaaaggccctatcgtctgctgcttgtttgaaacgttcatggtttatttatcataaataataaatatattttcagttaaaaaaaaaaaaaa

SEQ ID NO: 26750 - DNA, 725 bp, Glycine max
  Clone ID: TF_GmC1487_1
gtaggactctgcggctcgagatacactgtgaatggaccatcaacctccaccgtgccccgccgccgcctccgcaacggacaaccctcgtggcggaacgcgccaccccatgtaccgcggcgtccgcaagcgccggtggggcaaatgggtctccgaaatccgggagccacggaagaagaaccgcatatggttggggtcgtttccggtgccggagatggcggcacgagcatacgacgtcgcagcctactgcctcaaaggccggaaggcgcagctcaactttcccgacgacgtcgactccctgccgcttccgtcgtcccgcacggcaagagacattcagaccgccgcggcccaggcggcgcgtatgatgaaagcttccggcaatgatgagaaaagcggcattgcctccgacgacggcgatagcggttgcgatgatttttggggcgagattgagttgccagagctgatggacggcgagtgctgctggggttgtccggccggcgcttcctcctggacttcctccggcgatctcgccgagtggccggaggaggagctttcgccgcagcaaccgtcgtttatggcatgtctataatctactgtatctctgtattaatgctgcatgttcagttgtcgttggtatgtttcttgtattatatatcctattcctaatgttatatcctatgtgccaactgttcctgttgtcataaataatattaatagttattatcagt

SEQ ID NO: 26751 - DNA, 817 bp, Glycine max
  Clone ID: TF_GmC16307_1
aattcggctcgagcgacagaagggggtcaacactgaattcaaaatcactttcgaccatattctcttcttcttctctctctccatcatggtgcaaacaaggaagttcagaggtgtcaggcagcgccattggggttcatgggtatcggaaattcgccacccttttctcaagaggagggtgtggctaggcacgttcgaaacagcagaagaagcggcacgagcttacgaccaagccgcgatattgatgagcgggcgtaacgcgaaaaccaatttcccaatactccaaaccccggagggtgacccaaagacgacgctaacacccatcgatcacgagacctcatcatcgtcgacgaccacctcgaaggaactggaagagattcttcacgccaagctccgaaagtgcgggaagcttccgtccccttccatgacctgcctgaggctcgaccccgagaattctcacatcggagtgtggcagaagcgcgccggccagcgttccgattccaactgggtcatgatggttcctcccctcggaaaaaaaggtggtgctaatgaaggaggtactggaggagatgcttcttgttctaactcctttccgttctccgagtgcgatccgaccccgcaagtggcaaggcaggagcttctgaggacggagatggacgaggaagaaagaattgcgctgcaaatgatagaagaactcctcagcaggaactgccccactagcccttcattcaataacttatattaattaagggaaatgtttcctgaagaaggataattctattcagtttctttaagggtctttagagataaattatgctgg

SEQ ID NO: 26752 - DNA, 876 bp, Glycine max
  Clone ID: TF_GmC1010_1
cgaaagcacggggtgcggctcgagcttcattcattctttatggatcaagaaacaacaagaagaaacaccatgcaagaatgtcatgtgatagccccaacaacaacaacggcaacatcatcgtatcgtggagttcgtcagcgaaaatggggcaaatgggtgtccgaaatccgtgagcctggaaagaagagcagaatatggttagggagctatgagtcaccagagatggctgcagcagcatatgacgtggcagcgttacaccttcggggacgagctgcaagactcaatttccccgaattagttgagacgctgccacgtccaacgagttcgaaacccgaagatgtccaagtggcagcacaacaagcggcggtgatgttcagaatatcaccaacaatgtcacctattaacaatcatcaaggatgtgtcaatgacaataacattattaagggtagtgtggttcctgtgagagtgggactctcacccacacaaattcaggccatcaatgagtccccattggactcaccaaagatgtggatggtgcaaatggcagaggcactcaggtttggtttcgatgatcactctatgatgatgctgccttctgatgatgatgattatgctttggagttgagtggatgggaagaaatacagcatgaatctttatgggactctccagaatatatgtaattaattacgtaactattaattaataatcaatgtacccttgatttagggcattatatattacatatgattaaagaatcatgtggttttagtgagactgattcaatgaagcaaaaggattaataaattatatatttgtaaattgcgtacagtatttcatgacccatttgtttctccaattgatttgtgtatgtgtct

SEQ ID NO: 26753 - DNA, 1082 bp, Glycine max
  Clone ID: TF_GmC56_2
caaaggtgttcggatgcggaaatggggcaaatgggccgcggagattcgtgaccctttcaagggcacgcgaatctggttgggcactttcagcactgcagaagaggcttctcaagcctatgagaccagaaggcttgagtttgaggtcatggccaaggctctatctgatgagaagagcaacaatggcagcagcaacaacaatgttgttgcttctgctgaaactgaaactgtggctgcccctgaaaataacagttcaaactattatgtttcttctgctgcaggttctgtatcagactccaagtctgcttttatggatgaatcagagagtgtgttgtcacacacatcaccatcttctgtgcttgaattggatacatctgcttccaatttgattgggagtggtaaggtttcaagcaatgaaattgttgagactaaagggttggaggccgaagttgctgagactaaaagtttggcagctgaatttgccgagctggaaatccaagatttgagtatgctgaatgtaccatccccatctgctgttgctgctgctacgtctgagtatgaattggatttgttggcatttgacagtttcaaatatggatttgattatgaacatggctttgatgatgattttgctgccctggaagacattcacatttgcagttttgatgataatgagcctagcgagcttcctgattacgattttgatgactttggtgctgatgagtttgctggttggattgaagaacccctcaatataccttgcgtatagattttgcagctacataggaatgagttctatccaagagaattacaagttttgtgtcattgcttaaaaatgctctacagttttgtgagatctcaggaaaaaactagttcctgggggtgttgttttgttttaatttatttgtttctttagggagatggaagatcaatgagaggttaagagagaatgccttggttttccttgtgctattagagccgtccaagggtttttcaatttctattatcatgaaagttctgagtgtgtagaagtctatcaaacttgaattctattatctttatgaaaaattctatggtatccttgg

SEQ ID NO: 26754 - DNA, 458 bp, Glycine max
  Clone ID: TF_17963946
gcatcttgaaagcagctctatcataagctaaacctgcttcttcttcagtctcataagtcccaagccaaacccttccacctttgctctttgggacccatatctccgccgcgaactttccccacggcctccgcctcacgccccggtaatgcttccataccggatgcgtgtgaaattcacgcgcgtccacatgctgttcacttttgcatgaaaataaaccctttgagtcgtggacaccttccaagcagatttcgtggttggagacattggagatagtgttggaatcattttcatgctctagaagatagtgttgaacagattccaatggagaaagatcgcaatatattgtattattctccatgttaattagtttaatttggaatacaatagcgagggtagtgtgtttttcttttggagagtaactttgcggttgattgaatttctttttctttttctttttt

SEQ ID NO: 26755 - DNA, 1396 bp, Glycine max
  Clone ID: TF_GmC25_6
ggctcgaggttttgttaatgggctcgctatgtgttttggggaatgcgaaggtgtatgtgtttccggagctaaaacaacatgttttttgtcattctgaatatgagggaagaggacgaggaaagttttgggagaaccttaattaagggaattgagaaatttgaggcagctgttcgacaagttcagggaaacatactgagtggggaggaagcatttgtcttgtgggatacatatgggtttccattagatctcactcagcttatggctgacgaaaagggattagtttgcgatgggggccgcaaacgcagccaaaacaacaactaacgacaaagattcttccccaacacaagggaaaaccggagcaacaaaaaaagtaacacacacgcacacacgcatcatcgtataacatttgttttattttttttaaagagcgagtgttgtaacaaatggtgaagtcgaagagcgtggagaaacctgcggaggaacaacaacgaggtggtgtttcagcgtacagaggagtacggaagaggaagtgggggaagtacgtgtcggaaattaggctgcccaacagccgtcaaaggatttggttgggttcctacgacagcgccgaaaaggcggcgcgtgcattcgacgcggccatgttctgcttacgtggcagcggtgccaactttaatttcccgagcgaccggcccaacatcgctggcgggaggaacatgacgccctcgcagattcagatcgccgcggcgcgtttcgccaattcggagccccgaaaggagtgttcgggtaaacccgtggagtctttgacttcgattgaggaaacgacgtcgtttccagtaaattcggatacggatacatcttctcctctatcagtagtgacgatccaaaacgacaccgaagtagcaaccgggtcgtttccgggtatattttcgggtttcgggtcgggtaatttcgtccccgaattctccgattttccgagcttcgatgatttcggccacgatttcttcgtgcatgagcttccgggtttcgattacggagaagagaacttggatgggttgataattcaggactcgttcctgtggaatttctaagcgggtcggggttaggataattttattatatcccaaccgtgtttagaattcggatcggatccggatttgggttggtcaatttttgtgagaccatgccctctgtgttagtagttagtgatggtaatgttttttttatgtacctagtagtcaaggtttcgattttttgggatgagaatcataatttatttatttgtcatgactcatgtcattaattgtaaagttgtctgctgatagtgtaattttcttttggccattcattcaattataaaaatgataagatattttcgtctggataaaggttttaaacaacc

SEQ ID NO: 26756 - DNA, 634 bp, Glycine max
  unsure (1)..(634): unsure at all n locations
  Clone ID: TF_jC-gmXLIB3563P071cf05a2
cggctcgagcggctcgagcggctcgagcggctcgagctcgagccgaatcggctcgagcggctcgagctaacgacaaagattcttccccaacacaagggaaaaccggagcaacaaaaaaagtaacacacacgcacacacgcatcatcgtataacatttgttttattttttttaaagagcgagtgttgtaacaaatggtgaagtcgaagagcgtggagaaacctgcggaggaacaacaacgaggtggtgtttcagcgtacagaggagtacggaagaggaagtgggggaagtacgtgtcggaaattaggctgcccaacagccgtcaaaggatttggttgggttcctacgacagcgccgaaaaggcggcgcgtgcattcgacgcggccatgttctgcttacgtggcagcggtgccaactttaatttcccgagcgaccggcccaacatcgctggcgggaggaacatgacgccctcgcagattcagatcgccgcggcgcgtttcgccaattcggagccccgaaaggagtgttcgggtaaacccgtggnagtcttgacttcgattgangaaacgacgtcgtttccagtaaattcggatacggatacatcttctcctctatcagtagtgacgatccaaaacg

SEQ ID NO: 26757 - DNA, 527 bp, Glycine max
  Clone ID: TF_GmC786295_1
gcacgagggtgaagtaccgtggagtgagaaagaggccatggggtaagttcggagcagagatcagagacccaacaaaacctacgggaaggcaatggttagggacatttgacactgctgaagaagctgctagagcttatgatcgtgcagccattgctttgaggggtgctcttgcaatccttaattttcctcatgagttccattctcatctcccttttatattatcaaattcttccactaagggaaatggaagttcttttgataaggaagttattgagttagagtatttggatgacaaggtgttggaagagcttcttgagttagaagagaagagaaggagtaacgaagactaagatcactggagtactattcattgttttgagatccccggccccttttattttctctagctctccacttgtattaatatctgaacttatgatttagggttcagattgatttccaaaaatcttccccacccattgattgaattaaattgtgtatgcttcaaaaatcttacaattaatgca

SEQ ID NO: 26758 - DNA, 1151 bp, Glycine max
  Clone ID: TF_GmC700_1
cggctcaaacattaagtactgttccttaacaaaaaaaaaaaacagaatggctgagctacctagctcagaagcatcgtcatcatccgcttccagtcggaagcactcgtcttcggaggcccatttacccgccccggatcagaaaaggcccaagcaggcccgagatagcagcagcaagcaccccgtctacagaggggtccgaatgcgggcctggggaaagtgggtatccgaaatacgcgagcccagaaagaagaaccggatctggctcggaacctttgccaccgccgagatggccgcacgtgcgcacgacgtggcggcgctcgccatcaaaggcaactccgccattctcaacttcccagaactcgcggcctcccttccccgacccgactccaactcgccaagagacgttcaggccgccgccgccaaagccgccgccatggaggttaacgatgttccgacgacgccttcgtcttcgtcgtcgtcggcgtctctgtcgctatcgcaatcgtcatcttggtcttcattggcggtttcttcttcctccggcgatggcccgtcgacgccggaggagctgggggagatagtggagctgccgagtctggggacgagtttcgaaatacccgacccgagtggggagttggtgtatttggacccgtggccgtattctcaggcgtggagtcacggcatttatgatgagagtgaggggtattttattggggactctgagactgagagcatgatactttgtggcttcgagggttcattgtggcagcattaatgcttgtgctttccttttttttctttttttgtcttattgactttccaatgtgtgagagccctttcccaatttttcacttcaagggctgctaaatacattactactactactactactactactgttgtttcccccccttaggtttctcaatgtcatcctccttctccttccgcgtgttgcacaacacgacaggtatgcctgccatcctcctcaatattcaatgtcttgtttcatgtaatcaatgtaatgcaaatgatttatgctcaattcccatatacgtgtagaaatcctacgtctatcatatttattattattaactattctactttttattcactggactaaataaaactttaacttgattctctaaaaaaaa

SEQ ID NO: 26759 - DNA, 307 bp, Glycine max
  Clone ID: TF_GmC250_3
ggctcgagcataaatttccctttaagcacttatgagaaggaacttgaagagatgaagcacatgaccaggcaagaatttgtcgccaatttaagaaggaagagcagcggattttcaagaggggcatctgtgtatagaggtgtgacaagacaccatcaacatggaaggtggcaggcccgaataggaagggttgcaggaaacaagacacaccctttaggagagacccacaacatatcaatcccgcatgattatatgactatgatacaccttcagaggggtgaaaaaagaaatggaaaatataaataaatag

SEQ ID NO: 26760 - DNA, 989 bp, Glycine max
  Clone ID: TF_GmC1715_1
ccagcgtcctcccccacgcgtccgtaaaaaacagagcaactactcaattcttcactctgtttccccttaccttacacactctaacacatggattcaccttcctccttcttcaactcaccctcttccggtttctgctccgaatcttcctctccggaagccttctcgtgggaagggtacctacccttcaacgagaacgacccggaggagatgcttctatacggcatgatcgccggcgcgacaaccgaggagcactccggcgagagggcgagctcggaggagagtgctgcagcacggaaggagaagtcgtaccgcggcgtacggcggcggccgtgggggaagttcgcggcggagataagggactccacgcgccacgggatgagggtgtggctggggacattcgacagcgccgaagccgcggctctggcttacgaccaagccgcgttctccatgcgcggctcggcggcgattctcaacttccccgcggagatcgttagagagtcgcttaaagagatgaactacgctcatgatgattccaacaacgaagaagggtgctcccctgttgtcgctctcaagaggaaacactctttgagaaggaaaattaacgtcaggaagaagaagaacaacaataacaatagcaaactacaaagtagtaccgtagacaatgctgtcgtgtttgaagaccttggtcctgattacttggaacagctgttgatgtcctctgatcatcatattcccaccaccttctgattcatttattcctcaattgcaattcagatctcaaaaaccttataaatatccattgcatagtttctacctagggtttttgtgttagtagtgttaattccttcttcttctttgttcttttgtttttgtaaggctaaaatgcttaggtcatgtttggatgacagatttgaacttcttttcagttcttatctttttttctttgtttttgtttttgttttcctactctgggagaattttcttcttta

SEQ ID NO: 26761 - DNA, 1913 bp, Glycine max
  Clone ID: TF_GmC158_1
cgacccacgcgtccgtacggctgcgagaagacgacagaagggaaacggacctcggccgtgaacaagagggctttaagagaagacggcggcggtggtggcggcggcggagcgatgaggtaccgcggcgtgaggcgcaggccgtgggggcgttacgcggcggagataagggaccctcaatcgaaggagcggcgatggctgggaaccttcgacacggcggaggaagccgcttgcgcctacgactgcgctgctagagccatgaggggtctcaaagctcgcaccaacttcgtttacccaacttctccgcaaccttcttccgccaccaccgaacacttgttccctaacttcaacaacaacaacaactttcacaaacactcactcttcaatcaccaccgtaaccgccacataaccggttccaacacttgttttgaccaccctcactccgttgacttttcagcccctcgaaacccttcttctctcaacatgcttctctttcgtgaccttattcactctaacccttctttgctttcttcttcttccactcagaacttccacgaccagttttacaacaagagtacttctactttttcatcgttacctgtttctccttctcttgctccccctagttattcgatgaataattcttgtggaggctctttgtctgttaagatgaacacgtttcccacttgtggaactaattttgctgaaaaaggtgatgatggtgatggttttttctctcgtgagtcttcggattcggggttgttggaggagatagttaacaagttcttgcctagaacgaagcctagtaaatgcgagactacttttgcaaatcctcaggaggagtcgcttcttctccctccgcttgtttctgaatcaacgcttgtttccaccgggcaacaatactatgatgatgacatgaaaaaagggtttccaaagaacgagggtctaggtgttttttattctgatcaaggttttcccatgcagcaattcgacacctctaatgggtttaatagcatggctatggagaatgatcaaaacattattaataatgcagagaactgtgtcgttgaagatgtttttcagtaccaagagcttcttaatgctttcgcaatcagaatgcaaaatgcttaattagttaacatttccagtgtctgcatctcaatgctagttgtgtatgtagtcatgttgaatctgtcacttctcaatgttggtctggcctttcaattagaaacttattaatcattagggcctttgttcctaggtttaattaaccaggttattttgttcgtgcttactatgtagtattatgcccctctggcttccttccagtagtattatgtatggaactatggataatttgaaagcaatatatttttagtattggtattttgggtaacctttgaaattgtcatgtttataattgtttttggttaagcacgcctttgcccttttcactatatgttttctttatgatatatggacattcattttttaaacacctaataactattttttattttttatacgtgaaatcatattatctataacatttatgttttttttttatttctgagtgttaggtattcattaacatattgggtatttatcgataatttttgttttgtttttctactctgaaaaagggattaatgagaaccacgcactcagagtgaatttgtttttgctagatgacgatagcttttgcgttgactttggaaatagaaaattagtcttgcgttgcacaataccttttttctgctttgtatggatctatatattcttccttctgtttggagaacgtattggtctggtttcaatagtgcctggttggtgttgtccttttcttcttagtattttgttgtggtattgtgaaaaaaaaaaaaaaaaaaaaaaaaaaaagcggccgctctagagga

SEQ ID NO: 26762 - DNA, 1812 bp, Glycine max
  Clone ID: TF_GmC189492_1
cccacgcgtccgctctacctcccactctcacaatccctctctctctttctatcttcactccggctattacttattagcataactctcttttgctctgccttcccgccaaaacccttctctgtgatcaccaaggattcaaggttgagcgttgaattcttgaaccttgttgttgttgttgttgttgatgtgagtggagtgagatttcacttgaagcgcatccaaagttggccatattctcttctctctttctctctctctcttggaatatatctctagagacgaaaagcaaaagttgttacccataaaacatcttggtttttctttctgcttcaccaccaccaaaagtgtttccaaacgtctcaattccccccagcatatacatctacttgtccacttttcccccataccctctaaattcttctcttactctttaaaccccacccttcatgcactccagccaacaccatcacacaacaaccttccctcttccctctctcactcaaacaaaaacatccttaaccactccaaaaacactcttttaggcatgtccgtacacgcaaaactgaagcaccaccccatgaacctagcatccccaagttcccattttgaggacgacccaccatgcaaaaccaagaccaaaacccaaaggaggctccttcggatcataatcaccgaccatgacgccaccgattctgactcctccgacgaagaacaacagcagcagcaacaaaaaacaagaagagtgaacagagaaatcacccaaatcaacatgcaacttcctctatcacataatagttccttttccccttcatcttcttattactcttcagcttccacctcatcggaacaaaacctaaagtgcaagagacccaacaaaaagccgccaccttcctccgccgaggcccgccgccgcaacaagttccgcggcgtccggcagcggccgtgggggcggtgggcggccgagatccgcgaccccacccgccggaaacgcctctggctcggaaccttcgacacggcggaggaagccgccacggagtacgacagagccgccgtcaaactcaagggccccaacgccgtcaccaacttccccctcgcgccggaggctacggcgcagtctccaccgctcgccgcggacaacctcagctccgacggcggcgcgtcgtactcggacctagtggcctcgccgacgtccgtcttggcctacgagtgcgactcgacgccgttcgacggtttccgttatctcgacgttgacgcgttcgggttccacatcgacgcgccgttaagtttgccggaagttaacgttaacgttgcgctgacgtgtcatcacgggaagaagcaggaggaggcgtttgatgaattcgatctggacgagttcatgacgtggccttactagtgataaaaatctcagggacagtttggtaaattacaccctgtttgcattgcggaagtgtgagttggaaatcccgaaattgcccccctccccctctcgttgtccaagtttgaaattttgtcgtactcgttggagctttggaagagtgtagagttgttggtacaaaattttatgtagtcgcattttactaccacctgaaacggcgattctttgtgtcgtatttggtagagtttaatttgtagttattatcatgaaaagaagaaaaaaaaaatgaagtgtcaaaactagtgagtgagaaaaggagaaaaggaaagatggtgttatttgagaaggaaggactatattgtaatttcggtatataaattttgataattatttaaagaaactttggtattgtctatatatagatcatgggttaactt

SEQ ID NO: 26763 - DNA, 527 bp, Glycine max
  Clone ID: TF_17153962
caacttcctcggtgtctcatggttcaggtagtgttgtggaagcagaggtttcggtttcgtacagaggggttcgaaggaggccctgggggaagtttgcggcggagataagggactctacgaggaacggagtgagggtttggttgggaaccttcgacactgccgaggctgctgcgttggcttacgaccaggccgcgctggtcatgagagggtccatggcagtgttgaacttcccagctgagattgttcgccaatcgcttcggaacatggagcagtacggtagtttccaagaaggctcttctccagttctggagttgaagaagaggcactccatgaagagaaaatcagagaccaagaagcaccaactccacgatgtgatggtgttggaggacttaggggcagagtatttggaacaccttcttactctctcccaggatatggatatggatgcttgttagttaagttacatttacctccttcgtcaaaccttgcctttcccatccccaccactttcttttctctctctatca

SEQ ID NO: 26764 - DNA, 1904 bp, Glycine max
  Clone ID: TF_GmC6617_1
ctgaactcttgttcttctttaccgattcaacaacagctcagcagtggtagtacccatgagcctgcagaatctgcactttttttgccttggcttctattctctcctcactttgaatcggaagatatcctttccattcaaggcagcaagcagaagtttcaacgaaagtctcctctcccacacagctactatcttctcaacactattggaatcaccatcatctgaataattcccttttttctttctctttctctcacacacccccatgatgtcaaaagttgttattttctctttattcctatcatcagtcccgaccatgtcttaacagctctttttcttctttaccgattcaacaacagctcaggattctctctccctctcaccctcttatttccaaaccattcccctatttgggttcattttgtcttacatttgaataagaaacgcaatttggaagacagtatcctatgcaaacacacagtgcatagcaccgtcaccaagaaactcatctcccccaaaaaatcatcccaaaccaattcatcgacagagcgcacaatagtgcggatttcatacactgatccagacgcaaccgactcctccagcgacgaggaaggtttccccttggttcgccaaagaatgaagcgctatgttaaccagattgaaatagaaaccgctttcgccgaaaaagttgttcggaaaaggcccgccggtgagccttgccgccgaccggcgaagcttcactccgggaagaagttccgcggcgtccggcagcgaccgtgggggaaatgggcggcggagattcgagatccggcgagaagagtgcgtctctggttgggaacctacgacaccgccgaagaagctgccatggtctacgacaatgccgctattcgtcttcgtggccctgacgcgttaacaaacttcgtaacgccacctcaaagagattctccgtctccgtctccaccgccggcggcggcggagactccggcggaggtttgcgacatgaaggttgtggtcaccgaagaagcctccggctccggctacgactccagcgaggatcattgccaccacaacctctcctctccgacttcggttctccagttccgaagcaactcgagcgaagaaaattccgagtctcagcagaaagcagaacaagtgttgagagaatgcgagggtgagacagaaacgagtttgttcgaggaaacgggtgagtttttggcgctggataacatgcctttgcctgcctgggatgacgtgttcaatttcgaaacgccagagtaccctcctcttctgtttcaagaggaggagaatctgaatctacttcatcagtcccagatgttgggcgaaacggtgcagttttcctcggaggaagggttcagtgatgaaagcagtatcatgctggccgactcgctcatagatttcgacagagcctgcccttcaccatcctccttgtgccaagtggacgatttcttccaagacattttgtttgcttctgatcctctcgttctgctctgaacactcttaaaacttactaaactgtcattcgttaatcgtcaatcgtccacttcacggcttgcccaatattcatggcagatttttgcttccggtggtaaaaaaaaaatgcctagtttctatttaattaaaatactatatatatatatatatatatatatatatatatatatatatatatatagttttatttgcgtatttatttagatgttttagatgctccgttacaaatagctaacggggggatgagttgagaacttgtgagcgaagttttgtttaaattttagttatatttgtaatctttttgcttaataagtaggatcgtacgttgagacttgagaatgtaatgtatatttgtccagatgttaatctaagtgtaatggcgttcttttctttac

SEQ ID NO: 26765 - DNA, 547 bp, Glycine max
  unsure (1)..(547): unsure at all n locations
  Clone ID: TF_jC-gmro02910014e07a1
ggctcgagccaaaactaaaactaaaggagttagaaacatcaagagagtcactgacaaccaacctggcatgccaagtcctaacttcattctttgttaatttctttcccttccatccactcctctctatcttcttactatctcaccttaccaaaacaaattgtttactttcattcacgtccaaaacttgaacatgaaaccctacacgtcatcaccatcatcctccaagtccaaaaagaagccaacaacaacacaacaagatcatgaaacagcatggggaggaaggtaccttggagtgaggaggaggccatggggaaggtatgcggccgaaattcgcgacccttccactaaggaaagacattggttgggcacgtttgataccgcagaagaggccgccctagcatatgataaggcggcccgctccatgcggngctcacgtgctcgaaccaacttcatctatccggatactcctccgggttcttctgtcacctccatcctctctccagacgagcaaacccaaacccaaatccaccaggcccaagaagagctc

SEQ ID NO: 26766 - DNA, 1188 bp, Glycine max
  Clone ID: TF_GmC250_1
gccattggattttcaagaggggcatctgtgtatagaggtgtgacaagacaccatcaacatggaaggtggcaggcccgaataggaagggttgcaggaaacaaggacttgtatcttggtacatttagcacacaagaagaagctgctgaagcatatgatatagcagcaatcaagttcagaggaacaagtgctgtgaccaactttgacataagtaggtatgatgtgaagagaatctgctcaagctccactcttattgcaggagatcttgcaaaacggtctcctaaagaatcaccagctccggttcctgcctctgacttcaattcgtgcggttcatcgccgatgccgctggtgtctcagccacctcctttggctataactgatggtgaacattctgatgagttgtccaacatgatgtggaatgccaacaacagtgatgagcaagcacagaatgagagtggtggtgctgaattcaacaacaatgtaactgaatcatcatcatcacaacaggtttcaccaagcagcaacaaggatgctttgaaccctcaaagccccaatgagtttggagtcagtggagcagattatggacatggctacttcacccttgatggaccaaaatatgatgatgggaacaatgaaaatgaccacatgagcaccaacaggcttggaaatttgggattggttaatcaagttcccatgtttgctttgtggaatgaatgaagggaatgttatgttgatgagttgagattacaaaaaacattagcttaggaaaaaaaactaagatcagatggcagaattattgaatgattattatattgtagcttggtatggtaactttttattttatgttgaaagaaaggggatatgtcagtagtgctgattcctgaagtaaaaagagcagataatgaaaataggtacttcacccttgaagaaaaaaaaaaggatgatgggaacaatgaaaacgaccacatgagcaccaacaggcttggaaatttgggattggttaatcaagttcccatgtttgctttgtggaacgaatgaagggaatgttatgttgagttgagattacaaaaaacattagcttagttagggaaaaaaaaaactaagatcagatggcagaattattgaatgattattattgtagcttggcatggtaacttttattgtatgttgaaagaaaggggatatgtcagt

SEQ ID NO: 26767 - DNA, 652 bp, Glycine max
  Clone ID: TF_GmC152_5
cccaagcctacgacgacgccgccatacgcatccgcggcgacaaggccaagctcaacttcccggccaccaccatttccgccgccgccgccgttccgccaccctccaaaaagcaacgctgcctcagccctgacatcatcactgaagaaagcagcagcagctcacattccaccactggatccaccggcgaaagcggcggaggaaacgacgaactcgacctgaaacaaattgaatggtttctaggtttggagaatgagctgcctgttagcaacaacattggtgctgagtgggacaacatggatgacctgtggatgctggacgacgtcgttgtgcccaaccgtcacttaatttactagaaggctaataattaataaatggcgttttcttaagttttagttttattttataaattgtagtataaaactatgttggtatttgtgttcttagttttcttctgctgttttgtctcttctctggctttggtaatttctgttttggacggttgaatgatttcaaaattaggtacttaattacaccctatcatgattgggatgatgattatatattatgattatgatgattatatataaataaagggtgattaagttagggcgcgtgagtgtttgcgactttgcgccgtgcatgtttttataaa

SEQ ID NO: 26768 - DNA, 1337 bp, Glycine max
  Clone ID: TF_GmC1286_1
gatgaaacaagctgcagcacttggaggagtgcaaagagccaggaagaggtttgttggtgtaaggcaaaggccatcaggtagatgggtggctgagatcaaagacaccattcagaagataagagtgtggctgggaacttttgacactgctgaggaagctgcaagagcctatgatgaggctgcttgcttgcttcgtggcaccaacacaaggactaacttctggccttgttctcaatcctccacaagtccagctctttcctcaaagatcaccaatctcctccttcaaaggcttaaagaaaggaacaacaacaacacttgttcctcgtcctcgtcctcctccacttcacttctcatcaaccaccaacaaatgcatcagcaagttggtgcatatggagaaggttcaacacaattctcaattgaccaattcactgatttcctcaatgaccctgaagattatagcacaagcaacaatgacttcatcaacaacagtgcacaaattgactacattactagtagctttgaatcatgcttaactgaaaaagatggtgggactaaaattgatatgcaatacaaatccaggaatgtgacaccacagacttcaagcaatgacagcaattcaggagtggaggatagtgaagaagaaggctctgatttgggtgtgcaaagcacaaatttggatgtccatgattttaagtttttggacaacattgctccacctagttactactctccctttgagatggctgaagagatggaggaggagcctgtggagcctgagaatgagaactatggcgatgagccttcaatgcttagagctgtgatgaagagaatgacttatgagaggaagttctcagcttctctctatgccttcaatggaatacctgaatgcttgaagttgaaacttgaatcagggaacatgaagggaagaggactagctgatcaattaacaagccttcaaatggcttgtagcaaaaacatactcgagaagaacaaggaggagaaagaatacattggaacaatggataggagacaggaagaagaacaccaacaaacatcacctgacatggattcttcaagtgttgatggggaactgttgctttggaattcacttgatcttcctcctatttgctttgttaacttgctagaaaacggttcattcaattagcaatatccattcattttctgtaacattatttatgctgagcacaactatattgtaacattagactttgtagtaagcatgaagtaatatcttctgctaattgaaattatttaaattcttatttcattcataattcctagtatcaatgagtaacattgaatttaaagtttttcttaaa

SEQ ID NO: 26769 - DNA, 432 bp, Glycine max
  Clone ID: TF_jC-gmXLIB3563P052af02a3
gccatctgtactcagaacacatagacccaccgacacaacagaccttcttgcactcctgcacatatcggcgcccaatggaccctatgccccctaaacaggagcaaggagtgccaggggactgcaaaaaagcacccggtgtaccacggtgttcggaaaaaaaactggggccaagggggtccgaaatccgggagccacactaagaaggcccgaatctggctcggaacattatcaactcccaaaatggcggtgcgagcccacgacgaggcggccctcaccataaagggccagacaacaatactcaacttccccaaaactgcacaccagatccctaggcccgtcacgtgctccccacgtgacatccaaaccgcgcacacggccgtggcctccatggttaagatcgacactgtaacacaatactcagactcagaaact

SEQ ID NO: 26770 - DNA, 953 bp, Glycine max
  unsure (1)..(953): unsure at all n locations
  Clone ID: TF_GmC104_2
cgctgganncggcttgagctttaacgcgccaaattacaatcaccatgtcctcttcctcttcctccttcttccccgcccatatcaccaccgaccaagaattctccctcatcgttgccgccctcaccaacgtcgtctccggctctacctccagctcctccgtccctgaattccgcttcccgcactcctccccgcctctttcttccgccagccttatgccgccacccccgcctagcatccacacgtgtcgcgagtgcaacatcgcaggatgcctgggatgcaactttttccccgaggaacaaaggaagaaatacagaggagttaggcagaggccttcgggaaagtgggccgccgagattcgcgatcgtcatcgttcggcccgggtctggctcggtacattcgaaaccgccgaggacgccgcccgggcctatgacaaggcctcgttcgagttacgcggcccacgggccaagctcaatttccccttggtcgacgagtcgctcactctccagccggagatggctgcaacagaagagcagattaacaacgaggataatctcaatcaaggcatgggaatggactcgcacgaattctgggacaggatcaacgaagctgattttcatccgttcatgatgatgatggattttactggagattcttcagactctgctgccactgggtacactctcagttcctgaaattgatattcaattaaaccaaataattagttttgttaatgtgcgtttaacaattgtacaactcggctaagcgtatttgttaaattagcatttgctagctccactgcaatacattacactacatgtatttctgtaatatctttcttccgctaggtttttttcgtgaggaagttgctgcatagtacaaatcaagagttttaatgtttcatttcaccaccccaagagtatgctatgtataaagattagagtattattactgtt

SEQ ID NO: 26771 - DNA, 954 bp, Glycine max
  Clone ID: TF_GmC5319_1
tatttaaaaaagcaaagataacgtcatatcaactaaccacacgtggggaagaatcttccacttcaacattcaatgctattttcaaatactcttgtagcttcaaagaaacatcacacaaacgaaaacaatattaaagaaataattagcatcacgttgttcaaactatgtttctatagttacaacgaatacataaaaaaatatacaactccagaacccagtggtataaatacacaacgcattattcttcatagtgcttcaagaataaaaaaagataaccccaaaatcagaaaaaaccatcgtcttcatcaccattcaaaacatggccaccacaatatcttgtgatttctcttcaatggaatctattcaacactatcttcttgagcctgaacacgattccaacgctctcatgaacatttccaaccacgaagtttgctattctgcaacgtacaatgcattcccaagccctacgttcagcttggagggtgtcgtccatgatgcaaacgattccttagcatgcaaaagagaacaccctagggaggagcgtgaagttcacgcgccaccggtatggaagcattaccggggtgtgaggcgtaggacttggggcaagttcgcggcagagataagggatccaaagaagaatggtgcaaggatttggctaggcacttatgaaactgaagaagcagcgggtttagcttatgatagagctgctttcaaaatgcgtggcagcaaagctaagttaaattttcctcatctcattggctctcacgcgcctccgcagccagtgagagtgacaaaggctttgaagcgaaactcgccagagaagaggaaaaatttggctgacttgttaaacaggttggccaagaatagaagccaaatacttatacaggtgcttgaaatgggtttacatgcaaattatgtcaatgttgaacaatggtagagtaagttgaatgtgtt

SEQ ID NO: 26772 - DNA, 1221 bp, Glycine max
  Clone ID: TF_GmC15_1
gtacgcgtcggacgcgtgggcggacgcgtgggcggccgctcgagctcatctgtatgcctatgcttgtttatcattttcttactttcctctcacgctctgccacaaaactccgtctccgcaataacggaataaaaaaacaagtttaattactattatggcgccgagggatcataagacaagcaacgctaaggctaacggtaacggtaacagcggggtgaaggaggtgcattttcgtggagtgagaaagaggccgtgggggagatacgccgcggagatcagagatcccggcaagaagagccgcgtctggctcggaaccttcgacacggcggaggaggcagcgcgtgcctacgacgccgcagcacgagagtttcgcggccctaaggccaagacaaacttccctctccctttggaaaatgttaagaactcgagccccagccagagcagcaccgtcgagtcctccagccgcgaccgcgacgtcgccgccgattcctcgcctctagacctcaacctcgcccccgccgccgtcgcatccgctcgattccccttccagcaccagttcccggtttttaccggcgcggtgcctgcggcaaatcaggttttgtacttcgacgctgtcctacgcgccggcatggccggtccacgtggctttgcgtttggctacaatcatcatcccgttgcggcgagtgagttccacgcgacgacgagcgactcggactcttcctctgttatcgatctgaaccataatgaaggcgaggttaaggggaacggttctagaatcttcgatctggaccttaaccatcctcctccgcatgagatcgcttgatccaaagtctgactcacccctttagttttttttttttttttgtgtttcggattatgaatttctcgttagtttttttttttatataagtagagaaagtagcagcctccgataagggaaaataacgagggaagggaagggaaagaaaagaaagtatgtgaatacgtaggcggtatgattgtctcaattttttgcgacatagaggaaccaccaccggtttcatcctgttgtttcttaaatcacgaaatggttatcgggtttttctttcgttttaattgattatgtactgcggtgtaatgtttttggtttgcagccataatttggttcaatgaaattaacacggaaagtttgcataaaaaaaaaaaaaaaaaaaaaaaaaaaaaaaaaaaaaaaaaagggaa

SEQ ID NO: 26773 - DNA, 1610 bp, Glycine max
  Clone ID: TF_GmC1684_1
tacggctgcgagaagacgacagaagggtacggctgcgagaagacgacagaagggtacggctgcgagaagacgacagaagggtacggctgcgagaagacgacagaagggagaacaagaggaacagagaatgtaaagaaggaggagggaaggagaaaatatagaggggtgaggcagaggccgtggggaaaatgggcagcggagataagagacccattcaaagcagcaagagtatgctagggagattgaaggggtattattttttcatgcagaaacgagggatcatctaattaaaccagctttcatcagggtgtgggtgatttattgtaagctttttcttattatcttcgattgtgtttacacgtgtgtgttaaaggtggcgaatcctaaagagaagggaaatgaggttgatgacaataaggaattgatattattccatgaagggataatgaacaaccctacattgtcaaggctatttccgggtttgaatagggagagggagatgtctgctatggtctcagctttgacccacgtggtctccggagaggtgccaataaccggtgattcttcttcttcttcttctttggttcttcatcatcaacctcatgatgatactgttattgttacaccaaccatgccttcttcttcttcttcatctacttatgttgttggcacctcttctctcaagagaagtagggaaaatgatacatatacatcatgcttattctcacatacaccttcatcatcccctgctatgccaaaaagggcagaatatgcaacaagggaaatgggaaactgtggggataagtgaccaattcaaaccaggaagagtatggttaggaacatttgagacggcagaagcagcagcaggcagaggccgtgggggaaatgggcagcagagataagggacccattcaaagcggcaagagtatggttaggaacatttgacacagcagaggcagcagctagagcatacgatgaagctgctcttcgtttcagaggcaacaaagccaaactcaattttcctgagaatgtcactctccgacaacctcaattcactgtttccaatcctccatcttctcttgtatctattacaacatcaatagacccagttgttcacagtactcgacctctccttcttccttctcaggcttcaactgcgaccaatgtttacgagtattttcaactctcgggcttccccaccaacaccaacctttatgatggtaataggatgtttgtgacgtctaatgccatggcttctcatcatcttcaatcttcgtcttcgttgttgtcgtcttcttcttctgcgtttgtttcttctgtaacttctcaggacacttcactttcttcgttgtattctggccagttgccaccatggtcaaaggtttctggtcacagctcgtcttcctccggatgatcctttttgtttaatgtttatggaatctgtatttttcttctttcattatcataatctcttcatttttttttaaaaaaaacattatacttctattatctgtaattgcaagactagcttgccaatacgtacattcatgattcatgactttagatgattaagatgtttatggaggaaattatggtattaaaaccttcac

SEQ ID NO: 26774 - DNA, 548 bp, Glycine max
  Clone ID: TF_GmC392056_1
agctcaaaatttattaagttgtttcacagccagcaagcaaacttcagctcaacaccctcgttccctttcggctccaaaacatgtcatccacaaccacggattcagattgttcatatttggaacaaattcaacaatatctccttcacaatgattcaacaattctaacaccacctcaagcttttccaagccctagccatgatagtagttcggatgcaagtgtccactttgagcacccttcggaagcgcatgacgtgaacgcgccacccaaatggaggcgctaccggggtgtgaggcgtaggccatgggggaagttcgcagcagagataagagatccaaagaaaaatggttctagggtttggctcggaacttatgttaacgaggaggaagcagctttggcttacgacaaagctgctttcaacatgcgtggccaaaaggctaagctgaattttcctcacctcattggctctggtgtgcagccggaaccaccgtgtctggcggtttctagaggagcttaccagagtcttctccccaacacaccatatgatagt

SEQ ID NO: 26775 - DNA, 1442 bp, Glycine max
  Clone ID: TF_GmC326_6
ctcaggttcctcctatatatatatatatatacatacataatatccttctccctcaaaccaaaccatacctattctcaagtttctctctgtttcttcctacttcatgctatagcacttacaatactcaacaataacctaaccaaaccaaaccaaaccaaaacccttatctgcactcacttcacacaaaccaaagttaattaattaccaacacaaaatggatggaggctgtgtcacagacgaaaccaccacatccagcgactctctttccgttccgccgcccagccgcgtcggcagcgttgcaagcgccgtcgtcgaccccgacggttgttgcgtttccggcgaggccgaatcccggaaactcccttcgtcgaaatacaaaggcgtggtgccgcaaccgaacggtcgctggggagctcagatttacgagaagcaccagcgcgtgtggctcggcactttcaacgaggaagacgaagccgccagagcctacgacatcgccgcgctgcgcttccgcggccccgacgccgtcaccaacttcaagcctcccgccgcctccgacgacgccgagtccgagttcctcaactcgcattccaagttcgagatcgtcgacatgctccgcaagcacacctacgacgacgagctccagcagagcacgcgcggtggtaggcgccgcctcgacgctgacaccgcgtcgagcggtgtgttcgacgcgaaagcgcgtgagcagctgttcgagaaaacggttacgccgagcgacgtcgggaagctgaatcgattagtgataccgaagcagcacgcggagaagcactttccgttaagcggatccggcgacgaaagctcgccgtgcgtggcgggggcttcggcggcgaagggaatgttgttgaactttgaggacgttggagggaaagtgtggcggtttcgttactcttattggaacagtagccagagctacgtgcttaccaaaggatggagccggttcgttaaggagaagaatcttcgagccggtgacgcggttcagttcttcaagtcgaccggaccggaccggcagctatatatagactgcaaggcgaggagtggtgaggttaacaataatgctggcggtttgtttgttccgattggaccggtcgttgagccggttcagatggttcggcttttcggggtcaaccttttgaaactacccgtacccggttcggatggtgtagggaagagaaaagagatggaactgtttgcatttgaatgttgcaagaagttaaaagtaattggagctttgtaacattacatagtttttgagtttcttttgtgaattttgtaactgttgaattcatgaggtagagatggtgatggtgttgttgcaagttgccactcacaaaaggtgtatagtctcagacaaaaagaaaaaggaaaaattagggcaagaaaaattgttgaacagaaattttcttaac

SEQ ID NO: 26776 - DNA, 529 bp, Glycine max
  Clone ID: TF_10710623
actcaacaaaaagagctagagagaagataccccttaaatcctaatttctacctcaaagaaagtactcttcaaacattttgtattcactgaagaaggatctttgcacttgcacctgcagccatctaccatggttaagtcagaacacaagatcaaaaccgaaccatcatcaaaggcaatgcggttatcttcaccctcatcatcaacatcagattgcaagaagaagaagtacaagggagtgagaatgaggagctggggatcatgggtttctgagattagagcaccaaatcagaaaacaagaatatggttaggctcttattcaaccccagaagctgcagctagagcctatgatgctgcacttctatgccttaaaggctcctcagcaaatctcaatttccctttaagctcttcacaacaatacattcctggagatgctgtcatgtcccccaaatcaatccaaagagttgctgcggccgccgcatatagtttcatcgacaatgccaccactcccccttccccaccttcggcttcg

SEQ ID NO: 26777 - DNA, 1641 bp, Glycine max
  Clone ID: TF_GmC1505_1
aaatcagctcacaaagtggaggcctctcaaaaaacaaacaaaagtgacatcaaaatccccttctccttcctcttattctcttataccccacccccacttcttagcttcatccctctctctctctctccttctcaacaattacttgcaagtcttgagttttctcctccctgttctctggttttggaattgagacaggctttatttataattttaaaaacttgtttccctccctcccttatttttgggttttctcaacttgttcttgtcatcttgtaaaacatgggaactgctatagacatgtacaacagcagcaacatcgtagcggatttcctagatccgtatagtgaagagctgatgaaagcacttaagccttttatgaaaagtgattatttctctgcctcttcttcttcttcactcgaatcacagccttgttctttttcatctaattctctccccacttcgtatccctcttccaaccaaatcaagctcaaccaactcaccccagaccaaattgttcagattcaggcccaaatccacattcagcagcagcagcagcacgtggcccaaacccaaacccacctgggcccaaaacgcgtccccatgaagcacgctggcacggccgcgaaacccacgaagctctaccgcggggtgcggcaacggcattggggcaagtgggtcgctgaaatcagactcccaaagaaccgcacgcgcctctggctaggaacattcgacaccgcagaggaagcagcattagcgtacgacaacgcagcgtttaagctcagaggcgagttcgcgcgtctcaattttcctcatctaagacaccacggagccttcgttttcggcgagttcggagattacaagcctctaccttcttccgtggattccaaactgcaagctatttgcgaaagcttagcgaaacaagaggaaaagccgtgttgctccgtcgaagacgtgaagcccgtgatacacgctgctgagctggcagaggtcgagtctgacgtggcaaaatcgaacgctgaatatgtttatcccgagttcgaggattttaaggtcgagcacgagaacccaatgttttctggtgaatcttcttcgcctgaatccagtgttactttcttggatttctcggacttctcggattctaataatcagtgggatgaaatggagaattttgggttggagaagttcccttctgtggagattgattgggaagctatatgatgactcggtgaattttcgttatgtcaaatggttggtttggttttgctctgcttttgggttttagtatgtacttattatgttttgtaattttttaggtttatgtttcggtagtgtctttggctgcttctgcaatggattttttgacatttgcggatgttttgctgagacacgagggttgcaaattttaggcagtgaaatcagagggtcgtagtgatctttttgtggtctgctcgtgttttttgttacttgcatgaccttgggggcttctacttgtgtcttggctagctacttcttgttcaactgtaattaaagtgcccttccaatatatgaaaaatttacatgttcttgtaaaaaatggactatggagaagaaaaaaaaaaaaaaaaaaaaaaaaaaaaaaaaaaaaaagggcggccgccgact

SEQ ID NO: 26778 - DNA, 360 bp, Glycine max
  Clone ID: TF_LIB3242-559-P1-J1-G12
ggctcgagggcgtttaccacacatatttctttgtcatttccaaaccacacttgcttactagcggggggagcttattggtgagtgcgaaaaaactaacagctgaacattacatgcattatcattagaggagaatcagcataactaaatgttgggataaatcgcacagcaaaaaatttaaacaatatatcaaaatcttaatatattatatcgtgtcataacatacaacttggaatactcactaatgcttccaatgctgttggcaacagaaccatttttgttgcctatcaccacccgtgaacaaattcatttgaatttattgatccatatccaaacctatgtgaagtcaactttacacgacta

SEQ ID NO: 26779 - DNA, 354 bp, Glycine max
  Clone ID: TF_LIB3242-501-P1-J1-E8
ctgagactgacaaaaagttcagtgtcggcatgaggtttaagatgagattttatgacgatgattctgctgagactggcaaaagatcttagggtaccggggttggagagcaagatatttatatctcattggtgtaaattcaaaatgtgcgatcactacaatgttcaatagggatgaacgctgcattctgttccccagacctgataggtgtttcaccatgggagatacgaaccctatgttgcttgtgattttacacacctaatttcaacctactatgctaacgactaaaaggccccggacacccatcgaaacttcagatgttgacacaacatctgatgcttatgttttttgggatgc

SEQ ID NO: 26780 - DNA, 1780 bp, Glycine max
  Clone ID: TF_GmC340_2
cccacgcgttcgcagaattagaattagaaagagaaagagaaagagggggggtcgtgtcggcttgaaaccaaacacgaccttatcggcgatccaatttcgatctgtgcaaatcgtaaaccctacctacttgcttctgcaattctggtggactggatccattttcatctcaattctcagtaagttggggcacatcacacaataactttgacatggcttccgctgcgccaggtgcaaccaatgatgctttatacaaggaattgtggcatgcctgtgctggaccccttgtcactcttccgcgtgaaggggagagagtttattacttccctcaaggtcatatggaacagcttgaggcatccatgaatcagggattggagcagcaaatgccttcctttaatctgccttctaaaatttcatcaggaaataaataaccatttccaagatgcgtgattaaacggctgagattgtgtacagttatccagaaacagaaaccgtagacaacccgaatcccttattaagcaggggtttcgcggcgcgagacggtgacactggcagagtggaatttccgccgccattcgaagctacagcgatggccataaccgccaccatttccgttcccttcacatcccccagtcgccgcactctcgcctccgtcaatagcctctctccgcgttctacccgatccactttgcccacaccgcaacgcactttcaaataccctaattcgcgcctcgtcgtgtcttccatgagcaccgaaacagccgtcaaaacttcatccgcctccttcctcaaccgcaaggagtccggcttcctccatttcgccaagtaccacggcctcggaaacgacttcgttttgattgacaacagagactcctccgagcccaagatcagtgctgagaaagcggtgcaactgtgtgatcggaacttcggcgttggagctgacggagttatctttgtcttgcctggcatcagtggcaccgattataccatgaggatttttaactctgatggtagtgagcctgagatgtgtggcaatggagtgcgatgctttgccaaatttgtttctcagcttgagaatttacatgggaggcatagttttaccattcatactggtgctggtctgattattcctgaagtcttggaggatggaaatgtcagagttgatatgggggaaccaattcttaaagcctcagatgtgcctactaaattacatgcaaataaggataatgctgttgttaaatcagaactagttgtagatggagttatctggcatgtgacctgtgtcagcatgggaaatccacactgtgtaactttcagtagagaaggaagccagaatttgcttgttgatgaattgaagctagcagaaattggcccaaaatttgaacatcatgaggtgttccctgcacgaactaacacagagtttgtacaagtgttgtctaattctcacttgaaaatgtgtgtctgggagcggggagcaggagcaaccctagcctgtggaactggagcttgtgctactgttgttgcagcagttcttgagggtcgtgctgggaggaattgcacggttgatctacctggaggacctcttcagattgaatggagggaggaagataatcatgtttatatgacaggctcagccgatgtagtttattacggatctttgcccctttaatatgttgcccccattgttaaacccaatatggaattaggaattgctgaataatatttgtatgagaggtggactttctgcttgttcttactattttgccacatatttatatcttcc

SEQ ID NO: 26781 - DNA, 502 bp, Glycine max
  unsure (1)..(502): unsure at all n locations
  Clone ID: TF_11413657
gctacattctaaggtttactagttccttagggtcacatggagcatgcctttccctcgcattacctcagccctctcatccgctctctccccttcgtcccctgccatgttcctcctcactctcctctcacaatcacaacaacaacctttccaaaatgacaccaaggaggtttgaaatgacgatgacgataaggaccgcgagaacaacaacgtcatttcattcgcgaagatcctcactccctccgacgccaacaatggcgacgacttctctgtgccacgcttctgcgccgactcgtgcttccctccactcgactttcgcaccgatctgcctgtctagctcctctctgtcgctgacatccacggcgtcgagtggcgcttccgccacatctaccatggcacgccacgccaccacttcttcaccatcggctggagcaagtttgtcaatcataagaagctcgtcgacggcgacactgtcattntcgtcaaggactcccacgatggaatg

SEQ ID NO: 26782 - DNA, 2026 bp, Glycine max
  unsure (1)..(2026): unsure at all n locations
  Clone ID: TF_GmC630_7
nngatgggatgaaacatcaaacataccacgtcctgagagagtttcacaatggaagatagagcctgctcttgctcctcttgctctgaatcctctaccaatgcccaggcctaaaaggcctcgatctaatgtggttccatcatccccagattcctcggttcttactcgtgaaggtatggataggttgcttttaaatatttgatatttatttgagtttcatctttgcttaacatatgtaattatgtgaagcctgatctgttatcggtgattaacagcttctaaagtaagcgtagatcctttgccaacaagtgggtttcaaagggtcttgcaaggtcaagaactttcgaccttgagaggtaattttgctgaaagcaacgaatctgatacggcagagaagtctggtgtgtggccacctgccacggatgatgaaaagattgatgtttctacctcaagaaggtatgggtcagacagctggatgtcaatgggaaggcatgaaccaacatatccagatctactttcaggctttggggcccacggagatcattcatcccatccatcatttgttgatcaaaatggtcctgtagctaaccttagtagaaaacatttgctggatcgtgaaggcaaacataatgttcttagtccttggcctggagtgccatctagcctatcactgaatctcttggactcgaatttaaaaggctctgctcaaggcggtgatacagcttaccaagtacgagggaatctgaggtatagtagtgcatttggtgagtaccctgtgcttcatggacataaagttgagcattcccatagaagctttttgatgccaccaccaccatcaactcaatatgagagtcctcgttcaagagaactgttgtccaaaccaatatcaggaaaaccttgtgaggtttcaaaactgaaagacagtgactgtaagctatttggcatctcacttcttagtagccgccccattgcatcagagccttctctatcacaaagaaatgttacaagtgagtcagttggtcacatgcatacagcatcacaccatcaacgtgcaattgaaaacgatcagaagtctgagcattctaggggttcaaaaccagctgatggtctgctgattgatgaccacgaaaaggtgttacaaacttctcagccacatctgaaagatgtacaagcaaaatctcatagtggttctgctagaagttgcactaaagttcacaagaagggtattgcacttggtaggtcagtggacctcacaaaattcagtgattatggggaattaattactgaattggatcaactattcgaatttggaggtgaattaacttctccacaaaaggattggcttattgtctacactgataatgagggagatatgatgcttgttggtgatgatccgtggcaggaatttgttgcaatggttcgcaaaatttatatctaccccaaagaggagattcagaaaatgagcccgggtaccttgagttcaaagaatgaagagaatcaatctgccagtgaaggtgcagcagacgcacaagaaatcgagtgtcagctcaatcattcatcttcagatacctgatagttcgtagatttgatttccatagcttccaggttccggactggagtggaaagtagtaggtgactgtcataaagccatctagttggagaatatgacctgaagaaggaaattctaattctgaatctgactgttttatcaagtgagtgcttgtgtttggaatcagaatatggatggcatgaatgagtatccatccaattttggaccgtgtcgtggaattagtagtagtagtagtagtagtagtatatatgccttccctgttatacactcctaatatagtagtatagtacggaattgtgcgttgtgcaaggtgataagggagtgtatcggccttgcatttttcaacaatcctaccttgtacatagttttactcgcaaccttagtaccggaactcgttaatgtaattaagttgatatacaagggcgattttaaacaaaaaaaaaataaaaaaaaaaataa

SEQ ID NO: 26783 - DNA, 581 bp, Glycine max
  Clone ID: TF_GmC140962_1
ccacgcgtccgcaaagacacagtggtcaaccgtcttcctctaacaaataagagagtgtctgtctggcacctttgactccgagactatcttcgcttcgccattccttgatttgacttcactatccattccattccgattccctttccctaccttcatttcctttgcttttcacttttcgctaaatcactacaagagagatgcatcgccgctaacctaaaacaacctccacgcccaccgaagcaatgaaggcgcaaccaccagacggtgccgccgccgtcgcacccaacgccggcgaaggaggagagaagaaaaccataaacgctgagctatggcaagcttgtgcggggccgcttctcaacctgccttcgcctggaactcacgtcgtttacttccctcaaggccacagcgaacaggtagcagcgtctttgaagaaagacgtggatgctcaagtcccgaactataccaatctcccctccaagataccctgtcttcttcacaatgtcacgctgcatgcagatccagacacggatgaagtatatgctcagatgacacttcagccggttccttcttttgacacggat

SEQ ID NO: 26784 - DNA, 378 bp, Glycine max
  Clone ID: TF_GmC1198_4
acggctgcgagaagacgacagaagggcaaggacaagccagttcattgttagtgtgaacaagtatttagaggctatcaaccaaaaatgtaatgttggtatgagattcaagatgaggtttgaaggggatgaatcccctgaaaatgacaaaagattttcgggcacaatacttggagtagaggatatttcccctcactgggtgaattcaaattggcgatctcttaaggttcaatgggatgaacctgcatcttttccaagacctgatagagtttcatcatgggagatagaacacattctggcttgtgttcctactacgtcatctcaacctgctgttataaagaataaaaggcctcgacaagcaagtgaagttcccgatctttg

SEQ ID NO: 26785 - DNA, 382 bp, Glycine max
  Clone ID: TF_uC-gmflLIB3275P141f02b1
acacgcgtccgccacaccgtccgttgtgacctcttgaatcttaagaaccaaaagggggcttcccttccaccaaagtgggcacctgcaggcaaccagccacaaaacattttttgcaaaactttaaccgccggggcaccaacccctcatgggggatttttttggccttgccggccagttgaaaaagggtttcctccatgggatttttttaaaaagcctcctgttcaaaaattaattgcagggaatttgctgtggattgaagggaaattcaaacttattttccggggccagcccaaagggcatttacttacaaccggatggagggtctttgtaagggctaaaaaacttgttgctggggattctgggctgttaatctggaatgaaa

SEQ ID NO: 26786 - DNA, 271 bp, Glycine max
  Clone ID: TF_701152936H1
cggctgcgagaagacgacagaaggggatgaggtttatacacaagttactttgcttcctcaagctgagttggaagggatgtatttagagggcaaagaacttgaggaattgggagcagaagaggagggggatgatagatcaccaactaaatcaacccctcacatgttctgcaaaacactaactgcctctgataccagcacacatgggggcttttctgttcctcgccgagctgctgaagactgttttcctcctttggattataagcagcagagg

SEQ ID NO: 26787 - DNA, 518 bp, Glycine max
  Clone ID: TF_GmC229993_3
acacagcagagaataaagttattattgcctctgagcaaagacaagttgaggaagggaggatctgataggaaaagttaacacgttaatgaaatagactccatttataataatggtggtgtagtgtacctgcagaagacgccatggagaatcaggccaaaggatgggatctgcaacttgaacagaagaaatggttcccatgaaccagctgatcctagaagaatcctcagtctcaaagggcattttgaatctcatcccagaacaccactgaatttgcattgcagccttcacaacagaagccttaacacaaaactctggcgaactagcccttggatagtacacaacctcaaagggccttccattaacagcacaagtcacagcctcaacaacagattcagcagccactcttcccaccaacatctcatgatcaccaccactcatcaaattgctctcactcccacacaagaagccaccaccaaagagagggttattccatccaccagaagagaactcagtccctc

SEQ ID NO: 26788 - DNA, 1887 bp, Glycine max
  Clone ID: TF_GmC1322_1
aattcggctcgagtagagagccttgactgttcttattcagttggaatgaggttcaggatgcgttttgaaactgaagatgcggcagatcgaagattcactggattaattgctggaattagtgatgttgatcctgttagatggcccggatcaaaatggagatgcctactggtaaggtgggatgacatagaagctgctaggcacaatagggtttccccatgggaaattgagccatctggttctgcttcaaattccagtaacttgatggcagctggtttgaagaggaacaggattgaaatgacttcagcaaagctggaatttcccaatcccaatgggattcaaacatcagactttggggaatcgttaaggttccggaaggtcttgcaaggtcaagaaattttgggtgttaatactcccccctttgatggtattaatgctcagagtccctggttatacgagttagggaggtgctatcctggttcaaactgttctgggattcctccaacaggaaataacatcagagtgccgcatccggcatctgatttttcctgcaatggcataggctttagtgaatctttccggttccagaaggtcttgcaaggtcaagaaattcttccaagccaaccatatggaagagccttatctattgaggaggctcgagcaaatggtcgctatggattttatgatggctgtcagttacttaactccagaaatggatggtctgcacagatgcatgacaatgcttcacatttgcatgcatctgttacacctgcgcaagtgtcatctccatcatctgtgttaatgttccagcaagcagttaatccagtttcaaactgtgattataacattaacaaatgtaataaggaaatggagggtagaatccattatcaaggcttatacacatctgaaatgaaaggtagaacattggcatcttccccatttgacgatcttattgtatctaggcgagctcccgaaggtgctagttctataggtatgtttggatgttcataatcagttgggtagttcacagttacatgaatcagtgtcagcattgagaagcagtcaaaagttggtttcctcatgtaaaagtagttgcagactctttggtttttcattgactgaggacacacatgttgcaaatgaagaggtatcagcctctaccatcactttaccattgagttctggaccttcgtttactagacttgttgaagatgagttccatcctggccattcgcatccgagtaaggcggttggaagtaactgcaccaagagtgtattgcagtattgagcttagaatcatgatgtgtgctggctatatgacacactgggaatgagataagctgaagaacgggtccatagtttgctctggttacgtgctttgctataatatctttggatttaagtaaggaggaaaattgttattatttgtgccatatttgttggctgaccaagttgaagtgcttgtgtattaacggtttgctcatgggcaatatgacctgtaaaagatgcatactccgaagtaaaaactattgctgtaatcttaggcatatttatcctccatttggcacttctaaagttgaatgtatttgttagacgcaagaagttaaaatttcaatggaaaggccatcgacccatcttggaggatctcgaaacactatagcctatagggtggaacgttcttcaactgaactttctcagtgatttcttgacacctgaaagtgggttagtatttcaattgacactggattaagtttcgttttttttctcttaaaaactattcctccccaagtcctaatataatacattgactggccttttaagttttgattgtataaaatgagtgaaacctccagtaatatatagggaaaaatggttaattttattttgggg

SEQ ID NO: 26789 - DNA, 608 bp, Glycine max
  Clone ID: TF_GmC340_7
gtcgacccacgcgtccggactagttctagatcgcgatctagaactaggaaagagggggggtcgtgtcggcttgaaaccaaacacgaccttatcggcgatccaatttcgatctgtgcaaatcgtaaaccctacctacttgcttctgcaattctggtggactggatccattttcatctcaattctcagtaagttggggcacatcacacaataactttgacatggcttccgctgcgccaggtgcaaccaatgatgctttatacaaggaattgtggcatgcctgtgctggaccccttgtcactcttccgcgtgaaggggagagagtttattacttccctcaaggtcatatggaacagcttgaggcatccatgaatcagggattggagcagcaaatgccttcctttaatctgccttctaaaattttatgtaaagtggtcaatgttcatcttcgagctgaacctgaaacagatgaagtatatgcacaaataactttgcttcctgaagcagatcaaagtgaggtgacaagccctgatgatcccctgcctgaatctccaaggtgttcagtccattcattttgcaagacactcactgcttgtggcactagcactcat

SEQ ID NO: 26790 - DNA, 4722 bp, Glycine max
  unsure (1)..(4722): unsure at all n locations
  Clone ID: TF_GmC340_1
ggctcgagaaaataatgtaatatgcttagatagggcgtgggacagtgggggaagttgtaggggtttcagggcacgcattctatcgctgtttctctcgaatcaacaaaacgccaccgtttcattgatctacttcctccaaagccaggtctccatgaataggtaccaattcaagctgcaaatatacttgaacttcaacttatcccacattctccactctcaaaggcttcaactctcaaatctggcggaattcatcgtgccgtgcggtgtacagaattagaattagaaagagaaagagaaagagggggggtcgtgtcggcttgaaaccaaacacgaccttatcggcgatccaatttcgatctgtgcaaatcgtaaaccctacctacttgcttctgcaattctggtggactggatccattttcatctcaattctcagtaagttggggcacatcacacaataactttgacatggcttccgctgcgccaggtgcaaccaatgatgctttatacaaggaattgtggcatgcctgtgctggaccccttgtcactcttccgcgtgaaggggagagagtttattacttccctcaaggtcatatggaacaggtacaacttgcctgggcatgttctcttaatttctgactttaattgaacttgaggcatccatgaatcagggattggagcagcaaatgccttcctttaatctgccttctaaaattttatgtaaagtggtcaatgttcatcttcgagctgaacctgaaacagatgaagtatatgcacaaataactttgcttcctgaagcagatcaaagtgaggtgacaagccctgatgatcccctgcctgaatctccaaggtgtacagtccattcattttgcaagacactcactgcttctgacactagcactcatggaggtttctctgttcttcgaagacatgcattgcgtacagttatccagaaacaaaaaccgtagagaatccgaatcccttatcaagcaggggtttcgcggcccgagaccaagtcaaaccgagacggtgacactggctgagtggaatttccgccgccattcgaagctacagcgatggccatagccgccaccatttccgttcctctcacatcccccacccgccgcactctcgcctccgtcaatagcctctctccccattctcccagatccactttgcccacaccgcaacgcactttcaaataccctaattcgcgcctcgtcgcgtcctctatgagcaccgaaaccgccgtcaaaacctcctccgcctccttcctcaacctcaaggagtccggctttctccatttcgccaagtaccacggcctcggaaacgacttcgttttgattgacaatagagacacgtccgagcccaggatcagtgcagagaaagcggtgcaactgtgtgatcggaacttcggcgttggagctgacggagttatctttgtattgcctggcatcaatggcaccgattataccatgaggatttttaactctgatggtagtgagcctgagatgtgtggcaatggagttcgatgctttgccaaattttttctcagcttgagaatttacatgggaggcatagttttaccattcatactggtctggtctgattattcctgatgattgttagccaccactggatatgactcagtagcccccatggcaagaattagttgcaactgatctgtatgggaatgaatggcattttagacatatttttcgagggcaaacccaggcgccacttactgaccactgtggtggagtgtctttgtcagttacaaaaaattagtggctgtggatgcatttatattcttaaggggtgaaaatggagagctgcgagttggaggtaggaggctcatgagacagcatagcaacatgccatcttctgttatatccactcacaatatgcatcttggtgctctgactactgcatctcctgccaaagagacaggaacagtgttgtctagattttacaagcccagactgtagctgggctgagtttgctggtagtagcctcacctgtggtagaggatgcttgtggtaatattctggcggtagttcttccgggatgaggttcaagaggagatttgagggtgggagcagattcagaggaactattgcgggtgtgggattgaggtagggatgataaatcgtgcttttgagtggcgatccttaaaggttgaatgggatgaaccatcgtctattttgcgtcctgttagtatttctgcccgcgatttggaaccacctgtgactacccctcataaagactcccagccatcccaatgtaactagaaatcggggcctctcattctaccttcaacaatgcctgattcttctttgcaaggtgtatggaaatcaccagttgaatctgcaccattctcttattgtgaccatcaacatgggcgagatgtctatccatcaaccaatttcaattccactgcaactggttttcttggttttggtgggaactgctatgcttccaacaagtcaatatattggtccagtaggatggaaaactccacagaatctttttctcctgtagcacttaaagaatttggagagaagagacaaggcactggaaatggctgtagactctttgggattcagttacatgacaattctaatgctaatgaagaaaatctaccaatggtcactttgtcaggaagggtgggtgatgatgggtcggttccatctttggatgctgagtctgaccaacattctgaaccatcaaatgctaatcgatctgatattccttcggttagctgcgatgctgaaaaatcatgcctgcagtctccccaggagtcacaaagcaggcaaataaggagctgtacaaaggtccacatgcaaggtatggctgttggaagggctgtggatttaacacggtttgatggatatgaggatctgctaaggaaattggaagagatgtttgacatcactggtgagctctgcggatcgacaaaaaaatggcaggttgtgtacactgataatgaagatgatatgatgatggttggggatgatccatggcttgaattttgtagcattgtgaggaaaattttcatctacactgcagaggaggtgaggaagctttcacccaaaataggacttccaatcagtgaagaagttaaacccagcaaaatggactctgaagcagtagccaatcctgaggatcagtcatctattgtggggcctggttgctaatgtcttaggtcttccaacatttcagttgttatatatatatacaatagatattggcatgaaaataggaagtagaacgtgagagaaacgagtatgtacctggcaagcccttcatcatggcctataaggagcatatggttagtgtattctgcatctatacaggagcagcataacagcaccaaagcagagggcttggggtattgtggcttttctctttctttcatagctctgtaatcaccgagtttcgatgccttgcttgttcagttttgtattggttgcgagcgtgcagaaatgtcttgtttttttttttttggttgcgagcagcataacagcaccgaagtatcttactatgtatgcatttggattttttttttggttcttttgtaattcacttgttatgatgcatcatctcatttatgtatatataactttctattatatacatactatttaatgtatgtatatcgagccaatttaatgcgatgcatcctttttgtaaaaataggagcatatcatggtgtcatctatacaagcacaaagggctggtgtggtataatactgtttttgaagataggcttggggtgtggcttttctatttctttcatagctccgttatcaagtctcgatcgcccttgcttgttcagttttgtattggttgcgagcgtgcagaaatgtcttttggttaagtatcttactatctagtatgcatttggagtttcttttttggttcttttgtaattcacctatgttgcatctcatttctgtatatataactttctattatatatactatttaatgtatgtatatcgagccccctgtcagagttgatatgggggaaccaattcttaaagccttggatgtgcctactaaattacatgcaaataaggataatgctgttgttaaatcacagctagttgtagatggagttatttggcatgtgacctgtgttagcatggggaatccacactgtgtaactttcagtagagaaggaagccagaatttgcttgttgatgaattgaagctagcagaaattggcccaaaatttgaacatcatgaggtgttccctgcacgaactaacacagagtttgtgcaagtgttatctaattctcacttgaaaatgtgtgtttgggagcggggagcaggagcaaccctagcctgtggaactggagcttgtgctactgttgttgcagcagttcttgagggtcgtgctgggaggaattgcacggttgatctacctggaggacctcttcagattgaatggagggaggaagataatcatgtttatatgacaggctcagccgatgtagtttattacggatctttgcccctttaatatgttgcccccattgttaaacccaatatggaattaggaattgctgaataatatttgtatgagaggtggactttctgcttgttcttactattttgccacgtctttatatcttcctacccttttttggttgaatgtgtcacaacaacggtttgttatctggttttggctatattaacctganagaaatgaagcaatga

SEQ ID NO: 26791 - DNA, 849 bp, Glycine max
  Clone ID: TF_GmC630_4
ccacgcgtccgatttatcagctgagagaaaaaataaatactaaaataaaaaaagaaatccagcaagagagagaaactaagacagaaagagagagaaagagtggttgaaagcgtccattgaaggtatagagagagaggttttgtgaattggtgctgcttcgtgtctgtttatttcctcgcgaggtttgaattccggaacagtgaagagaaacggaggttccgatcctgcgatgtgatatatgagagatctgtgaggaaattgaactggaaaaaaaaaatggcgacgtcggaggtatccatcaagggaaattcggtgaacggaaaaggagataatagttctggtggctacaccaacgatgttaggaacggttctggtggaggcgaggctcggaattcttcttcttcgtcttcatccgcgagagacgcggaagctgcgctttacagggagctgtggcacgcgtgtgcaggtcctctggtgacggtgcccagagaaggagagcgcgtgttctactttcctcaaggacacatcgagcaggttgaagcgtccacaaatcaggtagcggaacagcatatgccggtttacgatctaccacccaagatcctttgtcgggttatcaacgtcatgctcaaggcggagccagacacggatgaggtgtttgctcaagtgactttacttcctgagccaaatcaagatgagaatgcggtggagaaagagggtcctccggcggcgcctcctcggtttcacgtgcattcgttttgtaaaacgctgacggcgtctgatacgagcactcacggtgggttttcggtgctgaggcgacatgccgatgaatgcctcccttcgctggacatg

SEQ ID NO: 26792 - DNA, 461 bp, Glycine max
  unsure (1)..(461): unsure at all n locations
  Clone ID: TF_GmC883036_1
cttagcacaaaaaggctctntgctggagattcagttctttttatcaggtataaagagggctaatagacagcagccagcactatcttcatcagtaatatccagtgacagcatgcacattggcattcttgctgctgcagctcatgcagcttcaaataacagcccgtttactatattttataatccaagggccagcccttctgaatttgtaattccattggccaagtataataaggccctgttcaatcaagtttcccttggaatgagattcagaatgatgtttgagactgaggaatcaggggtacgcagatatatgggtacaatcactggtatcactgacttggatcctgtccgatggaagaattcacagtggcgcaatcctcaggttggatgggatgaatcgactgcccgtgagcgcccgagcagggtttctatttgggatattgagccagtggtgacctggt

SEQ ID NO: 26793 - DNA, 1343 bp, Glycine max
  unsure (1)..(1343): unsure at all n locations
  Clone ID: TF_GmC77382_1
cgcgtgcgcgcgctntaagtctcggatacgagcacttgagagagagagggagaaagctatagtagcatggtcaccaagttagaagtagtatagtagtactagtaagtagcatgaacatgaccaatgaccatgaccacaaagcataaccataaaaactaagcacaaacacaaccattgctacttctacttcccatttttccattaccggaattctaatgagccaaacgctgactcttgattttgtactactactctttaccaacgctctttcctctgtatacaaacactgatcctttcacactttctctctcttcttggattcgctgttctttctctgagatctgtgtgcttttcgactctgttcctcttctgggtctcgttactctttcagattgttgctaaatttggcagaaaaaagccacgtgtacttctgagagattctgttgtgcgtaacgaggactttcgttgaggactggaacctggagtgttgggggttaaggaaaactagaaccgaatgaggcgtactccaattgtcttttcttgtgacactggttttggttgaaggttcatacgtgtgaatattaatggattgtaaggggcgtgaagtactggtacaaatataacagagaatgttattctgcagtgggaaggaagggagagaggaaaaggcttgttttgtggtggagggtgtcattttgtgagaatttcgttgcgtaattggtagtgttgtgattgtggactcgattttgaggttactaatttgctttagccttttttgctcaaatgagactttcttcagctgattttagtcctccaccccaggaaggggaaaaacgagttctagattcagaactttggcatgcatgtgctggtccccttgtctctttaccagcagttggaagccgcgtggtgtactttccacaaggtcacagtgaacaagtggctgtgtcaaccaacaaggaagtagatgctcatatcccaaactatccaagcttgcctcctcaactcatttgtcaacttcataatatgactatgcacgctgatgttgagactgatgaagtgtacgctcagatgaccttgcaacctctgaatcctcaagagcaaaatgaggcataccttccagcagagttgggcactgcaagcaaacagccaacaaactatttctgcaaaactttgaccgccagtgacacaagcactcatgggggattctctgtgcctcgccgggcagctgaaaaagtgtttcctccattggatttctctcacagcctcctgctcaagaattaattgcaagggatttgcatggtaatgaatggaaattcagacatatcttccggggcccagcc

SEQ ID NO: 26794 - DNA, 261 bp, Glycine max
  Clone ID: TF_jC-gmro02910046c03d1
ggctcgaggatccctttatcttttttataggacagaatggtgaactctctgttggcgtccgaggagcattgcgacagcggggtaatgttgcatcctcacatctctccagccacagcgtgcgtactggcgtccctgcccctgcttggcatgccatctggaccggcaccatctacactgtctataacaagcctaggaccagccctgctgaatttattgaaccctacgatcaatgaacggcgtctactcgaaatagtaatagct

SEQ ID NO: 26795 - DNA, 2805 bp, Glycine max
  Clone ID: TF_GmC1198_1
acgattccaaaagctgcttcctctcataaattctctgtcaacgcataatcattccatttagttatcatctgtgacaccatcacactgcgatcatcatcctcattcctactttgcacacccttatgacaatgatgatgtcatggacttagattcattggtcacagtcacagactctgaagaagaaaaacaacagctttgaattgattacaatacaaccttaaacgttctcgttgaaccgtggtggaggaggagaagaagatgaactctatgagcaactatggaaagcgtgtgcaggaccccatgtggaagttcctcgtactggccaaagggtcttctatttccctcaggggcacatggaacaattagaagtatcaacaaaacaaaaactaaaccaaaggattccactcttcaagtgggactccaagatcctttgtcgtgtcgtcaacgtccatttactggctgaacaagaaacagatgaggtttatgcgcagatctgtctagaaccagtatcttagcaagctgagcctatgagccctgatccgtgccctgctgaacttccaagtccaagagttcactccttctgcaaggtcttaactgcctctgatacaagcacccatggtggcttctctgtcctcaggaagcatgccactgaatgccttccagctttggacatgtctaaatcaaccccaactcaggaattggttgccaaggatcttcagggctatgaatggcgctttaagcatatatttagaggtcagccacgtagacacttgctcacaactggatggagtaattttgtgacttccaagagattagttgctggagacacctttgtgtttctgagagggaacaatggagaattgcgggttggagtgaggcgcattgctcctgtgcagagcagcatgccatcatctgtgatttctagtcagagcatgcacctaggagttcttgcaactgcatctcatgctgtagcaactcagactctttttgttgtatattataagccaagggcaagccagttcatttgttagtgtttggctaggcaagtttcatgctagttgtaatacactggctaattgtagctcaatatagagattctaggtactaattaggttcaaaattacaaaagattttcgggcacaatagttggagtagaggatatttcccctcactgggtaaattcaaattggcgatctcttaaggttcaatgggatgaacctgcatcttttccaagacctgatagagttttaccatgggagatagaacccattctggcttctgttcctactacatcatctcaaactgctgctataaagaataaaaggccacggcaagcaagtgaacttgcagatcttggagacacagcattagcttcccctactttctgggatgctggactgacacagtctgatatggcaaaacttagtgtcatggccgaaatcaaaaggagtgacagtagttcccatatgtggcatcataacagtaaaagcagcaacaatggtatatcaatgaatcagacagaagcaatttggctatcttctccttctcaattatatcatgacacaaccgatgatagcaagagcatctcagcttggcctatttcaaaacctcactcagagagattgaacaatgatcatttccttgaccaggttgacaaggagatcaacaaagtagaggctgctacaagttatagattgtttgggattgaccttattgatcatgcaaggaacaactctctttctgcagagaatgcatctggaatcacctctgagtgcaaaattgatgtaaaccatgtgtccgatatctcaaaggcttctaaagaatggaaccaagaacagctacaactatctccaaaagagactcaaagcaaacaagtttgtagcagaagttgcactaaggttcaaatgcagggggttgcagtgggtcgtgccgtggatttgaccacattggatggatatgatcaacttgtagatgaattggagaagatgtttgacataaagggacaacttcaacttaggaataagtgggaaattgtcttcactgatgatgaaggggatatgatgcttgttggtgatgatccatggcttgaattctgtaaaatggtgagaagaatcttcatttattcaagccaggatgtgcacaaattgagctcagggagcaaactacctatctcttctatggaagagattgtaacaagtttagacacaaccgagacctgaaacttttacattcttgtcctttctactttgttagttttcttcttcttcttcttctttttttttgctgtttcttttatttttcttatctaaggtaaggatgttagtttatttttggctaggcaagtttcatgttagatgtgaaacgctggctaattgtagctcaatttagagattctagacactaattgggttccaaagaccaaattgaatattttaataaaaagtaaattacacatgtcaaaaaaaaaaaaaaaaaaaaaaaaaaaaaaaaaaaaaaaaaaaaaaaaaaaaaaaaaaaaaaaaaaaaataataaaaaaaaaaaaaacaaaaaaaaaaagaaaaaaaaaaaaaaacaaaaaaaaaaacgaatgaaaaaaaaaaaaaagggggggcccccctatggggatccagctttttacccccggccacgtacaacaaattgtttttttttttgcccccgaaaaataaattacgggcggggggtttaaaaacgcgggggtgggaaaaccggggggtaaaccaattttaatggcgttttaaaaaaacccctttcccgcagttgtgttaaaaaatcaaaagggcccc

SEQ ID NO: 26796 - DNA, 2748 bp, Glycine max
  Clone ID: TF_GmC695_1
gatgaaatctatgctcaaatgactctgcaaccactgaattctgaaagagaagtttttcccatatctgattttgggctaaagcacagtaaacatcccagtgagttcttctgcaaaactttgactgctagtgacacgagcacgcatggcggcttttcggttccacgcagggcagcagagaagctctttcctccattggattacacaattcaacccccaactcaagagcttgttgttcgagatttgcatgataatacctggacatttagacatatataccggggtcaaccaaagagacacctgctcacaacaggatggagtttgtttgtaggctcaaaaaggcttagagctggtgattctgttcttttcatcagggatgagaaatcacaattgcgagttggcgtgaggcgtgttaatcgtcagcagacaacactgccatcatcagtactttctgctgatagcatgcacattggtgtgcttgctgctgcagctcatgctgctgccaatcgaagtccattcactattttctacaatccaagagcatgcccctcagaatttgttattcctctggccaaatacagaaaatctgtatttgggactcaggtctcagttggcatgagatttggcatgatgtttgagacagaagaatcgggtaagcgcagatatatgggtacaatagttggtatcagtgatgtggatcctttaaggtggcctggttctaaatggcgcaatattcaggtggagtgggatgagccagggtgtggtgataagcagaacagagttagtgtgtgggagattgagactcctgaaagcctttttatctttccttctttgacttcaggtctaaaacggccattaccatctggtcctttggaaaatgagtggggaactttgttaacaagacccttcataagagttccagaaaatggaactatggagctctcaaactcaattccaaatctctactcagaacacatgatgaaaatgctttttaaaccccagctgattaacaataatggagcatttttatccgccatgcaacaagaatctgctgctacaagaggtcccttgcaagaaatgaagaccactctggcagcagaaaaccaaatgctgcttaaaaatctacatcctcaatctatccctgaccaacctaatgccttaaacatgcaatcactgttgaaaaatgatcagcctgaaaaatttcatcctcttgccaaaattgataatcatcttccttctgggatagttattgacaagccaaaattagaatgtgaggtattacctgaccgcgtgattgactatccttccatggaagggtgcaacaatgaaaaggtggcagtaaatcctgttaaccagcaaggcctagcaacccaattgccattccataatcaaaaccagagtccactactccctcaatccagtccatggcctatgcaacctctgatagaatcctccatgccccatcctcaaatgattggtatggctcaagctgattctgccatggtaaatggcctgtttcctcagcttgacattgatgaatggttggcgtatgcttcttcccaaccttttgctgggcagaacagaccaactggacctttttctgacttgcaagaacataactcacttcagcctcaagtagtgaatccccctttaccttcaatgaacaatgaagtatgggatcattatgtcaagaacttcaagttcttatctcaagcagaccagcttacatccatctgtcagccagggatgtatggcctcaatggcgtaccaagctcaaataatttgagggatctttccgctgagagcaataaccaaagtgagatttgtgtcaatgttgatgctagcaacagtgtaggcaccaccatggttgatccttctacttcaagcaccattttggatgagttttgcacgatgaaggacggagaatttcagaatcctcaagattgcatggttggcaacttgagttcaagccaggatgtccagtctcagataacctctgctagtctagccgagtcacatgcctatcctcttagagacatccctgacaactccggtggcacttcatcaagccatgttgattttgatgaaagcagcttcctgcagaataactcatggcagcaagtacctgcacccatccgaacctacacaaaggtgcaaaaggcaggttccgttggaagatcaatcgatgtgactactttcaagaactatgaggagttgatccgtgcaatcgaatgcatgtttggactcgatggcctgctgaatgacactaaaggctcaggatggaaattggtgtatgtagattatgagagtgatgttctacttgttggtgatgatccttgggaggaatttgtaggctgtgtccgctgcataagaattttatcaccttcagaagttcagcagatgagtgaagaggggatgaagcttctaaacagtggagctttgcaagggatgaatgtttgaatatcaggtggtggctgcatccaatgtcactaagccatgctttgtgatgttcttgtacaaggcaatgtttgaaaagcaaaggcatatgttgtggaagaagtcagtattattaacttgtatggaacaaaccttgaagatggaagagagtttgagttttattatcacacagatcaaaagttgtaagatgatgttccaatgagtcaagggtgttgcataccttatgttgtaagaaattcttgctggcaagtggacatattatgctttattattactacgcattgggacctttcc

SEQ ID NO: 26797 - DNA, 248 bp, Glycine max
  Clone ID: TF_LIB4281-002-Q1-K1-F7
ccacgcgtccggttttgtctgcagatgtgcctttagcattactataatccgaggggcagatcatctgagtgatcatacctatccacagagtgcgaaagagcctcgattatccgtattcagctggaatgaggcccaggatgcgctatgacactgaggctgctgcctagcgaacatccacaggattaattgcgggcatcgctgacgtggatccctgtcagatgggcctgtatctagatggatacgcctaa

SEQ ID NO: 26798 - DNA, 4089 bp, Glycine max
  unsure (1)..(4089): unsure at all n locations
  Clone ID: TF_GmC630_1
ctctctcatccgcacaacacaccacaaccttcttcttcttcttcttcaacttctggttcaaaacctcaacagtttgttgaattgcgcgttgaaatacgactcaatattctttcgcgagctctgttctcacttcaaaggttaggttcttcgacagtttctttgtttccactccgtcgcttgctgagaaggcgtgagcgagagttgtagaattacgcaagagaaactaagacagaaagagagagaaagagtggttgaaagcgtccattgaaggtatagagagagaggttttgggaattggtgctgcttcgtgtctgtttatttcctcgcgaggtttgagaacagtgaagagaaacggagtttccgatcctgcgatgtcatatatgatagatctgtgaggaaattgaactgaaaaaaaaaatggcgacgtcggaggtatccatcaagggaaattcggtgaacggaaaaggagataacagttctggtgatgctagaaacagtggaggcgagggcacaaccctagcaacgcttcttcttcatcttcatcaaaacctcaacagattgtggaatagcgcgttgaacagcgacagaattattcttccgcaaactcggttctcccttcaaagcgtcgagtttaggttattcgagagattctttatatttactccgacacttcgcgagaaaccgtgtcttgcgagagcgaggcttggagaaccacgcgaggagtgtcgcggatgagagatctctggtgaggtctgtggaaatggcatcatcggaggtgacgatgaagggaaattgcttgaaccacaacgacggcggagccacggagcctcattcgccgtccacggccaaagacgcagaagctgcacttttcagggaactatggcacgcatgtgccggtcctctagtcacggtaccgcgggaaaaagagcgcgtgttttatttccctcaaggacatattgagcaggtggaggcgtcgacgaatcaggtggcggaccagcacatgccggtttacgatctcccacccaagatcctttgtcgggtcatcaacgtgcagctgaaggcagagcccgacacggatgaggtgttttctcaggtgactttgtttcaggagccaaaccaagatgagaatgccgtggagaaagagcctcctccagcgccgcctccacggtttcatgtgcattcgttttgtaagactctgacggcgtccgatacgagtacccatggtgggttttctgtgctgagacgacatgctgatgaatgtcttcctcctctggatatgtcgaagcagccacccacacaggaattggtggctaaggatctgcatgcaaatgaatggcgatttaaacatatctttcgaggtcaaccgcgtagacacttgcttcagagtggttggagtgtttttgtcagctccaaaaggcttgttgctggggatgcatttatatttcttagaaggtgagaatggggaacttcgtgttggtgtcagacgtgcaatgagacagcagggtaatgttccatcctcagttatctcaagccacagcatgcatctcggtgttcttgcaactgcttggcatgccatcttgaccgggaccatcttcactgtttattacaagccctaggactagtcccgccgaatttattgttccgtatgatcaatatatggagtctctcaaaaataattatagcatcgggatgcggttcaaaatgaggtttgaaggtgaagaggctccagagcagaggtttactggtaccgttgttggaatagaagattctgatcccaaaaggtggagagattccaaatggagatgccttcaaggtgagatgggatgaaacatccaacacccctcggcctgagagagtttccccttggaaaatagagcctgctcttgctcctccggctctaaatcctctttcaatgcccaggcctaaaaggcctcggtctaatgcagttccttcatccccagattcttctgttcttactcgagaagcatcatctaaagtaagcatagacccttcaccggcaaatgggtttccaagggtcttgcaaggtcaagaattctcgaccttgagaggcaattttgcagaaagtaacgagtttgatactgcagagaagtctgttgtttggccacctactgcagtagatgatgaaaagatggatgtttctacttcaaggaagtatggttcagagagctggatgtcaatggggaggaatgagcctacatattcggatcttctttcaggctttgggaccagtggggatccttctcatttatccttgaaggatcaaatgagccctgcttattctgctagaaagcaatcattggatcatgaaggcaaacttcacatgccttatccatggcctgtaatgccctctagtctgtcactgaacatcttggactctaatgcaaaaggtcctacacatggtggtgatacatctttccaagctcgagggaatttgaggttcagtgcatttggtgaataccctgaactgcatggtcataaagttgaggattcacatggaaacttgatgccacccccacctgcaccccaaactcaatatcagagtccttgttcaagagagcttatgtcaaaacaagtatcagcaaaaacttgtgaggctgtgaaaccaaaagatggtgactgtaagctatttggcttctcacttatcagtggccctatcgtaccagagccttctttatcacaaagaaatgtgagtgagcctgctggtcagatgcatcttacagcacaccaacaaagaacatctgaaaatgatgagaagtcagatcactcaaagggatcaagacctgtagatgatctagttgttgatgaccatgacagaccattacggacttctcagtcgcatactaaagacgttcaagccaaacctctcagtggttctgctaggagttgcactaaagttcacaagaagggcattgcacttggtagatcagtggaccttacaaagtacagtggctatgatgaattagttgctgaattggatcagctgtttgaatttgggggtgtattagtgtcaactaaaaaagattggcttatcgtctatactgataatgatggtgatatgatgcttgtaggcgatgatccatggcatgaattctgtgccatggattgcaaaatttatatctaccctaaagaggagatcccgaaaatgagcccaggtaccatgagctcgaaaaatgaagagaaacagtcggtaatggctagtgatggtgcacgatgcaaaagttagttaaatgtcagccacatcaaaagtttccaattcagaaaatggccttgacgcctaatgattagtagattgatttccatagctttcagattctgggatggaaagtaaggaactgtcatgaagccatccatccagttggaaaacataacttgaagatgaaatcgaggctgactgctgcttatcagtgactgcttcaaatcaaatatataagatggcattaaaagagtagtatccgtccaattttggaaatcccggaattagtagtatatgcctgcccagttatacaatccctagtatttaatcaattgtgtttttgagtgaggtgatatagggtgatatcgaccttgcttttttttttttttaaaacaatcccaccttgtagttgttgctgtacatagttgtttctctcccaccctatgaacaacaacccattaatgtaatgaaagtttcgtataccaggtcgcggccttgtggttggtatccagtttatttgattttaattttgattcttattcttattagtcataatttgtgagatggaaattatcgagattccattctgcatgctgtataattaaattttgttttaagtgtacataattgttttgtaccccgtttgtaaaaaaaaaaaaaaaaaaaaaaaaaaaaaaaaaaaaaaaaaaaaaaaaaaaaaaaaagggggaaaaaaaaaaaaaaaagggggggcccccaaaaagagggcccccccccccgaaaataaancccggccccaccctcaaaaccncgggggggcccccaaaaaaaggccccttcccccccgggaatattttgccccccccccccccgggggaaaacattttttcctttaa

SEQ ID NO: 26799 - DNA, 585 bp, Glycine max
  Clone ID: TF_GmC896_4
gcgaggattccgattccgccgctcattctgtgctgcgtggcagctgtgaagttcctcgccgaccccgaaaccgacgaggtcttcgccaggctgcggatggttcctctaagaaactccgagctcgactacgaagacagcgacggtaacggcggcggaggggtcggagaagccggcgtcgttcgcgaagacgttaacccagtccgacgcgaacaacggcggcggattttccgttccgcgatactgcgcggagacgatattcccgcggctggattactcggcggagccgccggtgcagacggtgatcgcgagggacgtgcacggcgaggtgtggaagttccggcacatttaccgagggacgccacgtcggcacttgctgactaccgggtggagcagtttcgtgaaccagaagaaactcgtggcgggggattctatcgtgtttctgcgggccgagaatggggatctttgcgtggggattcgtagggccaagagagggggagttggtgggccaaaggggccgtgcgggtggagcagttatggttctggagggcttgtgcttgagccatacggggccttttcgggtttatg

SEQ ID NO: 26800 - DNA, 643 bp, Glycine max
  unsure (1)..(643): unsure at all n locations
  Clone ID: TF_GmC240088_1
tcgatccagcgtccgatttgtttgctttgtgccaaaagcctcacccgttgaaaccgtccgctgcacttgtgccttttttcccaggctttggtctctgctttgttttttctcagagatcaacagcaacaacaacaacatatgagatgagattcttcttcacatattaacaacgtgaacccttttcttctcttcttctttctaatggggtggggagggaaaggaaagttttttttttgtttggtggggatataatataacttgttgtgaattgatgaagaagacgtagaaacacaggttcctctagtggtttttaagttgaaggcgtagagagtggtgcagacataggaataggatatgatatgatggcttccgttgaagaaaagattaaaactggaggagttggaggaggaatggttgttgggggtcaaactcttgttgctgagatgaaactgttgaaagaaatgcaagaacattctggggtcagaaagactttgaattcagagttatggcatgcttgtgcaggccctcttgtgtcactaccccaggttggaagccttgtggtgtacttcccttaggggcgtantgagcaggtggggggttgtactggagggacgggggggtcggggtttgccccccactcccg

SEQ ID NO: 26801 - DNA, 975 bp, Glycine max
  Clone ID: TF_GmC216969_1
ccacccgtccgctttctccctcctctttttctcatccaccaacaccaattcacttttcttcttcttcttcttcttcttccttcattttcttctctgcatctcacactgatcataccccaaacaacccttttgagatatgtttatggttatggattcagcagaaaggtgcttagattctcaactatggcatgcctgtgccggtgccatggttcagatgccacccctcaacacaaaagtcttctactttccccagggccacgctgaacacgctcatgggaaggtggaatatttcgggaaaaaccatcaaacccgtgttccaccactcatcccttgcagactctctgccatgaaatacatggcagaccctgacaccgacgaggtttatgtcaaaatgagactcacccctttgagggaacatgaattattggattcacaagatgattgtttcttgggaaacacaaacagtggaggagttgagaatcaagagaagcctccaacttcttttgctaagactctcacacaatctgatgcaaacaatggtggaggcttctcagtgcctcgttactgtgctgaaaccattttcccaaggttggattattcggctgagcctcctgttcagaccatcattgccaaggatatgcatggacagtgctggaagtttaggcacatctatagagggacaccaaggaggcatcttttgaccactggatggagcaatatcgtgaaccagacgaggcttgtcgctggcgactctattgtgtttctgagggcagaaaatggggatctctggtgttgggataacgcgggctaagatggggattgacggagggactgagtgaccttacggtggatggtataaccctctgtttggtggtggctccttgtgtgagagtgagaacaatgtgatgagcggcgctgatcatgagatgttcgagggaagagtggctgctgaatatgatgtcgaggctgagacta

SEQ ID NO: 26802 - DNA, 2795 bp, Glycine max
  Clone ID: TF_GmC1058_2
cctttgcgttcggagagtgataggtgagtggggagagaaagacagagagagaaagcgggtcagtttctttttggagtattgggtcagcttcttttggcaatgccaaagttggtcacgctctctgaaaatgcagcagctgcagcagcaggaggcatgaagaacaacaacctcaccactccttcaaatatcatcatttctcactcgttacttcactttcttctttgcttctctctcttcttccctctcctttctcattcttctcctcatggctggtctcatcgatctcaacaacgcaaccgaagacgatgaaatgccgtcgtctggctcctcctccaccgtgtgcctcgagctctggcacgcctgcgcgggtccattgatttccttgcccaagaaagggagtgttgtcgtgtacttccctcagggacacttggagcaacaccttcacgattttccgctccctgcctctgccaacatcccctcccatgtcttctgtcgcgtcctcgatgtcaagcttcatgctgaggaagggagtgatgaagttcattgccaggtggtgctggttcccgaaactgagcaagtacatcagaagctgcgggagggggaatttgatgctgatggtgaagaggaggatgctgaagctgtgatgaagtccacgacgccccacatgttctgcaagactttgactgcttctgataccagcactcatggtggattctccgtgcctcgtcgcgctgcggaagattgcttccctcccctggattacagtcaacagaggccttcacaggagcttgtggcgaaggatctccatggccaggaatggaggtttcgacatatttatagggggcagccgcgaagacacctgcttactaccggttggagtgcctttgtgaacaagaagaaacttgtatctggagatgctgttctgtttctcaggggtgaggatggagaactgagattgggaattcgtagggcggctcaactgaaaagtggcagtaccttttcagctctttctggccagcaagggagtcctaccagtcttatggatgtggttaatgctttgtctgcaagatgtgcctttagcattcactataatccgagggtcagttcatctgagttcatcatacctatccacagattcgtaaagagccttgattattcttattcagctggaatgaggttcaggatgcgcttcgaaaccgaggatgctgcagagcgaagattcacaggattaattgttggaattgctgatgtggatcctgttagatggcctggatctagatggagatgcctaatggtaaggtgggatgacttagaagccacaaggcataatagggtttccccatgggagattgagccatctggttctgcttctactgcaaataacttgatgtcagctggtttgaagaggaccaagattggattgccttcagccaagctagattttccagtttccaatgcgattggaacatcagactttggggaatcactaaggttccagaaggtcttgcaaggtcaagaaatgttgggtgttaatcctacttatgatagttttaatgctcagagtcaccagctatctgatttgaggaggtgctatcctggctcgaactatcctaggattgctgcaacaggaaatagcattggaatcccacaagtgagttccaatgtttccagcaacggcataggctttagtgaatctttcagattccagaaggtcttgcaaggtcaagaaatacttcctagccaaccatatggaagggccctgtctgttgacgaggcttgtggaaatggtcgctgtggactctttgatggtttccaggcgatgagatccagaaatggatggtcttcccacgtgagcaacaattcctcacatttgcatcctcctgttccatctgggcaagtttcatctccgtcatctgtgttcatgttccagcaagctgtcaatccagtttcaaactccgattataacaaccaaattggtcaggtgatgggaggtaaggtccatcagcgagtttcatatgcgtctgaagttaaaggcggaaaatttgtatcaaccccctatgagcctcttctccgtggactatctcaggaaggcacaaattcttttggtctttcaaactttcataatcagctggatagttcacgttcacacgattctgtttcagtactgagagctagtcaagagttggttccctcgtgtaaaagtagatgcagagtctttggattttcattaactgagggtgctcccgttgcaagtaaagaggcgactgactcatctgcagttgcttgtgctggaccttcctttacaagacatgttgaagatgatttccatccagggcattcacttaggagcaaggcagtggcaagttattgcaccaagggtgtgctgcaatattgacttggaaatcttgatgtatgctggtactgatgctggcataaggtagcagaagagaatgtccacagttgttgtacttgtgtgctttgctctagtgacttggaatattgggagactaaaatattgtaactattcgtctaatttagatacttgttaaattggctatgaccacgttctagattctgtattaatcatgtatctacccttcattgacttgtatggggaaaacctctaaacgatgcatgtttatccaccgttttggccatatgaacaaagtaagccaggtggttgtgcataacccttcatttatcttgaattgggcattgattacattagagagcaatagctctcttaatgtttcatgtccttaatgttgtctccatttttactcactgttcaaaaa

SEQ ID NO: 26803 - DNA, 2906 bp, Glycine max
  Clone ID: TF_GmC340_3
aaaaaaaagaaatgaatatactaaaaaaatgtaatccgcttgatgggcgtgggacagtgggggaagttgtaggggtttcagggcacgcattctatcgctgtttctctcgaatcaacaaaacgccaccgtttcattgatctacttcctccaaggccaggtctccaagaattggtaccaattcaagctgcaaatatacttgaacttcaacttatcccacattctccactctcaatggcttcaactctcaaatctggcggaattcatacaggggcaatcaatgatgatttatacaaggaattgtggcatgcatgtgctggtccccttgtcactctccctcgtgaaggggaacgagtctattactttccacaaggtcacatggaacagcttgaggcatctatgtatgagggattagagcagcagatgccttccttcaacctgccttctaaaatattatgtaaagtggtcaatgttcatcttcgagctgaacctgaaacagatgaagtatatgcacagataactttgcttcctgaagcagatcaaagtgaggtgaccagccctgatgatcctctgcctgaatctccgagggtcaagatccattcattttgcaagacacttactgcttctgacacaagtacccatgggggtttctctgttcttcgaagacatgcagacgattgtctgcctccactggatatgtctcagcagccaccatggcaagaattggttgcaactgatttacatgggaatgaatggcattttaggcatatttttcgagggcaacccaagcgccacttacttaccactgggtggagtgtctttgtcagttccaaaaaattagctgctggtgatgcctttatattcttaaggggtgaaaatggagagctgcgagttggggttaggagggtcatgagacagcaaagcaatgtgccttcttctgttatatctagtcacagtatgcatcttggtgttctggccactgcatctcatgccattgccactggaacactgttttctgtgttttacaagcccagaacaagccggtcagagtttattgtgagtgtcaacaagtatctggaagttcagagtcataaactctctgttgggatgagattcaaaatgcgatttgagggtgatgaaattcccgaaagaaggttcagtggcacaattgtgggtgttggagataataaatcatcgtcggtctggcctgattctgagtggcgatcattaaaggtgcaatgggatgaaccatcctcaattttgcgtcctgacagagtttcatcatgggaattggagccacttgtgtctaccactcttgcaaactcgcagccaacccaaagaaacaagagggcacggcctctcattctaccttctacaatgcccgattcttctttgcaaggtgggtttgctgggttggttgtgcagaatttctttgtcattctgctgcccattctgtttttctacataatcatctttctttgtgcaccaggcatatggaaatcatcagttgaatctacctctttctcttattgtgacccccaacaaggacgtggcctctatccatcaccaaagttcaattcttctgcaactaactttattggttttagtgggaatagctctgtgggatctccttccaacaaatcaatatattggtctaataggatggaaaataacttggaatctatttcagctatagctcttaaagaagctggagagaagagacaaggcactggaaatggctgtagactctttgggattcagctacttgagaattctaatgcagaaggaaatctacaaacagtcactttgtcaggaagggtgggtgatgataggtcggttccatctttagatgctgagtctgatcaacattctgaaccatcaaatgccaaccgatctgatattccttcagttagttgcgatgctgaaaaatcatgcctgcagtctccccaggagtcacaaagcaagcaagttcacatgcaaggaatggctgttgggagggctgtggatttaacacgatttgatggatatgaggatcttctcaggaaattggaagatatgtttaacatcaagactgagctctgtgggtccctaaaaaaatggcaagttgtctacactgataatgaagatgatatgatgatggttggagacgatccgtgggatgagttctgtagtgttgtgaggaaaattttcatctacacagcagaggaggtgaagaagctttcaccgaaaataagacttccaatgaatgaaaaagttaacccaagcaagcaggattcagaagcaatagtgaatcctgaggaccagtcatctaatatggggcccagctgctagaagtcgtatgaattccagttccagtatatcctagttgttatgaatgcaataaatgttggtgtggagagaggcgataatgaactaaaggtggccggccaatactaataggagcatgcatatcacttccacttgtgtattgtattgtattgtattgtattgtattgtattgtattgtattgtattgtgcagctaggctggctggctggcatgacgtcagcaagcaagaatcgacgcagagggttgttttgagatactgctgtttgatcttgccttgccttgaatgaaagatattgtgggttttctatttcttctacggctcggttatcttatcgccgggagggagtgtagtggtccttgctcattcggttttgagttggccgcaagcaccaacatgtatgtctttacttaatatcatgccatgcatgatatgatctttttttttttgttttttatgagaggggtgggtattttcttttgtaactcactcaatgtgatgcatgcctttttgtacagaagtatttattattatcttcgaatgctatttatatgtacgaggcataaccctccgttctcccgct

SEQ ID NO: 26804 - DNA, 768 bp, Glycine max
  Clone ID: TF_GmC245555_1
ctgacgcgtgggcggacgcgtgggcgccaccccagttgatttgccaacttcataatgtcacaatgcatgcagatgttgaaacggatgaagtatatgctcaaatgacattgcagccattcgtccggcaagagcagaaggatacatttctttctatggaattgggcattccaagtaagcagccgtcaaattatttttgcaagacattaacggccagtgacaccagcacgcatgggggattctctgttcctcgtcgtgcagctgagaaagttttccctccactggatttctcgcagcaaccgccggcacaggaactaattgctagggatctccatgatgttgaatggaaatttcgacatatttttcgaggacagccaaaacgacaccttcttactacaggctggagtatatttgttagtgccaagagacttgtggctggagattctgtgcttttcatatggaatgagaagaatcaacttcttttgggaatacgtcgtgccaatcgaccgcaaactgtaatgccgtcatctgttctatccagtgatagcatgcatatttggacttcttgcagccgctgcccatgctgcagcaaccaatagctgtgttacccgtattttataatccaagggctagtccatctgaagttcggcataccactttcaaaatatataaagctggtgaccatacacgtattttctgttggggatgcgtttcaggaagctttttgagactggagaagccaagtgtccgcaggtataatgggtacaataa

SEQ ID NO: 26805 - DNA, 3040 bp, Glycine max
  Clone ID: TF_GmC630_2
acgcgagaagacgacagaagggcgcctaatgattagtagattgatttccatagctttcagggaacggtctgcctcccataccagctaactaacactggattcaatgattttagctgtctagatcaaaactgccctatgtaatgttgttacaatacatgaattttgaatctagtttagtagaggaatttcatggtgtaacggtttcatgtgagccacgcgtacggtcctaatctttaagatcctcagatgtcaaacaaaaaaaaaccaacaaccttttcctttgggttagtgagctcacgttgaagttgttagttcaaagacttttactctcttcactgatgacgagtaggttatgggaaggttctggggataacggattccccacccgatgaatgccttcctccgctggacatgtcaaagcagccacctacccaggagttggtggccaaggatctgcacgccaacgagtggcgattcaggcatatttttcggggtcaaccgcgtagacacttgctgcaaagtggttggagtgtttttgtcagctccaagagactagttgctggggatgcgtttatatttttaaggggtgagaatggggaacttcgagttggtgttaggcgtgcaatgagacaacagggtaatgttccatcatcagttatctcaagccacagcatgcatctcggtgttcttgcaactgcttggcatgccatattgactggcaccatgttcactgtgtattacaagcccaggactagtccagcagagtttattgttccctatgatcaatacatggagtctctcaaaaacaattataccattgggatgcggttcaaaatgaggtttgaaggtgaagaggctcccgagcaaaggtttactggtaccattgttggaattgaagatgctgataccaaaaggtggccaaagtccaaatggagaagtcttaaggtgagatgggatgaaacatcaaacataccacgtcctgagagagtttcacaatggaagatagagcctgctcttgctcctcttgctctgaatcctctaccaatgcccaggcctaaaaggcctcgatctaatgtggttccatcatccccagattcctcggttcttactcgtgaagcttctaaagtaagcgtagatcctttgccaacaagtgggtttcaaagggtcttgcaaggtcaagaactttcgaccttgagaggtaattttgctgaaagcaacgaatctgatacggcagagaagtctgctgtgtggccacctgttgcagatgatgaaaagattgatgtttctacctcaagaaggtatgggtcagacagctggatgtcaatgggaaggcatgaactaacatatccagatctgctttcaggctttgggacccatggagatcattcatcccatccatcctttgttgatcaaaatggtcctgtagctaatgttggtagaaaacatttgttggattgtgaaggcaaacataatgttctgagtccttggtctggagtgccatctagcctgtcactgaatcttttggactcaaatacaaaaggctctgctcaaggtggtgatacaacttaccaagttcgagggaatctgaggtatagtagtgcatttggtgagtaccccatgcttcatggacataaagttgagcattcccatagaaactttttgatgccaccaccaccatcaactcaatatgagagtcctcgttcaagagaactgttgtccaaaccaatatcaggaaaaccttgtgaggtttcaaaactgaaagacagtgactgtaagctatttggcatctcacttcttagtagccgccccattgcatcagagccttctctatcacaaagaaatgttacaagtgagtcagttggtcacatgcatacagcatcacaccatcaacgtgcaattgaaaacgatcagaagtctgagcattctaggggttcaaaaccagctgatggtctgctgattgatgaccacgaaaaggtgttacaaacttctcagccacatctgaaagatgtacaagcaaaatctcatagtggttctgctagaagttgcactaaagttcacaagaagggtattgcacttggtaggtcagtggacctcacaaaattcagtgattatggggaattaattactgaattggatcaactattcgaatttggaggtgaattaacttctccacaaaaggattggcttattgtctacactgataatgagggagatatgatgcttgttggtgatgatccgtggcaggaatttgttgcaatggttcgcaaaatttatatctaccccaaagaggagattcagaaaatgagcccgggtaccttgagttcaaagaatgaagagaatcaatctgctagtgaaggtgccacagacacacaagaaatcaagtgtcagctcaataattcagcttcagatacctgataatttgtagatttgatttccatagcttccagattccggactggagtggaaagtagaggtgactgtcataaagccatccagttggagaatatgacctgatgaagaaaattctaattctgaatctgactgctttatcaagtgactgcttgtgtttggaatctgaatatggatggcatgaatgagtatccatccaattttggaccgtgtcgtggaattagtagtagtagtagtagtagtagtatatatgccttccctgttatacactcctaatatagtagtatgttattgtgccttgtgcaaggtgataggggggtgtatcggccttgcatttttcaacaatcctaccttgtacatagttttactcgcatccttagtacccaaactcgttaatgtaattaagtgtcatatacaagggcggtttatctgattttaaatatgattgtctcttatttgtagtggggtaatttgtgccagtatgcctaatcattgtggatattaaaatattagtatgcgtttgggtagtagatgtattattaaattttgcccctaaaaaaaaaaaaaaaaaaaaaaaaaaaaaaaaaaaaaaaaaaaaaaaaaaaaaaaaaaaaaaaaaaaaaggatatat

SEQ ID NO: 26806 - DNA, 2042 bp, Glycine max
  Clone ID: TF_GmC144398_1
gaatgcagacgctgatgtattttcacattaatttcttttccctcgttgattgtctgaaaccgtggacactcgaaaggtcatatcgcattcacatgtataagtactaaatataagtaatatatatatatatatatatatatatatatatatataaagcaaaaatgcgaaaaattgtgaaatgaaatgaaagtatgaaaccttctctctctctttctttctctccctagaaaagataaatcatctgacacagggacacagtctctttctcctccttaaaaaacacccaaaaacaatggcggttctgtcttcattcgctcaagcatagaaagagaaaagcaacagtagcacgaccatagtcgccgccgaaactgctacccattttcccttatggctgcttagaaaaaaagaaaaaaagaacagacccggtttttttttaagaaaaaaaaattctaaaggtgtgtatcacactgttttcttgtcacctccgtgaaaaaggaacaagtacctacgtttgtaaccgtggtcgttttccgttgcaacgtttgcttcggttttttgtactgtggagtgagtgcttgtgctgattcccaagtcccattttgcgcttttttcccggctttgcttgagatccggttaccctttgggatttgtagctcctttcgctgagatctgtttcgttttggagtttcttcgcttgtttggtttttcacgttgttgccaaaaaaatgttggtgatatagaaaaaggggttaaaagaaggtgctggagcgtgttacttgctattggtggttcaagcgttgttgtatgatgaagtgttgggttgaagatttgaactttgggtggtggtgtgggttgacgagggtaggaagcgaatgaaaggtaggagtagaacaattgtgttttgtagtgaaactggtattggttgaggattaaaaaaggtgggaattttcagagtttcttagcgtttctcgttgatggttgagggaatttggcatctggggtgtttgagttttgttttgattcatttgggttttggttggtgaagggggggttaaaggtaaaaaaagaatgctattgtggaggaaggaggaagggaagaaagggattgttgtttggtttggggtgaaggttgggggaattttgttgctgctaaattgttctacttaagagttttgcttcaatcattgatttcggggctgggttttaaggtttgaaattgctgaaagtttactgaaatgaaactttcttcacctggttttagtcctccaccccaggaaggagaaaagcgagttctagattcagaactttggcatgcttgtgctggtcctcttgtttctttaccagctgttggaagccgagtggtatactttccgcaaggtcacagtgaacaggttgctgtgtctaccaacagggaagtggatggccatatacctaactatccaagcttaccaccgcagcttatttgtcaacttcataatctgactatgcatgcagatactgagacagatgaagtatatgctcagatgaccttgcaacctcttaatcctcaagagcagaagggagcataccttccagctgagttgggcactccgagtaaacagccaacaaactacttctgcaaaattttgacagccagtgacactagcactcatgggggattctctgttcctcgcagggcagctgaaaaagtttttcctccattggacttttcacaacagcctccttgtcaagagttaattgctagggatttgcatggtaatgagtggaaatttagacatatcttccgtggccagcccaaaaggcatctacttacaacaggatggagtgtgtttgtgagtgctaaaagacttgttgccggtgattcagtgcttgttatctggaatgaaaagaatcaattgcttcttggaattcggcgtgctaatcgaccttaacctgtgattgcctcatcagtgttggcaaagtgatagcattgcactggggccttcttgctgcttgaagctcattgccagtttcaactaaattttcgttttacccttctttta

SEQ ID NO: 26807 - DNA, 522 bp, Glycine max
  Clone ID: TF_LIB4280-012-R1-K1-C7
ccacgcgtccgctctcattctcattccattccattccattccgttgctatgtttcaaaaccctaaccaaaccctcttagcattctctcttgtgtaacgaattcaatttccgtgatgcctcgccaacctccgccttcacctccgtctcagcctggtgttctcgaccctgcactctggcttgtctgcgccggaaccaccgtggagatccccaccctccattctagggtttactacttcccccagggacacttcgatcaagcctcttccgctccaagaaacctctcccctctccttctttcgaaacccgccgttctctgccgcgtcgaatcggttcaattcctcgccgatcctctcaccgacgaggttttcgcgaagctgattcttcaccctgtcgctgattgcttcgcttcgggaccttccgctggtgctcctgctgctgcttctgcttccgctcaaaccggtgagaataacgtcgtttctttctcgaagggtctcactgcttctgatgctaataacgtggggg

SEQ ID NO: 26808 - DNA, 1876 bp, Glycine max
  Clone ID: TF_GmC1238_1
cccacgcgttttaactaactacaacacagttataatattttaaccattatcttccatgaataaaacaaagaaatatctataggaatatgacattttcttcctgtgttgcaggtgtactagtggtatagtgactggaatgagtgatttggatccctataaatggcccaagtcaaaatggaggtgcttgatggtacatttgctattttttctttacaaactacgcagaatgttttgaccttatattgtacatttagcatttgctctggattttatcttcaccgactttgccattgaagatatgttatgcttcatcaaccttttattgaagatgcattttcatgcaggctgccacacccagtcacctcaccactggtatgaatcccaaatcctaatgccgagacagccaaagtaaaataaatcagtaaacttcgagatcctaatcatcctcttgggagaaaatacgggttttatgtcactatattatggatgtgacacagtaactaagcacttctgcatctgtgtcagcaggtgcgctgctcctgcgttggggtgggttcgcccttctgggtttgcgggccccgcgggctcctccaccttgccatgggcctcccgaggccaattcggctcgacagagttattatcccaatttcctttcttctgtggctaatgctatatcagcgaaaagcatgtttcatgttttctacagtccaagagcaagtcatgcggattttgctgtgccctaccaaaaatatatcaaaagcatcaagaatccagtgaccatcgggacaagattcaaaatgaaatttgaaatggatgaatcttccgaaagaaggctcactttctccgacaggactggaatgagtgatttggatccctataaatggcccaagtcaaaatggaggtgcttgatggtcagatgggatgaggatattgagattagtcatcaagatagagtatctccatgggagattgatccttcttcgtctcttcctcccttgagcattcaatcctccagaaggctgaagaaactgaggccaggtctgcaggctgccacacccagtcacctcaccactggaggcagtgggtttatggactctgaggagtcagtaagatcatccaaggtcttgcaaggtcaagaaaatacgggttttatgtcactatattatggatgtgacaaagtaactaagcagccagaatttgagatcagatctccaagtcatcctaatcttgcatcaactggagtgagaaagatttctgctgctgagtttatgagggttcacccttctagttttgcaggcttttcggaaactaacatgtttccaagggtcttgcaaggtcaagaaatatgtccggctagatccctaacaggaaaggctgatttgaactttggttcttggggcaaacccaatgtcagttactcaaataacaacctgcatcaggcaaccaaacctagctttcactctttaggaccagaagttattcaaactgcatatttcccttatggtgatattcacaatgctggtcaaggtagcagcatcttgtgctccaaaccgaccaatttccaacgagagaatatcccatttaacactccttctactcagtcagggatcatgagaaatgaagttggacggtcagacatcacaattccaaatgagcagaagctgcaggacaatatttctggtactgcttctttaggggcaaacatgaggattccaaaggatgacaatttcaaggggcaggtaaaagcttgtaaactatttggaatttccttgtccggggaaactaccgcccaaaatttacagaactctgctaaaagaagctgcacaaaggtgagcgacgatagcaacagagttatattgtgaaatatgcctttttt

SEQ ID NO: 26809 - DNA, 2378 bp, Glycine max
  Clone ID: TF_GmC695_2
cgaagtccattcactattttctacaatccaagagcatgcccctcagaatttgttattcctctggccaaatacagaaaatctgtatttgggactcaggtctcagttggcatgagatttggcatgatgtttgagacagaagaatcgggtaagcgcagatatatgggtacaatagttggtatcagtgatgtggatcctttaaggtggcctggttctaaatggcgaaatattcaggtggagtgggatgagccagggtgtggtgataagcagaacagagttagtgtgtgggagattgagactcctgaaagcctttttatctttccttctttgacttcaggtctaaaacggccattaccatctggtcttttggaaaatgagtggggaactttgttaagaagaccctttataagagttccagaaaatggaaccatggagctctcaaactcaattccaaatctctactcagaacacatgatgagaatgcttttgaaaccccagctgattaacaataatggagcttttttatctgccatgcaacaagaatctgctgctacaagaggccccttgcaagagatgaagaccacacttgcagcagaaaaccaaatgccacttaaaaatctacatcctcattctatccctgaccaacctaatgccttaaacatgcaatcactgttgaaaaacgaccaacctgaaaaattgcaccctcttggcaaaattgataatcatctgtcttctgggatagttattgacaagccaaaatcagaatctgaggtattacctgatcatgtgattgactacccttccatggaagggtgcaacatcgaaaaggtggcagcaaatcctgttaaccagcaaggtctagcaaaccaattgccattccataatcaaaaccagagtccactactccctcaatctagtccatggcctatgccacctcagatagaattgtccatgccccatcctcaaatgattgatatggttcaagctgattctgctatggtaaatggcctgtttcctcagcttgacatcaatgaatggatgtcatatgcttcttcccaaccttttgctgggcagaacagaccaactggacctttgtctgacttgcaagaacatacctcacttcagcctcaagtagtgaatccccctttaccttcaatgaacaatgaagtgtgggatcattatgtcaagaacttgaagttcttatctcaagcagaccagctaacatccatttgtcagccggggctgtatggctcaatggcataccaagctcaaacaatttgagggatctttcagctgagagcaacaaccaaagtgagatttgtgtcaatgttgatgctagcaacagcgtaggcaccactgtggttgatccttctacttcaagcaccattttggatgagttttgcacaatgaaggacagagaatttcaaaatcctcaagattgcatggtgggcaacttgagttcaagccaggatgtccagtctcagataacttcagcaagtctaactgaatcacatgcctttcctcttagagacatccctgacaactcaggtggcacttcttcaagccatgttgattttgatgaaagcagcttcctgcagaataactcgtggcagcaagtacctgcgcccatccgaacttacacaaaggtgcaaaaggcaggttctgtaggaagatcaattgatgtgactactttcaagaactacgaggagttgatccgtgcaattgaatgcatgtttggactcgatggtctgctgaatgacactaaatgttcaggatggaaattggtctatgtagattatgagagtgatgttctacttgttggtgatgatccttgggaagaatttgtgggctgtgtccgctgcataagaattttatcaccttcagaagttcagcagatgagtgaagaggggatgaagcttctaaacagtggggctttgcaagggatgaatgtttgaatattaggtggtggctgcatacaatgtctcactaagccttgctttgcgatgttcttgtataaggttaacctcaaatggctttatcgtccaatgtttgaaaagcaaaggcatatgttgtggaagaagtcaggattattgacttgggtgtcatgtgatgtattattattaactaaaggacactcgttatttgaaacatttcttaaggtatggagcaaaccttggagatggaagagtttaagttttattattacttatcaaaagttctaagatgatgttccaatgagtcaagggtgttgcataccttatgttgtaagacattcttgctggcaagaggaaatattatgatttattattaatacgcattgggggctttccaaaaaaaaaaaaaaaaaaaaaaaaaaaaaagcggccgctctacaggatcca

SEQ ID NO: 26810 - DNA, 710 bp, Glycine max
  Clone ID: TF_GmC240259_1
gtccggggatattgtcggcgaaggtggttgccgaggcggcggagctggcggcgcggaacatgccgttcgaggttgtttattatccgaaggaaaggtggtcggagtttgtggtgaagactgaagcggttaatgaagcaatgaaggtcgcgtggagtcccggattttgagtgaagatcgctgcggagacagatgattcgtccagggtgtcgtggtgtcagggtacggtctcttctgtcgctcttcacggtaatggccaatggcgcggttctctttggcgtatgcttcaggttacatgggatgaacctgaaggtttgcagatagcaaaatgggtcagcccttggcaggtggaacttgtttcaaccacacctgcacttcattcagcattccccccaataaaaaggattaaagctgctcatgattctggggtgtttactaatggagagagagacccctttcctatgacaggattcactaattcgacaatgggacaactgaatcaggcattgttgagttatggtacttttcctgctggcatgcagggagccaggcatgatgcattttctgcatcaagattttgcaattatccaactgacatgtctcgtctgtgtatgggtaattcctttgggaagagcacatttccatggctgaaaacattggaaacagaggtaaatgttggcagctctcaatctgatgaattgtcacctgatagt

SEQ ID NO: 26811 - DNA, 2855 bp, Glycine max
  Clone ID: TF_GmC127069_1
ccacgcgtccggtggatgtgagactcctataaagtcctgccacaacaaaagattggggaaaaaaacagaataggctctgtaactaacgtggtgaggccaggaaggaagtgtgtgtttgttttcctcactcaaaacgcgcgttaggagtcccgttcaacgcaatttctgttagaaaaagctttggtgttgaacgtcgtggttagctccaaagcctaaccaatctgtagcagctcaattatcccttcacgatccgacgaaaaaagccgactcacacacataacttgtttttctggcttctcaagatacggcgtttactttttcagatccgacgaaaaaccgttttgggaaattaacaagatcagtgaaagttgttgagtgagatgattacattcatggacacaaaggagaaatcaaaagaggtggagaggtgtttggatcctcagctatggcatgcatgtgcaggtggtatggtacaaatgccaacagtgaactctaaggtttattacttccctcaaggtcatgctgagcatgcatgtggaccagttaacttcaggacttgtcctaaggttccaccttttgttccatgtagagtgactgctgtcaaatacagggctgatcctgagaccgatgaagtctatgccaaactcaagctcattcctctgaatgccaatgatgttgattatgatcgtgatgttgttggtggggctgaaactcaggacaagcctgcttcatttgcaaaaaccttgacccaatctgatgccaacaatggtgggggattttctgttcctaggtattgtgcagagacaattttccctcgtttggactactcagttgaccctcccgttcaaaacatccttgccaaggatgttcatggagaaacatggaaattcagacacatttataggggcacgccaaggcgacatttgttgactactgggtggagtacttttgtgaatcacaagaagcttgttgctggggactcaattgtgtttttgagggcagaaaatggggatttgtgtgttgggattcgacgagcgaagaagggaatttgtggtggacttgagacttcctcagggtggaatcctgcaggaggaaattgtcatattccttatggtggattttctccctttttgagggaggatgataatagaatcttgagaaatggcaatagcaatggattgaaccctagtgtaagtatgatgggaaagggaaaagtgaggccagaagcaattattgaagctgcaaatcttgcagccaataagaaaccctttgaggttgtttactaccctcgggcaagtactcccgagttttgtgtgaaggcctcactagttgaagcagcaatgcagactaggtggtattctggaataaggttcaagatggcctttgaaacggaagactcctcgcgaataagttggtttatgggaactatatcttcggttcaggttgctgatcccctaaactggcctaactcaccttggaggcttctccaggttacatgggatgaaccagatttcccccttgatggccagattcctttgccgacacttcccaacaaccttctaggtcccaacaacaccaaccaatttggttgtctactcgaaagtactcctgccgaatcggctcgagccaggcatgctcattatggtctatccttatcggatctccacctcagtaaattgcaatcaggtctatcttcggctggtttcccgcctcttgatcacactgctacgccaatgaaggtctcaaataacaagacattgcaaaagcctagcatcagtgagaacgtctcttgcttactatctatgacaaattctactcggtcttcaaagaaattggatgctgggaagacaccttcgctcatgctttttggccaaaaaattctcactgagcaacagatctctccgagcagctctgttgatacactctccccagttcttaccagaaattgttcgacagatggaaatgtcaataaagtgactaatttttttgatggttttggatcagctcttcatcagcaaggtctacacgaacactcctcttgtgagcaggtcccagtggtgtaaggataatccccaagaaactgaggctggtttggagattggtcactgtaaagtttttatggagtctgaagatgtgggtcggactatggacctctcgttgcttccgacttatgatgaattccatagaaagttggcagacatgtttggcatagaaaaatctgaaatgttaagtagggtgctttactgcgattcagttggggctatcaaacacattggtgatgagccattcagtgacttcacaagaacagccaaaaggttgactattctaatggattctggcagcaacaatgtaggagtgtagtggggcagaataaactattcttttaattgtacagatagttcacgaagtctcattttctaacctttccctcttcctggtgcaatggaaggagacaacctaatttattttttgaatatcaaactctacataaatgtttctattccatctcaaaggggatttttggatttttgaattttggttagagtgatcataacttgtgtttccctttttctttttgtttttttctgtcaactatctctttatctttgcctacttgagtttccttttaaaattttgttggggaaaaaggtggaggacaaagagagaagtttgaaatcctataaatatgattggtttgtaagcaggtaaaaatgtatttgatctgaatactagttgaaacaaaaggagagtcattcttgcttttatgtattcacttgttcaaagattgtaccattttcttcttgttgttgccttataaattatttgctattacaatttaatcttgcattgaatgc

SEQ ID NO: 26812 - DNA, 460 bp, Glycine max
  Clone ID: TF_GmC137804_1
gttattattcaattgtttagttttatagattacagagagtgtgtgtaagagaaaaaagttgtccccctcttttcccttcttctttctctgagatccaaaaaaaaattcaggtgaggtcttgtgtggtagataactgactccactcaactcaacctttttgattttgcattcactgagagagagagagagagagaaagaaaaacataaaacataaaacatcagcatcaatacagagtttaactgaatcatcatcagttttggttcgtgccggtgccgccgcaatgaaggaaacagacaagagtttggatccgcagctgtggcacgcgtgcgccggcggtatggctcagatgccgccggtgaactccaaagtgttttatttcccgcagggacacgcggaacatgcgcagtccaacgtcgatttctgagcggcgaggattccgattccgccgctcattctgtg

SEQ ID NO: 26813 - DNA, 514 bp, Glycine max
  Clone ID: TF_GmC5800_2
ggagagtattgggtcacagcctcttttagcaatgccaaagttactcaacaacacctcacgctctcggaaaatgctgcaggcatgaaaccattcattccaaccttcaactccttcttccaaacctctccttcacttgttagatttgttcacattgcaaagagatttttgttgctatggggttgatcgatctgaacaccacggaagatgatgaagctgctccattatctgcttcttctccagcttcatattcttcttcttcttctcactcggggataagcacttctgcttcaaccttggttgttcctcctactcctccttctgtgtgcttggaactgtggcacgcgtgtgcgggccctttgatctctctgccgaagaaaggaagtgttgttgtgtacttgccacagggacactttgagcatgttcaggattttccggtcactgcttatgatatcccaccccacgtgttctgtcgtgtccttgatgtcaagctccatgcagaggaagggagcgatga

SEQ ID NO: 26814 - DNA, 1581 bp, Glycine max
  Clone ID: TF_GmC1198_2
ccacgcgtccgagagagtttagtttggtcattcattattccaaccgagtaacgccgtttctcttcttcccttcgtttcacaggcaaagaccgcaacagcgtcgtcgtcgttcaacggaacctcttcttcttcttcatcttctgaagagtttttcttttttgttttttttaactcttacgttagaagctgtcttcttctcagttttgtaataacgggatctcgtaaaggggattcacttattattcagattagtgacaaaacttgacaaaacgaatcgttttgttttcgtgaatatttcttattttctttaatttcttttctggggcgttgacttgggttgaaccatgttgagccgcggggcgcatggcgaagtggttggttctggtgagagtggtgaggatgagatgtatgagcagcagtggaaggcatgcgcgggaccactggtggatgttcctcgtgttggccagagagtcttctatttcccacaaggccacatggagcaattagaggcttcaacaaaccaggaactgaatcagaggattcctttgctgaagcttcccacgaagatcctatgtcgagttgtgaatgttcatttactggctgagcaagaaacggacgaggtttatgcgcaaattactttggtgccggaatctagtcaagacgagcctacaaatgctgatccgtgcactgctgaacctccaagagcaccagttcactcgttcagcaaggtcttgactgcttcagataccagcacccatggaggcttctccgttctcaggaaacatgccacggaatgccttcctgtgttggacatgtcccaaccaacaccaactcaggaattggttgcaaaggatcttcatggttatgaatggcgctttaagcatatatttagaggtcaaccacgcagacacttgctcacgactggctggagtacttttgtgacctccaagagattagttgctggagatacctttgtgttctcagcttggcctatttcaaaacctcactcagagagattgaacaatgatcatttccttgaccagagaatgcatctggaatcacctctgagtgcaaaattgatgtaaaccatgtgtccgatatctcaaaggcttctaaagaatggaaccaagaacagctacaactatctccaaaagagactcaaagcaaacaagtttgtagcagaagttgcactaaggttcaaatgcagggggttgcagtgggtcgtgccgtggatttgaccacattggatggatatgatcaacttgtagatgaattggagaagatgtttgacataaagggacaacttcaacttaggaataagtgggaaattgtcttcactgatgatgaaggggatatgatgcttgttggtgatgatccatggcttgaattctgtaaaatggtgagaagaatcttcatttattcaagccaggatgtgcacaaattgagctcagggagcaaactacctatctcttctatggaagagattgtaacaagtttagacacaaccgagacctgaaacttttacattcttgtcctttctactttgttaggttttcttcttcttctaaaacaaaaaaatca

SEQ ID NO: 26815 - DNA, 405 bp, Glycine max
  Clone ID: TF_jC-gmst024114e07a1
ggctcgagtgctcacaactggggttattgcatgtgtgaacaaaacgaagctggttgctggagatgctgcgatgttacttaggggcaaccatggagaactgagattagggatacgctgggcagctcatctgtaaagagctggttcgtaggcaggtccctctgggcaggaattgaatactgcaactctgaagggggtggggaacgcattatctacacgaggtgcatttagtgtgcgctacaatcacaggatgagctctgcacaagttatcatacctgttcacagattcttaaagagccttgactgctcttattcagctggcatgaggttcatgacgcatgttgaaactgaagactcggctagagccaagatgcactggattaattgctggaattagtgatgttgatc

SEQ ID NO: 26816 - DNA, 1141 bp, Glycine max
  Clone ID: TF_GmC74745_1
gcggattgcggctcgcgtcgtctttcaaacccaaaaatcctcacttgggtctcaatccgaaagcgataggccacaaaagagggcctttacttccttacatactctcacttgcttgtggttccttggtcgttcatatttttgatatttcttcttcttcttcttcttcgttttgttcagtttctttcatggcgatctcggagaacgtgtcacctttgaagctgttgttatgttccaattgggttccacttgtggtttttgcgtttgcttgatgttttccttttctgggtgtttttttcttctttgctttttggtggggttttgaggtttgtagagagcatgttgcggagcttcatggatccctttgaaggggttttggggtgggtttgattttttgggaagttgctgtttttttttttttttttttgtttgggcatggagtgcattggcaagtgggaggaggggaacatgggggaatgcaataatgataattacaataataataatattaatgggtttggggaaattgaggatgctggcactgagctagggttccatgtgtgtctgtgattgctgaatactgtgtcttcaaaaaggaggaaaaaggggaaagcttgatatgaagctttcaacatcagggttgggtcagcagggacatgaaggaggggagaagaagtgtttgaattctgagctatggcatgcatgcgcgggtcccttggtgtccctaccaactgcagggactcgtgtggcttatttccctcagggtcatagcgagcaggttgctgccacaaccaacagagaagttgatggtcacatacccaattacccgagtttgccaccccagttgatttgccaacttcacaatgttacaatgcatgcagatgttgaaacagatgaagtgtatgctcaaatgacgttgcagccgctgactccgcaagagcagaaggatacgtttcttcccatggagttgggcgttccaagtaagcagccctcaaattatttttgcaagacattaacggcaagtgacaccagcacacatggagggttctctgttcctcgtcgcgctgctgaaaaaaggttttccctccattggatttctcacagcaaccacctgccgcagaactaattgctagggatctccatg

SEQ ID NO: 26817 - DNA, 770 bp, Glycine max
  unsure (1)..(770): unsure at all n locations
  Clone ID: TF_GmC293503_1
aaatgggagtggaataatactttgaatttcttgttattatttgattgacactcttctcttcttcagctcttcttcttcccaccatgtcctctgttccactcctcccctgttttttttttcttcttttctcccttgtggtgtccctccaaacatgaactccttttcgtgatttgacctcatttccattctgttacagttctcactttctgcctttcctttttttaaaaacccacttgattgttgcactcttggcctcctttatcctctcttttctctgcttttttttttcttttatcctctttggtttcccatttgagttccacttcagaagaagaaccaacaacaacaaccacactggggtgtgttcatggaaattgatctgaatgatgcagtgacgagtgaggctgaaaagagtgcgtcttgcaatggggagtgtgagaaaggtgctgctttgtcatctccaacatgttcatcttctggctcctcctccacacgtgtgtcttcttcttatattgagctttggcatgcttgtgctggcccccttacttccctcccgaagaaagggaatgtggtggtgtatttcccacaagggcaccttagaacaagctgcatccttctctcccttttcaccaatggagatgccaacctatgatcttcagccacagatcttttgtagagttgtcaatattcagctacttgccaataangagaatgatgaggtttatacacaggttactttgcttcccccagctgagttggcagggatgtat

SEQ ID NO: 26818 - DNA, 1158 bp, Glycine max
  Clone ID: TF_GmC86745_2
ttggcactgacaaagacactccaccctgtagtaagaagatgccttttgggctgaccgcgaaatatatgcctgaatttccattcattatcatgaagatctctggcaattagttcttgagcaggaggctgctgtgagtaatcaagaggagggaagactttttcagctgctcttcgaggaacagaaaatcctccatgagtgctggtatcacttgcagtcaatgttttgcaaaagtagttggttggttgcttgctgggagtacccaattctgcaggcagcagatacacctccttttgctcttggacttagaggttgcagagtcatttgagcatatacttcatctgtttcagcatctgcatgcattgtcacattgtgaagctgacagataagttgtggtggcaagttagggtaattaggaatatgtgcatctacttccctgttggttgatgcagcaacctgctcactatgaccttggggaaagtatactacacgacttccaaccagaggcagagaaaccagagggccagcacaagcatgccaaagttcagaattcaaacattttttctccccttcttcttcagcaggagggttaaatccagaagaagagagcttcatgcttggagctataacaataggtgaagttccaaactagtaaaaactgaagcaccccaaatcgaataaaagcattattattgttataaaggtcgcaaattttgcatgcccctttgaatcagcaatgatcctatttcataacccatcccacctccccacccaccccgaaaattgaagctacccacagaaaaccatcatccaaagccacttccaatgcaacacccgaatctcctggttctcataacacgctggaatccaaccctaattgggagcctgaagttcaaaccctagcttccagatctcaccgtagcggagctgaacagtagaattagagggattgggggagagaggcgagtgaagtgagagtgacattcatgtgggatttcagtggaagaagcggagaatgtgatgggagagagagagatggctaatggctatgttactcaacaacaataatgcacagtgactggtaataattgatccatggcatggtatgtgttgtgctattatacgaaaccggacgcggggtcgacccgggaattccggccc

SEQ ID NO: 26819 - DNA, 229 bp, Glycine max
  unsure (1)..(229): unsure at all n locations
  Clone ID: TF_6070067
ggaactatgtgacgcatgtgccgatcctgtggtcgcggtaccacgngagaaagagcgcgtgtattatttccgtcaaggacatatggangagggggaggcgtcgacgaatcacgtggcagacgatcacagtgccggtgacgagcgaccacacaatgaggtttgtcagatgatcagctatcatatggatgccgggcacgacacggatgatatgtatgctgaggtgagtgtg

SEQ ID NO: 26820 - DNA, 408 bp, Glycine max
  Clone ID: TF_jC-gmXLIB3563P078bd01a1
gccaaacacgaccttatcggcgatccaatttcgatctgtgcaaatcgtaaccctactcacttgcttctgcaattctggtggactggatccattttcatctcaattctcgtctctcttcagtaagttagggcacagcacacaataacaattcattctcttagacatggcttccgctgcgccaggtgcaaccaatgatgctttatacaaggaattgtggcatgcctgtgctggaccccttgtcactcttccgcgtgaaggggagagagtttattacttcccgcaaggtcatatggaacagcttgaggcatctatgaatcagggattggagcagcaaatgccttccttcaatctgccgtctaaaattttatgtaaagtggtcaatgttcatcttcgagctgaacctgaaac

SEQ ID NO: 26821 - DNA, 722 bp, Glycine max
  Clone ID: TF_uC-gmflLIB3275P163h04b1
cccacgcgtccgcttcctccaaggccaggtctccaagaattggtaccaattcaagctgcaaatatacttgaacttcaacttatcccacattctccactctcaatggcttcaactctcaaatctggcggaattcatacaggtttctctctaatctcgtgtttctctttcccctttttttgacgcaacctcgccagaatcattctttaattgcttactcaccttgggttgctctctctaattgaattcatagccaattcgtgagactcttcttacccatgccatatgtcatgatcatgagtaactttatctgactggtctgtttggcaaaatttatcaacgttggaaggtgtttaatatatattccacatgaactttaagttattctctacttcattattttgtcatgctttgttttttaggggcaatcaatgatgatttatacaaggaattgtggcatgcatgtgctggtccccttgtcactctccctcgtgaaggggaacgagtctattactttccacaaggtcacatggaacagcttgaggcatctatgtatgagggattagagcagcagatgccttccttcaacctgccttctaaaatattatgtaaagtggtcaatgttcatcttcgagctgaacctgaaacagatgaagtatatgcacagataactttgcttcctgaagcagatcatagtgaggtgacccagccctgatgatcctctg

SEQ ID NO: 26822 - DNA, 1779 bp, Glycine max
  Clone ID: TF_GmC5800_1
ccacgcgtccgccatgtttgtttgcacctctctctctctttctgcccacatcaaacccaacagtctcagcattgcagcagcaactgcaccactgctctgctgcttcagctctcagaagacgagtaaaataaaacaagaggggatacaaagctcccatttttatatgactccaacttaaatctcactgaaagcttgatttgatgctaccccaaaatacacaccctctttcccccatgccataacataaagtaaaaaaagaaaagaaccctccaaaaagaaacaaaagtaaaaaaaaatttaaaaaaaaatacagcagagagagtgataactcatatcatatagagtagtgagagaatgagagagagaaagagggtctctttctttttggagtattgggtcacagcctcttttaggaatgccaaagttactcaacaacacctcacgctctctgaaaatgctgcaggcatgaaaccgctcattccaaccttcacctccttcttccaaacctctccttcacttgttagatttgttcacattgcaaagggaactttgttgctatggggttgatcgatctgaacaccacggaggatgatgaagctgctccattatctgcttcttcttctcactcggggataagcacttctgcttcaaccttggttgtttctcctcctccttctgtgtgcttggaactgtggcacgcgtgtgcgggccctttgatctctctgcctaagagaggaagtgttgttgtttacttgccacagggacactttgagcatgttcaggattttccggtcaatgcttttgatatcccaccccatgtgttctgtcgtgttcttgatgtcaagctccatgcagaggaagggagtgatgaagtgtactgccaagtgttgttggttcctgaaagtgagcaagtggagcatagcttgcgggaaggggaaattgttgctgatggggaagaggaggatactggagctacggtgaagtcaacaactccccatatgttctgcaagactctcacagcttcagacaccagcactcatggtggattctcagttccccgtcgggcagctgaagattgctttcctcccctggattacagtcaacagagaccttcacaagaacttgtggcaaaggatcttcatggcctggaatggaggtttcgtcatatatataggggccaaccacggaggcatttgctcacaactgggtggagtgcatttgtgaacaaaaagaagcttgtttctggagatgctgtattgtttcttaggggcaatgatggagaactgagattagggattcgcagggcagctcagttgaaatgggctggttcctttgcagttccctcaggtcagcaattgaatcctgcaactctcatggatgttgttaatgcattatctacaagatgtgcatttagtgtttgctataatccaaggtatttttctctttattcacttgtaccttccccaggagttattgaaggaaatctgttaatgtcagttcctgtgcacagttattatggagttttttctgtttgtataagatggggatggggattctgaattctgaaacatgtttagtcataatgtctaaatgaaaatttcccatttcacctcagtcttctattttaaggtgctagactggagatttggtttaatagaagaaaacaaactgcattgaagttcctagttccttaccattaataattgaatattttaatgatttttaaaatttccattttctctgtatgcatagtatgttttaacaagatttgagttatag

SEQ ID NO: 26823 - DNA, 2362 bp, Glycine max
  unsure (1)..(2362): unsure at all n locations
  Clone ID: TF_GmC769_1
gaccacanactgtcatgccatcctcagttctatctagtgatagtatgcacattgggcttcttgcagctgctgctcatgctgcagcaactaatatttacagtgtgctacaacccacatctgaactgtttttcctttaaatatgtcaaagctttctctgtaccattttttctttaattcggctcaagatgctttttgagactgaagaatcaagtgtccgcaggtatatgggtacaataactggcataagtgatttggattctgttcggtggccaaattctcattggcgctctgtcaaggttggttgggatgaatcaacagctggagagagacaaccacgagtgtctctgtgggaaattgagccattaacaacattcccgatgtatccatcattatttcccctcagactgaaacgtccatggcatcctggcacctcatctttgcatgatgggagagatgaagctactaatgggctaatgtggatgagaggtggacctgtagaccaaggtctcaattccctaaattttcaaggagctggtatgttgccctggatgcagcagagactggatccaactttactaggaaatgatcagaatcaacagtaccaagccatgttggcagctggtttacagaacttaggtagtggatatctaatgaaacaacaaatgatgaattttcagcagccttaccactatcttcaacaatctggaaacagtaattctcctttgcaacttcagcagcagcaaccaattcaacaatctgtgtcttctaacatgctgcagccacaagctcacgtgttgacagagaacctctctcagcacctccttcagaaaccacataacaatcaagaagtccaagcacaacagcagcaacatacttatcaagactcgctcttaattccgagtgatcaactccatcagagacaacactctggcattccttcaccatcatattcaaaaccggatttcttggattcgagcatgaagttccctgcttcagtttctcccgggcaaaacatgcttagttcactttgtcccgaaggaagtggcagtctcttgaatttatccaggagtggtcagtccttgctgaccgaacagttaccgcaacagcaatggactcaaaaatatgcacctgtgcaggtcaatgcctatggaagcactgtgtcacatgcacaatattctggaaaagattctgtaatggtgctaccacattgtaactcagatgcccaaaattctacgctttttggtgtcaatatcgattcatctggccttctcctccccaccaccgtccctggttacaccacctcgtcagctgacactaattcatcaacaatgccattagcggagtctggtttccagggttctctatatggttgcatgcaagattcatcggagttgttgcaaagcgcagggcatgttgacccagaaaaccagactcaaacctttgtcaaggtttacaaatcagggtcagttgggcgctcacttgacatatcccggttcagcagctatcatgaactgcgcgaggagttggctcagatgtttggaattgaggggaagttagaagaccctcttagatcaggctggcagcttgtgttcgtcgacagggagaacgatgttcttctccttggagatgatccgtgggaatcatttgtcaataatgtttggtatatcaaaatactttcacctgaagacattcagaaaatgggggatcaagcggtagaatcccttgctctaggttcaggacaaaggctaaacggcactggtgctgagtctcaggacattgtttctggaccaccatcaatcggctcacttgagtactgagaaaactgaaacatgtattccttcagaccccatggtcaagagaatttctctacatgttttattacttaagttggaatatgttgtgtatgatctgttccccctttcagccctccttattattactatcagcattgaagaaaagtatacatttatgattaaaaaaaacccttaggacatgcttctgtgccaatttgaacttggagcactgcaagctagagttagtgttaatgctattttagcataatatttgatcaaacttttgcatgaactaatgtactctagataggaaactagagaaggctgtttatgcttgagctgtctttgtattctacaatgccattagttcccagttaaggggtcgaacttttaactcaaaatgtatgagtagtattttactatattgccattgaaaccatcaacccaccatacgacatgtctcttaaatgctactattttgtagctctattnaaaaaaaaaagtaaaaaaataaaaaaaaaaaaaaaaaaaaaaaagagggcngcgccgntcttataagagatatcaag

SEQ ID NO: 26824 - DNA, 619 bp, Glycine max
  Clone ID: TF_LIB4281-036-R1-K1-A6
ccacgcgtccgttctgttcatccagttccactctctcttttttttccctttgatttaatactctccaaatatgaattctttctcacaatctaacctctttttccatggtatttatactttccactttctggggcttccttttctcaattcttccacttggtgacacacacactctttccctcccttcttcaagttgtgaattttcgttgtggggtgcttttgttgctgcttccttgttctcttggcttccatttgagcctacaccactaggtgttcatggaaattgatctgaaccatgaagtgactgaggttgagaagaatgcattctgtgatagggaatgtgagaaaggtgtctggtgttacttgttggtcctcttccacttgttcatcctctacttcttcctcttcagcgcttgtgtcctcttcttaccttgagctttggcatgcttgtgctggccctctcacttctcttcccaagaaaggaaatgtggtggtctattttccacaaggtcacttagaacaagttgcatctttctctcctttcacaccattggagattcccacctatgatcttcagccacagatcttttgcagggctgcgaatgtccaactactcgcc

SEQ ID NO: 26825 - DNA, 631 bp, Glycine max
  unsure (1)..(631): unsure at all n locations
  Clone ID: TF_LIB4164-060-R1-N1-B1
cctacacccgtagacaaaagtaaaaaaccaaattatacatatctatttatctgtaacacaatctctgatatttctataatagtgctaaattctatcaagacaatgtcatatagttgctatatgaatcaaacagtcataacaaaccttcacagaacgccagtgtgaatttggccagcggactggatctaaatcactaataccagttatggtacccatgtatctggacaagaacatgatacagtgagtataggttcaaatgtttaaaaaaagaaaaagaaaaaggaaaacaaaaaaaaaacttggaaaagaccactgttatgaaggacaaacaaatattgttgtggctaaatcattcaaagcttttaaaattttggctttttatcttttggaagcacataagttatgcatcaacagtcatgaacaggagtgcacagcagagagtggcattaaatggcatacagaaaactattaatacaataataatggttagaaaccaacanatcagtaacataaaatggcaggaaccaaaatcgaggaaagctaaagggaactaaaatcgatttgctacagacacaactgttgaagtcacagtcacatatagataaagatttaaaggggtccaactaatact

SEQ ID NO: 26826 - DNA, 755 bp, Glycine max
  unsure (1)..(755): unsure at all n locations
  Clone ID: TF_LIB4391-012-R1-K1-E9
cacctctcaaaactaatttattaaaatatttaatttagtctttggaacctaattagtatctagaatctctaaattgagctacaattagccagtgtttcacaactagcatgaaacttgcctagccaaaaacaaactaacattcttaccttgaataagcaaaataaaagcaacagaaaaataaaagaaaaaaaaccaacaaaatagtaagaacaagaatgtaaaagtttcaggtctcggttgtgtttaagcttattacaatctctcccatagaagagataggtagtttgctccctgagctcaatttgtgcacatcctggcttgaacaaatgaagattcttttcaccatattgcagaattcaggccatggatcatcaccaacaagcatgccactgaatgccttccagcattggacatgtctaaatcaacaccaactcaggaattggttgccaaggatctccagggctttgaatggcgctttaagcatatatttagaggtcagccacgtagacacttgctcacaactggatggagtacttttgtgacttccaagagattagttgctggagacacctttgtgtttctgagagggaacaatggagaattgcgggtttggagtgagggcgtattgctcctctgcagagcagcatgccatcatctggtgatttctagtcagagcatgcccttaggagttcttgcaactgcatctcatggctgtagcaactcagactcttttttgttgnatattataagccaag

SEQ ID NO: 26827 - DNA, 1103 bp, Glycine max
  unsure (1)..(1103): unsure at all n locations
  Clone ID: TF_GmC88076_1
ccacgcgtccggtggcgtctggtccataactggggaggtaaactgattgcagtatgaagaagaagagcagcataaaggcggagctgtggcacgcttgtgcggggcctttggttaagcttcctccctccggcacgcacgtcatctacttccctcaaggtcacagcgaacaagtctctgcttctctcaacagagatgtccactctcaaatccccaactatcccaatctcccctccaagctactctgtctcctccacactctcactttgcatgctgatccccaaactgatcaagtctacgctcagattactcttcaacccctcccttcttttgacaaggatgctctcttgagatctgatctcgctctcgaatccaccaagccaccacctgacttcttctgcaaacaactcaccgccagtgatactagcactcacggtggtttctccgtccctcgccgtgccgccgagaagattttccctcctcttgattattctatgcaacctcctgctcaagaactcgtcgccagggatttgcacgacaccgtttggaaattccgccacatataccgtggacaaccaaaacggcatttgcttaccactggatggagtctgtttgttagtggaaagaggctttttgccggagactctgttttgttcattagagatgaaaagcagcagcttcttttgggtatcagacgagctaacaggcaacccaccaacatatcgtcatcagtgttatcaagtgatagtatgcacattggaattcttgctgcagcggctcatgcagctgcaaataatagccccttcaccgtcttttacaatcctagggctagtccctcagaatttgttattcctttagccaagtactacaagtcagtgtacagcaaacaggcatcacttggcatgcgtttccgaatgatgtttgaaactgaagactcaggaacaagaaggcatatgggtactgttacaggtatcagtgatctggatcctgtgcaatggaaaaactctcaatggcgtaatttgcaggttggttgggatgagtcaactgctggggaaaagcgtaacagggtctcaatctgggaaattgaacagngactgctccatttt

SEQ ID NO: 26828 - DNA, 716 bp, Glycine max
  unsure (1)..(716): unsure at all n locations
  Clone ID: TF_GmC86745_3
caaagttggggtaattaggaataatgtgcatctatttcccttgtggttgatgcagcaccctgctcactatgaccttgggaaaagtagacttcacgacttcccaacggaggcagagaaaccagagggccagcacaagcatgccaaagttcagaattcanaacattttttctccccttcttcttcagccggaggattaaatccagaagaagagagcttcatgcttggagctataacaataggtgaagttccaaacttagcaaaaactgaagcaccccaagttgaataaaagcattatgattattgtcataaaagtcgcaaattttgcatgcccctgtgaatcagaaatgatcctattgcgtagcctgcccaccccccaccccaaaaattgaagctacccacagaacaccatcatccaaagccacttccaatgcaacacccgaacctccttgctctcataacacgctcgaatccaaccctaattgcgaacctgaagttcaaaccctagcttcccagatctcaccgaaacggagctaaacagtggaattagagggattgggggagagagacgagtgaagtgagagtgacattcatgtgggatttcagtggaagaggcggagaatgtgatgtgtgtgtgtgtgtgtgagagagagagagagagacagagaaatgggccgaggctgcggtaccacgcaacaacaataatgccggacgcgtgg

SEQ ID NO: 26829 - DNA, 249 bp, Glycine max
  Clone ID: TF_701099624H1
ccttgctgagtaagttacggatgacgtatacgcacagatcacgttggtgccggaatctaatcttgatgatccgatgaaccctgacccgtgcactgctgttcctccaagtgcaccagttcactcgttcatcaagacttgacagcttcagataccagcacccatggtggcttctctgttctcaggcaacatgccatggaatgccttcctgcgttggacatgtcacaaccaggcccatctctggaattggtt

SEQ ID NO: 26830 - DNA, 3859 bp, Glycine max
  Clone ID: TF_GmC570_1
tgaaactgacgaggtgtatgcacagatgacccttcaacctgtaaacaaatatgagaaagaagcaatactggcatcagacatgggtctcaaacaaaaccgtcaacccactgagttcttttgcaaaactcttacagctagtgacactagcactcatggtggattttctgtgccacgtagagcagctgagaaaatattcccacctttggattattcaatgcaacctccagctcaggagcttgttgccaaggatttgcacgacaatacatgggcatttagacatatttatcggggacaaccaaagaggcatctattgactactggatggagtgtatttgtcagcactaaaagactgtttgccggagattctgttctttttatcagagatgaaaaacagcatcttcttttaggtataaggcgtgctaatagacagcaaccagcactctcttcgtcggtgatatccagtgacagcatgcatattggcattcttgctgctgctgctcatgctgctgcaaataacagcccattcactatattttacaatccaagggctagcccctctgaatttgttgttccattagccaagtataacaaagtcacgtacacccaagtttctcttggaatgagatttagaatgatgtttgaaactgaggagtctggggtacgcagatatatggggacaatcactgggatcaatgacttggatcctgtccgatggaaaagctcacagtggcgcaatattcaggttggatgggatgaatcaacagctggtgaacgccccagtagagtttcaatctgggaaattgaaacagtgttgactccgttctacatatgaagacctcgatttttgaggaaaaagatcccccgagaatcaggggtgctagatggcgtaatgttccaggcaccaatcatgattagagtggggcagacactggcaaatcatgttgggttgagtattaagataactcccatacctcctttattcggtaaagtggaattgatgaacatgcacaataaaaaccaatcaacttctgcacatttattagttgagcactcaattaatctaattaaacctctgccgggtgaggttccaattaatagtactaatcctttatgcagcattcagattactgtcgtttttccggggagtttgaatcacgacaactgcactctactgactcaaaccacgccactttaaaagtcgcctgtgtcatgtcctcagctgcaacaattgcagcatcaactacatctgaagcggcagcaacaacaccgacagcatcagcatcagctgctagggattgaacaacagcttcaggttcattcattgttggatgtagcaatataccatctccagcagcagagggaacaacatcttcctgaacgacaaaatttggcatggatgtgtaaactggctccacagctaggacagaaggccaaggaccgagaggcaagtaatcaatgtggatcttgaaataggcggttttcctgttcctaataaatcttggagaggatttgaaaacagtgaacagcgtatggggaaattcacatataacgaggtaccgcaaatgagcttggatggggatctaggtcaagttcccgactcaaatcattcttgtaatggacaagataatggcaacgcatagatgggaaagcttgcttctaactgtggcagctacaacaacagcagacacaattgaaactatatccattgcagttgttgcagtaaaacctgcgagagatggcacaacaacaaaccccatccaattaaatgttagtgcttaatcctacagagctacaactccaactgcagttgcaacagaaattgcagcagcagcagcagcatcaacaacgactactttccacgtctaccccacttttgctgtctcagcttctacaacaacaaaatactcaccaacaaaaccagcaattaccgcagcccctgccgcctatatctcagcatcaacctcaacaactaggcaataacgcattctcaacagagaagcttctcaacagcaacaacttatcttcgtatcttatgcaatcacagaaggtttcaatgaaccatccccagaatacacagaaatcacttaccatcactagagctccctctacactaactgagggagatgccccatcatgctcaacctctccatctactaataactgccaggtgactcccccaaacctcctgaaaagaaatcagcaattaccagccacattaaggggaagtttgatagttgagcccactagtaatctgatacaggagcttcacagtaagcctgacacgcagatcaaacaggagtttctcaatgtaaaaggacctgaccagttgaagtataaagggacaattactgatcaactagaagcttcttctggaacatcttactgtcttgatcctcctggtaatgtccagcagaacttgccactttccaacttctgcatggaaggggatgtccaatcacacccaagaaatagtttaccatttgactccaatctggatggtctaacacctgatactatgctctcaaggggctatgactctcaaaaagatcttcaaaacttgctgtctaattatggtggtgctccaagagacattgaaactgagctgtcaactgctgacattagtccacagtcgtttggggtgccaaacatgccttttaagcctggatgctcaagtgatattggcatcaatgatcctggggttttgaataataataatggcttgtgggctaatcaaactccacgaatgcgaacatatactaaggttcaaaagcgtggctctgttggaagatgtattgatgttacccgttacaagggatatgatgaactccggcatgatttggctagaatgtttgggattgaagggcagctagaagatcctctaaggactgattggaaattagtatatgtggatcatgaaaatgacattcttcttgttggtgatgacccttgggatgaatttgtaagctgtgtccagagcataaagatattgtcatctgcagaagtgcagcaaatgagcttggatggggatttaggtggtaatgttccaatccccaatcaagcttacagtgggacagacagtggcaatgcatggaggggacagtatgaagataactcagctgcctcctttaataggtaatgatgtcaaatgctgacgcttaagagagatcaacttgtgcatttcaagtggtggtggagaaccaacttcttaacctaacaaaacttctggttggtgcttctcaaatggaaagtacacattcattacaaatgatgcagtttattggggattgtattagaggtggactggacccataactgcatcctagttctcttcaccacaccacttttgatggtgagaaagtttagatcctcaaatgtagcaagagcagtttcccttacactattaatgctacagatcctataacttcggaatcagcttttcttgtggttgtttgattaggatttctttttcattttttgcaagggacaacagaatagggcagctagtgtataatatgatcgttctgatataaacattaatttttacttatctcttgtaaatcttgtcatggttaaagttgtatacggaagtttggtgtctaagtgattgcccagagcctgagacaacgaagaatgcatgccaattctagctcttgtataaagtgcctacgatgtttccacggtgtccattatggatgaagaaaaactcagtttctttttaaactcttcaattttggaattaatgtgcttcaattacaattagatatttgcgcgtccaagagagacagctttgacaaatagtttcaagatgccttcaatttccacctgtaaatttcaatggaaattcttttacctttattct

SEQ ID NO: 26831 - DNA, 2485 bp, Glycine max
  Clone ID: TF_GmC318_1
ggctataccattagcgaagtatgttaaagctgtgtatcatactcgagtttcagttggtatgcggttcaggatgctgtttgaaacagaggagtcaagtgtgcggagatacatgggtacaataactggcattagtgacctggatcctgtccggtggcaaaactcacattggcgctccgtcaaggttggctgggatgaatccactgcaggagacaggcaacctagagtgtctctttgggaaattgagccatttactacatttcctatgtatccatctccattcccccttaggcttaaacggccatggcttccaggattgcattcattccatggcatgaaggatgatgattttggacctaaatcaactctgttgtggctccgagatcctgatagaggacttccgtctcttaagtttcttgggattgggattaatccttggatgcagccaagatttgatctcaccatttagaatatgcaaacagacatgtaccaggctgcggctgtacaagacattaggagttttgatccttcttcaaagcagtctgcttccttacttccatttcagcaaccacagaacttcccaaacaggactgctgctttaatgcaggcccagatgttgcagcagtcacaacctcagcagatttttggaaatactcaagagaatcaacattccccacaatctcaggctcatcttcagcaacatctacaacatcaacactcgttcaatagtcagcatcatcatcaccaccagcaacaacaacagcgacagcaacatcaagtggtagataatcaacagatttctagtgcagtctctacaatgtctcagtttgtttcagctcctcaacctcaatcaccacctatgcaagttatctcttccatgtgccaacagcaaaacttttctgattcaaacgggaacactgtgactactattgtttctcccctgcacagtatcttgggttcttttccccaggatgaaacatctcacctcctgaaccttcctagaacaagctcttggattcctgttcaaaattcaagtgggtggccctcgaagcgtgttgcagtggatcctctcctttcttccggagcctctcaatgtgttctacctcaggtggagcagctagggcagccacagagtaccatgtctcaaaatgctatttctttaccaccttttcctggtagggagtgctcaatagaccaagaagggagcaatgatccacaaaaccatctcttatttggtgttaatatagagccctcgtcccttctcatgcctaatggaatgtcaagccttaagggggtctgtggaaacaatggctcctcaaccttgccatatcaatcttctaattatctgaatactaccacacggactgattcttcattgaatcatggaatgacccccaacataggcgactcgggtttcctgcagtgtctggaagaggcaggacaaggaaacccactgaacaaaacctttgtgaaggtttataagtcagggtcctttggaaggtcattggatatcactaaattcagcagctaccatgagctgcgtggtgaactcgctcgaatgtttggccttgaaggcgagttggaggaccctgtgagatcaggctggcagcttgtatttgtagaccgagagaacgatgttcttctccttggtgatggcccctggccggaattcgtaaatagcgtatggtgcataaagatactttctcctcaggaagtgcagcagatgggcaacaatggccttgagctgttgaactcgtttccaattcaaaggctctctaatggcatctgtgatgactatgtgagccgtcaagacccaagaaatttaggcactgggataacaaccgtggggtctttagactactaaatagtcttcacttcttctatcacatgtaatattattacccttacttctcaaccctttctttgtgtacggtgggaagcacctttgcctaagtgtagtttacatagcctactctttagcctttggatgttttcctgttttttcctgctaggacatttcataaactaatactgtaactatatggcatctagtcattgtgctagccacaatatatacgatacttaatccgttaggaaatcaatgcgtgagatatgttctcttaacttgtacagaactttttctttctagtttggaaataatcagaatcagcagggctttctggcgcagcagcagtaacaagggcaacgtctgcagttgcaacatccacaagtggtcgatcatcaacagatttcaagtgttgtctctacaaggtctcagcttagcacagcagctcaatgtcaattaccacccatgcaagctatctctacacttggccatcagcaaagcttttctgattcaaatggaaaccccacgactactgctattgtttctcccctgcataggatataggattcatttcctcttgatgacacatctcacctttttaggctttctagatacacttgttgcgttcctgttcaacattct

SEQ ID NO: 26832 - DNA, 848 bp, Glycine max
  Clone ID: TF_GmC630_6
tgcgagaagacgacagaagggggagagaaagagtggttgaaagcgtccattgaaggtagagagagagaggttttgggaattggtgctgcttcgtgtctgtttatttcctcgcgaggtttgagaattcagtgaagagaaaacggagtttccgatcctgcgatgtcctatatgatagatctgtgaggaaattgaactgaaaaaaaaaatggcgacgtcggaggtatcgatcaagggaaattcggtaaacggaaaaggagataacagttctggtgatgctagaaacagtggaggcgaggctcagaatgcttcttcatcatcatcatccgcgagaggtaacgtggtttcctctgcgtgtgccttgtggcgtgtttggcgtgacgataacaagtttttttttggtttcagacgcggaagctgcgctttacagggagctgtggcacgcgtgtgcaggtcctctggtgacggtgcccagagaaagagagcgcgtgttctactttcctcaaggacacatcgagcaggtaggtaactcataactgttcctccgaactcagattcggtggagtttctcacgaactcggacttggctgcctctataatgaaatttgatggctttctatttatgacgagtgagtgtttgtttttatggcacaaacacgcattaggtggaagcgtccacaaatcaggtagcggaacagcatatgccggtttacgatctaccacccaagatcctctgtcgggtcatcaacgtcatgctcaaggtagtaaccaacgcttaattatctctgtttttcaagagctaagtttgtaaatgaacttgttttttaatgttatggtacttcgtttttggc

SEQ ID NO: 26833 - DNA, 2685 bp, Glycine max
  Clone ID: TF_GmC340_4
atcgtgccgtgcggtgtacagaattagaattagaaagagaaagagaaagagggggggtcgtgtcggcttgaaaccaaacacgaccttatcggcgatccaatttcgatctgtgcaaatcgtaaaccctacctacttgcttctgcaattctggtggactggatccattttcatctcaattctcagtaagttggggcacatcacacaataactttgacatggcttccgctgcgccaggtgcaaccaatgatgctttatacaaggaattgtggcatgcctgtgctggaccccttgtcactcttccgcgtgaaggggagagagtttattacttccctcaaggtcatatggaacagcttgaggcatccatgaatcagggattggagcagcaaatgccttcctttaatctgccttctaaaattttatgtaaagtggtcaatgttcatcttcgagctgaacctgaaacagatgaagtatatgcacaaataactttgcttcctgaagcagatcaaagtgaggtgacaagccctgatgatcccctgcctgaatctccaaggtgtacagtccattcattttgcaagacactcactgcttctgacactagcactcatggaggtttgtctgttcttcgaagacatgcacgatagattgtttgccaccactggatatgactcagcagcccccatggcaagaattagttgcaactgatctgcatgggaatgaatggcattttagacatatttttcgagggcaacccaagcgccacttactgaccactgggtggagtgtctttgtcagttccaaaaaattagtggctggtgatgcctttatattcttaaggggtgaaaatggagagctgcgagttggagttaggaggctcatgagacagcaaagcaatgtgccatcttctgttatatccagtcacagtatgcatctgggtgttctggccactgcatctcacgccattgccacaggaacattgttttctgtattttacaagcccagaacaagccggtctgagtttattgtgagtgtcaacaaataccttgaagctcgaagtcataaactttctgttgggatgagattcaaaatgagatttgagggtgatgaaattcccgaaagaaggttcagtggcacaattgtgggtgttggagataataaatcatcgtcggtctgggctgattctgagtggcgatcattaaaggtgcaatgggatgaaccatcctcaattttgcgtcctgatagagtttcttcatgggaattggagccacttgtgtctacccctcctacaaacccccagccatcccaaagaaacaagagatcgcggcctcccattctaccttcaacaatgcctgattcttctctgcaaggtgtatggaaatcaccagttgaatctgcaccattctcttattgtgaccatcaacatgggcgagatgtctatccatcaaccaatttcaattccactgcaactggttttcttggttttggtgggaactgctatgcttccaacaagtcaatatattggtccagtaggatggaaaactccacagaatctttttctcctgtagcacttaaagaatttggagagaagagacaagggactgcaaatggctgtagactctttaggattcagttacatgacaattctaattctaatgaagaaagtctaccaatggtcactttgtcaggaaggatgggtgatgatggcccccttccatctttggatgctgagtctgaccagcattctgaaccatcaaatgttaatcgatctgatatcccttcggtaagctgtgatgctgaaaaatcatgcctgcggtctccccaggagtcacagagcaggcaaataagaagttgcacaaaggtccacatgcaaggtatggctgttggaagggctgtggatttaacacggtttgatggatatgaggatctgctaaggaaattggaagagatgtttgacatcactggtgagctctgcggatcgacaaaaaaatggcaggttgtgtacactgataatgaagatgatatgatgatggttggggatgatccatggcttgaattttgtagcattgtgaggaaaattttcatctacactgcagaggaggtgaggaagctttcacccaaaataggacttccaatcagtgaagaagttaaacccagcaaaatggactctgaagcagtagccaatcctgaggatcagtcatctattgtggggcctggttgctaatgtcttaggtcttccaacatttcagttgttatatatatatacaatagatattggcatgaaaataggaagtagaacgtgagagaaacgagtatgtacctggcaagcccttcatcatggcctataaggagcatatggttagtgtattctgcatctatacaggagcagcataacagcaccaaagcagagggcttggggtattgtggcttttctctttctttcatagctctgtaatcaccgagtttcgatgccttgcttgttcagttttgtattggttgcgagcgtgcagaaatgtcttgttttttttttttggttgcgagcagcataacagcaccgaagtatcttactatgtatgcatttggattttttttttggttcttttgtaattcacttgttatgatgcatcatctcatttatgtatatataactttctattatatacatactatttaatgtatgtatatcgagcc

SEQ ID NO: 26834 - DNA, 3224 bp, Glycine max
  unsure (1)..(3224): unsure at all n locations
  Clone ID: TF_GmC715_1
gaagttgcagtaggctaagctgaatctatagactagagtagagtaggggtccgggaaatgagtgattaacttctcaaactgagagagagagagagaaagagagagagcactgaagtgaagagtgcattgtgatatgaggaagcaacaacgttggcaagttggtatcgtggattgaggtggtcttttgggggaaaccatcaacgacaacgacagcatcaaaaggaagagaaagacccagaaacgggaacggctttcagaaactcacaagcttttcaaaaagagcttcaaagtgaaggaaaaaagtgccctttgattcttggtcaccacaacgccaagacaaacaacaaacaaagcaaaacacacacacacacacaagcaaactagaggagccaccgcaacatgttttctgtaaccgaatgctataattcaagggagttggtggtggtggttgttacagaatagaaagagaaaaaaaagcatttttgtagtttggaattatcattgctactacttcgnctactacacacatttaactgtcatgtctgggtggtgaaaagagctttctgttgtgttggctttgtctttcttgtgtggggtttgtttgctggtgaattcggctcggggttttttaatgatgaaatttgaggggtgtgtgaatgacccttttcccctgtgaggattggggaaattggggtggagtaaagttgttaactttctcagagaccatgcaggggcattgagcttgtgttcttgtttcttctcttctcacttggttttgttttgtggcaggtttgaaggatgatgatctgtatagagagctgtggaagctatgtgcagggccattggtggatgttcctcgtaatggggacagagttttctacttccctcaaggtcacatggaacaattgcaagcatctacggatcaggaattgaaccaggaaattccccatttcaatctcccggccaagattttttgccgtgttgtgaacattcagctgttggcggagcaagacactgatgaggtttatgcttgcatcgctttacgtccagaatcagatcaaactgagcctacaaaccctgatccaaatgtagtttaggccccaaaactatataatatctaagcttgaggtagattaactgcctctgatactagcacacatggaggattttcagttttgcggaagcatgctactgagtgcctgcctgaattggacatgactcaatcaacccctactcaggagttggcagcaaaggatcttcatggatttgagtggaagtttaagcatatatataggggtcaaccaaggaggcatttgcttacaactggttggagtactttcgttgcatctaaaagattggttgctggagatgcttttgtgtttctaaggggagagcatggacaattgagagttggtgtcagacgtttagcgcggcagcagagtcctatgccttcatctgtgatatcaagccagagcatgcatctcggcgtgcttgccactgcttcccatgctgtcatgactcgtacaatgtttttggtttattataagccaaggactagccagtttattgttggtttgaacaaatatctggaggcagtcaacaataaattttcactcagcatgcgattcaagatgcgattcgagggagatgactcacctgagagaagattttccggtactattgttggggttggagacgtgtctgcagggtggtcaaattctcagtggcgctcattgaaggttcaatgggatgaaccagcaacaattccaaggccagatagagtttcttgttgggagatagagccttttgtagcttctactgctttgaatgtcacacaaccagcagttaagggtaaaaggtctaggcctgctgatgttttatcttctgctgcttcaggtttctggtatcatggttcttccaatgagcttagtcaattaggtgctgctgctgaggtccaaagcaaggaaaatcaggttgttccatgctctctgaggcagaaagacattattaatagcaatcctattaatgctaataactctagcatcagtactagagtccgaatggaaggagtatggccttcttcaccacatttgaatgccactccaaaccttttttctgatcccaataacaacaacagcaacaacggcgtttcggcacgatcactgatctctggttatcctaatgttccatctagatcaagtgatggtcccacatgcgacggtgtggaagatgggaaaaagactgagaactcccttgattgctggttatttggagttaatttgactaacaattgtagcaacgttattactactccttcagagagggaacagagaggtccaagctcaagtgttgttcttagtggtcccaaagaatctattcctgcagctgcatgtgaaactgagagggttcagactcccaactattcactgtccaacaaagggcagaagcaaattatttctgaggcatcaccaaatcagtggcagaacaagcaggccactgtactatccatgaggacgcggactaaggtgcaaatgcaaggtgttgctgttggtcgtgcgtttgacttgaccacgttgagtggctatgatgatctcatagatgaacttgagaaattgtttgagatcagaggagagctgcgttcacaagacaaatgggctgttactttcacagatgatgaaaatgatatgatgctcgcgggtgatgatccatggccggagttctgcaacatggtgaagaggattttcatttgttcaagggaggacttgaagaagatgaaatgctgcaagttacctgcttcttcatcagaggttgaagagattctattgagtccagattcacagaatagggatgagactcagcagtctcacatgccttagacaacttggcttttttttttttttttactttttttggggtttgggaagtgaaagatatctgatggcataggttgcttaattttatggaactttcaaagcaactgcagattagtggactaattatataatatgaaagcaataggtagtgcagttggattttaggtacttatatttgtgaatacccttttttttctttttcttttttttatcctagagtgccatcagcttgtaaacaaatatgcttttcccatctctaatggattgtttgtctgtgatgtgtcggtttcttctacatataaaaaaaaatgatgttttgctaaaaaaaaaaaaaaaaaaaaaaaaaccttg

SEQ ID NO: 26835 - DNA, 2013 bp, Glycine max
  Clone ID: TF_GmC769_2
tattattctgagtgtggtgcaagccacctatgtactatttttcctttacttatgcaaaagctacctttgtactatttttcctttacttctgcacaagccacctttgttttgcaggtacatgggtacaataactggcataagtgacctggatcctgttcgttggccgaattctcattggcgatctgttaaggttggttgggacgaatcaaccgctggagagagacagccacgggtatcattatgggaaattgagcctttaacaacgtttccaatgtatccatctctatttcccctcagattgaaacgaccctggcatccgggcacctcttcttttcatgatggcagagatgaagcaactaatgggcttatgtggctgaggggtggacctggagaccaagctctcaattccctgaattttcaaggttctggtttgttgccatggatgcagcagagaatggatccaactttacttgcaaatgatcataatcagcactaccaagccatgtttgcatctggtttgcagaacttagggagtggagatttaatgagacaacaaataatgaattttcaacagccttcaattatcttcaacaatcaggaaaccccaatcctcctttgcagcttcagcaaccgcaagcaattcagcaatccgtatcttctaataatattctacagccacaagcccaagtaatggcagagaacctgtctcagcacctccttcagaaatcacacaacaatcgagaagaccaaacacagcagcagcagcagcagcggcacacttatcaagatacagttttacttcaaagtgatcagctccatcagaggcaacactctggtctaccttcaccgtcatattcaaaaccggatttcttagattcaagcatgaagttccctgcttcagtttcaccaggacaaaacattcttggttcactttgtcccgaagggagtggcaatctcttgaatttatccagaagtagtcagtccatgttgactgaacagttacctcaacaatcatgggccccaaagttcacaccattgcagattaatgcttttggcaactcaatgcaacatgtgcagtattctggaaaagatactgcaatggtgccaccacattgtaacccggactcccaaaatcctattctatttggggtcaacattgattcatctggccttctgcttcctacgactgttcctcgttatactactgcatcagctgaaattgatgcatcagcaatgccattaggagagtctggattccagtctcctctatatccttgcgtgcaagattcatcagagttggtgcaaagtgcagggcaagttgaccctcaaaaccagacacgaacattcgtcaaggtttacaaatcagggtcagttgggcgctcacttgacatctcccggttcagcagttatcatgagctgcgggaggagttggcacagatgtttggtattgaggggaaattagaagaccctcttagatcaggctggcagcttgtattcgtcgacagggagaacgatgttcttctccttggagacgatcccgtgggaatcatttgtcaataatgtatggtatatcaaaatactttcacctgaagatatccataaaatgggagaacaagccctggaatcccttggtccaagtccaggacagaggctgaatagcactggtgcagattctcatgaaattgtttcaggactaccatcaattggctcccttgaatactgagagaattttaacatgtatttttctctcaggtcctacggttaagaagactattacatatccacatgtttagtacttctgtttgaacactacttttcgaccttgcatatctgaatcaatatatactgtattgtctgtttcactttcaaaaacatcgttattatttcgtagaggattgttgagattttcaggacaaaaaatctatattatatatatgatgagaaagaaacctaggacaaacttttgtgccaatttgtaaccttgtgttgacatagagttaaaactattgtagc

SEQ ID NO: 26836 - DNA, 791 bp, Glycine max
  Clone ID: TF_GmC88076_3
ccacgcgtccgcggacgcgtgggcggacgcgtgggggaaagaaaccattttttggtgtgtcgaagcgagcgtggcgtctggtggaaaactccggaggtcaactcaagagaaagagagagtaatgagcattgcattgtgtctcacacactctttgaacgcatcctcctaatgaagacgacgcagcagcctgaagctcctcaaggcgatccctgtgaagagaagaagaagagcataaaccctgagctatggcaagcttgtgcagggcctttggttaaccttcctccctccggcacccacgtcatctacttccctcaaggtcacagcgaacaggttgctgcttctctcaacaaagatccccactctcaaatccccaactatcccaatctaccttccaagcttctctgtctcctccacaatctcactttgcttgctgatcccgaaactgatgaagtctacgctcagatcactcttcagccagtcccttcttttgacaaggatgctctcttgcgatctgatctcgccctcaagtcctccaagccacaacccgacttcttctgcaaacaactcaccgccagcgatactagcactcacgggtggtttctccgtccctcgccgtgccgccgataagattttccctcctctcgattattctatgcaacctcctgctcaagaactcgtcgccagggatttgcacgacaccgtttggacattccgccaattttaccgtggacaaccaaaacgtcatttgcttacactggatggagtctatttgttagtggaaagaggctctt

SEQ ID NO: 26837 - DNA, 2265 bp, Glycine max
  Clone ID: TF_GmC339_1
ttaggcttgttcctttgaccagaaacgagggtgattttgaggatgatgctgttggaggcatcaatggatctgaaaataaagataaatccccttcttttgccaaaaccttgacacagtctgatgccaacaatggtgggggcttttctgttcccagatattgtgctgagacaatttttcctcggttggactattccgcggaccctcccgttcagaacatccttgccaaggatgttcatggtgagacatggaaatttaggcacatttataggggcacgccgcgccggcacttgttaactaccgggtggagtagctttgtgaatcacaagaagcttgtggcgggggattcaattgtgtttttgagggcagaaaaggatgatctgcgtgttggaattcggcgggctaagagggggattggaattggtggaggacctgaggctcctgcagggtggaattcaggtggggggattcgtcctatgccttatggagggttttcagcttttttgagagaggaagatagccagctcttgagaaatgggttgagtccaaatgcaaaggggaaagtgaggcctgaagcagttattgaggctgcaactcttgctgccaatatgcagccatttgaggttgtttactatccccgggcaagtgccccagagttttgtgtgaaggccaatttagttagagccgcattgcaggttaggtggtgtcctggaatgaggttcaagatgccctttgaaacagaggactcctcgcggataagctggtttatgggaaccatctcttctgttaactttgctgatccaagatggcccaactctccttggagacttctccaggttacatgggatgaaccagagttacttcaaaatgtaaaaagggtgagcccgtggctggttgaaattgtatcaaacatgcctaccattcatctttcccattactcaacacaacaaaagaagccaagattccctcaacacccggatttttcttttgatggtcagatttcattgccagcatttcccagcaactttctaggtccaagcaatccgtttggttgtctagctgaaagtactcctgctggcatacagggagccaggcatgctaattatggtatatccctatcaaatctccacttcaataaactgcagtcaggcctatttcaagctggtttccctccacttgatcacactgcttccccagtattgagagtctcctccaacaatgcagcaacaatgcaaaaggtcggcacgggtgacaacgtctcttgcttactgtccatgtcaactgctactcaaccttcaaagaaagtggatgatgtgaaggcaccccaattggtgctttttggccaaacaattctcaccgaacagcaaatttctttgaacacctctgctaagacagatcctactcgaaataattcatttgatggaaatgctgataaaatgtgcaagttttcagatggttttggttatgctcttcacccacaaggctcttctcttgagaggttacagtggtacaaggatcaacaaaaagaaaccatggctagtttggagacaggtcactgtaaagtttttatggaatctgaagacattggtcggactatggatctcacaatgcttggatcttatgatgaattgtatagaaagctggcagacatgtttggcatagaaaaatctgtggtgctaagtcacatgctttaccgtgatacaactggggcagtcaagcacattggagatgaagcattcagcgaatttaccaaaactgcaaggaggttgaccattctaatggattccaacagcgatggtagaggaatctagaggaagaaataaacaattatcatttcaattgtacagctggttgatcaatttctctggagagtctcatctaatttatggatattaatgtttttctcgaagggcctatttggatttgttttttttcttttagtgatgatagctcgtggttttccttctctttttggatcataacatggtttacttgaggcttttgtttaataattctgatgtgaaaaaaggtgggggagagaagagaaagggtagtgatcatatatccctatgaatacgattggttcataggagtttcctgtatacaatggtttttaagtgtaaaaaaagctacctaggcttaatggttattgagacagtagttacctatttttttgttctgtgtttttaccactgtagttacctatttcattttcttgtgactttcgtatgcaaaaggaaagaaggggaaaggggggggggggtaggt

SEQ ID NO: 26838 - DNA, 471 bp, Glycine max
  Clone ID: TF_LIB3242-311-Q1-J1-H3
gtggttgaaagcgtccattgaaggtagagagagagaggttttgggaattggtgctgcttcgtgtctgtttatttcctcgcgaggtttgagaattcagtgaagagaaaacggagtttccgatcctgcgatgtcctatatgatagatctgtgaggaaattgaactgaaaaaaaaaaatggcgacgtcggaggtatcgatcaagggaaattcggtaaacggaaaaggagataacagttctggtgatgctagaaacagtggaggcgaggctcagaatgcttcttcatcatcatcatccgcgagagacgcggaagctgcgctttacagggagctgtggcacgcgtgtgcaggtcctctggtgacggtgcccagagaaagagagcgcgtgttctactttcctcaaggacacatcgagcaggtggaagcgtccacaaatcaggtagcggaacagcatatgccggtttacgatctacca

SEQ ID NO: 26839 - DNA, 2627 bp, Glycine max
  Clone ID: TF_GmC896_1
ccacgcgtccgcctttctttgactcagagagatctaagagcgcaaaaaacaaaaaccagctcgtgcttgtactttgcgcgatgaatctcctttgaagaaaacagaaacttcaaaaagcacattattttctcttttgaacacactctgttttttttgttgtttccatgaaggaaggtgaaaaggtattggatccgcagctatggcacgcgtgtgcaggtggcatggttcagatgccgcaaatgaactccaaagtcttctacttcccacagggtcacgccgaacacgcccacaccaacattcatctgaggcttccaccattcattttatgcaacgttgaagcagttaagttcatggcgaacccagaaaccgacgaagtgttcgcgaagctgagtttgcttcctctcagaaactcggaactcggtgctgactcggacggtgctggtggtgatgacgtggcagaaccttcttgttgtgaaaagcctgcgtctttcgctaagactctgactcagagcgacgccaacaatggtggggggttttcggttccgcggtactgcgcggagacaattttcccgcgtctggactacacggcggagccgccggtgcagacggtggtggcgaaagacgtgcacggcgagacctggaggttccggcacatctaccgagggacgccacgtaggcacttgctgaccacagggtggagcagtttcgtgaaccagaagaaactcgtggctggggattccgttgtgtttctgagggctgagaatggtgatttgtgtgttgggattcggagggcaaaaaagggaattagcgagggttcaggttcaggttcatcatctgtgtggagttcagcttctgggtctggaaatggaaattgtgggattgggccttatgggcctttttcttttttcttgaaagaagaaaacaaaatgttaaggaatggttgtggtgggaatttgagtggaagggtaaaagtgagggctgaggatgttgttgaagctgtgactcttgctgctagtaacaagccttttgaggttgtgtattacccaagagccagtactcctgagttttgtgttaaggcttcttctgtgggggctgctatgaggattcagtggtgttctgggatgaggttcaagatggcctttgagactgaggatgcttcaaggataagttggttcatgggaaccattgcttctgttcaggttgttgaccccatctgctggcctaattccccttggaggcttcttcaggttacttgggatgagccagatttactacaaaatgtgaagcgtgttagcccgtggcttgttgagttggtatctaacattccactcattaatttcacacccttctctccaccaagaaagaagctgcggccacaacacccagacttcccccttgatgttcaatttccaataccaatgttttcaggcaaccagcttgggcctaacagccccttgtgtggtttttcggataatgctcctgcagggatacagggagccaggcatgctcaatttggaaaatctctatcagatctccaccttaacaataaactgcagttggggatgcttccaactaatatccatcaacttggagtgtataatgagatttcaaatggtaacatgatgaccaaccatgataagagcaaagaaagtttatcatgctttctgaccatggggaaatctaccaagagtttggagaaatctgatgatgttaagaaacaccagtttttgctttttggtcaaccaattctcactgagcaacaaatttctagctgttctggagatgtgttgtctcaccgaaaaagatcggtaagtgatgataaggacaaagcgaagtgccttatggatgactcgcaatctacactctcacagcagttttcaccaggaaaagcatcttctgctgagttctcttggcaacttggcttggatactggtcattgcaaagttttcttggagtcggaagatgtaggaaggaccctagacctatcgctgtttggttcttatgaagatctgtataggagacttgccatcatgtttgggattgaaaggtctgagattttgaaccatgtgctctaccatgatgcagctggtgctgctaagaaaaccggagaagaacccttcagtgacttcatgaagacagcaaaaagattgacaattctgacggattcaagcagcaaaaacattaaaagggcctttattacaggaactcgtaatggtgaacatggactagatgcatcaaacaaaacaggccctctgagcatatttgcttaaaatatgctatagatagcatctgagacattgttgagatctgagtagttgaaggacagtcctaactctatttacctctgcaaagactgaacatgagctgaatcttttatcatggttgttactattgtgtactaaaaacaatatctatcaaggttggcttagttgtttattagtgtacaaataatgatgccattatcatggtcaactgttattgtaatattaaccaagatttggaccccatttggcaacttgcttcttttcttttccttatttttttgttcattgtgctctcacactcacatgctgctgcctacgtgtctccacgtcaccagtgctcaataaattgtgcaaagttggtat

SEQ ID NO: 26840 - DNA, 656 bp, Glycine max
  unsure (1)..(656): unsure at all n locations
  Clone ID: TF_GmC82302_1
gggtcgaggacgcgtcaggttggttttggcgttttgatttgtgcagccacatggattccaatgctggggtttttgtcctatttgtttgagatttggtgtgacttgaatccttcgatgttaagttgttgaatttggagagcttgtgctgtgtggaagttggagttagaaattagttgcatttgagggaaaagggtcagtttttttgttgatcctattcttccatatgagtggacaattttgtgttcgttttctgtggcagtgctggacgaattgaagtttgaattgtcttgttatgaaaatcctgtgggacaagggcaaatcttgttgctagaaaaggccatgtggtgaatttgttttgcggtcattgttttttttttataggtcgtaatgaaggctccatccaacggttacttgcctaattctggcgaaggggaaaggaagacaatcaattcagagttatggcacgcttgtgctggacctttggtttctttgcctcctgttggtagtcttgtggtttacttcccccaaggacacagtgaacaagttgcagcttccatgcaaaaggaggctgacttcataccaagttacccttaccttnncatccagntgatttgcatgcttcacaatgntgcggtgcatgctgatcctngaactga

SEQ ID NO: 26841 - DNA, 634 bp, Glycine max
  Clone ID: TF_LIB4280-026-R1-K1-G4
ccacgcgtccgcttctgtcgcgtcctcgatgtcaagcttcatgctgaggaagggagtgatgaagtttattgccaggtggtgctggttcccgaaagtgagcaagtgcagcagaagttgcgggagggggaatttgatgctgatggtgaagaggaagatgctgaagctgtgatgaagtcgacgacgccccacatgttctgcaagactttgactgcttctgataccagcactcatggtggattctctgtgcctcgtcgcgccgcggaagattgcttccctcccctggattacagtcaacagaggccttcacaggagcttgtggcaaaggatctccatggccaggaatggaggtttcgacatatatatagggggcagtcgcagagacacctgtttactactagagtgtagtggcttaggagacaagtatgaccttagttcttgggaacagtaattggtttttgcatttcaaagctgggaaagaacattcaagtactttcaagttcctttgtcaataggcaagaccaatacactgtggaaggagtgcagaatcttggagacaaagcagtgatgtgccataggctaaatttcagaactgcagtattttactgccctgaagtccgtgaaacacagctttcat

SEQ ID NO: 26842 - DNA, 687 bp, Glycine max
  unsure (1)..(687): unsure at all n locations
  Clone ID: TF_LIB4390-057-R1-K2-C10
gttaaagctgtgtatatacacgagtttctgttggcatgcgatttaggatgctatttgagacagaagaatcaagtgttcgccggttggctgggatgagtccactgcaggggagaggcagccaagagtttccttgtgggagattgaacctttgacaacattcccaatgtatccatctccattccccttaaggttgaggcgcccttggccatcgggcttaccttctttatatggtctcaaggatggagacatgggcattggttctccattcatgtggctccaaggtgggcttggggatcaaggaatgcaatctttaaacttccagggngcttggtgttacaccatggatgcaacctagacttgatgcttctataccaggtctccaaccagagttataccaagcaatggcttcttctgcattccaggaaataaggacaatggatccttcaaaatcttcgcaatctctgntgcagtttcagcagacttcgaatgttcccagtgctcatgcttctgaggtacagaggncagtattaccacagtctcagcctcaaacacccttctacaaattatcaagaaaaccaggtgcctgctcagtcacaacttctgcaacaacagttgcatcgttaccacccatattatgatccgcggcaacagcagcagcaacttaaaaacttgcctgttcagcagcag

SEQ ID NO: 26843 - DNA, 803 bp, Glycine max
  unsure (1)..(803): unsure at all n locations
  Clone ID: TF_GmC86745_1
catgcctgcagattaagaagacaatgtgcatgctatcacttgacaaaacagacgatggcatgatagtctgcggacgattcgctcgccgtatgcccaagagtaactggtttttttcattcctgataaagggaataagaagaatggttacaataatatcttatagttcctttgaatagattccagtcatgcagccatggcctatatagatgcaattactgacgatattgctttatggacaagctaacaagctaaaacatatttctcaggtcaaaaagctcccatggaagtagactagaatctcggaaccaagctcaacgcggcatgttccggtattgccaattcagtagacattatttttaaataatggagaactaatataaatataacatgacttctcagtttaaatatatctataactaaaactgtgcacacagatggagggagagaaaaggaattgaatttccaataggtcaatttaatgaaaatattaaaaattatatgtaccagatgaaaaggactgaatcaccagcaacaagcctcttggcactgacaaagacactccaccnctgtagtaagaagatgccttttgggctgacctgaaagcgaaaatataaagcagttagaagtgaaaacanttaagtaacaatttaagcagctttcatgacatcacatatcacgactgttgcttgttgatcattcccttggtttcactacagacaatttgtaaaacttgatatggaaaaggattttcaggaggaaaggaagagccaaagatacatgcaaatgattaaggactatacact

SEQ ID NO: 26844 - DNA, 1790 bp, Glycine max
  Clone ID: TF_GmC591_1
ggcgttttcgtcacatatatcgtggtcagcccaaacgacacttgcttactagcggttggagcttattcgtgaatgcaaagaaacttgttgctggagattcatgcattttcgttagaggggaatctggagaacttcgtgttgggattcgtcgcgcagcagaaaatctcagcaatatatcgcaatcttcatctctgatatcgggtcatagcatgcaacttggaattttgactaatgcttccaatgctgttggcaacagaaccatgtttcttgtctattaccgcccgtggacaaatccctttgaatttattgtccatctccaaacctatttgaagtcaactttacaagactatccaattggaacgagggtacaaatgcagcatgaagttgaagaatctttaagaagacttgcaggtacgataattggtaatgaagatatcgatagtattaggtggcctggttctgcatggagacgtctcaaggtgcaatgggacgccatagtagaagacaaaatgcatcctgaaagggtttgtccttggtggattgagcccttggaatctgccaaggagaagaagcaagttcctgctctccccaccaagaaaaaggggcatgcacttcttaaccagcgctctttgcctggaataagtggctttggcaagaatgatgttcatcagaattcagccggcccttcgtctcagactcggagggcagacggagacctgcaaggtcaagattacagcggcctatctcctccacagcctttgcaaagagcaccatcaactgatataatccgcccatcaaaggtcccaatccgtggctcgcggttcgggaaggagaatcggaatcagcatccctttctcaagcaagatcctcttcataaatctcttggcagatcaatgtcacttacacatgaagacttgtcaattacaagctcaaacctaacttccattggttctgaatcccttggaatgccttctactgaatctagaggtgaaaatgatgctccttttgggcagcctggcagttctagtacattcaaactttttggagttaacttaattgacagctcccctgagatcccatcggttaattttgttgatctcaacaagacttcaagtcttccttctagtcctccaatgggtgttgccccaggaaaaacatgcaagaagtgtcgctgtgttaataatcggagctgcacaaaggtgcttaagctgggaaatgctcttggaagagcagttgaccttgcacgctttaatgggtataccgaacttattgctgaattggactccatgttcgattttcaaggaaccttgataagcggaggtagtgggtggcacgttacctgcttggatgatgaaggagatatgatgcaacttggagattatccctggcaggatttcctgggcgtggtgcaaaagatgatcatatgtccaaaggaaggtactgacaatctcaagccaggctcctcagctaatccttgaaacctttagtcgcctaccttttctccccttttccaccattgcatgcatgcacagtttgcagtactgtgtcgtttctagttcgaataaatttctcttttcctgagaatctaggagatcaataagtttctgctataaaaatatagcaatcatagtgaaataaatttacagagtggaaaaacaaaaactgctttttcttgttttaagaacctgtttttcatgatacttgtggaaagtactcatgagtcatgaccgtgatatgaataattgacataataaatgcatggttattccgtcctcatgaacgggcgttcg

SEQ ID NO: 26845 - DNA, 508 bp, Glycine max
  unsure (1)..(508): unsure at all n locations
  Clone ID: TF_uC-gmflminsoy056g07b1
gaaaagaaacagttgtggggggtttttttttgaccacacccccaagagcacaccagngnctgtttcggacttttgactcggagaactatcttgccaccacaatttcccggcaattcctttatttgacttcactatccattccgattccctacctcattttttttaatattttatttcctttgcttttcacttttcactcattcctcttctcgctatattcatcaataatcactacaagagagatgcatcgccggtaacctaaacaacctccacggcgaccgaagcaatgatcacgcaaccaccagacgctgcccccgccgtcgcacccaactccggcgaaggaggagagaagaaaagcataaacgctgagctctggcaagcttgtgcggggccgcttcttaacctgccttcgcctggaactcacgtcgtttactttcctcaaggccacagcgaacaggtcgcagcgtctttgaagaaagacgtggatgctcaggtcccgaactatacc

SEQ ID NO: 26846 - DNA, 835 bp, Glycine max
  Clone ID: TF_LIB4200-008-Q1-K1-G8
ccacgcgtccgagagagcactgaagtgaagagtgcattgtgatatgaggaagcaacaacgttggcaagttggtatcgtggattgaggtggtcttttgggggaaaccatcaacgacaacgacagcatcaaaaggaagagaaagacccagaaacgggaacggctttcagaaactcacaagcttttcaaaaagagcttcaaagtgaaggaaaaaagtgccctttgattcttggtcaccacaacgccaagacaaacaacaaacaaagcaaaacacacacacacacacaagcaaactagaggagccaccgcaacatgttttctgtaaccgaatgctataattcaagggagttggtggtggtggttgttacagaatagaaagagaaaaaaaaagcatttttgtagtttggaattatcattgctactacttcgtctactacacacatttaactgtcatgtctggttggtgaaaggagctttctgttgtgttggctttgtctttctgttgtgtggttttgtttgctgttgaatggcacatctggggtgttgtaatcttgggggccctgggagtagtggaacttctctaccggaaaaaggtttgaaggatgatgatctctatagagagctatggaagctgtgtgcagggccattggtggatgttcctcgtactggagacagagttttctacttccctcagggtcacatggaacaattgcaagcatctacggatcaggaattgaaccaggaaattccccatttcaatctcccggccaagattttttgccgtgttgtgaacattcagttgttggcggaacaagaactgatgaggtttatgcttgca

SEQ ID NO: 26847 - DNA, 1003 bp, Glycine max
  unsure (1)..(1003): unsure at all n locations
  Clone ID: TF_GmC88076_2
ccacgcgtccggtgtttgaaattggaaagaaaccattttttggtgtaaggaagcgagcgtggcgtctggtggaaaactccggaggtcaactcaagagaaagagagagtaatgagcattgcattgtgtctcacacactctttgaacgcatcctcctaatgaagacgacgcagcagcctgaagctcctcaaggcgatccctgtgaaggtgactcagtctcttttctttgtatttatgtgtgtgctaacaacaataataatattggttggtgcagagaagaagaagagcataaaccctgagctatggcaagcttgtgcagggcctttggttaaccttcctccctccggcacccacgtcatctacttccctcaaggtcacagcgaacaggttgctgcttctctcaacaaagatccccactctcaaatccccaactatcccaatctaccttccaagcttctctgtctcctccacaatctcactttgcttgctgatcccgaaactgatgaagtctacgctcagatcactcttcagccagtcccttcttttgacaaggatgctctcttgcgatctgatctcgccctcaagtcctccaagccacaacccgacttcttctgcaaacaactcaccgccagcgatactagcactcacggtggtttctccgtccctcgccgtgccgccgataagattttccctcctctcgattattctatgcaacctcctgctcaagaactcgtcgccagggatttgcacgacaccgtttggacattccgccacatttaccgtggacaaccaaaacgtcatttgcttaccactggatggagtctatttgttagtggaaagaggctcttggccggagactctgttttgtttattagagatgaaaagcagcatcttcttttgggtatcagacgagctaacaggggcacccaccatatatcgtcatcagtggtgtcaagtgatagcatgcacatttgaaatncttgctgcagcggctcatgcagctgc

SEQ ID NO: 26848 - DNA, 2799 bp, Glycine max
  Clone ID: TF_GmC1058_1
gtgataggtcagtggggagagaaagacagagacagagaaagcgggtctctttctttttcggctgcgagaagacgacagaaggggaatgccaaagttggtcacgctctctgaaaatgcagcaacagcaacagcagcagcaggcatgaagagcaacatacacaacaccactccttcaaatatcatcatcatttctcacttctcatccttcactctcttcttctctttcttcccttcactctctctttcgcttcatggctggtctcatcgatctcaacaacgccaccgaggacgatgaaacgccgtcgtctggctcctcctcctcctcctcctcctccaccgtctgccttgaactctggcacgcttgcgcgggtccaatgatttcattgcccaagaaagggagcgttgtcgtgtacttccctcagggacacttggagcaacacctccacgattttccgctccctgcctctgccaacatcccttcccatgtcttctgtcgcgtcctcgatgtcaagcttcatgctgaggaagggagtgatgaagtttattgccaggtggtgctggttcccgaaagtgagcaagtgcagcagaagttgcgggagggggaatttgatgctgatggtgaagaggaagatgctgaagctgtgatgaagtcgacgacgccccacatgttctgcaagactttgactgcttctgataccagcactcatggtggattctctgtgcctcgtcgcgccgcggaagattgcttccctcccctggattacagtcaacagaggccttcacaggagcttgtggcaaaggatctccatggccaggaatggaggtttcgacatatatatagggggcagccgcgaagacacctgcttactactggttggagtgcctttgtgaacaagaagaaacttgtatctggagatgctgttctgtttctcaggggtgaggatggagaactgagattgggaattcgtagggctgctcaactgaaaagtggcagtaccttttcagctctttctggccagcaagggagtcctaccagtcttatggatgtggttaatgctttgtctgcaagatgtgcctttagcattcactataatccgagggtcagttcatctgagttcatcatacctatccacagattcgtaaagagccttgattattcttattcagctggaatgaggttcaggatgcgctttgaaactgaggatgctgcagagcgaagattcacaggattaattgttggaattgctgatgtggatcctgttagatggcctggatctagatggagatgcctaatggtaaggtgggatgacttagaagccacaaggcataatagggtttccccatgggagattgagccatctggttctgcttctactgcaaataacttgatgtcagctggtttgaagaggaccaagattggattgccttcagccaagctagattttccagtttccaatgtgattggaacatcagactttggggaatcactaaggttccagaaggtcttgcaaggtcaagaaatgttgggtgttaatactacttatgatagttttaatgctcaaagtcaccagctatctgatttgaggaggtgctatcctggctcgaactatcctaggattgctgcaacaggaaatagcattggaatctcacaagtgagttccaatgtttccaacaacggcataggctttagtgaatctttcagattccagaaggtcttgcaaggtcaagaaatacttcctagccaaccatatggaagggccctgtctgttgacgaggcttgtggaaatggtcgctttggactttttgatggtttccaggcgatgagatccagaaatggatggtcttcccatgtgagcaacaattcctcacatttgcatcctcctgttccatctgggcaagtttcatctccgtcatctgtgttcatgttccagcaagctgtcaatccagttttaaactcggattataacaaccaaataggtcaggtgatgggagataaagtccatcagcgagtttcatatgcgtctgaagttaaaggcggaaaatttgtatcaaccccctatgagcctcttctccgtggactatctcaggaaggcacaaattcttttggtctttcaaactttcataatcagctggatagttcacgttcacacgattctgtttcagtactgagagctagtcaagagttggttccctcgtgtaaaagtagatgcagagtctttggattttcattaactgagggtgctcccgttgcaagtaaagaggcgactgactcatctgcagttgcttgtgctggaccttcctttacaagacatgttgaagatgatttccatccagggcattcacttaggagcaaggcagtggcaagttattgcaccaaggttttgtattaaatgcttatggggtgtgctgcaatattgacttggaaatcttgatgtatgctggtactgatgctggcataaggtagcagaagagaatgtccacagttgttgtacttgtgtgctttgctctagtgacttggaatattgggagactaaaatattgtaactattcgtctaatttagatacttgttaaattggctatgaccacgttctagattctgtattaatcatgtatctacccttcattgacttgtatggggaaaacctctaaacgatgcatgtttatcccccgttttggtcatatgaacaaagtaagccaggtggttgtgcttaaccataaaaaaataaagaattgagcattgattacattagagagcaaaagctcttttaatgtttcatgtccttaatgttgtccccccc

SEQ ID NO: 26849 - DNA, 1181 bp, Glycine max
  Clone ID: TF_GmC131_1
tacggctgcgagaagacgacagaagggggaccttggcgcatgcttcaggttaattgggatgaacctgaagtcttgcagaatgcaaagcgagtcagtccttggcaggttgaacttgtttcccttccatttgcacttcatacagtatactcccctaacaaaaggcttagatctgaccagggttctgggctgttaagtaatagggagggagaccccttctttcctatgacagggttccctaactcgacaatggaacacatgacagggttccctaactcgacagtgggacacatggataaatcattgttgagttatgatacttttcctgctggcatgcagggagccaggcatgatctattttctccatcaagtttttccaactttttaaatgataagtcctatctgtatatgggtagtggttcatttgggaacaatccagtgcaaagtttgggaactgtgacaacagagctaaacatgagcagttctcaatcggatgacttgtcaccacatagccagagtagttttcattcctttgccagagagtttgctgggacccggaactgtgacaccaaagttgcttctggttcaattctgctatttggtaagatcatacagcctgctgaaagtgatttgcatgatggtgattgcatggaacgtgatggcagcaggggcagcaataaacttaagacagttgaggcatgctatttttcaaagtagttatgcagcagaatgcagttaaatacttgtacaggaaatcaaggctggcaggtaaaacaggaagctgtctagggcttgtagtggtaaagtgatgtttccgggtcatcatatgttggtcttactacaaacttgaatgatgaactaacatcatgatatttgatcagttgtatgatattaatatctgacatattattgtgtatattttcaaatacattcttaaaaggcaattgtacttgccttttaaaaaaaatgcccatgcttgcgcaggtaacaacctccgtactcgtatatctttatttgatgaggtaattgtagcctgaaagaatgcttgcaatactctttaactctgtctagcatggttgctgcgtagcacatacttcatggtatgttgaggcagtatcatacctcactcatataatatttagcttgcatttatgtacgacgtcaatgaataacacgtctctgcc

SEQ ID NO: 26850 - DNA, 844 bp, Glycine max
  Clone ID: TF_GmC153313_1
ataatcctagggcaagcccatctgaatttgtcattcctttggccaagtacgttaaagctgtgtatcatacacgagtttctgttggcatgcgatttaggatgctatttgagacagaagaatcaagtgttcgccgatacatgggtaccataactggtattagtgatttagatccagtccgctggccaaattcacactggcgttctgtgaaggttggctgggatgagtccactgcaggggagaggcagccaagagtttccttgtgggagattgaacctttgacaacattcccaatgtatccatctccattccccttaaggttgaggcgcccttggccatcgggcttaccttctttatatggtctcaaggatggagacatgggcattggttctccattcatgtggctccaaggtgggcttggggatcaaggaatgcaatctttaaacttccaggggcttggtgttacaccatggatgcaacctagacttgatgcttctataccaggtctccaaccagagttataccaagcaatggcttcttctgcattccaggaaataaggacaatggatccttcaaaatcttcgcaatctctgttgcagtttcagcagacttcgaatgttcccagtgctcatgcttctgaggtacagaggcaagtattaccacagtctcagcctcaaaacacccttctacacaattatcaagaaaaccaggtgcctgctcagtcacaacttctgcaacaacagttgcatcgttaccacccatatagtgatccgcggcaacagcagcagcaacttaaaaacttgcctgttcagcagcagttaccaaatgtcatctctcctttgtctaa

SEQ ID NO: 26851 - DNA, 1168 bp, Glycine max
  Clone ID: TF_GmC231_12
agaaaatggagcagttcattgataacttgccgccgatggatctgatgcgatcggagaagatgaccttcgttcagctcatcatccccatcgagtccacgcaccacgccatctcctatttaggcgaactcagccttctccaattccgcgatgtggagaggattgcaagctaaggttatggagtatcaagtctggtgaactgctttttgaggacaagttctctgattcagttatcttcattgtgtgctataaaacatatggacatagttttaaagcagaagaggaaaaccaatacaagcgtgactcatctcagggtgcatggcttggatcacttgaaggactattttatatgtgctggttatgagtgtgaagggtcctgcagctatagaatctgaagctaactagatgcccacaatacctgataaatactaagtttatagcatattactcacatgaagcagcttaagtcctgagattctagaaggtttactaagatcaggtttgcaatgatacggcatgtagatgtcacaatggatcaggtttggggatggctttcatgtctgcaaggtttatgtcaacaaaagtcggaaggagttgatcggccgcaatggtccacatttagtgatgttaactactcaggttctctttcatccacatttggtagcaaggctttagcaactgaaggagagaaggaaaatttgatgacagattatgtcttaagggactggaggtctgtgctgatactattgtaggaaatgcaatgttaagggggatatctggtggacaaaggaaacgtgttacaacatgggagatgctggttggactagctaatgcttaattcatggatgaaatatctactggtttggatagctcgacaacttaccaaattctaaactcgctcaagcaatgtgttcacattctcaaaggaacaacagtcatctctttgaattttaatgaaatatctactggtttggatagctcgacaacttactattccctcttgcattttaatgatatgcttgtgtgatgctactaaaaaattttcaggggtcagaaagactttgaattcagagttatggcatgcttgtgcagggcctcttgtgtcattaccctaggttgggagccttttgttttacttcccttagggacatagtgagcacgtgaatgaatt

SEQ ID NO: 26852 - DNA, 1030 bp, Glycine max
  unsure (1)..(1030): unsure at all n locations
  Clone ID: TF_GmC630_9
caaaaaccacacacaacacaccacaaccttcttcttcttcttcttcaacttctggttcaaaacctcaacagtttgttgaattgcgcgttgaaatacgactcaatattctttcgcgagctctgttctcacttcaaaggttaggttcttcgacagtttctttgtttccactccgtcgcttgctgagaaggcgtgagcgagagttgtagaattacgcaacgagtgtcgcggatgagagatctgtggtgaggtctctggaaatgacatcattggaggtgacgatgaagggaaattgcttgaaccacaacgacggcggagccacggagcctcattccccgtccacggccaaagacgcagaagctgcacttttcagggagctatggcatgcttgtgcaggtcctctagtcacggttccgcgagaaagagagcgcgtgttttatgtttcctcagggacatactgagcaggtgggctcgaggtggaggcgtcgacgaatcaggtggcggaccagcacatgccggtttacgatctcccacccaagatcctttgtcgggtcatcaacgtgcagctgaaggccgagcccgacacggatgaggtgtttgctcaggtgactttgcttccggagccaaacgtgagtttcctctcctcgttagtgtgtgttttttagagagagacagagtaattgggtgaaaaagtggtgatgcttatgatttttttttaatgtgggtggnggatgatgatatagcaagatgagaatgccgtggagaaagagccaccaccacctccgccaccacggtttcatgttcattctttctgtaagactctgacggcgtccgatacgagtacccatggtgggttttctgtgctgagacgacatgctgatgaatgtcttcctcctctggatatgtcgaagcagccacccacacaggaattggtggctaaggatcttcatgcaaatgaatggcgatttaaacatatctttcgaggtcaaccgcgtagacacttgcttcagagtggttggagtgttttggcagc

SEQ ID NO: 26853 - DNA, 763 bp, Glycine max
  Clone ID: TF_GmC896_2
gcagtagttctagttcgctttctttcactcactcactgagatctgaaataacaaaaaacaccgccagctcgtgctggtactttgcgtgatgaagctcgtttgaagaaaagagaaacttcaaacttcaaacttcaaaagccacattattttctccttgaacacactctgttttttttgttgttgttccaatgaaggaaggtgagaaggtattggatccgcagctatggcacgcgtgtgcaggtggcatggttcagatgccacaagtgcactcaaaagtcttctacttcccacagggtcacgccgaacacgctcacacaaccattgatctgagagttccaccgttcatcttatgcaacgtcgaagccgttaagttcatggcggacccagaaaccgaccaagtgttcgccaagctgagtttggttcctctaagaaactcggaactcggtcctgactcggactctgctgctggtgatgacgcggcggaaccttcttcttgtgaaaagcctgcgtctttcgccaagactctgactcagagcgacgccaataatggtggggggttttcggttccgcggtactgcgcggagacgattttcccgaggctcgactgcacggcggagccgccggtgcagacggttgtggcggaagacgttcacggcgagacgtggcggttccggcacatttaccgggggacgccacgtagacacttgctgacaacaggggggagcagtttcggtgaaccagaagaaactcgttgctgggggat

SEQ ID NO: 26854 - DNA, 2060 bp, Glycine max
  Clone ID: TF_GmC519_1
gggtctgcaacaggttgacatcgcacacaaaaatgttttgtcacaaagcacatggaatgacaatactggacgtaacagatggtagcaagattgtctcagctgtgccggttacaaagccttactcatctacattgaacagtgagaatgtgcgcgactcaggcaactagcagagcaacatcagtgattctacgtcaaagcatgcatctgggggtgcttgcattgatccctcatgctgttgccactcagactctttttgtagtatattataagccaaggacgagccaattcatcataggcgtgaacaagtatttagaggctatggacaaaaagttcagtgtcggcatgaggtttaagatgagattcgagggggatgattctgctgagactgacaaaagattttcgggtaccatagttggagtggaagatatttctcctcattgggtaaattcaaaatggcgatcactcaaggttcaatgggatgaacctgcagctgttcccagacctgatagggtctcaccatgggagatagaaccctttgttgcttctgcttctacaccctcagttcaacctactatggtaaagactaaaaggccccggccacccagcgaaactccagatgttgacacaacatctgttgcttctgttttctgggatgctggtctgcaacaggctgacatggcacaaaaaaatgttttggcggaaagcaaatggaatgacaatactggtacgtggcatcatatgcaaactgacatgaatagtaaaagcaacagtggcaacactatgttaaggaatcagacagaaggaagttggctatcttctccgcattctagttgtccctctcatttgtttcaggacgtaacagatgatagcaagattgtctcagcttggccggtttcaaagcctcactcatccaaattgaacaatgatcatgtgctcgaccaagttgacaaggagagcaaagttgagactgctacaagttatcggttgtttggaattgaccttattgatccttctaggaactctccttctgtagagaaggcatctgcacaagcagtaaatgtacccaaagttactactgaaggctgtaccatcaccttgtcccattctgtaatatggtgagaagaatcttcatttgttccagccaggatgtgaagaagatgagttgtggaagcaaactgccgatctcctcagtggaagacgggactgtaataagctcagacacaactgaaacctgaaacttttgacattctttcctgtggttttgcgtttgtttgtcagcagcacccaaatgctgatccttcttgttgcttcaaattgtttgtgggaaggaagttggtctatttgggctggggtaagtttcatgttatcagatgtgagacactagctaattgtaacttaatttgtagagacaccaccaccaggcattaattgtgctagaaaaaaaaagacctaaacagatttctttaataaattagtaagtgggaagatggcaaatttaggcttagtatatgtgaatattcatgtcaagctggaaaaagaataaactttgacatctttcttgtggttttgcgtttgtttgtcagcatccaaatgctgatccttcttcttgttgcttcaaattgtttgtgggaaggaagttggtctatttgggctgggtaagtttcatgttattaaatgtgaaacgcactagctaattgtaaacttaatttgtagagacaccaccaggcattaattgtgctagaaaaaaaagagaccaaaacagatttctttaataaattagtagtgggagatggcaaatttaggcttagtatatgtgaatattcatgttaagttggaagaagaatgttgggggttgatgttttgaaaagacttgccttttctagtcaagggggcttattcattggagctttgtatgcgtataatgtgcactttgttgttatcctctaaaatttctaatctgggtgagtcaatgtctgttgctgtcatcagtgaatgtaaattatggcattaaattgcttcaattgtagtgttcagaaaaacagtggtcccctgtgccagtc

SEQ ID NO: 26855 - DNA, 985 bp, Glycine max
  Clone ID: TF_GmC326_8
gacgccgtcactaacttcaagcctctcgccggcgccgacgacgccgaagccgagttcctcagcacgcattccaagtccgagatcgtcgacatgctccgcaagcacacctacgacaacgagctccagcagagcacccgcggcggcaggcgccgccgggacgccgaaaccgcgtcgagcggcgcgttcgacgcgaaggcgcgtgagcagctgttcgagaaaaccgttacgccgagcgacgtcgggaagctgaaccgattagtgataccaaagcagcacgcggagaagcactttccgttaagcggatccggcggcggagccttgccgtgcatggcggcggctgcgggggcgaagggaatgttgctgaactttgaggacgttggagggaaagtgtggcggttccgttactcgtattggaacagtagccagagctacgtgcttaccaaaggatggagccggttcgttaaggagaagaatcttcgagctggtgacgcggttcagttcttcaagtcgaccggactggaccggcaactatatatagactgcaaggcgaggagtggtaaggttaacaataatgctgccggtttgtttattccggttggaccggttgttgagccggttcagatggtacggcttttcggggtcgaccttttgaaactacccgtacccggttcggatggtattggggttggctgtgacgggaagagaaaagagatggagctgtttgcatttgaatgtagcaagaagttaaaagtaattggagctttgtaacattacatagtttttgagtttcttttgttaattttgtaactgttgaattcgtgaggtagagatggtgatggcgttgttgttgcaagttgccactcacaaaacgtgtatattcttaatttgatgggaaaaaaaaagagaaattagggcaagaagaattgtataatgcaaaggtttttttcaaaagaaaggaacatggagtgcaactatttatttttgt

SEQ ID NO: 26856 - DNA, 735 bp, Glycine max
  Clone ID: TF_GmC892011_1
gcgaggcgctgtgaggggccgggacggcgtcggcttgggccctaccgggcctggtcgggttttatccgcgagcggagtcgccgggcgttggtgtgtggtcctccgctgtgagaggcgctttctggggccgctggtgtcccggcgtgtggggcgggttgccttccgcgaccgaggactcctccgggttgtgctgggtcctcggctctgtggcggccgttcaggttcctgtgccgttccgctggccggttccacctgcctggcgtctccggggttgctgccaggaccagctggttcatggggactattgcttctgttcaggttcttgatcctattcgctggcctaattcaccttggaggcttcttcaggtacacactatttcaattcatgcttgtctttgccaatattctaaagtttgaattttcatcgcaacaggttagttgccttgggcccgtcttgctccagcagcccctgcgggtgtccccctggttgcgcgcctgcgggcctaccgggcccctcgccctcccggctgccttctctccaccaaggaagaagcttaggttcccccttgacgttcagtttccgataccatcgttttcaggcaacccctttgggtcttctagctctagcagccccttttgttgtctctctgataacgctcctgcaggcatacagggagccaggcattctcaaattggaatatctttatcagatctccaccttaacaataagctgca

SEQ ID NO: 26857 - DNA, 1212 bp, Glycine max
  Clone ID: TF_GmC229993_1
gatagaaactcatgagttacatcatcccatatataattggaagagggattctccctcaataaggaaatacagtagtaggagagaaaacttcagtcaagtgcaagttaacgaaaatattaccccttcagttcatcaaaacggttactcagttttaacaaacaacacataatagttgttatggtgtcataaaatatgtttctgaatcaaacgggggaatatttttgttaacttgcacccaagtacaatttatgccgaaggaaaagaaacacctatacaacaaaggcaacaacactacagctactgaaatctgttataagaatagttagccgcattgatgtattgtctccaagaactcactggcgtagcaactgaaaataggggcgattttgttataaagcaatacacaatgtgttaacattgtcagttccaagatcagacttgtgttggtccttgtaccagggaaaccctccatcagaattgttctcaattggactaccttgatgcaaaccaaaacctaggccatcggatgcattagatgtcttgtgtgaattcccctcagatacactattaccattagtattggcagagctagtgtttgaactcttttgctcagtctgaatgagttttccaaataacaagatgtgaggtgcttttgtttcattggattccttgaaattctggccaggatttcccactgtcaacaagcaagaaatgccaacattggccttagtagtggtgttgttcttataggttccacaaggtggcctaataggctgtgctgctgcatggtcaagccttgagaaaccacctagaagcatgtctgctgggagcttgttgaagggaaaatcagatggagatagtccaaattgagcatgcctggctccctgtatgcctccagaactattactatcttgaatggtgcaaagagagttggtgtaattgagaaggttgctagagaatgatggcattgggagttggttgatgacttgaaaataaggatcctgaagaaaacgttgtttcattctaggaggtgagtatgcagagagattgaatgtaggcatgtttgagactagttcaaccagccacgggtttacacacttcacattttgaagtaaatctggctcatcccacaccacctgcagaagacgccatggagaatcaggccaaaggatgggatctgcaacttgaacagaagaaatggttcccatgaac

SEQ ID NO: 26858 - DNA, 498 bp, Glycine max
  unsure (1)..(498): unsure at all n locations
  Clone ID: TF_GmC749534_1
gcacgagggtcaattcagctgtttccggtgggaaaacaattaccaacaacgcccataacagaggcaaagggttttggagattccaacaaaaggggcaaagaaaaactggccctgtttgtattctgtaacaggctaacagccgctagctaaagagataaattccgtggcagttgagttagaagcgaaaagaaggaaactactcactgtctgggttccgctttctctctccttacctgccgtggggtactaatctaatcagtaatcactctaccacctgctttcagcttttgcctctctgtcttcctcaatggcaggtgtgggagatggcgatttgtacacgcaactatggaagctatgcgcgggacctttggtggatgttcctcgccaaggggagagagttttctacttcccgcagggtcacatggaacaattgcaagcttcgactaatcagggactgaaccaggaaattgaatgggttgttctaaanaaaaaaaaaaa

SEQ ID NO: 26859 - DNA, 507 bp, Glycine max
  Clone ID: TF_jC-gmXLIB3564P118cd01b1
cccacgcgtccgttaatttttcatatctacaaaccaaatgctgcttggaaagcactgatggctgaaagaaattaccaagagattatttaatggcttcaacatcttgcgttggtaaccgctcattacctataaaacatgcaacaggtccaagttattgagcatattctttttctctagcacaatatgaggaggttgtagacaatccccagctcttcatgtttaccttggaaaaacttcacgccgatatgggtaccaagtgatgattcccattggtggaggaagagaactatatttgcatcccctctttgatgaagtgacttctcgaggagggattgtcaaaataattagagagaggaaatggaaagacgtaccttcagtattaaattttccatcaacagctacagatgctttgattgagctgcggaagtactatgctgcattgctctaccattatgaacaaattgacttctttaaagcccgggaatgggaccctactgctcctgatgc

SEQ ID NO: 26860 - DNA, 499 bp, Glycine max
  Clone ID: TF_LIB3242-287-Q1-J1-G12
aattcggctcgagaaaggaattgaaattgtcataaggtaaggtgtgtgtttttatatttacatagattaaggatttatgaccaattatggagatatgaatgtgacaaataagccaaacccagatggttccaccaatgggtttcagtctcagcttcaagttcaacaacaaaatgggtgggagcagggatcatctagactcagacccactaaaccttaccctgcaccaacggctcggtaccaggacattgttcgtgatgcaaacctcttctggggaacgcttcaagcttttcacaaaatacttggcaccaaatacaaggttgctactgtgggaggaacgtcacttgatctacatcgcctttttgtcgaagttacatctcgtggtgggattgaaaaggtgattgttgatcgtaagtggaaggaagtgattctgaccttcaatttcaaagataccataacgagtgcatcatttgtggtgcgcaaatcctatctatcgatgctt

SEQ ID NO: 26861 - DNA, 1613 bp, Glycine max
  Clone ID: TF_GmC52418_1
atttgaaatttgcatgaagctacctcaatgggctttgcagattttgagacagctagcacctgaggtttcttatcgaagtttagttgcacttggcattgctagtattcaggggttgcctatagcttcttttgagaaagatgatgctgaacgcttactgttcttctatcaaaactgtgagaaagatagctgtacaaacaaaaataatataatttttagcagtccccctggttggttgaaaccaccccctcctactaggaaaaggtgtgaaccaagacaagaggctagccctggtcttcatgaaggtgtctttgcagggcagggtggtgtttgtaaattaaatgaagaggaaaaggacagaaaaattgtcaatgggattagcatgccgttaactcctgctaggcagagattaaaagtatctgcaatgaggccaattcctcacattcgtcgccatagaatgacacctttttgtgggccttctgagacagatggttttgatggcactcaggtagaggctattttgccacttgttgcccctacgaagcgtactagtattggatcaacatctggaacacacagaaaatcattttcaagtgcagctcagtctaagcaggttatttcattgaacccattgcctcttaagaaacatggttgtggtagaggcccagtacagacatgctctgaggaggaatttcttaaagatgtcatggagtttctgattctccggggacataatagactgattcctcaaggagggcttaccgagttccctgatgccatactcaatggaaaacgtcttgatctctacaacttgtataaagaggtggttaccaggggaggatttcatgttggcaatggcatcaactggaagggacaaatcttttcaaagatgcgcaattacaccacaaccaatagaatgactggtgttgggaatactctcaaacgacattatgagacctaccttttagaatatgaattagcacatgatgatgtggatggagaatgttgcttgttgtgtcacagtagtgcagctggtgattgggtgaattgtggcatatgtggtgagtgggcccactttggctgtgacagaaggcagggtcttggtgcatttaaggattatgcaaaaacagatgggctagaatatatatgtcctcattgtagtgttacaaatttcaagaagaaacaaaattttgctaatggttattctcaagggttaatgtcttcacgacccctttgatagttttccccattcccttctggaatagcggacaaactagttacctgatttgctggatttatctgtaatttatgttttagatagattagtgaaatataggatgaaaaatttgaaaattaggtttaatcaacacaaatgtcatcaggagtaggcgaaccccttccacatttgttcttgattaaggggagcaaaaattcctaattcagataatggaaatcattccactttcggatctccatcaaactctccattgtgagcagtgagctgaagtttattttattacgagtgtcctattgtattgaaaggaaaatgtatagacttgtgcactaagcatgtttatatgatttaatttaacatctcaattttaagtctttctgtt

SEQ ID NO: 26862 - DNA, 2265 bp, Glycine max
  Clone ID: TF_GmC1753_1
gcatcagcatcttattctgtttattaatttcttttgctgttgtatattttatagtgcaacaccaccacctctccaggcaggaacattctcacgtggtgtagtgactatgcgttgtgatatatcaacatgtagttctgctcatatatcacttttggggtctggtagtgcagacacttgttttaatgatcaggcatgggtgaatttgctgccagtgtttgacattttacatatatgatcttttaaactttttacttacctatcacttattttgggtatatcctcagcttttggagaatcatattaaaaaagagctgattgagaagagtcaacttgtccaggcatttcctaatcatcaacaaagtaaagcaccttcatccgagcctcgaagatcagcctcagtagcgtgtggatctagtgtgtttgaagtttgtatgcgagttcctgcatgggcttcacaggttaattgttgtttctcaaggtttcgtctgtcggatatagctttctaaaatataatttaatggatcttaaaaattatttttaatcaatgaaagggcctagatggaggcttttgctaaagatatttgtgacttctgctttgccattatattttccagttgactggtttatgtattttagtccaattgttaggcctataacagtagtttgtttactttgttattgttccaattgttctgtttttcacggaagtgacggaacatatgaaaatagcctccacattgtattggcttgatcttttagcaatttcatgctgtaatgacatgacccttgttagttccttttttctttttgaataatgaaaccttatcttttgattaatggtttttgatatttgtgcacaggttctgagacagcttgcacccaatttggcataccgcagccttgttatgttgggaattgctagtattcaggcattgccagttgcatcttttagtaaagatgatgccgagcgccttcttttcttttgtactaggcaggagaaagaaaactgtcctaaggatcatgttttctctggtattccaagttggctgaagcctccaccacccagtcgaaaaagatctgaaccatgctctagttcaaagtctattaatgctagtggccggggagttgaagctattggcagtcatagacagaaatttattgttgcttctatgaggccaatccctcactctaatagacacaagattctccccttttctggattgtctgagggtacaagatatgatggagaccatggaaaatcaaatctaccacttgctcttattaagcataatgtttcaggccctacttcagttacaaataggaaatctgtgtcgaattcatttcaagctcaccagattatttctttgaatccactacctatgaaaaagcatggttgtgacagagctccaatacgagcttgctctgaggaggaattcttgagggatgtaatgcagtttttgatacttcgggggcataatcgtctaattccgcctggtggacttgctgagttcccagatgccattttgaatgcgaaacgccttgacctgttcaacttgtatagggaggtggtttcaagaggaggctttcatgttggaaatggtatcaattggaaagggcaagttttctcaaagatgcgcaatcacactatgacaaatagaatgacaggtgttggcaatacactcaaaagacattatgaaacttatctcttagaatatgaattatctcatgatgacgtagatggagagtgctgcttgatgtgtcacagtagcgcagcaggtgactgggtgaactgcggcatatgtggtgaatgggctcattttggctgtgataggcggcagggacttggagcatttaaggactatgctaaaaccgatgggctggagtacgtttgtccccgctgcagtgcgttaaaattcagcaaaaaatcccaaaaaactgcaaatggtttttaacaactaacacaggtcaaacattgctggcccagagcaaaatgtacattgcaagtgctagatagatttatttacacatccattgtgcttggacccttgtctcaattggtaagggtaggtttctaaggactgtaattgtttcacttatgttaaagctgtagagttttgacatgctatggtcacctcacatctcaaacttgcctattttattttgtcaaaggtactcatacctagtacaaaatgggtgtcgtcttgtcataggtattcattgcaattatcattattattattattattattattattattattatta

SEQ ID NO: 26863 - DNA, 2002 bp, Glycine max
  Clone ID: TF_GmC327_2
cacgcgtccggggtttttcaaattcaacatttcttcggttaccaattttcggttgttttctctcacccttcaattgcaattcgtacaggaggttgttctattctcatgcacaattgaaattggcaaatgagtgatgcaaaagaaaacgaggaagctggccagggcatgccctcggtcgtggaagaaaaccaacagttggttgatgctgaggttcaagatcaacctgaaactgcctcttagtagaggaaacttcaaatcatgttgaaaattactcatgttgaaaaggaagaacctcgtgccaggataaaaatgcagaacttgaggctgtttcagagggaattccacaagaagatgttcaaaatactcttctatgtcccagtagagtctgatgctcagattttggataggactgagtctgaagaagatctgttgcgaaggtggaagctgatgaattaccacagaataataaggaggctgagaataatgatgatattcatcaaaaaagtaatggcaatgttgagatggctttggaggtgaagcctgaagcctgtggaatggctgatagtaaagcatgtgataatggtgaccctgtgcttgcaagtcataatgagcctgctacgcccctacctgctcctgcagatacaaacactgaaattatgaatgtattagaagttgagaataaggttgatgaaaagcaagtggctgaacctgcagataacgggaattcaaactcaaagcacatgcttttcttggatgccgaccattcctatgatggtaatgagtcaggaacagaggaggagcagtcagcatttatgaaggagcttgaaaacttctttagggagaggagcatggaattcaaacctcccaaattctatggagaaggattaaattgccttaagctgtggagagctgtaacgagattgggtggctatgataaggtgacttcatgtaaattatggcggcaagtgggagagtctttcaagcctccgaagacatgtaccactgtctcatggacttttcggggattttatgagaaggcacttcttgattatgaaagacataaaataaaaggtggtgagctgaatgttcctgttgcttctcatccagagcctataaatattgaaaatcaggcctctgtatcaggtagagcacggagagatgctgcagcacgagctatgcaggggtggcactcacaacgcctcctaggcaatggtgaagttagtgaccctattattaaggataggaattctgtgtctgtgcaaaagcgtgaaaagcagcttaaaagcatcaatatacacaaacgtaagaagccatcttcaccttacatggataatgcagtcaaagctgcacgcagtaaaccgtctaaaccacaattggacacaactgtgattgatattggacctcctgctgattgggtaaaagtgaatgtacaaaaaactaaagattgttttgaggtatatgctttagttcctggcctgctgagggaagaggtccgtgtacagtcagaccctgcaggacgcctagtcataagtggggagcctgaacatcccaacaatccttggggtgtgacacctttcaaaaaggttgtcagcttgccctcaagaattgatcctcatcagacatccgcggtggtgacactgcatgggcagttgtttgttcgtgtcccgtttgaacatttagaatagtggtcgcttatgctttcaatgcctctctctttgaccatgatatgtatgtaggatagttgacccggaaaccatgtagaaaaatatttctgcctgtaaaacatgccaatttctagcttagcgtagcatttattttaatgttttagttcacttataaattctcgtacatgattttctcaaagaatattttaaccttgttaatatgagttaggtaggattctgtaattgctgaggatcaatgttgtaatattgcaacttggttagtgagattacattaaacttttgacctttttatgttgaaaaaaaaaaaaaaaaaccac

SEQ ID NO: 26864 - DNA, 2085 bp, Glycine max
  Clone ID: TF_GmC327_1
aatacggctgcgagaagccaacacaacctgacttagaatttgcgctcttacaatttagaggaaaaggaaattaattaaggttttccttcaaattcaaccattgttgagttttcttttgcaatacgattgaatttcaatatagggttggtgtagaaggttgttctgtgttctcgtgcgtggttaaattttggagatgagtgatgcaaaagagaatgatgaagcagggcagaatgtacccttggctgtggaggaaactcaggagttagttgaagcacagagtcaaccagaagatttggctgctcctgtgtccaaaggggatacttcaaatcatgttgaaaacgggaaagaagaggggcacgtgtgggtaggataaaattgtgaaaccagaagcggattctgagtgcattccacaaaaagatgttctaaaaatactcttcatgcagtccccgtaatggacaatgctcaagttttaaataaaaccaaagaaggtgaatatgtttcagatgtgaagagcaaagctgaagaaactccacagtgtgataagagaatcgagaatgatgctaatgtttggcaaatcaacatggatactgctgaaacgactgtggcggtgaatcccaaagcttttgaagtggctgatagtaaaacttgccttaatggtgactccaactccatatgccctagtcataatgagcctaatacaccacatgcaattcctactgaaatcaatagtggattagacaatgagaatagggataatgaaaagcaggctgttgttgcacatgcagataatggacattcgatctcaaagaacttgtactttttggaccctgatgattcatataatggtaatgagtcaggaacagaagaggagcaatcagcttttatgaaggagcttgaaaatttctttagggagaggagcatggaattcaaaccacccaagttctataaagaggagcttaattgccttaagttatggagatctgtacacagattgggcggctatgacaaggttacctcatataaattctggcggcaagtgggagagtctttcaaacctccaaagacatgcacaacagtttcatggacttttcgggttttttatgagaaggcacttcttgactatgaaagacataaaataaaaggtggtgagctgaatgtgcctgttgcttctcatccagagcctataaatattgaaaatcaggcctctgtatcaggtagagcacggagagatgctgcagcacgagctatgcagggttggcactcacaacgtctcctaggcaatggtgaagttagtgaccctattattaaggataggaattctgtgtctgtgcaaaagcgtgaaaagcagcttaaaagcatcaatatacacaaacgtaagaagccatcttcaccttacatggataatgcagtcaaagctgcacgcagtaaaccgtctaaaccacaattggacacaactgtgattgatattggacctcctgctgattgggtaaaagtgaatgtacaaaaaactaaagattgttttgaggtatatgctttagttcctggcctgctgcgggaagaggtgcgtgttcaatcagaccctgcaggacgcttagtcataagtggggagcctgaacattccaacaatccttggggggtgacacctttcaaaaaggttgtcagcttgccctcaagaattgatcctcatcagacatcggctgtggtgaccctgcatggacaattgtttgttcgagttccatttgagcattcagaatagagaaggctgatagattcatgacgaactaatttaccatggtttataggatagttgacccctaagccaaattccgtattctattaacattatgttaatattttttatttaaatttttgtgtagaaaactatttctgcctgtaaaacatgccaatttctagcttagcgtagcatttactttaatgtttgagttcacttataaattctcgtacatgattttctcaaacaatactttaaccttgttaatatgagttaggtaggttctgtaattgccgaggatcaatgttgtaatattgtaactttgttagtgatattgcatttaacttttaccc

SEQ ID NO: 26865 - DNA, 880 bp, Glycine max
  unsure (1)..(880): unsure at all n locations
  Clone ID: TF_GmC37930_1
gttggaaggaaagaaagaaggagaaaggggtaagatagtattttgacatgcaggaaacgaagcggtagtagtagagagtagtgggaaggtaaccggagtttctctcccaccgctatatcatatgggggccaattgttttattttcatcattcattcaaattctgcttccaatcatatttaaatagaaacacacactcctcatcccaaaccctacattttcttcaagcgctgcggtggatcagattccccattaaggatggaggatggtgagaaacccagccatggcattgctgatatggatgttgttgatgccactttgcaaagccatcgtgtggcttctgatcaagtaatggtcctacagggtcatgatatcaaaaacggcgattctgatcctgctcacgtgccagcaaccagtgcaattagcaataatcagtttgaacttgaagatgctaagactgtttcgcatcaggaactgatcactccaaagcctaaagaaaagaatgtcagagaaatgaagaatgtgctaaatgataccgagatgactgattatgatgagtatggcacgcctctggatcgagaaacatttatgaaagagcttgagactttctacagagagcggtccttggaatttaagcctcctaagttttatggagagccactcaattgtcttaagttgtggagagctgttatcagactaggcggctatgatgtggtaactggatccaagttgtggcggcaagtaggagagtctttccaccccccaaagacctgcactacagtctcatggacatttagaattttttatgagaaagcacttttagagtatgaaaagcacaagagagagattggggagctacagnctcctgttggaccattccat

SEQ ID NO: 26866 - DNA, 1285 bp, Glycine max
  Clone ID: TF_GmC85_1
ccggattcccgggtcgacccacgcgtccgctcttcccttcttaactttcacctttaacctcagttttccggtgccttcgcgtcgctctgaatgtcatcggcggcgagaactcccggtggcgaggagggaaagcactaccctgctccactcgcccctcacgagggcgtcgtgaaggactccactctcttctgggacactctaaggcgctttcactttgttatgggtaccaaatttatgattcctgtgattggagggaaggagctggatttgcacgttctttacgtggaagttacgagaagaagtggctacgagaaggtagttgcagagaagaagtggagggaagttggtagtgttttcaagttcgcagctaccaccaccagcgcttcttttgtactcaggaaacactactttagtcttctttatcattatgaacaagttcacttctttaaagctcggggtcctatctacactccatcagcagatgcattttccggcaacagcccttcgtggagacctgaattagctattgtggaatattcgcctaagcctatggataatagtcctgaatctcgtgctgaagatacttcatgcctttcaggaaatggaaccatcgagggaaaatttgactgtggttatttagtgtccgtgaagcttggttcggaggttcttagaggggtgctttaccatcctgagcaattggttcctcaccatcgattccaaacatgagagtgccattgtaccaatcaaccgcaaacctcaccgttctggtcgtaggaagaaaaacaaaagaaggtgggaccccaattatccaaagccgaataggagtggctataacttcttctttgctgaaaagcattacactctcaaaactctctacccaaacagagaaagggagtttaccaaaatgattggccagtcatggaacagtcttagcccagaagaaagaatggtttatcagaacattggcttaagagacaaagaaaggtacaagagagaattgacggagtacaaagagaagatgaagcttaggcagacctcagaagttggacgtccatagaatctcattggtacccgtttgtggaggcgaaagaatggcttagaaaatttttataatctgttgacttttacgtgcatattgttgtggataatggtccactggactgtggtctacagaactattgtttttttcttttcaaaagagaaaactagtgtctattgttagtcagagaccctttcatttcgtttaatcaattaattatcctcccaagtttgttctctgttagaa

SEQ ID NO: 26867 - DNA, 1707 bp, Glycine max
  Clone ID: TF_GmC1306_1
gcagcgtccggtttgagacctgaatctgctgctccgcggaaaatactgaaggctgaaatgaccaaatagttaatggcgtcaacatcttgcgtaggtaacacttccttatctatgaaagattcagcttcgagatattctgcatatcctcttcctctagcaaaatatgagaagcggatggacaatccccagctcttcatgtcaaccttggagaaacttcacgctgctatgggtaccaagttcatgattcccattgttggaggaagagaactagatttgcatcgcctctttgttgaagtgagttctcgaggagggattgcgaagataattagagagaggaaatggaaagacgtaacttcagtctttaattttccatcaacagctacaaatgcttcttttgtgttgcggaagtactatgtttcattgctctaccattatgaacaaatctacttctttaaagctcgtgaatgggatcctattgctcctgatgtttcgcagaaccaatcgaccctgccagttcctcctccaaaaatgcagtttcagcagcctttgtcagaaactcaaccagctgtctttcaactgtcaaatgttaatgctgctaaattgcctgaagcaatggcagcatcttcggcaggttctccagtcattggggtcattgatgggaaatttgaaagtgggtatctagttactgtcacaattggttcggaaaaactcaaaggtgtgctttatcaagctccacaaaaccctgtattgacagcatcccatcatagtgcctcagctaataacaacaatgcttctgcttcattgggtgtccatcgtcgacgacgcaggaagaaatcagaaataaaaaggagagatcctgctcatccaaaacctaacagaagtgggtacaatttcttctttgctgagcagcatgcaagactaaagctacttcaccatggaaaggacagagagattagtaggatgattggtgaactctggaacaagttaaaagaatcagaaaagacggtttatcaagagaaggccatgaaggataaagagaggtacagagtagaaatggaggattatcgggagaaactgaagatgggcccagttatcagtgatgctgtgccgcttcaacaacgacttcctgaaccagatactgacatgttggatgaagctgagggagattctcctcaaactccagaggagagcagctctggtggaagtgattatgaagattataataaaactgcagagagaggttttgatatggatgcattgcctgttataggaatgggcgcagaaacaagttatttgggttcagaagagaagttatctaagggggggttatgagcttctccaggagagagagagagagagagagagaggttagctggccctgatttttagcagagattttcttatggtaattttagatgcagtggagatttgaggtaggattcaggttgcagtgcttacaacacagtgcttaactgtgagttttgtcatttttaatgtttttattaaggtgttcatgttggcttcatgccatattgctgttgtacatctggcatgctgacatggatgatggatgatggatgatggatggtaacttgttaattaggcctttgggagcagtggacactggggagtctgctcttcctatgttattaggtccatcgagacctaagaataaaatgttgcctctttcaaaaatttattctttag

SEQ ID NO: 26868 - DNA, 1115 bp, Glycine max
  Clone ID: TF_GmC327_3
atggaattcaaaccacccaagttctataaagaggagcttaattgccttaagttatggagatctgtacacagattgggcggctatgacaaggttacctcatgtaaattctggcggcaagtgggagagtctttcaaacctccaaagacatgcacaacagtttcatggacttttcgggttttttatgagaaggtgattctagattaataaggcacttcttgactacgaaagcatacaacaaaaggtggtgagctgaatgtgcctattactcctcttgcagagccaataaatattgaaaatcagtctgtccagggttcagcatcatcaggtagggcacggagagatgctgcagcaagggctatgcagggttggcactcacaacgtctccttagcaatggtgaatttagtgatcctattattaagatttacttaaacgcaagaaatcatcggacaccgttaatgttgtcaaagtggcacacagtcaaccatctagaccacagttaagacacatatcggacacatctgtggttgacattggacctcctgctgattgggtaaaaatcaatgtgcaaaaaactaaagattgttttgaggtctatgctttagttcctggccttctgcgcgaagaggtgcgtgttcaatcagacccagctggacgcttggtcataagtggtgagcccgagcattctgacaatccatggggggtgacacctttcaagaaggttgtcagcttgccttcaagaattgatactcagcagacgtcggctgtggtgaccttgcatggacaattgtttgttcgagttccatttgagagcaatcaaaatagagaaggctgatagattcatgccgaactaatttaccaaggtttataggatagttgacccctaagccaaattcatgccgtgttctattatctctgaattatgtcaataattttttatttaaaattttcatttgatgttctgtcaaaagttttacaatttcaagcattgtttaaaatcacaccttagtaatagtatagtggcagcgttggttgctattctattatttaaaccccatgctaccaaaactaatatttccccaaaatgaaagaagtattctaaaaagcactgtaaaaa

SEQ ID NO: 26869 - DNA, 2106 bp, Glycine max
  unsure (1)..(2106): unsure at all n locations
  Clone ID: TF_GmC1243_1
cccacgcgtccgtccacgcgtccggtaggtgacacaacaccaacaagtggatggagctctgtttgcttgggaagttgaaaactttgaacacagtacaagaaccgcttaccagggaaacaacccaataccacttccaccattaacaatacacagataacccatttattgctaacatcattatctttccgtccattaaaacgggatggtaaaaaacaaaacactgggcctgggggccccgcgtccgcactctcaaggtacttccccactgatccgattttatgcccgtactagtctgacccttttagtggcatagattgaggtacaattacaaaagcatattacccgtatcgtatcctttctgctacaaccaccccgaaacacactgcgttttttttgtgtcaaacttcaaccggggctttcttacttctcttctcttcaactttttagtgttttttttttttttttctcgtgtcgggtccttgagcttctatttgtttatttatttccggcagcgagttgagttaattttcgtgtcatagtctcaattaggtggatgtgacttgtgtggttagggtttacatgcaaaaacgcatgtgcttcgtgtctaattcatcctgaaacaaggttttgggacagagatctgaatatttcaagctatctattttgtttctctatctagaaggttttgagaaatcaaagatggcgaatagatggtgggctgggaatgtgggaatgataagagagcaagagttgatggaaaacagcaacaacaacaacaacaacaacaacgctactactactacaccgacgaatagcagcaacagcaacactaacgcgaacaccaacaccaacacgaccgaggaagaggtgagcagggataacggagaggaccagaaccaaaacctcggcagccacgaagggtcggagcccggaagcagcggtcggaggccacgtggcaggccagcggggtccaagaacaagcccaagccgcccatagtcataactaaggaaagccccaacgcgctccgaagccacgtcctggaaatcgcctccggcagcgatgtcgccgagagcatcgccgccttcgccaaccgccgccaccgtggcgtgtcggtcctcagcgggagtggcattgtagccaacgtcactctccgccagcccgccgcccccgccggcgtcataaccctccacgggaggttcgagatactctccctctcgggtgcctttttgccgtccccctcgccgtccggcgccaccggactgaccgtctacctagccggcgggcaggggcaggttgtcggcggcaacgtggcgggctctctcgtcgcctccggaccggtgatggtgatcgccgccactttcgctaatgccacttatgagaggttgcctctggaggatgatcaaggtgaggaggaaatgcaagtgcagcagcagcagcagcagcagcaacagcagcagcagcagcagcagcaacaacaatctcaaggtttgggggaacaggtttcaatgcctatgtataatttgcctcctaatttgctacacaatggtcagaacatgcctcatgatgtgttctggggagctccacctcgccctcctccttccttctgatcacccttgccaatatgatcatgtctttaatctctcactgacttgcgaattaagtactatgttaattaatttctcacggtttttcttgcaagcatagctagctagctagcaaggttagttattaggatggttttgttaatttgtgcttcttagagactcgagtcaagtagatgatgttcttatctttaatatactttgtagtactactggtttgtttaggttcgttttgttaatttgtgcttcttagagactcgagtcaagtagatgatgttattatctttaagatactactttgtagtagtagtactactggtttgtttatttgttgttggttttacttctgtctaatcaagctgcttgttttggtggaaaagtttaattatgattgtgtgtagggataattaataaggatggagtttgaaatggtccggggaataaaattggagctgtgtgctggaatttgaacccnnnnnnnnnnnnnnnnnnnnnnnnnnnnnn

SEQ ID NO: 26870 - DNA, 378 bp, Glycine max
  Clone ID: TF_uC-gmflLIB3260P050e10a1
gggcaaaaacggggattacttcctgaatttcggccccgggggcgcccccgggggtccccccgggaattcgggcccggacccggggggggtcccagttttcccaatggggggccgaattaaagctgggcaaaaacaggggaaaaggtgcttccgggggaaaagatgtaccccctcacaaatccccacaaaatacgggccggaaacataaagggaaaacccggggggcccaaaggggggccctaccccaacataaggggggtgggccacaacgcccgttttacgagcgggaaaacctgggggggccccgtgcaaataaaaaaaaccccccccccccggggggggggggtttggaaaatggccccccggggggtttttttt

SEQ ID NO: 26871 - DNA, 1058 bp, Glycine max
  Clone ID: TF_GmC120058_1
ttatctcgcgaagaaaccagcaaaggcctctctcttctctctttctccttctgcttccttttctttccctgcactccatccaccgccgctcctcctctttatcgattcaacacaacacaagctttctctccctccatccatatatgttatatttatatacagacgcataccacacttcccttaaaataaccataaacaaaagagaactccttcctatttattaatatccagctatatcaacacccaaaaaataaactagtatatattcgtttttttttctttgaataaaaattgaacagtacctctctcttcctttgatgtgtctatggctggtttggatttaagcacggcttcacccttcgtccaaagtctccacagaccagacttcaaccaacaacacgattccggagaagacgccaaacaatcagcagaagatgggccacatcaccagggcgatgtggtggggcggcgcccgcgggggcgtccggcggggtccaagaacaagccgaagccgccggtcatcataacgcgggagagcgccaacacgctccgcgcccacatcctcgaagtcgccaacggctgcgacgtcttcgaaagcgtagccagctacgcacgccgccgccagcgcgggatctgtattctcagcggcagcggaacggttacgaatgtgagcctccggcagccggcgtcggcgggggcggtggtcacgcttcacggcaggttcgagatactgtccctgacgggatcgttccttcctccgccggcgccgccgggggcgacgagtctcagcatatacctcgccggaggacaggggcaggtggtgggtgggagtgtggtcggagagtttgatcgctgcgggaccggtgattgtgatggcggcgtcgttcacgaacgtggcctatgaaaaggttaccgttggaggaagaagagaacaggttgagatatcttggtgttgctggtaataatagtaacccctttcctgatccttcttcgggacttcctttcttcaatttgccaatgaatgttcagttgccctgtggatgcctgggccgggaaac

SEQ ID NO: 26872 - DNA, 2048 bp, Glycine max
  unsure (1)..(2048): unsure at all n locations
  Clone ID: TF_GmC873_1
ggtccggaattcccggctcgaccacgcgtccggaacgagggtaacgaaaaccctttagaggagtttggcacactggaggagcatgtgccgtttcatgaagagcaacatgcaatggtgcatcatcagcaagggcaagcagaagaggaagatcatcaggttcctttttgtgaagagatccaaggagatgaagaaggtggtgatggtgttggagtagatgatgagatgagtaatgtgttcttggagtggcttaagtctaacaaggatagtgtctcagctaatgacttgaggaatgtgaagctcaagaaggcgacactcgaaagcgcggcgaggcggctagggggaggaaaagaagccatgaagcagttgctgaagctgattcttgagtgggttcaaaccagccatcttcagaataagcgccgaaaggagaataatggtagtagtattagcagtgtacttcaggcacagtttcaggatcctagtggccagaacaacaaccagaatacacaaagtggttcatttgcacctgaatcaaacacttgtttcaacaaccaaacaccatggttgagttctcaaacttttgcaacagatcaggctcctctcatggtgcctccacagcaatttccacaacccatggttgggtatgtgggtgacccttacactagtggtgctgcttcaaataacatatcagccactcataaccataacaacagcaacccttatcaacctggtgcagaacaataccacatgttggagtcagcacattcatggccacattctctgttcaatgttgcttctaactatagtcagtcttttggggacaataatggtcttaacccacatgggggtttcggtggtggaggctatggcaataaccagtacccttatcagttttttcatggccctggtgataggttgatgaggttggggccctccgcgacgaaggaagcgaggaagaagagaatggcaaggcaaagaaggtttctgtctcatcacaggcatcatagtggtaatcaccagaatcaagggtctgaccctcatgcaagattggggggtgataattgcaacactgctttggctgcacctcatcacgcaaatccttcagccaattggatgtactggcaggctatgattggcggcgcggcaggtcctttggctccggtgattccggccgagccgccggtggtacaaccggtcgtggaccggtcggccatgcagacacagaattgtcatcagaatcgagttgcatcagataggagacagggttggaagcctgagaagaacttgaggttccttctgcagaaggtgttgaaacaaagcgatgtgggaagtttggggagaatagttttgccaaaaaaagaggcagaaacccatttgccagagctggaggcaagagatggaatttccataacaatggaagacattggaacttcacgtgtttggaacatgcgctatagatactggccgaacaacaaaagcagaatgtatttgctcgagaacactggtgactttgtgagagccaatggactccaagagggagatttcatagtgatatactcagatgtgaagtgtggcaaatatatgataagaggagtgaaagtgaggcaacaaggtgtgaaaccagagaccaagaaagtaggaaaatcgcagaaaaaccagcatgggacagggacaaatgcatcaactacagcttgtactgctgctaataatggcacgccatcgtcaccgaaaaccaaagctgaaaaaagtagtaaattaatataatacatagaatatgtatgtacaatatatattatattatattatatataataaaataagagactctgaagtctgaacacggtgctcacataatgttgaggagttttagcatgccctgcaatggaggctgtcaaggatttgtataacagtattttgggtatatttcttttcgtagtttattttgcgattgttattatgtgaaaatgttgtatgtgtttaacttggatgtacatgttacgttattagtggtctatgtgatgttcatttaagactgaaaannnnnnnnnnnn

SEQ ID NO: 26873 - DNA, 2570 bp, Glycine max
  Clone ID: TF_GmC873_2
ctctgaaattgtcatgtccacgttaaggtcttgattggcgcttcagggtttggagaagatagaatctctgcttcactctcttcactgctgtgggtggtaactgagccaaaccctattggttttggcaccatggaaaacgaacacactttggcggttgctgagagagagatgtggctgaacagtgaccaagacgagttcctaggagtcaatgatgcttccatgttctacgccgatttccctcctctccctgatttcccttgcatgtcatcatcatcatcttcttcttcagcactaccatttcctgtgaagaccatgacatgttccaccagaaccacaacaacaaccaccacttcctcttcttcctcttcctcatcctgggccgtgttgaagtcagatgctgaggaagatgcagagaaaaatcattgcaaccgctacatgcatgaccaacttgatgcaactttgtcttccactgcttccatggaggtttctcaacagaaaaacctcgatcctgggcttggtggccctgttggtgagtgcatggatgatgttatggacacttttgggtacatggagcttttggaggccaatgatttcttcgaccctgcctctatctttcagaacgaggataacgaaaaccctttagtagatttcggcacactggagcagcatgtgccgttgcatgatgagcaacatgaaatgttgcatcatcagcaagggagaacagaagaggttgatcatcaggttcctgtgtgtgaagagatccaaggagatgaagaaggtggtgatggtgttggagtagacgatgagatgagtaatgtgttcttggagtggctcaagtctaacaaggatagtgtctctgctaatgatttgaggaatgtgaagctcaagaaggcgacgattgaaagtgctgcgaggcggctagggggaggaaaagaagccatgaagcagttgctgaagctgattcttgagtgggttcaaaccagccatcttcagaataagcggcgtaaggagaataacggtagcagtattagcagtgcacttcaggcacagtttccggatcctagtgtccagaacaaccagaatacacaaagtggttcattttcacctgaatcaaacgcttgtttcaacaaccagacaccgtggttgagtcctcaaacttttgcaacagatcaggctcctctcatggtgcctccacagcaatttcaacaacccatggttgggtatgtgggtgacccttacactagtggtgctgcttcaaataacatcacaacttctcataatcataacagcaacaacccctatcaacctggtgcagaacaatatcacatgttggagtcggcacattcatggcctcattctcagttcaatgttgcttgtcactatagccagtcttttggggacaataatgttattttcccacaggggggttttggtggtggctatggcaataaccagtacccttaccagttttttcatggccctggtgatacgttgatgaggttggggccctcggcgacgaaggaagcgaggaagaagagaatggcgaggcagagaaggtttctgtctcatcacaggcatcataatggtaatcaccagaattcagggtcagacccacatgcaagattggggggtggtgataattgcaccactggtttggctgcacctcatcatgcaaatcctacagccaattggatgtactggcaggctatgacgggcggtgcggcgggtcctttggctcccccggccgagccgccagctgtggaccggtctgccttgcagacacagaattgtcatcagagtcgagttgcatcagataggagacagggttggaagcctgagaaaaacttgaggttccttctgcagaaggtgttgaaacaaagcgatgtgggaagtttggggagaatagttttgccaaaaaaagaggcagaaacccatttgccagagctggaggcaagagatggaatttccataacaatggaagacattggaacttcacgtgtttggaacatgcgctatagatactggccgaacaacaaaagcagaatgtatttgctcgagaacactggtgactttgtgagagccaatggactccaagagggagatttcatagtgatatactcagatgtgaagtgtggcaaatatatgataagaggagtgaaagtgagacaacaaggtgtgaaaccagagaccaagaaagtaggaaaatcgcagaaaaaccagcatgggacagggacaaatgcatcaactacagcttgtactgctgctaataatggcacgccatcgtcaccgaaaaccaaagctgaaatttgtagtaaattaatataatacatagaatatgtatgtacaatatatattatattatattatatataataaaataagagactctgaagtctgaacacggtgctcacataatgttgaggagttttagcatgccctgcaatggaggctgtcaaggatttgtataacagtattttgggtatatttcttttcataatttattttgcgattgttatgtgaaaatgttgtatgtgtttaacttggatgtacatgttacgttattagtggtc

SEQ ID NO: 26874 - DNA, 718 bp, Glycine max
  unsure (1)..(718): unsure at all n locations
  Clone ID: TF_GmC283122_1
cacgcgtccgaaaaaaaaaaccctaagctaatgatgatggatcagcgacagcgagagaagctgcttcacaaaaccgaggcctgtgctttcgtggcaggtgttgttccggagctttcccttgtcaccgttccagggaacaacaccaacaacgttaacaacaacaacaacgttgtttctcattctcaatctaacgggtcgggtcggatccaggaaaacaaccaccaccttggactcgttgctgctgtcacctccgccttcggtaccgttcaaaggaagaaaaggatggcgagacaaagaagatccactaaacccacttcgttgatgaaccatctcaacaaccataagcacaacaagcctcgttctcttccttctcccagtgcatcctcctcgtacgtgccactctcctccgcaactctccagcccgcacgtgaaatcgatcaaagaaggttgagattccttttccagaaggagttaaagaacagtgatgttagctcccttaggagaatgatattgccaaagaaagcagcagaggctttcctttcagctcttgaatcccaagaaggaattgtaatcagcatggatgatatagatggcttcatgtatggaggttcagtacagggctgggctacatatacagcggatgtatgcacttgaaaatctggagaatttgncaacacacatggcctcgtttggagattcattatggttaccaagatag

SEQ ID NO: 26875 - DNA, 2397 bp, Glycine max
  Clone ID: TF_GmC5693_1
ggctcgagcttagaagcaaatgctggcatggtatcgcagattcgtgtggcaagaccacctgctgaaggacggggaaggaatcaattgcttccacgttattggcctaggattactgatcaagagttgcaacaaatatcaggagattcaaattctacaatcgtgccactctttgaaaagatgcttagtgcaagtgatgctggtcgaattggtcgcttggttttaccaaaagcatgtgctgaagcatatttccctccaatctctcaaccagagggccttcctttacgaatccaagatgtgaaaggaaaagaatggatgtttcaatttagattttggccaaataataacagcaggatgtatgttttagaaggtgtaaccccctgcattcagtctatgcaattgcaagctggagatactgtaacatttagccgtatggaccctgaggggaaacttataatggggtttagaaaggcaacaaattctactgcagtacagttacaaaagggatgttcagaaacccacctaaatgcgctgtctaaaaaatggaactcagctggtggtgacatgagttggcataacattgacatgcctgaaagcagaaaaagagatgagttgccgttgccacctgtgatggttcctgagaagaaaagaactcggaatattgggtcaaaaagtaagaggttgcttattgatagccaggatgcactggagctgaaacttacttgggaagaggctcaagatttgctccgtccacctcctactgttaagccaagcgcttgaataacagagcagcaaacaaattcagattaaaatgtgcaggcacagtctaccaaatgatagttaggtgtagcacaatgaagattgcgaaaccactacggttattcatgcgcaggaaaccagacatgaagagaacagcgggcaagataacgagccaaaacaattaactcatgaatgcttgccagttgcattttcttttttccttcttttgttgcactcaaaaatcattttccaagggaccttgataaacttctgaggctgaaaaaggaattcaagtatgaaagtctgtcagctaggcagagactggccctggaacatgaatcttcaggactggatgctttggcaaatgcagcaatactgggagatgatgcaagtgactctggcagaacaccagttgttaccaccacaaaacatcctcggcatagacctgggtgctcttgcattgtctgtatccagccaccaagtgggaagggcaaacacaaacctacatgcacctgcaatgtgtgcatgacagttaaacgtcggtttaaaaccctgatgatgcgaaagaagaagcggcaatccgaacgtgaagcagagattgctcagagaaatcagttatcatggcggacgaaagatgaatcagaagtagatagcacctctcgccatttaactccagttgacggtttggagaatgaagtaagggtgcaaaatgaattagattcaaggagtccagacgatgcggtggctgaagctgccaagggacaattagacttgaattgtcaacctgatcgagaagatgtgcaagctgggccgaacagcttgagcatgacgagtcttcttgaagaagcaaatctcccgctggaaacctacctaaagcgaaatggccttagtagcttgatatcagagcagcaaacaaattcagcttcaaatgtgcaagcacagacaaccaatgatagtgaggtgaaacacaatgaggattgcggaaccgcttcggttattcatgagcaggaaagcagtcctgaagagaacagtgggcaagataaagagcaaaacaattaactcatgaaatcttgccagttatattataatttttttttccttttttttttaactcaaaaatcattttacaagaatccttgcataaattataaaattataggaggttcatttgtatgtctatatttttttttcttgttattgttgtctgtgtcttatggttgtgaaatttccccccaaaactcaataacctatatacgccaaagcgtgtgttttagggttgtaaactagtgagaggcaaggagttgaaggaaagcacaccacctggtttttttttctttggtgtgtgtgtgtggtgagtctgaataagcattgtttttcttcttttttgttatatggagaaagggagatttcacctaatttcgtttcttagtgcgtgtgtttagtttgaaaagccattatttggcttgcctttttaataggaaaatgctcttttgcatgaaaaacatttcactgatgttgtacagaactaatgtgactggttgatgtatgtaatagttatgtgatttcttcaaccgttgaggctgcgggcgcagggtgcggcagcgagctagtcagcccgtcgacccgggaaacatatgtcat

SEQ ID NO: 26876 - DNA, 3008 bp, Glycine max
  Clone ID: TF_GmC962_1
ttcctctctctctttttctctctcttcactttttttctctacagccctccgcgtctcccatacatcgtattatccgaaagcaagcattatcagaagcagaaagaaagaataagaggttgcagcaacaatggcagccatggctgcgcttcagagctcaatggtcggtctctccctctcctccaactctttcttaggccaacgcctttctcccatcaccctcccctctcttcttccgggtaagtcaacagagaagcaatgtcctattgtaatgaggcttaaacgatgggaacggaaggagtgtaaaccaaacagccttcctatcttgcacaaaatgcatgttaaacttggagatacggtgcaagtcatatctggacgtgaaaggggtaaagttggggagattactaaaatcttcaagcataacagcatctaacatagtaaaagatttaaatttgaagaaaagagcattttgagagtagagtagaaggggatcatgggagaatgattatgactgaggttgttgtatgtagatctattcagattctcaacttgatatatctgatggtcgccatcgtggggaagcatactgacaatgatcgtggcattgaacatctgctgcaaaataagaaagagagaaagttttgataaagcggaggcctaatggtatctaaacatccatccttgcgaaggtaatgaagtctggactaattgaacgtgatggtactgacgtcaaccaaaaaagcactagcaggaagacattaacctaaataaatatgtcttttttagtgtagttgtaatttacgttcaagtctagttaggagagggcgtaccataaaattgaaaatggataaaactgttggtaatgaattttttgattctaagccatctttagatggtattggtaacagggaattagatgcaggattctgtcaatagatgagagaaaaaagtatggagtgatagtctgtcggtttaaagtgtctacttctaccattatttgagaaggtgttgagggccactgtcgcaggtcttattggccgtcctgtttttccctaagcctaacctgatgcacattttcctcttatttcacaatctgaaggtgttgctttacgaatgcaagatgtgaaggggattgagtggacatttgagtagaggttttggccttataacaaaagtaggatgtatacattggagggtgtaacagttaccatacagagaaggaactattgatctcttgataatgaaggaattaattgtagacaaaaaggttgatcttcatatatggcatcacggttagaataaaatatttcaaatatttagaaaaagtatgtgacgagtagagcaaaggaggaacggggacaaattattaagattgaaggttctatccacagctcaaatgcgatgctctactccaaatgtcttaaggtagcaagtcgtgtggggcataaagtcctagataatggtaaaaaagtccgctaccttataaaaactggagaaataattgatagttcagagaactggaagaaactgaaggaggctactaagaaaactgaagaagctgctgctgctacgacttacaatgatggaagtaaaacttacatgtagctacattttaactctaatgaaactcatttggaacttacatatcaagaagcacaatatttgtttcgtccttctccggttgtcaagccacaaattataacaactgaggaccaagtatttgaagaatatgaagtaaccactgtttttgtaaagagaactatattcagtgcctgttcatctggggggaaggaacaatgggctcagtgtgatgattgctctaaatggcgaaagctgcccgttgatgctcttcttcctcccaagtggacatgttctgaaaatgtttgggattcaagcaggtgttcatgctctgtgccggaggagttaagttcaaaggaattagaaaatcttctgaaaaccaacaaagattttaaaaagcggcgaattgcagaaagcagcaagtcaatccaagaacacgaggcttctggcctggatgcccttgccagtgcagctgtccttggagaaaatcttgttgacactgccgagtcatcagctggagccaccaccaaacatcctagacaccgtcccggctgctcttgcatcgtatgtattcagccaccaagtggaaaggggaggcataagccaacctgtacgtgcaacgtgtgcatgaccgtgaagcgccggttcaaaaccctcatgctaaggaagaagaaacggcaatctgaacgcgaagcagatactgcccaaaaagaccaaactctcctgaaagatgagccggataccaacggagcaccgagggacgatacaagtcggttggagaaagaggtgggactaaacaaaagtcaacatcaggtgggtgagtccagtgctggacagatagatctgaattctcatcccaaccgcgaagacatgcaagtggaaaccactggacttaacatgtctagtcatcttgaaccagcaacaaaccatacagtaggggaatttatgaaccaaaatggcctaagaaactttaataatgaagtgcaaactggtcagaattcttctttgcacactcctaaatctaatggagaaggtcagagatacttctctgatggaagatgctttgcatccattatgtggaaccaggaaagaaaagatgaggtacacagtcaaaccaatcaaagtcaaaacaatctttcttaacaatttatttaattttatattcaaccttttttttttcctttactggatttcttttatatttctccttgcacttgcagtatatattttgctttctctttcaaaggggtggtcagaagtagttcgttcttataaaaaaataatgtaattttttgtatcgtctatctttgaagttttagttttttatttttcatggaagtgggtcgtgcacatttctttctttgtcaatgtatttgattgtcggttatatgaatgaaacataggaaaaagtttacagattcaatctgtttgtc

SEQ ID NO: 26877 - DNA, 1831 bp, Glycine max
  Clone ID: TF_GmC5717_3
ggctcgagcaaactccacctccaggaaagcaatttaatggcactatgcatttagcacctgattcatcaggtgaggctcaggttcgcaatgggcggcctcgagcagatgcccgaggaagaaatcagttattgccacggtactggccaaggtgtacagatctggagctacagcaaatttctattgattcaaattctgtaattactcccttgtttcagaaaaccttgagtgctagtgatgctgggcgaattgggcgtttagtgctacccaagaagtgtgctgagacctacttcccaccaatttctcagcctgaaggattgccacttaaaatccttgatgcaaaacgtaatcgattcgggtggggggtgcaagggaagagatcatataattgctttgcttatttgcgaggatttgatggaagaacatctcactccattggctgttacccatctccttcaacacactctcagaagtttgtgcatccatgaaaattctcaatgggtctacgcagtcttctggaggatcttgcctagaaactaccctccacccaagtgggaaggacaaggggcttatgatagatcaagaggaaacagaaggaattggatattggtgtgggaagatggtttctgcaattttgctgcatcagcagcacctgaagttaactctggtgattgttctaccccacctgtttatgggaactgtgaatttcagccctaccaagggctgcaaccggagctcttcttcaagatgtcacatgagatctataactatggagaagggttgataggaaaagtggctgcagatcacagccacaagtggataaacaaagagcctaatgatcaagaaatcaacttcttgtcagcatggcacaattcagcagattcgcaccctaggacttgggaagcccagttcctgtctggtataaagaccatagctcttattgctgtaatgttgttcaattagagctgttcacaaggttattgagcctgacatgtggttcttttgagaaaaatttcagctacattgagagcatccctggtgtgctgttgccacacccttcatcttcagcatacccttataaaatagaaggaggagggtatggagcaccagaacaatggcattatcaaggcggcaacaaccatcaccaccttgcatcaccccaacaaactgaactatatgatcaccatggccacttcaacttgccactcaagataactccttcaatgagtagccttgaggcacttctctccaagctcccctcagtggtgccaccaacaacaacacaacaacaaccactcttgccatctaattcccagcaacaacaacgaaggccattggagttcatcatgggaatgcagaaagtggcaaaggaagagttggaacaagaagaggtgtacaggccaatatatatatatgtgtgtgtggggggggtgattgttgctgtccagtttttaaaaaaaaaaccctaaaaaattatagcagagaagatgctagtaaaagtacttactaaataaaaatcaatgtacttggttatggtgcaagtctgaggattgagacatacaaaaaacaaatgcatctactatgatataaactcgagctaatatgaacttgacataggtgagagtagcagctccttgccaggaggagggtacccccaacaccaacatcaacatcacttccatcaagatcagaataataatgtaactaggagtggagccaccaatggattttgaaatttctgtaccattaattaattagtactcctttttaaaaaaaacagatgatgatgataatggggaagaatcagaggcaatgttaatgaaatttagccctc

SEQ ID NO: 26878 - DNA, 361 bp, Glycine max
  Clone ID: TF_7796380
atcaaacaaccacaacaggaggagaacaagaaatattagacgataaagaaccgatgttcgagaagcccttaaccccgagcgacgtggggaagctgaaccgtctcgtaatcccgaagcagcacgcggagaagtacttcccactgagtggtgactcgggcgggagcgagtgcaaggggctgttactgagtttcgaggacgagtcggggaagtgttggcgcttccgctactcgtactggaacagcagccagagctacgtgctcaccaaagggtggagccgctacgtcaaggacaagcgccttgacgcgggcgacgtcgttttgttcgagcgtcaccgcgtcgacgcgcagcgcctcttcatcgg

SEQ ID NO: 26879 - DNA, 662 bp, Glycine max
  Clone ID: TF_LIB4164-006-Q1-N1-B8
aaacacatacaacattggggcataacaatcgcaaaataaattatgaaaagaaatatacccaaaatactgttatacaaatccttgacagcctccattgcagggcatgctaaaactcctcaacattatgtgagcaccgtggggaggcgggagagtctcttattttattatatataatataatataatatatattgtacatacatattctatgtattatattaatttactacttttttcagctttggttttcggtgacgatggcgtgccattattagcagcagtacaagctgtagttgatgcatttgtccctgtcccatgctggtttttctgcgattttcctactttcttggtctctggtttcacaccttgttgtctcactttcactcctcttatcatatatttgccacacttcacatctgagtatatcactatgaaatctccctcttggagtccattggctctcacaaagtcaccagtgttctcgagcaaatacattctgcttttgttgttcggccagtatctatagcgcatgttccaaacacgtgaagttccaatgtcttccattgttatggaaattccatctcttgcctccagctctggcaaatgggtttctgcctctttctgtctcctatctgatgcaactcgactctgatgacaattctg

SEQ ID NO: 26880 - DNA, 640 bp, Glycine max
  unsure (1)..(640): unsure at all n locations
  Clone ID: TF_LIB4199-008-Q1-K1-F1
ccagcgtccggctggagatactgtaacatttagccgtatggaccctgaggggaaacttataatggggtttagaaaggcaacaaattctactgcagtacaggaaacactaccatctaatatgcccaatggttctcattcaagtgaaacttcctattctggtgtttatgagaatctacctatattaagtggttactctggccttcttcagtcacaaaagggatgttcagaaacccacctaaatgcgctgtctaagaaatggaactcagctggtggtgacatgaattggcatagcattgacatgcctgaaagcagaaaaagagatgggttgccattgccacctgtgatggttcccgagaagaaaagaactcggaatattgggtcaaaaagtaagaggttgcttatcgatagccaggatgcgctggagctgaaacttacttgggaagaggctcaagatttgctccgtcctcctccaactgttaagccaagcattgtcatgattgaggatcatgtatttgaagaatatgaagaacctnctgtctttgaaagaggagtatattcgtagttcgatcaactgngtaaatgagcagtggatgcagtgtgatagttgctcaaaatgcggaagttgcctgntgatgcactt

SEQ ID NO: 26881 - DNA, 722 bp, Glycine max
  Clone ID: TF_GmC449061_1
acgagacttctactactactagtgctgttgcacgtcctcttcaccatcatcatgtaataaatatcccttaccaacaaaatccatggctggggatgaatattgttcatcaggagcatctggttccggctccagaatccctcacttcagcagctggctgcgggttgttacaccagcaccaggaggcagcaggttccaatttcatcatcaacaacaatcatcatcatcatcaacatcaccaccaccacacaacaaagcagctagacttcatggacttgtcacttggtagcagcaaggatgaagggaatttgccaggatcttcttcttctgtctatgctcatcatcatcatgcagcaagtgctagttcttctgccaatggtaacaacaacaacagcagcagcagcaacttgcagcaacagcagcagcagcctgctgagaaggagcacatgtttgataaagtagtgacaccaagtgatgtggggaagctgaaccggttggtgataccaaagcagcatgctgagaagtatttccctcttgattcctcagccaatgagaagggtctgttgctgaattttgaggacaggaatggtaagttgtggaggttcaggtactcctattggaacagcagccagagctatgtgatgaccaaatgttggagccgttttgttgaggagaagaagctagatgctggtgacatggtgtccttccagcgtggtgttggggag

SEQ ID NO: 26882 - DNA, 470 bp, Glycine max
  Clone ID: TF_GmC928_1
ctcgagaacactggtgagcttctttgctttgaatttggctccacacaatagttaatgacctttcgtttttccaccactttcattttcaaggaacatggtttttcatacacacatccatatttccttgtgcaggtgactttgtgagagccaatggactccaagagggagatttcatagtgatatactcagatgtgaagtgtggcaaatatgtaagaccctttcttattttccatttttcattttcttaacatgttttgaggtataataattttttacgatacttatataatgtttttttttttatcttctgttttaatacaaatttttgcatcggcattcttgattcctatggtaattttcttatgacctgatcataaggaagtggttcgagtccggtgaacaataaatacaaaattttgtaagaaaaaacaagtatcatgaatacaattttcataaatacaaatttttgt

SEQ ID NO: 26883 - DNA, 2313 bp, Glycine max
  Clone ID: TF_GmC5689_7
gttgttgctgaggagtttcttgaaatttgtgggatggagggttccattccaaccggtttcaaatggagatctagaagagaggtggtggattggctgacatcgacgctatcaaagcagaacctgcagggagatagaagtgtatcagctggtcataacttggtaccatctcatgaggccacaaatgacagtgtcaatgaaattattggtctgtctgctcaaataacagatgacaaggactttccaacgagtaactccaaattgtccaattcagacattgtttggtcaggagttgcgtggagatgtggcaaacaacttaagcattatcctgcttttttcaggaatggcatcaaaatagcgattcaatcctttgtttttgttatgggcaagggagagaaccattatattgcttatgtagaggatatgtatgaagacaggaggggacagaaaaagatcaaagtgaggtggtttcaccataatcaggaagtcaagggtgtagttcctgtacgaaatcctcaccctcgggaagtttttatcacaccttattcccaagtcattagttcagagtgcgtagatggttctgccacagtcttaactcgtgaagactttgaaaaatgcatgccttttttttcccccacttcaagggacagaatacatttgtgctttaggcagtttagaagcaacaaaatcaagccctttgacttgagtaaattgcgtggttactacgctcaaccaattctttcttgcttacaccttgattcaatccagcaccctgagttcctagcaagagaagatgaagagttgagtgcaggtgatgatgtgaaagtaggagtcaagaggaggaggggtgataaggggtctcctcagtcttggataagtcgccagggggttaggaagttaagtagaaataagcaaatgatggtatacaaaaccttccaggttgcaaattatgcaagatcagaaaggatattgctttctcggaagcaggttgagtgtcaaccttggtctaaccacacatacaaggttgatgacaagatagagttactttgtcaagatagtggcatcagaggctgctggttcaggtgtacagttgttcaggtagcccggaagcagttgaaagtccaatatgatgatgtccaggatgaagatggaagtggaaatcttgaggaatggatcccttctttcaagttagccaggcctgataaacttgggatgaggcattctggccgccccaccatcaggccagctccaacttatgaggaacaagaactagctgttgaggttggaagtgcagttgatgcatggtggagtgatggctggtgggagggggttgtaactagaattgacaactgtggggatgatagtgttgaagtccactttcctggtgaatgcttgctgatgaatgtgtgcaagaaggatttaagaatatctagagattggttaggggacagttggattaacattaaggcaaaacctgaaataactaaatctatattcacagctaataatagctttaacacaaagctttctgtgtccccatctattgctaaagatgtggactctgttggttttgctaattcatgtcatggtgatcctgttagtaagaagtcaaatgaaccagttgttatcaaagaagagaattttgtgtcttgtgatggctctgataaagaagagaattttgtgtcatgtgatggctctgctgaagatggggactgtgtccaggataataaaccctcttcagaaaaaagtactcaagctgataatattgatacacatatcaattgtgataatgaagagaattgtggtgataatgataatgataacaatagcaatgatggtggtggtaacaagaatgatgatgataatggcaataaagatatgggggtatttggaacttctggaccggaccaagaaactgtagagctcatggaagtggctgtataaataattttttagaactcatgcataaagttatggtagttctgattgtagagctttgccatcatctcttattgtgttgtaatctttgtcctatgttagtctgagaatgtaaatagtagttgcacggttatgtgagaatctaattgattgttaacttagttgtctttatagatgtacagtgttgagtgtaatgtgctagcatgtgttgtcttcctttccattggttgtattagagagtaggtttctttcatactgagacaaatattgttgagtaatttctattgttatctgattagtttcatttatttgagccagtagtgttctctcgcgatctagaacaaaaaaaactcgagactagttctctctctctctctc

SEQ ID NO: 26884 - DNA, 500 bp, Glycine max
  Clone ID: TF_GmC1073_6
aattcggctcgagggctcgagatcgacgcttcactcaggtcgcaaccagcgaagatgaggacgaagcaccgccgcctcctcctcctcccaagcagcaatcgtcggtcagtgcccccgaagagaaccgttcgaagcagcagcagcgcaagaggaagagaatgaagcttcaagaagaagaggaagaggaagaggagaaagaggaagagaagaagaagaagaagagaaagatcaaagacaagcaagaagagagatcgaacgaagaagaggaaccgccgcaggaagacgcaaagcccattggcgaaccggttaggttatccggaaagggaaggggccgcaaaaagcattacgaatccttcgagtacgacggaaaccaatacatgctggaggaccctatacttttcacgcctgaggacaaagatcaaaagccgtatgtggctattatcaaggacattacgcaatccctaaatggcagcatgatggtcacaggacagtggttttat

SEQ ID NO: 26885 - DNA, 425 bp, Glycine max
  Clone ID: TF_GmC44819_1
ccacgcgtcaatacggctccgagaagacgacagaagggggtgagttttaagttacattgtgttgcaattgaggagttgaggtagtgattgtaaccaaaaaaaattagaaatggagaatcatcgacgtcgtactcaagtgacaacaagcgatgatgaagacgaacaagaaaaagaagaggtattgaaacggtctcgtcctgtggaagacgctaagcctattggcgagcctcttaagtattctggaaaagggaaaagcaagaagtggcactatgactcctttgaattcaatggcatccaatatactattggggatcatgttcttttcaaacccgaggaaaagggccaaaaaccatatgctggaattattaacgacattacacagggaaataatggcaatgtggtagtgacgggacaatggttttatc

SEQ ID NO: 26886 - DNA, 686 bp, Glycine max
  Clone ID: TF_GmC986_3
atgaagcagtgacgtagcaggaatctcctcctagtgaaaagagtagaaaattttgtttggagcactctccaacagcaaatccttgacaagtcttacttcaatgggtcgttaaagccaattaacacttcacttccacttattctctttaccaactgtcacacgatgacttattccaatgaaaggtgggcggtctttaggtggtttgaagagagcacagtcaccagcaataattttgcgaccatccttataaaaccaatcaactgaagacttcaacgaagaagaagaagaagaagaagaagaagaagaagaagaaaaatcaacggttacactagagtgggcacgcgtgggggatttccacatgtgccgagtcctccttttcctctccacacctcgatcccaccttcaaacccaacgactaccatcaattccccaaccacgaacctcaaaacgcaccgtttcgacctccgcgaaaccctagatctgcatccgaaaaccctaacgcgaaaacatcctccgccaaaaatagcaacaattaaaattcggaagctctatcagggcccgaaatcgaacgcgaatcggaacgcggcgatgaaaagcgaaatttcttagccgccttacgatcttgcgagaagggaaatgcgtgcgatgcgaagcggacgcgtgggtcgacccgggaatccggaccg

SEQ ID NO: 26887 - DNA, 1307 bp, Glycine max
  Clone ID: TF_GmC126_2
ggctcgagaatgtattggccacactacattatgtagataacattagatatcacatgatgaagcaaattaggaaactgcttagcggagatctcaggaccaaaaaatttactacgaaacggtcaaatgtagtgaaccctccaagaatcccatagcattcccaaaaaatcactgataaaatcgcaggcgaagcgtcacagtcactccctctcctcacacgaaaaaagtatccccccaacccaccccaccccacccccaaccctcaacttagggttcttctgttcttcttcttcttctcctttaaccaaacaacaagaaaaaaaaatcacattccccaaaacacccttctcgctccgcatggcgaaaacgaggccaggcagaaaggacgtggactcgtacaccataagaggaaccagcaagatcgtccgagctggagactgtgttctgatgcggccctcggacacgtcgaagccgccttacgtggcgcgcgtggagaagatcgagcaggacaacaggagcaacgtgaaggtgcgtgtgaggtggtactaccggccagaagagtcgattggtggtcggagacagttccacggggctaaggaactgttcctctccgaccactacgatgtgcaaagtgcacacaccattgagggcaagtgtgttgtgcactcttttaagaactacaccaagcttgagaatgtgggtgctgaggattactattgtagattcgagtacaaggccgccaccggggctttcacccctgaccgtgttgctgtgtattgcaaatgtgagatgccttataacccggatgatctcatggtacaatgtgaagggtgcaaggattggtaccatcctgcttgcatgggcatgactattgaagaagcaaagaaactagatcattttgtatgttctgaatgttcatctgatgatgatatgaagaaaccccaagctacattttttgcatcactgggagctgatggcaaggtggagccaaagcggcggaagagatgaccataatgcagtagtagtaaacatgtgaggtgtgtttggctctagctgaatttggctggctctatggtagcttttgtgtgttgtacagcttcttctagaggctataaacatttcatgtatttgactcaggttatgtatctatccgtgttagattttatcatgacattcatctgtttttcatttgtccatgatgagacctccgatccaagtgttaattcttgagatggcatcaaaccttaaaaactaagtacagagcaattgttagtttaaaatgttggttcctttttggtaccttgcttttg

SEQ ID NO: 26888 - DNA, 579 bp, Glycine max
  Clone ID: TF_16996963
tttgtgacgggtcttacaaacaaaatggaagagcgccaccataccaaatggttggtgaagaagaagaaagttgtgccaaggagtgaaccaaatttaaatcctagagcagcagtgggtcctgttgtatccaagaggaaagctatgcaagctacaacgacaaggctgatcaatagaatatggggagagtattactcaaaccacttgccagaggatgcaaaagagggaattgctagtgagttaaaggatgaggatgaagtggaggaacaagaagaaaatgaagatgatgacaatgaggagacaatacttttggagggaaccccaaaggcacattcagcttcaaagcaaaccaaaaaattttctgctgaaacagaaataaggtgggaaggggaacctgaagggaagactagttctggatatcctgtttataaacaggcaattattcgtggggaagttatttctgtaggaagatctgtgttggtggaggttgatgaaacagatgaatttccagacatatattatgttgaatatatgtttgaatcaaagatcggaagaaaaatgttccatggtaggatgatgcag

SEQ ID NO: 26889 - DNA, 2274 bp, Glycine max
  unsure (1)..(2274): unsure at all n locations
  Clone ID: TF_GmC126_1
gctgtgtattgcaagtgcgagatgccttataacccatatgacctcatggtgcagtgtgaggggtgcaaggattggtaaaaccagtatattctgcttttttttgtttactgttattacatttgtgagtggtttttggttgtctggttctctaattttagcattagatgcgttgtttgcttggatgaaggaattttgtgctcctgcagagccatctaaaaggctgctgaccctaaacaaaaggaagaatgataaagattgcaaaatgacttcaaggagccttaggaaaatgttttcccaagtccaacagttataatgcactcatgactttcattgttattcaaactctgtcttggtctatgcacatgttttgcatgtcgctctttacaaggctttcagcttgttccgtcaaaggaaaaacaattgacaacaatgcaggaaatggagaacatataaaacatttttcttttattacatgtagctcctttgtaaacgaaatagcaggatggattttatggagtttaaacttttgatgtgtctacatcaacagtattttgtcagcctataatatcgggattctggatttctttgtttctatttatcaatatgtgtcagccaatccaaattgaatgatgcaggggctgatttcttgtgctctgataagctttgacctaatttggctacaagaattcatccattgtaaaagattgttaaatttaaggagtatctgagaagtagtgctacttttatttattttttttctgtttgtgaccctatagattttatgaaagaaacactgttcaattttggtaggttttttgtaggccttctctggtgcccctcttctaattcttctctcaaaaggactgaacgaaaaaaccttagggttcctctgttcttcttcgccccccaaaaaattttctggctcagagaaattcaaccgttctcgccattgccgaagctccaactcctcgcatttccaactcttcacccaaaaccctttttgttggaacagagtttcagagagagacccttcacaacatggcaaaaacgaggccaggcagaaaagacttggattcctacaccatcagaggcaccaacaagatcgtaagagctggggactgtgtgctgatgcgcccctctgatacgagcaagccaccgtacgtggcgcgcgtggagaagatcgaacaggatagtaggaacaacgtgaaggtgcgtgtgaggtggtattataggcctgaagagtctattggaggacgcaggcagttccatggagcaaaggaactgtttttgtctgaccattatgatgttcagagtgctcacacaattgaagggaagtgtattgtgcactctttcaagaattataccaagcttgagaatgtaggtgctgaggattactattgtaggtttgagtacaaagctgccactggggctttcacgcctgaccgtgttgctgtgtattgcaagtgcgagatgccttataacccagatgacctcatggtgcagtgtgaggggtgcaaggattggtaccatcctgcttgcgtgggcatgactattgaagaagcaaagaaattggaacattttgtttgttcagaatgttcatctgatgatgacatgaagaaaccccatgctacattttctgtatcaccaggatctgatgtcaaggttgagccaaagcggcggaagagatgaccatcacgaagaattaactcatcttgcgaatgcaactcttgctgaatttcgcgggctatgtggtagctgttgtgtgtgtattgtacagcttctaccagaggctataaaaacatcattttatgtatttgactcaggctatgtatgtattggtcttagatttatgacagacattgatctgtttcccttgtgtccagaaagagtaactcctgtcagtgttaatgtttgagaaaacatcaggccttgaatactggagtaaaaagaaatgatcaattttctgcaattggcaaaggttattttccattttctgaaatttggattcctgacaatcacctcctcggcagttgtccatgatgcgaccatcgatctctttcttaattcttcggagggccgcggttgccggggtgtgtgcggtgcactgctgctcccagaggctgtttggccaccggtgtgtctctcggactctggcgatgtatgtattggtcttagatttatgacagacattgatctgtttcccttgtgtccagaaagacgtaactcctgtcagtgttaatgtttgagaaaacatcaggccttgatcnngagtaa

SEQ ID NO: 26890 - DNA, 715 bp, Glycine max
  Clone ID: TF_GmC237787_1
cacgcgtccgctcttctccgcttgtccctctatccatcactggaagcagcgatacgctgccatggctaaaaaacgcagcgcatcagacgccaccgatgatgcacaaaacgacaccgtatcgctgcttccctcccaacgcaagaagcccaagcactctgctcctaaccccgacgcctgcttcgtcggaaagcccattccttctgccgaggcccgcgccaaatggccccaccgatacccctccgaggtgaaaaagaaagctccagctagaagctcagaagaggttacgagtgaaaacagtgaggttatgctggctaggtgtcattatcgtcaagctaaagtagatggagttgtttataacctctatgatgatgcttatgttaaggccgaagacggtaaaccagattatattgcacgaatcgttgagatgtttgagactgttgataaggaacaatgttttatggctcagtggttctacagggccgaagacactgtgataaaaaatcacggtgatcttgttgacaagaagcgggtttttatatctgatgtgaaggatgtaaatccccttgactgtattgtttcaaaagtcaaaattttcaaaaaaaacccaagtgtagatttggcttcaaagaaggcaaaattgcctttttgtgattactattatgacatgaagtacactgtgccatatctaacattttccaacctagtcaatgaaaca

SEQ ID NO: 26891 - DNA, 2169 bp, Glycine max
  Clone ID: TF_GmC1759_1
ggctcgagaaaagatagagcaaggaactcataaaagtgggaggaatgtggggttgaaagcttatgttgtgtgccaagtgcttgagattgttgtcaaaaaggaaataaaacaagctgaaagaaaatgtacacaagtcaaaatcaggaaggtcattcgaccagaagatttatcaaatgagagggcatattgaactgatatacgagatgtgtattacagcgatgaaacatatataatctctgtagaatccatagaagggaaatgtcaagtcagaaaaaagaatgatattcccgaatgcagtgctcttggtggaatcttccaaaatgtttttttctgcgagctcttgtatgatcctgccactgggtcactgaagaagttgccggctaatataaaagtaaaatattcaagtggacaaacatctgatgctgcagctagaaagaggaaaggaaaatgtatagagggagatggtgtttcagagtccacaaaggaaggaaaaacattaaatgataaacgtttagcaaccttggacatttttgcaggctgtggtggcttatcagaggggttgcagcagtcaggagtttcatcaactaaatgggctattgagtatgaagaaccagccggggatgcatttaaagctaatcatcctgaggcattggtgttcattaacaattgcaatgttattcttagggctgtaatggagaagtgtggggacacagatgattgtatctcaacatctgaggctgcagaattggctgcaaagcttgatgagaaggaaataagtagtttaccaatgcctggacaagttgatttcattaatggtggtcctccatgccagggtttctctgggatgaataggtttaaccagagcagttggagtaaagtccagtgtgagatgatattggcattcttatcctttgctgattatttccggccaaggtatttcttgttggagaatgtgaggaactttgtgtctttcaataaaggacagacattccgtttaactttggcttcacttcttgagatgggttatcaggtgaggtttggtatccttgaggctggagcatttggggtttctcagtcaagaaaaagggcattcatatgggctgcttctcctgaggatgtgcttcctgaatggccagaaccagtgcacgtcttttcggcccctgagttgaagatcacattatcagaaaatgtccagtatgctgctgtccgcagtactgcaaatggtgctcctttacgtgcaataactgttcgagatactattggtgatctcccagctgttggcaatggagcctcaaaaggaaacatggagtatcaaaatgatccagtctcatggtttcaaaagaagattcgaggtgatatggttgtcttgactgatcatatatcaaaggagatgaacgaattgaacttgattcgatgccagaaaattcccaagagaccagcacctggtctcttggcgtgaccttccagaagaaaagataaaactgtctagtggacaagttgttgatttgataccatggtgcttgccaaacacggctaagcggcacaatcaatggaagggactgtttggcaggttggattggcaaggaaatttcccaacttccgttacagaccctcagccaatggggaaggttggaatgtgcttccaccctgaccaagataggattcttactgttcgtgaatgtgctcggtctcaaggcttcccagatagctatgaatttgctggcaatatcatacacaagcaccggcagattggtaatgctgtgcctcctcctctagcatcagcattggggagaaagctcaaggaagcagtggacagtaagagctccacttagaagatgggccttctacattaggtcatgcttattgtattcataacagtcaccaagatattgcaaatcatcattccgggttccaaaaactagaaacccttgtatatagtgatatccattggtcatttgttgaggctaattccttgtttaactttcctcaaccaaggaattgaatggatgatgctcattttctatcaactaggattttcttgattagatggtattttggctgtttatgaaagaaatggttgggaattgattacctcccaatgtgtagttgaaaattgagaccaattttttttaacctgttatgaatatttgttgttgccactatttggct

SEQ ID NO: 26892 - DNA, 1508 bp, Glycine max
  Clone ID: TF_GmC1281_1
cggccgctcgagccggcgggcgggtcctggttagctcacgcaccccttctccatcgcgtgtgcttcaattccatggctaaaccgaaggctccaagacgaaccctagagtcatactcagtcaaacacataagcaaaaccattagagctggcgattgcatcctcatgcggccctccgatctgtcgaaaccgtcgtacgtagcgaggatcgagcggatcgaagccgacgcgcgcggcgccaacgtgaagattcacgtgcgctggtactaccggccggaggaatcaatcggcggtcgacgccagtttcacggctccaaggaggttttcctctccgatcacttcgatgttcagagtgccgacacaatcgaagccaagtgtacggtccacagcttcaagagctacacgaagctcgatgctgtcggaaacgacgatttcttctgtcgttttgagtacaattcctccaccggcgccttcaatcctgatagagttgccgtgtattgtaaatgtgagatgccttacaaccctgatgacctaatggtgcaatgcgagggctgcactgactggttccatcctgcttgtatagacatgactgtggaagaagccaaaagacttgaccacttcttttgtgaaagttgctctgctgaaggtcaaaaaaagttgcaaaactctcattctgcttctagacactcagatacaaaggtggatactaaacgccgtcgtaggtaaaatagtgtgatagtatataaagcataaaatgagttagatctataatggatgtactgaagatcttgcttttctaatcctgggtaggggccagacaaacacagagacaaagttatctagtagtaagctgtagtctttctactttcatggaaagagactagtttggaaatgtttgtcatgtctatttggtttgagtactcatcctgtttcctttggaagtggaggacgtgtttatgtaattatttagtgtagattctgtgtcacttctctctggtccttgttctcgggcgttttgtaaagtattttgacttatttataagcagtagacactttattctttctttttactaaaagaggtaggcaatgatctagagtttctatacaccgataatggcgccgtgttgttggcgtgaaaagaattgaggataaaaaaatatacgatattgggttgtaatttaattcagcctttcgttggcaaagacctctgaaagaacttgctagagacattgcatgccgatagtttctcacctctgtatcatctggcgtgatgacgatggagattggaaaatacgttatttttttggaccatagaaaaacaaatctatattggagtactgcctatggtttgaaccaatcaaagacgcaatacactccactaacggtgcttgtgaatggactagagtggaatgtcgcggagtgaaatagaacagaacgacattgaatgtagtaaaaatattgttcgaatattttatgatggggtagaataaaaacatcatgttattgcgaat

SEQ ID NO: 26893 - DNA, 1075 bp, Glycine max
  Clone ID: TF_GmC1007_1
ggaattcataaattaaattcggctcgagcacccatggagccacacgagtcccgttgtcatccctgtattactcacacacacacaactgctatctgctctctccacaccgtgcagcaattcctctcttccctctatccacccctcccatggcggaaccaatggctgtcgactccaatcccgaatccggtctcgacttcgagtcccctttcgcctgggggaagaagcgaggcatgggaggcaaaaagaaggacgtgcagttctacgagtcattctccttcgacggtgccgagtacgccataaacgacaccgtatgcctccagagcgggatcggcggtggcgagccccacatcgggaggctgatcaagatctgggagacccgcgacaagtccaggaaggtgaaggtgcagtggttcttccgccccgccgagatctgcaagtacttggttgggatcgaagtgaagccgaacgagttgttcctcgcgtgcggcggcgacggcgccaagggctttgccaatgtcaatcctttggaagctattgtagggaaatgcaatgttgtttgcatttctaaggacgttgggaatccgcaaccgtcaggtgaagcaaaggctgattatgtgtactatcgtttctttgatgttgtgcaattgaaagtagtggatcagatagatgtcaaggttgctgcgggaattgaagttaaaaatgtttccaacaaatgagatagtcaaaagcacgttggtgttgtgaaactcggtccaagacaagataaaagttagtgggaatggcaagtaaagtattgaagtagatatttcaggtaaaaaacagagttagcctgaaattgaaaaggtagccggcaaatatgttgatgtaattaagttattaagttctacctcccaccaaaaatcaaaagttataccgtagtagctactgtaattaagctattactactgcggctactgtaagtcatttactgctgcagatgctgctgcttagaattaggatttactttaatctgtagacatggatatggtgtgtggaaggaaaataatactaatatcctttttgaaaaaaaaaaaaa

SEQ ID NO: 26894 - DNA, 2530 bp, Glycine max
  unsure (1)..(2530): unsure at all n locations
  Clone ID: TF_GmC1073_1
acaaaatccaaattcgcgtgtcacagtggcgctgggtgtaagaatgggaaatcgacgcttgactcaggtcgcaaccagcgaagatgaggacgaagcaccgacggctactcctcctcccaagcagcaatcgtcggtcagtgcccccgaagagaaccgttcgaagcagcagcagcgcaagaggaagagaatgaagcttcaagaagaagaggaagaggaagaggagaaagaggaagagaagaagaagaagaagagaaagatcaaagacaagcaagaagagagatcgaacgaagaagaggaaccgccgccgtccgctgagagagaagtgtagtttgaggtttctgccatgaagttggcttgtgcattgtttgaggttgatgattgttttgtgaaaagtgggttctaagaccttctgaaataagaagcgtgttgtgtttctgcagggaaagagtttatattgccatttaggcggtgatcgtaactgaaaattggaaatggtgaatcgtcgacgcctcactcgggtggcgacgagcgacgatgaagacgaggcaccgccgcgtccacaacgcacgcggaagaggatgaggcttatcgaggaagataacgatgatgacgagaatgaagaagaaaaacaagaagaggtgccggaactgcctcagcctgcggaggacgctaagcctcttggcgaacccgttagggtttcgggaaaaggaagaggaaggaagaggcactatgattccttcgagttcgatggcatccaatatattctcgaggatcctgttcttcttgtacccgaggagaaaggccaaaagccttatgttgcaattattaaggacattacacagtctatcaatggcaacgtgaaagtgacggggcagtggttttaccgtccagaagaagctgagaaaaaaggtggtggaaactggcaatcgtgtgataccagggagctgttttatagtttccaccgtgacgatgttcctgcagaggctgttatgcacaagtgtgtggtgcattttgttcccagtacacaaacagcttccaaagcgtaaggatcaccctgggtttattgtacagaaggtgtatgacactgtggaaagaaaactctggaggctgactgataaggattatgaggacattaagcagcaagagattgatgagcttgttcagaaaactcttaaacgtatgggcgaactacttgacattgagcccgaagaacctgttgctgatcaggaagatctgatgaaaaataaaagaatcttaaggaaaaagagcatttcacctcttgatgtttcaaaagaggaggaaacaactcgtaagggggaccaacctttgaaacctgaaacaccatggagttgtataaataatgcctcagaacattatcgcatattagtagatttcaatgctctaacaggagatactcatcgtgacaaatggttggagaggttgcttcaacgcattcaattcatgtttaattctgatgacagcaaaaaaagggacaaaggattagggaatgccaattctgatgaaatcaacaatgaaagcaagcatagaagttcagaatcagcaactgactgtcaagataaggttcagaagagttccaagtcttttaactggccagatgttgctgtttcagccatggttgctctcgaaaaagcttctcatgatgctctctcatcagattctatgaagtacaaccaaaagttgcggcaattagcttttaatttccagaaaaatgcagtgttagcacgccgtctattgagtggagagttggagccttcaaaaatattaaatatgacacccaatgaattaaaggagggtttggttgctgaggaaaaaaccaaggagcctgacgagacccagcacttgcaaatgacagatgcccgctgctcaaaatgtatggattgtaaggtgggcttgagagagattatccaagctggaaataatgaacgttatcagctggaatgtgtttcctgtggtcattcctggtatgcctcccgggatgaggtgtctatgccgaccatagatgcatcagatccaaagggaaacataggcacagcgccataggccactgcaaaatttaaagatgtaccgatgaagctgctgagcccccgtgaatccaaagtcagccaatgacatcttttaaaagaaaagttaattgtatatccccagaaatgatttggaaagtccaggaaaggtgacgatattgaggctatgagacgtgtatctatcccggctagtgttaagtcatagctaaaaattgtttatgaatagatatagttctcttcctatttgactctgcgcatcgcatacaaaaaaacggttggttttgtgtaatacttcacataaactagctggttttacctcatacatcataagggtagtgttagccatagaattaaatttcttagtttgacttttactttgtagtattaacttgtttcaatcattaataagcaaaaaaaagaaaacactagttcccccnnnnnnnnnnnnnnnnnnnnnnnnnnnnnnnnnnnnnnnnnnnnnnnnnnnn

SEQ ID NO: 26895 - DNA, 511 bp, Glycine max
  unsure (1)..(511): unsure at all n locations
  Clone ID: TF_GmC45167_1
ggatttcttctccgcacattctgtttagggttctgctgagttgctgtccgatcgcgtttcatcgcgctcaccgtcaccggcaaggtgactacacacagggactccagttaaatgccatacacgatgaccctagaacattgaaaatcttccactctctcgtgtccagtgatacgatacggcgaggaatcttgatacgtcaaaacatggtagaagcaggggaagaggaggttattgaattcaagtggggcacaaggaaagggttgggtggcaaaaagaaggatgtgcagttttacgaatcgttcacctacgatggtgtggaatactccctctttgattccgtgtttctctacaaggaaggtgaacccgagcattacattggtaaaatccttaagatatgggagaactctgataagagcaagaaagttaagattctatggtattttagaccttctgagattttgaatttcttggaagggagtgagacactngagaatgagttgtttctggcttc

SEQ ID NO: 26896 - DNA, 663 bp, Glycine max
  Clone ID: TF_GmC189543_1
cccgcgtccgaatttattttcgcactcgccggaccactctcctcctccgcctccgccatgcctagcaagcgcaagaccagatcctccgcctctcccgctgccgcgccgccgagcaagcgcgcctccagatcctccgcctctcgcgtcgccgattccgcaccggtcaaatctgaagccgaggaagttgtggcagcttcctctgtcgtcaaagaagaggcgcaagcaagcttcacggacgttactgacggcaacgttagcgatggcgaggggactaacgccagattcgtcggagagcctgttcccgacgaggaagcccggcgccgctggccgaaacggtaccaggaaaaggaaaagaagcaatccgctgggccaaaatcaaacagaaacgatgaagacgaggagattcaacaagctcgacgtcactacactcaggcagaagtagatgggtgcatgctttacaaactttacgatgatgcccatgttaaagcagaagaaggagaagacaattacatttgtaaaattgttgagatatttgaggccattgatggggcactgtattttacggcacaatggtattatagggctaaagacactgtcattaaaaaacttgcatatctcattgaaccaaagcgagttttcttttctgaagtccaggatgacaac

SEQ ID NO: 26897 - DNA, 1030 bp, Glycine max
  Clone ID: TF_701150581_FLI
gacacaaaaaaagtgaaaccccccacaccacacccaaccctcaccttagggttcctctgttcttcttctaacccaacaagaaaaaaaaatcacattccccaaaacacccttctcgctccgcatggcgaaaacgaggccaggcagaaaggacgtggactcatacaccataagaggaaccaacaagatcgtccgagctggagactgtgttctgatgcggccctcggacacgtcgaagcccccttacgtggcgcgcgtggagatgatcgagcaggataataggaacaacgtgaaggtgcgtgtggggtggtactacaggccggaagagtcgattggtggtcggagacagttccatggtgcgaaagaactgttcctctccgaccactacgatgtgcagagcgcgcacaccattgagggcaagtgcgtggtgcactctttcaagaactacactaagcttgagaatgtgggtgctgaggattactattgtagattcgagtacaaggccgcttctggggcttttacccctgaccgtgttgctgtgtattgcaaatgtgagatgccttataacccggatgatctcatggtacaatgtgaagggtgcaaggattggtaccatcctgcttgcatgggcatgactattgaagaagctaagaaactagatcattttgtatgttccgaatgttcatctgatgatgatatgaagaaaccccaagctacattttctgcatcaccgggagctgatggcaaggtggagccgaagcggcggaagagatgaccatgtgaggtgtgtgtggttcttgcttaatttggctggctctatggtagcttttgtgtgttgtacggcttcttctagaggctataaacattgatttcatgtatttgattcaggttattatgtatctatccgttttacattttgttatgacagttcatctgtttttccttttgtccattgatgagaactccgatccaagtgttaattcttgagatggcatcaaaccttaaaaaccaagtacagcgcaattgttagtcc

SEQ ID NO: 26898 - DNA, 809 bp, Glycine max
  Clone ID: TF_LIB4164-054-R1-K1-A4
ccacgcgtccgggaaagggaaggggccgcaaaaagcattatgaatccttcgagtacgacggaaaccaatacacgctggaggaccctatacttctcacgcctgaggacaaagaccaaaagccgtatgtggcgattatcaagcgtatggctgttgagcagcttgagctgcattgacgttattttgggtctggcagccccccttttttcctctgtcgtgtgtgggacattactcaatccctgaatggcagcatgatggtcactggacagtggttttatcgtcctgaagaagctgaaagaaaaggtggtggcagctggcaatcatgtgacacaagggagctgttttatagtttccaccgtgatgatgttcctgcagaatctgttatgcataagtgtgtggttcattttgttcccatacacaaacagcttccaaatcgtaagcagcatcctgggtttattgtgcaaaaggtgtatgacacagtagaaaggaaactctggaagctaactgataaggactatgaggacaataaacagcaagaaattgatgagcttgttcagaaaactcttcaacgtttgggcaaactacttgacattgagcctgaagaacctgttgctgatcaggaagatctgatgaaaaataaaagaatcttaaggaaaaagagcatttcacctcttgatgtttcaaaggaggaggaaacaactcgtcaaggggaccaacctctgaaacctgaacaccatggagttgtgtaaataatgcctcagaacattatcgcatattagtcgatttcaatgctctaacaggagatacccatc

SEQ ID NO: 26899 - DNA, 1263 bp, Glycine max
  Clone ID: TF_GmC6253_2
ccacgcgtccgctcctcagagcccgcgtccccctgttcgttatttttctttttttttttgtttcgtttcgttcggaacgctgaggctgtgtcgttgttttagtgggtggatgggaacgacgtcgtgtgagaagaagagcgtcgtgtacgtgagctgggacgaggtgttcgtgtcgaacgacaaggggaggagggaggttcattacttgcttaaacgaagaggcggtggctcggatctggccgttttgggaaaagagaagagcctcctcagacacatgtcgtatcgctacgccattcgaaacgccgcgttgtttaagccttacttgaagctcaggtcgcgcagagaggttgttgattggctggattcaattgtttcagggcgagatttccgctggctggatctgaaattgaatgattcgtcttcaggggatgcggttatggtgggaaaacatggttatgaacctgaaattggagccttgaaggacaatcaattgcagaagatgcacagttgtacaaaagagttctcatggatagggttgccatggacgtgtaagaaaagaagaaagcactatcaggcatataaaagaaatggttttcagatatccgtgcatgattttgtatttgttctggcagaagaggacaagcgtttagttgcctacttggaagacctttatgaggattccaaaggcaataagatggttgtggtgcgctggtttcacaaaattgatgaggttggtattgctttgcctcacagttttagtgacagagaggttttcttttctctttatcttcaagatctgagtattgaatgcatagatggattggctttcgtcctcagtcctgggcattacgaaaagtttcagaatgaggcccgttgtactcacttagagccattcatctgcaaccaccagttcgataatgatgatgtgaaaccctttgatataacacagattaagggttattggaaacaggaaattctcaggtacatgtatacccaattggactcgaagtctagtgggagttccaggcaatcagatgatgacctggaacttgatgaaaatcatatgactaccgtttttatcagacctaagaagaggctgcgccttaccaaagcagatgatgccaaagaagcagttgatttggttggccttaaaacagaaaatgtgaataacagttagaataataccaaaatcaatactggaaacaattcttgggaaactgattgggcacacaaacatgacagcaaccattaaagggacaaatg

SEQ ID NO: 26900 - DNA, 460 bp, Glycine max
  Clone ID: TF_LIB3242-256-Q1-J1-H5
cctaaatggctcacgcacctcaacctcacgcaccttacctaaattttggttgtttgtaaactctatgctttgatgttgagaactaccactgagggtggttttgaaccctattttttgtttttgtttcattgtttggattctgaaatgtttttgagctggctttgtggcctacaacatgatttgaacctttgaaagacgtcgtacgtgacgaggatcgagtggatcgaagccgacgcgcgcaacaccgacgtgaagattgacgtccggtggtactaccggccggaggagtcaatcggcggccaccgccagtttcacggctccaaggaggttttcctctcctatcacttcgatgttcagagcgccgacacagtcaaagccaggtgtacggtccacagcttcaagagctacacgaagctcaatgctattcgaaacgacgatttcttttatcgttttgagtaca

SEQ ID NO: 26901 - DNA, 624 bp, Glycine max
  Clone ID: TF_uC-gmroLIB3258P128h04b1
gtgaggtcattcaacatgtattgctcattgatctgatcatgggtcttggattactggttttttgtgcttgatccatctattttggcatggttcctaagatatggtcttgcagaagaggttagagtacgggtttaatggctatcagactccagccatgctgtgagcttcccgatcaactagggtaaatatcaatatgttctgcttctcatgtggggctgcttattactatcaatttgcttagagatttcatgaaaacaatttgtataattattttgttaaaatgtttcctagaggagggctaaatttcaaagagcagaagacaaacaaaagtgtgcatttgaattattggccaccgtagctggtaaactattgcaagagagagagaatccaaccatgtctagtgatacatcatcagaaaaggatcagtctggatttgtcaaagagtgccaagatgcaaataaaccatccaaatctgtgatttctgatgaaggaagttgtgacaaaagtggtttctctcgtctttcttcacaaacaaacaacaaaaattgtggtttgaaaaaaattccacatcttgcaattgatggtgatgcagggactgcttctatagtaaccagttctacttgc

SEQ ID NO: 26902 - DNA, 1368 bp, Glycine max
  Clone ID: TF_GmC34052_1
gttcttttgtaagataaagaaagtaactcagtttgcaagttaaatgtatgtttttgtttgagttagatacataatacatagttttcttcatttttttaatgtcaaagcaaatgcttcttatcaatgttgtcttcaggcattgctttgtatgatagcatctgggaaatgtccctttggtgcttcatgtctttccagtggtgcctttctactcctgctgtgtctttccagaagtttcttgatagttcttgatatcattttgttattcattttagatatattgaagagctctctgaaaatgaatctagagagcacaatccgaggttgtcaattctaataaaaccatgggacttggacatgtttctccaacttcgaatgtcaggcctgctagaaatgctttttcagaggcgagaacatatggcaccaggttagactctctcggaggttctgatgtccaaattccttgtgtgtctcgggttcggagaagtcgtccaagaaaagatattgcgtctcttatgaaattccatccaactggaatgggtgaggctgaaaaactgagtaataagctccttgagcatagttctgatgctggtagtgacttttcagacaaagttttgaagtcaagaatgcctgcaaagtttcatcaaccatcctcttctgaacctgtgaaagagcagtgtccagtaatatgcccgattgagctacggcaggaattgaggccaaaaagggcagatccatccagccatacctcagatgacaataatatagttactgttcctactgcaaaaggagggatgaggaggaagcatcatcgtgcatggactcttgttgaggtgattaaattggtggaaggtgtgtcacggtgtggagcagggaggtggtccgaaatcaaacggctctcctttgcatcatactcatatcgtacctctgttgatcttaaggacaagtggaggaacttgctcaaagctagctttgcactgacacctgcacctgcagatgaggggataaatttgcggaagcatggtacggctcccattcctgagaaaattttgctgcgtgtaagagagcttgctgagatgaattctcaagtgcctccaaattatagctcaagccagttagcatctggtggagggagtgtgcatggagatagatcggggtacttgtaaataaatactaaattccttatcaggcaacaaaaaaaaaatataaaaaaactaatttctgaactttgttagaccaatcctttcttggatgcatagagagtaagtagatgcaatcttgtagacagttgagaaattgattagatgtttatgcactgaaacgttgaatgaatagaatcgtgttactgttttgttggttgtggaataaaaa

SEQ ID NO: 26903 - DNA, 757 bp, Glycine max
  Clone ID: TF_GmC3657_7
actggaagacagctccaaagttgaaggactgtgaactttctgatctaggagtacctcgttatcataagaggaaaacttgttacggttttgaaagatctcagcacaatgccattgttaaaaagaggaaattcgttgaccgggtttcaggagtaacttctgatggaggattcagtagtgagagtgtgtccaattcaccacagaaagggatggatggagacaagcctagctcatctgcaaaattgcatgtacctaaggctaaggattctcatgtaaagtttagcataaagtcaataaggattccagagctttatattgaggttcctgaaacttcaactgttggttcactaaagaggactatcgtggaggcagtgatggctatacttggaggtggtgcacatgttggtgttcttcttcaggggaaaaaagttagagatgacaatagaacacttgtgcagactggtatatcttgcaatgaaaatttggataccctgagtttcatgttggagcccacttcactacaagcttctccaactgtttgtgttggtgatccttcttctcaatgtgaaacatcccagcctaccaggtccacagaaattcctgtcttagattcaggaattactgataccttgcacgactcacccttgctgacatatccgggcaacctaattgaaagtaaccatgagtctacttcttcacttgcggacactacacttgacaaactaacacctgattccagagcgatagttgttgttccaac

SEQ ID NO: 26904 - DNA, 787 bp, Glycine max
  Clone ID: TF_GmC3657_3
attcggctcgaggtgagtcagaaaaccaagcgctctgagtttgtacagcgtcgaaccaggagaccattctctgtgactgaggtagaagcacttgttcacgcagttgaggaacttggaactgggaggtggcgtgatgttaagttgcgagcttttgagaatgcagaccataggacttatgtagacttaaaggataaatggaaaacattagtgcacactgcaacaatctccccccaacagaggaggggagagccagtacctcaggagctcttggacagagttttggctgctcatgctttctggtctcagcaccaagccaagcaacatggcaagcatcaagctggaccaggaaccttgaagattacagaagcctcagctgaaagaccttgtgtgtgttgaaggtgaaggtgtccacttgtgatatgatgatggtgtagaaaggagtggtggtgttgacaggaaaagaggaagacaaaaacttgtacattttgatttgattcaatttcatgtaatattctcacaccaaattctttgccggccattaattgcatgcagggttggcatttgtaaatgatttgatgcaataagattgttctaacaggaacttatgatgttctttgatttttttttcttgatttcttttgcatttatgaatgtttgtagaaatgtaaaaagaacatagaacatgacgacccaaaggaaaaggtgaaaatgttcttgttattatctttcatttcatttatggaaattattgttcccacttgtttgatacttaactttctgtttgctg

SEQ ID NO: 26905 - DNA, 1003 bp, Glycine max
  Clone ID: TF_GmC354_8
ccacgcgtccgtttggagattaaggcttaatttgttttccttttctcttaattaattttcccaagagaaaaatgcaaaccgaattgtagaggaaaatgagagaaattgtttctgtcatggaaaactagtgttttttttttttttttttttctgatgttagttcacttcggattctccgacaattcgccgatctaacttcgcccggttaaaactgcgacctgtgaacagaaggaggctttcaaattgtggctggtgaggtcaagcaacaagagtgctcatttatctgatcatgggtcttggattactggttttttgtgcttgatccatctattttggcatggttcctaagatatggtcttgcagaagaggttagagtacgggtttaatggctatcagactccagccatgctgtgagcttcccgatcaactaggaggagggctaaatttcaaagagcagaagacaaacaaaagtgtgcatttgaattattggccaccgtagctggtaaactattgcaagagagagagaatccaaccatgtctagtgatacatcatcagaaaaggatcagtctggatttgtcaaagagtgccaagatgcaaataaacattgcaaatctgtgatttctgatgaaggaagatgtgacacaggttcatctgtggtgtaccaaagcaacgagccatcagcactgtggtttgatatcattcaagatgttgcaattgatggtgctctcaaaaccatgctcctcaatgcgagcaggcgtaacagattcaaaccgagaagaggcaattgtctgtagcagggggttcaccatgcgcacgcgttgtagaacagcatttctaatgacattcccatgtgacaaaaatgatctcattcctccttgcattttagctgtcagagagagagtaaagtgaagggtgtgaaagagagagagacacagagactgagtgtgagagagagttagcggcgtggagatagaatatgcctgccctgagccctacactcgt

SEQ ID NO: 26906 - DNA, 1897 bp, Glycine max
  Clone ID: TF_GmC354_4
aggaaaacgttactagcacagttaatttagattcttctgattatccaaagcatagtaatttcaagttacacggtgatacaagtaaaggaaaggatgagttgcataagtttgagaaggtgccaattggtagtgggattgacatgtgtagttttgaggaccctttggatgaaaatcctcctgcattgatcagtttaggtggcaatgccaaattgtctgggtataatgataggattccctgtagcttgttgtccaaaagtcgtgacaatgtaccagtagttagtagagatgatgatgaaaactcttatgggtgtactcaccctattaatactaaaaccaagtcctttaggctaaagactggtataggtgataatagaataagtaaaagactggcttctaactttcagaaagttgctgaaaaaacaaaggatcatacacattctaacaatgatggagattggaagcgaacttactgcagcaagaggaactgcaataaacaccaaagttctcagatgaatattcctttcaaaaagaggaagctttttaattatcgctctgtttcaaattctaatggattgatcaggagtggtggcatttattattcacctgagaattgtatgaatcaggacggttgtggttcaccacctgggatgcacaaagaccctggaatgccatctttggaagcatgtcaacatcagacgttacgaagtagaggttctcatgtgaatcttaggatcaagtcatttagagtgccagagctttttatagaggttccagaaactgcaacaattgggtccttgaagaggacagtgatggatgcagtgactgctgtgcttggaggtgaattgcacattggtgtttttctccagggaaaaaaagttaaggatgacagtaaaactctacttcaaaccggaatttctcatcaaaacgagctggatgctttgggtttcaccctggagcctaattcttcacaaagcctaccgattgtatgtgctgcacattctcccggtcctaaagctgacataactcagcctgtaataaggtatccttccagtccagctgtaattcatcagaggattcaaggcaattctgacatgttacctgagcatcaagtaaccagtttaggtagccattttgaaaacgaccatgattcagcaccttctcctgttaatgcatctgttgagaaaggtatgaaagattccaaagaactggttactgttcctgaaatggatgaggaactagctatggtacctgtacaccagaagtcaaagcgatctgagatcgtccaacgccgaatacgcaggcctttttctgtagatgaagtagaagcactggttcaagcagtcgaaaaactaggaactggaaggtggcgagatgttaaggtttgtgcttttgataatgcaaagcatcggacatatgtggatttgaaggataaatggaaaacactggtgcacacggcaagaatatcccctcaacaaaggaggggtgaacctgttccccaagaacttttggacagggttctagtggcccacgcttattggtcccatcagcagactaagccgcagcacaagcaccatccagaaactgaaactgtcttctccttttaataataagggccagggtcaggggttgtcagcagcaagtagccatgtggatgaggagggtgctttggtttctgacttgttattagtgtcttttctttttctgctttcaataaatatttatgaagtctctctgtttatcaaccatgtaaaaagtgacgacgacaaggaaaaagaagccaagcctagaggctgcttgtaaatgatttgatgtaataaagtgctcgctaacacaattcttttgcttgtaaataattgaaattgttctgtataaaattgttatgtttttattgcttgat

SEQ ID NO: 26907 - DNA, 5494 bp, Glycine max
  Clone ID: TF_GmC3657_1
aattcggctcgagggtgaatattcagatcacagtttggccaaggcttttctggattctaaagaattcattgagaagaagaggtgctctactagtgcttcagaagaagaagaatcttgtgctgatgcttgtgatgagatgaacccattggcaatagtgcctgtgcagaccaatgatgctgcttctaaaccgggttggcccctgcttcgtaagacaattgtatctgacaggaaatgttctcaaagatcgctcttgtgccagatctcggtggtacaatgggcaatgcagttaccctctagagatctttcatatgctgcacatcaagaccataaaacaaacaattgtggcccaaataaggatcagtttctggcccttgatagcaagagtggtgctctggaagagagagttgaacacttttctccctcgctctctccacatcttcacatcttcacatcaccctctcccgaagaaacttctccccactattcctcccccgacttgtcgcaacactacgcattctcttgcagttctaggttaagcgactctttggtggagaaacaccccgagttgtgcgtcgagtttttcttgtgggcgagtcgaatcggttacgcccaccctccagtggtgtacactgcactaattgagttactgttgcaatggcgataatgatagagtgtctgacaagttcttgatgcaaataggatgatgactgggagctgctcgctcaatgttctcattcaaaagtgtcgtccggggtttatctatctattattctatctactattgtttcgttccatctcacaaaaacaagagagaaaaaaaaaagaaaaaagaaaatgaaaacgaaaacttcacgttcctgaaagagagagagagagaaagttaaggacttaaatggtttgtttcagttcgtgaattccattagatctcttgcatttgtaaacagttttgcggggtttttgctttgtacgcaacaagttgtacttttttttcctgtgtcggaaaatgagtttcatcggaaacttcgttacttgatcgaagtttggttcatcggatcgagttcgaatgctgttttttcaggagtgacaaaagaatctggtgtatttatgcttctggttattggatgagctgtatatgttttaactatggtgttgaagaagagagtagatcatggatttgatggcttacgagttcctgttatacctaaagctcctagatctgcaagaaggaggattgctttcaaaaaagcagttgaagatggtcaagtttgtgctattgaactactggcatctttagctggtcagttgttgcaggagagtgaaggttctgcttccagcaatgcatctgaaggaaatcatcatcccccctttagccaaggtgtcattgagcaagatatacaagatggagttaaaccattaaagaaggaggaaattcatcagggaagttgtgtagagagtacttttaagaccgaggtagcctcacaaaacagtagtttcaaacctctttcacatactaagactggacatgtttcagttaataatagttctgactgttgtgagaaagctgaagctgatgtgaagtctgaaattttcgaatgggataataaatttgggaattattctaatagattagtagaaacacgtgaaaaatttagggtgtccactcatggtaacataaagaatggatttaaatgggaacaggaggctggaagttcatgcattcggggatcaaatttagctgataagtgtagtttggaggatcacttagaattgtatgtatctcctgcactaattgactcgaaaagtaatattaaatctccatttcataggaaattttttcccagtgcttccttttccaggtatgggaatggcattaagttaggttttagagatgatgacgaaaactttttaaggtgcaaaaagttttgcacgaagccaaaggcttttaggtctccacgacgcattgcacaccgaagaatcaggaatttgatgtcttccaaatactggaagacagctccaaagttgaaggactctgaactttctagatctgatctaggagtacctcgttatcataagaggaagacttgttacggttttgaaagatctcagcacaatgccattgttaaaaagaggaaattcgttgaccgggtttcaggagtaacttctgatggaggattcagtagtgagagtgtgtccaattcaccacagaaagggatggatggagacaagcctagctcatctgcaaaattgcatgtacctaaggcggcggattctcatgtaaagtttagcataaagtcaataaggattccagagctttatattgaggttcctgaaacttcaactgttggggctttctctctgcactcaaattcgtggccttactttttcatttacactcactcacgcacgctcacgaaccgcgaccacataaaaggacaacaacgtgagtgtctcattaaaagcatgaaaaatgctgccaacctgccacagcggcgccggtgaccgcaccgtggtggtgggcatgaagatggactctcacagcaccgagttgctcacttgggctctgttcaaagttgcacagcctggtgatgttgtgcctgctcttcatgttcttgggaatgatgaaattgtgaatcgagaagggaaatcctcgttgttttcacttgtcaaagcatttgactctattcttgccgtttatgaaggattctgcaatttgaaacaggtggatcttaagttcaaaatatgccggggttcatcagtgaggagaattttggttcgagaagcgaatgcttattctgcaacacacatcatagttggaagttctcaaggtcttcatatatttcggccttgtatatctgtggcaaggtactgtgctaagaagttaccaaaggattgttgggttcttgctgttgataatgggaagctagatgatgatggtacagagattcatgaaaagggttgtggtaatggtgaatattctttgaggcttttttggattctaaagaattaagaggtgcctatttgtgcagaatagtctatcttctgatgagaataaccctttggtgcctgtgcagaccacttctaaaccaggttggccgctgcttcgtaagacaattgtatctgacaagaaatgttccaaggaatcactgatcccttgcgccaggcaccctgggtgccatctcggtggtacaatgggcaatgcagctaccctctagagatctttcatatgctgccataaagcaaacaattgtgaccaaaagatcattttttggctctggatagcagctcttgttccagtggatgccgaaataggaactgctacttcgcgtgaactcaattcgagaagcattccaaaggaattatgtagacttaaaggattaatggaaaacattcgtgcacacagcaaatttctccagtcaacaaaggaggggagagccagtacctcaggagctcttggacagggttttggctgctcatgctttctggtctcagcaccaagccaagcaacatggcaagcatcaagctggaccaggaaccttgaagattacagaagcctcagctgaaagaccttgtgtgtgttgaaggtgagaaggtgtccacttgtgatatgatgatggtgtagaaaggagtggtggtgttgacaggaaaagaggaagacaaaaacttgtacattttgatttgattcaatttcatgtaatattctcacaccaaattctttgccggccattaattgcatgctgggttggcatttgtaaatgatttgttacaagaagaagcttttaagaggatctgaagatgtaataagaaaaatttgtgtttggttggtctgagagatacaagatgttttattatctgagaattttaaaccccaattcggtgactttggacttgcaaaatgtgcatcaaccttgtcatcacatataacatgcacagatgttgctggaacctttggttacatggctcctgaatacttcatgtatggcaaagtaaatgacaagattgatgtctatgcattcggtgtagtgctccttgagcttctttcagggagaaagcccataagtggtgattatccaaaaggtcaagagagtcttgtcatgtgggcaagtccgattctaaatagtggaaaggtgttaaatgttagatcctagtttgggtgtatgatcatgaagagatggaaaggatttgtatcagacgtgctccaagggctaggcctctaatgagccttatctctaagctccttggaggtgatcctgatgtgatcaagtgggcaagactagaagctaatgctttggaagcaccagaaatgcttgatggtgaagcttgtccaccttccaatttgcagtcacatctcaaccttgcattgcttgatgtggaggacgactcgctctccatgtgcagcgttgagcaaaacgtctcgttggaggactacttgagaggccggtggagtcgctcatcaagctttgattaagcaaactactgcaaattgctagaagaagaaggattgtgttttttgaaatctaaatccttttgtaaataattttgctgtgttgcatgtgctgtgaatgtttttatagatgggtttaggatgagaggttgtttgtgtgtgccctcctccttcccttgcttgccaaggaaattatgccttgtaatttttaaggctagatatcctttgtcgttttactttatttggtgctagtttcaatccttaatctcaatttgattgagtgtaatatgttctggtgcgaagaataaaaaatgaaaaagttgtatcttaaaactacataatgagtactgttctcatgcattttaaagttttcactaaagaggactatcgtggaggcagtgatggctatacttggaggtggtgcacatgttggtgttcttcttcaggggaaaaaagttagagatgacaatagaacacttgtgcagactggtatatcttgcaatgaaaatttggataccctgagtttcatgttggagcccacttcactacaagcttctccaactgtttgtgttggtgatccttcttctcaatgtgaaacatcccagcctaccaggtccacagaaattcctgtcttagattcaggaattactgataccttgcacgactcacccttgctgacatatccgggcaacctaattgaaagtaaccatgagcctacttcttcacttgcggacactacacttgacaaactaacacctgattccagagcgaagttgttgttccagctaccacagaaacattagctgtggttcctggcaaaagcgctctgagtttggcatttgtaaatgatttgacgcaataagattgttctaacaggaacttatgcttttctttgattttttttttaatttatttcccataatgaatgtatgtagaaatgtaaaaagaccatagaacatgccgacccaaaggaaaaggtgaaaatgttcttgttattatctttcatttcatttatggaaattattgttcccccttgtttgatacttccttcct

SEQ ID NO: 26908 - DNA, 519 bp, Glycine max
  Clone ID: TF_jC-gmro02910008g09a1
ggctcgaggttcattacacttgatagtaacatatttgctctgtataccttgtgaacagtaaagtttagcataaagtcaataaggattccagagctttatattgaggttcctgaaacttcaactgttggttcactaaagaggactatcgtggaggcagtgatggctatacttggaggtggtgcacatgttggtgttcttcttcaggggaaaaaagttagagatgacaatagaacacttgtgcagactggtatatcttgcaatgaaaatttggataccctgagtttcatgttggagcccacttcactacaagcttctccaactgtttgtgttggtgatccttcttctcaatgtgaaacatcccagcctaccaggtgagccaaattttacgacgatttctttttatcaccacagctgatttatgaagggaaatggccaaggttaatttatggggtagaaataatgattcagttctattcagccgaatttttattgtgatactattgctaatgtcattatttg

SEQ ID NO: 26909 - DNA, 3011 bp, Glycine max
  Clone ID: TF_GmC354_1
ggggggtgaccaaacttcatcttaacacagcctcctgtgaaggtcttcaaaggatttttcaaaacaaattcaaactgcatccagttgttattattaacatgctgctactccatcgggttaatgcccataaaactgaaattacaggaaagcaaacaagaaggctctgtggccataacatatttacaagcactcaagcttattacataattcaaattagcttgagtgcccttgagaatttttcatcatcattatctaataaccaccttgtatgaaagcattcaagcgctcgacctcttgtcggtgctcgcgcaccacagcacgaaccacatctccaatggacaccatgccaaacattcctttttcatcaatcacagggatgtgcctgattcttttgtcagtcatcagttgcatagcctgcagaactttggtatcaggggtgactgtgataagtttgttctcttcagtcataatatctccaaccttagtagacttggatgatcttccctgcacgatgatctttcttaagtaatctctttcagtaataattcctgcaattgccttattcgcatcagatttcacaacaaccaaagctccaacattgttttgggtcatcgatttaacagcatcgtaaacagtatcatctgtggtgcaccaaagccaggagccatcagcacccttgcctttatcattcaagatgtctgaaattgtggtgctctcaaaaccatgctcctcaatgcgagcaggcgtaacagattcaaaccgcgaagaggcaattgtctgtagcagggggttcaccatgcgcacgcgttgtagaacagcatttctaatgacattcccatgtgacaaaaatgatctcattcctccttgcattttagctgtcagagagagagagtagagggttgggaaagatagagcgagagacagcgagtgcctgagaaagagggagaagggggtgcaaaggaaaaggacccaaaaccctctttcccattacaacaaaattgctcatcttgaatcacagggtttaaagccttgctaggtggagatccacagaaaaatgggggtgatgaagccacttgccccccagatctcttggggagaataatgtccataagctcagccccaactcctgaatcttcaatttctgattggtagttgataaagggtggcctcaagggtctgatgtggttatcaaaggttgagtggttcaacaggcccaatcttcgaggtttagggcacaccacagattccatcctcatctcctcacagcttgtcaaggccttcttctgctgataaccacactgattcatcttttttctctttcccttcacacctcaaaaacaaaaggatctcttcacaaggaacacctgagcagactcagaggctcctctgagaggaaaagaggacagaaaaaaattgggtgaatgaatcagaggagagaagaaatcaagagaaaagaggtaaaaaaatttaccaacatcttttgtaaggtgaagtataggatcaagcctattagagtcccagagctaattatagacgctccagacactaaaacaattgggtcattgaagaggacagtaatgaatgcagtgactgctatgcttggagatgaattgcacattggtgtttttctcaagggaaaacaagttaaggatgacagtaaaactctacttcaaactggaatttctcatcataacgaggtggatgctttgggtttcacccttgaacctaattcttcacaaagcctaccgattgtatgtgcaaccgttgggtccttgaagaggacagtgatggaggcagtgactgctgtacttggaggcggattgcgtgtgggtgtgattctccatggaaagaaggttagagatgacagtaaaactctacttcagactggaatttctcatgataaccacctggatgctttgggcttcgccttggagcctaattgttcacgaaaccgaccatctgcatgtgctacaacagattctctctacattcctggtgcagatatgcctcagcctttaatagggtacccttcaagtcgtgctgtaattcatcagaggattcagggcttttctaacatgttagctgagcatcaagcaaccagtttaggtaaccttgttgaaagtgatcatgattcagcaccttctccaatcaacacatcaggtgaaaaaaatttgacagattcaaaagaacttattactgttcctgaaatgggtatggaggcactagctgtactacctgtgcatcagaagtcaaagcgaactgagatcgcaccacgccgaattcgtaggcccttttctgttgctgaagtggaagcattggttcaagcagttgagaaacttggaactggaaggtggcgtgatgttaaacttcatgcttttgataatgcaaagcatcggacatacgtcgatttgaaggataaatggaaaacactggtgcacacagcaagaatatcacctcagcaaaggaggggagagcctgttccccaagaacttttggacagggtcctaactgcccacgcatattggtcccagcagcagactaagcaacagctcaagcaccactctacaaaaccttgccttctcctttaataaggacttgacaccaccacgtgcctttgttaaaagtgtcatttatcattttttcttcttcctgtatttatgacaaagtgtgtttatcactttgatttttagtacaatgtcacactttatctatcatgtaaaattagaacaaggtgatgcctatagagaatttgcgtcataggttttcactccaaagtcaaggttcggtgtgtaactggagtggaggggcacgtggatgcacgtgttgatgatagaagtttatctgcaaattgaattatggacccacagcagctaataatgttagtgtagctagagcttatccatgaataaaaaagagctaatattagtctaaatgataatattaaatgaataatagtaatacacatattggcatacttaaagtagttgagataagaaattttactttcttta

SEQ ID NO: 26910 - DNA, 445 bp, Glycine max
  Clone ID: TF_GmC144846_1
ggggttgtgaggggtttaagaacaaacacaggcttggggtagttttcaggaggattttgttttatcagacaatagcccaagtctctgggtgagaattttttgattgcctttcatcaacaaatttcttgcagacaaccaaaaataagtgttcatttttttggtgcaaacataattcaacacaagaagaaaggggggtatttgtcggcttgattttcaaaccagaagagagtggcctcaacatgggttgaagggttcttctaatgcccacttacctgttctaatcttaggtgtttgcaaacctcaaggaagtcgattagattctatctaatgactttttcttataggagtgattatctgagatatggtgttgcagaagaggttgaactatggttttaatggctatcaggtgcctgtcattcctagagcttcaaggtcagctaggggg

SEQ ID NO: 26911 - DNA, 2703 bp, Glycine max
  Clone ID: TF_GmC354_6
cccacgcgtccggggttttggagattcaaagcaacaaattgttttccttttctcttcaattcattttcctaagagaaaaaaacaaaccgaaatttcgagcaaaatgagagaaattgtttctgtcatggaaaactagttttttttttttttttgttagttcacttcggattctccgacaattcgccgatcttacattcgccggaatttcgcttcgtctggttaaaatcgcgacctctgaacagcaggctttcaaattgagtgctcatttatctgatcacgggtcttggattgctggttttttgtgtttgatccatctattttggcatggttcctaagatatggtattgcagaaaaggttagagtacggatttaatggctatcaggctccggccatgccgcgagcttcccgatcaactaggaggagggctaaatttcgaagagcagaagacaatcaaaagtgtgcatttgacttattggccaccgtagctggtaaactattgcaagagagagagaatccaaccatgtctagtgatacatcattagaaaaggatcagtgtggatttgtcaaagagtgccaagatgcaaataaaccatccaaatctgagatttctgatgaaggaagttgtgacaacagtggtttctctcgtctttcttcacaaacaaacaaaaaaaattgcggtttgaaagaattcacacatcttgcaattgatggtgatgtagggattgcttctatagtgacaagttctagttgcttagagaggttcattgcagagaaaatggtggatagcaatagccatttcaaagtggaaaatgttactagcaaagttaatttagatttttctgattatccaaaggatagtgatttcaagttagatggcgataccagtaaaggaaaggatgagttgcataaatttgagaaggtgccaattggtagtgggattgacatgtgtaattttgaggaccctttggatgtaaatcctcctgcattgatcagtttaggtggcaatgccaaattgtctgggtataatgataggattccctgtagcttgttgtccaaaagtcgtgacaatgtaccagtagttagtagagatgatgatgaaaactcttctgggtgtactcaccctataaatactgaaaccaagtcctttaggccaaagacttgtataggtaaaagaatggcttctaactttcagaaagttgctgaaaaaacaaagaattatgcactttctaacaatgatggagattggaagcgaacttacctcagcaagaggaactgcaataaacaccaaagttctcagatgaatattcctttcaaaaagaggaagctttttaattatcgctctgttgcaaactctaatggattgatcaggagaggtggcatttattattcacctgagaattgtatgaatcaggatggatgtgattcaccacctgggatgcacaaagaccctggaatgtcatctttggaagcatgccaacatcagacgttacgaagcataggttctcatgtgaatcttaggatcaagtcatttagagtgccagagctttttatagaggttccagaaactgcaacaattgggtccttgaagaggacagtgatggatgcagtgactgctgtgcttggaggtgaattgcacattggtgtttttctccagggaaaacaagttaaggatgacagtaaaactctacttcaaactggaatttctcatcataacgagttggatgctttgggtttcaccctggagcctaattcttcacaaagcctaccgattgtatgtgcttcacattctcctcgtcctaaagctgacataactgagcctgtaataaggtatccctccagtccagctgtaattcatcagaggattcaaggcaactctgacatgttacctgagcatcaagtaaccagtttaggtagacattttgaaagtgaccatgattcagcaccttctcctgtcaatgcgtctgttgacaaaaatatgaaagattccaaagaactggttactgttcctgaaatggatgaggaactagctatggtacctgtacaccagaagccaaagcgatctgagatcgtccagcgtcgaatacgcaggcctttttctgtagatgaagtagaagcactggttcaagcagttgaaaaactaggaactggaaggtggcgtgatgttaagctttgtgcttttgataatgcaaagcatcggacatatgtggatttgaaggataaatggaaaacactggtgcacacggcaagaatatcccctcagcaaaggaggggtgaacctgttccccaagaacttttggacagggttctagtggcccacgcatactggtcccagcaacagactaagtcacagcacaagcaccatccagaaactgaaactgtcttctccttttaataataataagggccagggtcaggggttgtcagcagcaagtggccatgtggatgatgagggtgccttggtttctgacttttgttattaatgtcttttccttttttgctttcaataaaacatttatgaagcctctctgtttatcaaccatgtaaaaagtgatgatgacatggaaaatgtaaaaattatctttgctcatgatgtggatgcttccctgtgtggagaggctgctgcttcttgtaaattgattgatgtaataaagtgctcgctaacacaattcttttgcttgtaaatatttgaaattgttctgtat

SEQ ID NO: 26912 - DNA, 904 bp, Glycine max
  Clone ID: TF_GmC347_1
cacaaagaacgttctatgatcaaaattgaaagttgtgctaagggtgatcttaatatagtctcctctctggaagatacttcaactaacaataacatgtcaaagtgtcgtgctctagtggcagttcctgccattaacatggaggcattggcggtggttccattctggcgcaaatctggaaatcctgactttgcacaacgccgaatcaggaggccattctctgttctagaagtagaagcattggttcaggctgttgaaaaacttggaactggaaggtggcgtgatgtcaaacaacgtgcttttgatcacgcaaagcatcgaacttatgtggatttgaaggataagtggaagacactagtgcacactgctagaatctccccgcagcaaaggaggggagaacctgttcctcaggagcttctggatagggtcttagctgctcatgcctattggtctcaacaccagtgtaagcatcaacttaaaccactgtgagtcatttcaatcattgaaggacgcagaagaacaaacacattgttgcaaaagtacagtttccagagtgaagtagtgtagttatgataaaagttgatagtatataacgtttacataatatactcatgtgattccataatttatcctccctaagcctgataatgttttggttgcttgtacatgattgttttggcctaaaggaatatggtgtcactcataccaccccttgtggtcgattgctggtatgctatcaatatgcatactagaatatataataaataatgtatagtagttaaacctcttagaacttgtttcttggttgtatcttcattgttactagccattacaatgacataaaggaatacatatgaacaaatacaaatgaatatcttatgccaatagatgtaactatagttatagc

SEQ ID NO: 26913 - DNA, 591 bp, Glycine max
  Clone ID: TF_GmC3657_8
ggctcgaggtttatctatctattattctatctatctattgtttcgttccatctcacaaaaagaaaagaaaaatgaaaatgaaaatgaaaatgaaaatttcaagttcctgaaagagagagagagaaagttgaggacttaaatagtttcagttcctgaattccattagatctcttgcattttgtaaacagttttcatcggaaagttcgttacttgatcgtagtttgttccctcggatcgttgctcgaatgttgtttttttagtgacaaaagaatctggtgtatttatgcttctggttattggatgagctgtatgttttaactatggtgttgaagaagagggtagattatggatttaatggctttcgagttcctgttatacctaaagctcctagatctgccagaaggagggttgctttcaacaaagcagttgaggatggtcaagtttgcgctattgaactactggcatctttagctggccaattgttgcaggagagtgaaagttctgctttcagcaatgcgtctgaaggaaatcatcaacctgccttcagccaaggtgtaattgagcaagatatacaagatgaagttaaaccat

SEQ ID NO: 26914 - DNA, 139 bp, Glycine max
  Clone ID: TF_8670002
acaggataaatggaaaacattattgcacaccgcaacactctcctctgatcaattgatgggatagccattacctcaggagctcttgaacatggtgttggctgctcatgctttctggtcttaccaccaatctaatcatcat

SEQ ID NO: 26915 - DNA, 1349 bp, Glycine max
  Clone ID: TF_GmC57466_1
cggtcttgtgggtagatgtgttcttgatatgctctaatgcaatgcaatataattcctcagataccatttaccatcgacaggcccgagccatgcaagagattgcaaggaaggactttgagaatctgagacaagatagtgatgatgatagtgaaccacagcccaaaattgtgcagaaaggaaggccaccaggcaagcactcaagaaagtcactgggacttggtatgcctccttctgagcgtgttggtcctgaatcttcttctgatgcaactctggcttctggtgcggatattggtagtggctccaacggttataaattcagaaaagtacccagcaaatttcagcccacagattcatctgccagggcctacaacagcacttttaacagtggagggtatactggctgttctgattgggagaatgaatttccagcttctgttgttaaagctgtgctaagatatggaaagaagcagtttgcagttgatgagaccaggcgtgatacttacaaaaatccagtgactttaggaaatgaacgaccgatgttgtccacagttgaagatgaattcaagcaacttcttgctgtaggagtacacatgaagcatagctatgcaagaagtctagcccattttgctgcaaaccttggtcctgttgtttggaagattgctgcaagtaaaatcagaggtgtgttgccagctggacatgaatttggtcctggatgggtaagtgaagatgatgggtcatcacagaggcgacacttcccagtttgtgatgagggtagaacttcagaccctcctgtaccagaggattatagaagtagattttcttctccatctggatcgctcccccttgcaaatagaccattctatcaaagtggagacatggctatagataattaccaaaatgagttgaatccagtaatcaacattcctggtgggtctgaatccataactcctatgaggattcagcaggaatccatggtgcactctgatgattttggttcacatgatcggttaggctctaattttccatcccaaatgaagatggtaagacttgctgatctaactgggacttcgagtgctggggttgttcctcaaatgtttgacatggatcccccataagcaaccccactgtgcatacaaatgttgattcttcttttcagggtcagcacttgagcaaattaagtcaattcggttctggtgatttattgtcccgcgaacctggttacagctctgataatatatcgaaagggcctgtttgcagatcatgaggccaggcatggtacttaccaacatcccgggactcttgggctcgtgcgaccgacgttgtccgaaggattggaactacaaactcac

SEQ ID NO: 26916 - DNA, 904 bp, Glycine max
  Clone ID: TF_GmC373325_1
ggctcgagctcgagccgattcggctcgagctgccattgattcaagaatttcaagaaccgggtctgaagtgtgtgagttgaagaacaagaaggagggtgtgcgtgtagggtgcaagaacacagataagaagcgaaaggtcgtttactctccacgttctgaaaatcctgaagcaccctctgatgagaaaaggagaaaaacgagttcttcaaacccattatcagaagattcaagaactgtgcgtgtagagtgcaaaaagaagcgaatattgatggaccgttgcaagaagatgcagtgttgggctatgttgaagcgtttaatggtgggaagagatgcgtgggctttaaaaaaggatattcttgatcccaaggtattgtgcgttcttcataagtctgaagccataagaaagccaaagggtttggaggatattgagtcaaagttgaagaattgggattactccgaaactgatgagtttgtggatgatgtgaagcttgtgttgtcttatgctttgcaatatcctcaaaggagtgaggttcatagaactgcaaggaggatcagtgagggttttgagatcagttggaaaactatgaaggccaagtggatgcgtgacgaacaagatttgcaagagaagagatgatgatgatgaagtcgccgggaaagaaagaaggcaagtgaggagttatctcaaaaaaggagcaatcttttgatttgctgattcaaaatatcataggaacccggaaagatggcatgtttcatcaaccgttccaatttaattaccccgttttattcatatttttatgtaaaaagtctctattgaatttcttttaagaagtttctatttctattttgagtaattaagcttaattactaccttcaaactaaagaacaaaaatacgtatattttacc

SEQ ID NO: 26917 - DNA, 2295 bp, Glycine max
  Clone ID: TF_GmC14843_1
gtcgaattattaaatgctacgaaaaatctgtaggcattcaaaaaagttgtggggaacagagatcggtgcagaaagatgaagacccccccacatgaactttcaagatcaggggaggcttagctgactgatgctgaaattgatggccttcttgaacacaatgctaatgggagatcagaacatgtgattggcaagttaaagactgtcgggagtatggttaatacagagctgactgattttgaagatgcacctaaattttcatcgcttgaaccttcattgtttggcaatcctcagccaaatgctgatggctccttgacatctggttatgataagttcaatgaaggtgataaaggccagtctggaactgacaaatgtgcagaggacacactagaaaacaatgaagttgttcactcaagccattgccatgacctcaaaatgaaagcacctgtgaaatcaaccaagttagttattaaaaataaacaaatttcagcagacactgaagatactgtcaaaatgtcagcgactgctgctaagtaagtttcaatctcaaacaaggctcaactggtgatctggaagttcctcctttatggggcctaatctagtcacagaagtaccagaaggtgaagatgacagaaaatttagttctccacagctactgcattcatattctgacaagagaagttatgatcatttccataaaagggacaagtcatataaaggtaaagtcaatcaagatggttttgaatcttttgattgtgatatgggagaacatacttctgttttcagcaaccaacatggtttaggaattggtttgtctgatgttacaagtgatcctatgcgtcaaacacggtttataaggatgaagacaacttctgaggagccaagcacttcaaacagaagaattaaaattcgacagggtcaaagttccaggggaaaatctgatcgggaagactcttctaccagaatgtcagatcaacttcatcgaagaataaggacagccagacacaggaatggtgaatatattgccaatgattctggtactttaactcgaagggtgtcaaatcaccatgtcaaaaaattgtcatggctgatgttgtcagagcctgaagagggttaccgatatattcctcaacttggtgatgaagttgtgtacttaagacagggccatcaagagtacataaagtcatattcattatctgaatcaggtccatggagatcatttacagggctaggtgcttctgaaatttgcaaggttgaagaacttgagtatgcagagctaccaggctctggggatagctgttgtaaacttaaacttagatttctagatccttcttcgtgtgtgcatggcaaatcgtttaaattaactctacctgaattgattaacttcactgattttgttattgagaaaacatggtatgatactgccatgaagagaaattggtcttcaagagataaatgcatggtctggtggagaaatgaagatgggaaaggtggaagttggtgggatggtcgaattattcaagtgcaggccaaatctgatgacttcccagagagtccttgggaaaggtatcgggtccagtacaagactgatcccaccgagaatcatctgcatagtccgtgggaactatatgattctgagatgctatgggagcatccccacattgatcatgagatcagagataagctgctttcctatttcaccaaattagaccgcagggagaggtttgatatccaagcactgaaccaagtagctgagaaattagagtttgcaaacaggtttcctgccccattctatcctgaactaattcaatcaaggttgaagaatgactactatcggagtgtggaaggtgtcaaccatgatataatgataatgttatcaaatgcggaagaatattttaaaattacaaagaatgttcagctggtgggcaagatcaggagaatatcagaatggtttagaaggaaacttgaaaggatatagaaagctcaaattggattttataggtttcttttaacattgtttttcattctttaatccaattttggagaattagttggtgggtaatttggttttataaaatgaaggtggtcataggtggttgtggtggtaaatatcagctgtcacatgtgtatatatacaaactcatccttgttaattcaattgtcgttatgaggcatcttcagcttctttatatttgaatattttgttggttttgccttggcctccactaaagctgagtttaagtttcaatagaaagtagtgtatcgtttcctagaaagcaataaaatcttccattccct

SEQ ID NO: 26918 - DNA, 1503 bp, Glycine max
  Clone ID: TF_GmC303_6
tcgcgatctagatagagtggagccatctaaattatcacagattccttgcaagttgattgagaaagacatgcacaaaggcaacaaaggtaatcatgatgtggaacagcctgctggctctctaaaggcatgttcttcagtatgctttgtcacatccaagtgtagaatttgtggggataccacatgccattgtgtaattcctagcaattcaatacaggtgtcatcagatatatcatctgaaggatctgaaggaggggatgtaattacacgtggtgctgattctttgagacagaattgcccgactaaatgtacttcacctattgagaagaaatctgatcctgattctgatggggctgtaagttctttggacagtgaacatgtttgtcctagttctcagcatgtaactcctactactgatgcctcttctggggaagtatggagcacacctgttttgcctgtccagctttctcctaaaaaggctcttcgtgctgctatgcttaaaagccgctttgcagataccattttgaaagcacagcaaaagacccttcttgatcatggtgataaaggtaatcctcaaaaaatgcagcaggaaaaggagaggttggaaaggattcagcgtgaagaaagagctaggatcgaagcccaaattaaaattgctgaagctgctgctagaatgagggccgaggaagagtcaaggcagcggagagaaaaggaaagagaagctgctcgagcagctatagaaaagatgaaaagaaccgttgatatagaacattttttggagattattaaagaacttgaaagtttgagtggatgcacgctatcttataaagccgtgggctgtagaaatggctacaaagttgcattggagacattggataaacctcagtttgagaacccattggagcggcttggtttatttatcaaggaagactttaccgcagatgaagatgaggaggttttgaacggaggctttgaagaaggggaaatttttaactgcatgaaggtgtattcagttctgccagcgctaactgtttatatcctttagacagggaaacagacaattattgtaaatgcacatattgtttggaatctagtcttttgactatatctgccttaattacctcttgtctgggaattaggtaactacacgcttgcaattttgttgccaatgatctaatcttgggcattcctttgtgttcagatacttgtgtctttttgggcaaggaatctctatgccgggacagcatgtcaagactttttctcccagtttccttaattgtttcagattcgcttttatcatgctcatcttcacacttccatttccgacctaagtctttccattttctgtcaaatattttgctgagttcctttgccatcaaatgaacatcattactgggaggattatatttcatagcatttgagaaggtcagtctgacatcagctgcaaactcctcagtgccagaataaatatttttctccagcttagatttaattgtgcccaaatcc

SEQ ID NO: 26919 - DNA, 3170 bp, Glycine max
  unsure (1)..(3170): unsure at all n locations
  Clone ID: TF_GmC11917_1
cgttcgggacacattagggtaaccaaagttccaaaccctaaacgctacgattttaattttctggttttctctttttcaatcggtgcttcctccggcggcgcgtgggagtgtctttggcgcgtgattcctagttccccgcttacctatgcttcgctcgacccgcattgtagagttcacgccggagagacggcggaatctcaccggacgatcgtgatttcgcatcttcatggcttccgcctaccggaacgaacctaattggccacggcatagaagcggtggagctggattcatgggaaaagtacctttctctaaccctaaccctaaccctaattctaaccctaaattagcgaatggcaagaagacccaatcggcgtccgatgatgcttcctctatcaaccggagatcgaacgacgccgcaactcactcccagtatgtgaccttcaacgtcgcttcgtgcaccaagaaggagctcaacgacttcaagaatcgcctcgtctcggagctcgaacaaattcagaagctaaggaatcaaatcgggtccagcgagtttcaacccgggcagagcctcaacggacatccaaagaaaccgttaggcaagaaaatttccggcaacaagcgacccttgccatctaattccgcaaaggatttgaaacggtcgcattcggaggttgggaacttgatgaagtgttgctcgcaggttttgcagaagctgatcaaacacaaacatgggtgggtcttcaacgctcccgtcgatgtagttgggttgaaacttaccgattactgcgatgtaattaagcaacccatggatctgggaactgtgaagtccaatctttctatgaacgtgtacgccacgccttccgatttcgcctctgatgtgagattaactttcaacaatgcactggcttataaccctaagggtcacgatgtgtacaccgtggcggagcagcttctggcgaggtttgaggaactgtatcgaccggtgcatgagaaattcgaaggtagcataggtcatgatcgcgaatctgaggaggaattgcaagccagttcgtggagccaagttgagccagagagggtgaagaaaaaggagaatccgatccctcctgcaaaattgcataaagaacctcccccgcagcaccctgcaagttcttcaaaccctccattggtgcagtctccggtgcgcacaccatccccaatgcgagctcctcctgtgaagcctttgaagcaaccaaagccgaaggctaaggaccccaacaagagggatatgagtcttgaagagaaacacaagttggggttagggttgcagagtttgccgccagagaaaatggaacaggtggtgcagatcataaggaggaggaatggacatttgaagcaggatggggatgagatcgagctagacattgaggctgttgacacagagacactttgggaacttgatcgattggtgactaattacaagaagatggttagcaagattaagaggcaggcattgatgggcaacattgacaacaacaacaacgatgtgcagtctaacaaaggcaacggggaattgccttctagcgagaaggttgatggggggccagttgaagtgaagaagccaaagaaagtagaagcaggggacgaggatattgacattggggatgagatgccaacgagtatgttcccccctgtggagattgagaaagataaagatgttgttggaggccatgcaagtagtagttctagtagctctggcagttcaagcagtgattcgtcttcgtcaagcgattcggattcggggagttcctcagggagtgattctgaagcagacaacgggcactcgtagtagtcagtgggtttttggaactaatggtcatgtagatgaagaaaatgcttttgcttcattggcttcctttgagggcgtggctcgaatacatggacgagggattgtgaccgttgtttgttggttcgttttgggagtagcggtttgcattgtggcgctgtccactccaggatttgtggtgtgacatatttgtacaaacaatttcgggaaccgaagtaatcatcaaaacaatttgtaggccagaaagtagtagacttaaatgtggtgaaaattctaggatagaatcgttaaaaattaggaatagaactgagagttagtgtttttgagtttaccttgtacacattacaacagtaaatagatggaagatccttgaaaaatagcctttttttgtggatagtgcaatggaaattttgggatagttaattactttaaaagatcaatcatctttcattttgtatgttgtgtgccaagcacatgcttgaacaccaaggaaaaactacaatgggaataaaggcttcaggcctgtcaataatgtaaatttttctcaccattgcttttctcttgtctggagcatcagggagctagttggcacatcattttcttgctaagtatggtcattctgtagactttgatgttcaggttgtttcctgtccccttgccccctttgctcccatccctcggggaagaatcttagcgaattcccttccctgctatgaatgtgtaatctgttttgttgggctttgccaggggtggagaaggccccaaagnagaatcattctttttaaagtcaccctatcagtcaggttagttgatgcctggtcctcaaaggttcaaaacattcctttgggggtagctgatgggtgtctccttacaaattttcagcgtttaaagggaggcatagctgaggtgtatacccgtcgaaggtttatgaagagcttgagatgtattgcctcaggactgtgataaggttgcggagttttgatactctgctcaaagataatcaaactcagtagtttttcagagttggcctggatttgcgatttagatgtaataggagaacatgggatccatcgctctccaattggctattttattttttgtagccacttggtttctgtaacctcacttgttgagcatcacctatagagcattatgaaacataaagcggatgggtcggtcatatcatgactcaaggtttagctgcttattgttcgtgacgaaggtgttgctgatatgtctttcattgtgatattggtatttgttcaactgttaaagctttagctgttggggcctgtagcatggtgtaaagctcttttattatttaaatgttaccgacgtcttggttgaaaaa

SEQ ID NO: 26920 - DNA, 1008 bp, Glycine max
  Clone ID: TF_GmC801229_1
agaatgaatatgacctaaattttttgaacttttgagaatttgaaaattttcagaaattgctgtgtgggagtaaaagctcattgtcacggtggacatgtgcagatattagaattttgtcttacggcaccaactgtacctatagaatttgctggacaaaaggaatctaggaagtgctctctttcacaaataatggggaaatcacgaaagtactcaaaaggtcatgccaccggttttgttccagattttcgccatgctgttgagactatgggtgaatcagaaggacttggtaacttgggaagggttgataatgagttgacaatgtcagaaatttcatgtgccccaaagagaaaaagggttgatgagagttttgatgtgccatttcaactgttatctttaacaaagatggcccgttctgggagaaaggacttgacactgagattaaaatccgaacttgaagaagtaaggaaacttcaaaagaaaattgctggtatgagttcaatcactactgaattatctccatatagtgacataaggagctgcagtgtgggagagaagaggcctccactggaatcattagcactgcatggtaagaagcgcccactactaaagcataacggtcctaaaacaaagagaagtatttctgggcgatttatatctgcgaaatctgctgcaccagtaactccttcatatgccgtgctgatgaagcagtgtgagacattgcttaagcgcgtgatgtctcatcaatttggtaaagtttttgacaaaccggttgacattgtgaaatggaacattccagactatttcactatcatcaagcacccgatggatttgggtactgtgaagagtaagctgatttcgtgtgaatatacaagtcttatggattttgctgcagatgtgcggctgactttctcaaatgcaatgagttataatccaccgggcaatgatgtgcatgtcatggcagagacactaagtaaatattttgaaacaagatggaaagctatagagaaa

SEQ ID NO: 26921 - DNA, 2520 bp, Glycine max
  Clone ID: TF_GmC4550_1
cgctcccgccgcgcggccatccctcttgtgtctccgccgaggcttttgctgggcgtgcacctgtgaggtctagcaagcaagaacaaattcacaattccattgtgtctactttgcttgctttgatggatggccttgactctcgtgggcaagttgttttaattggagctactaacaggattgatgctattgatggagccttacggcgccctggtagatttgaccgtgagtttaactttcctctgcctggttgtgaggcacgtggtgagatattagacattcacactcgtaagtggaagcatcctcctccaaatgagctgaaaaaggaacttgcagctagttgtgtaggttactgtggtgctgacctgaaggctctttgtactgaagctgccatccgtgcattccgtcaaaaatatccacaggtttatactagtgatgacaaatttgtcattgatgttgattctgtcaaggtagaaaagactcattttattgaagccatgtctaccattactcctgctgctcataggggagctattgtgtactctaggcctttgtctctagtagttcaaccatgtcttcagagacatttagagaaagccatgtgtagtatatctgatattttccctccagcttcaattacatcagagttgaccaaactttcgatgctctcctacgggtctgcaattccacttgtgtatcggcctaggcttctgctttgtggtggtgaaggtacagggctggatcatcttggccctgcggttttacatgagctggaaaaatttcccgtacattcattaggacttccatctcttctgtcagatcctagtgcaaagacaccagaggaggcattggtacatatatttggtgaatctagaagaacaacaccatcaattctctatttaccacaatttgatgtttggtgggagactgctcatgaacagctccgggctgttctcctgactttgctagaagaattaccatctgacttgcctatcttactgcttggtacatcctcagttgcactttctgaagttgaggaagtgcccacttccattttccctcatcgctcagtttatgaagtgaatatgccatgtgccaaagataggactttgtttttcaatcttttgatagaagctgctatgtcaatattgttggagggaatcaacaagaaatctcaagacaccggatgtctccctgaacttcccaaggcaccaaaattggctagtggtccaaaagtgtctgagctaaaagcaaaggtggaagctgagcaacatgcacttcgtagattgcgaatgtgccttagagatgtttgcaaccggattctgtatgacaaacgatttaatgccttccattatccagtgacagatgaagatgcaccaaattatcgttcaattatacagaacccaatggacatggctaccattctgcagcatgttgataatggtgactatattacaagtgctgcattcctgcaggacatcaatctcattgtttccaatgcgaaggcttacaatggagaggactacaatggtgctaggattgttagtagagcttgcgagctccgtgatgcggtgcatgggatgctctcacagatggatccagcactggttgcatattgtgaaaagattgctagccaaggtggcccagttcagttgtctgatgaattaggggattctacattccctgctactcctgttgtgcagctgggtcaaagtactagaatgagtgctcgacttcgccatgtccaaccagaagttaatatgaatcagagttacgaagtattgaagcgaactaagaagatcgctgaagtgcatgcagaagacaagtcacaagaagattcggtacccccaaagtcttcccaggagcatcaagccaatgacacaaattctgaaaggctggaaaatgtgtcaattgaaggagatttgcatggaacttttacaaataaccttgctgatggcaacagtcctgatgatgtcacaatgctagatggtgaattttcaggagaagtagagtctgtcaagcagctttttgtgaagcgtagtgaaaattacagcattccacaacttgaaaggctttacacgagagttatgaagggcgtgtttgaaaccaaaaataaaggagtgaatggggatcttaagtcttcggttttgaagtttttgttgaattttgtagaggatgatgcaaatttctaattactgggtttttcttctcctccaatgatttagaaaaaggaaagatttttactgtaaagtcgggatttttttaatttaaattaaatgtcatttgattgagtacaaaaattccctttcttctcccttcccgagagccacaattgtccaaagcgatgtatagtagtgtgtaaccatttattctgtctctattctgaattatcgtaattataggatattaggattagatgaaaatagaaagcttaaacgtcaatggtcagtcagagagatagaactttttttttgttgctgtcaacctatagcaactactattaaaaaaatatgttctctacct

SEQ ID NO: 26922 - DNA, 1564 bp, Glycine max
  Clone ID: TF_GmC5690_1
gcgtttcactcgggcgaaggagggacgcgcgagagcagcgaggtgcagagctccgcgagcttaatgcgtaagaggaaatcagaaccgttggttggggttttggagttgatcaaggggcacgaacacagctcattgttcgagcgccgtcttgatagccagggggatacggatagatacaaagacctagtgaaacagcccatggacttggaaaccatacaattgagaccccaaaagggtcactattcctcatgcaccagtgcattcttccgcgacctcctcctcctcttcaccaacgccaccgtgttcttctcccatgactccctggaatcgcaggcggggcggcagctgcaccgccttgccaccgcggagatgaagaaccacggccaagcacaatcggatcctatcccccggaagaacgattcactccctacaaatgcaccaattagctaaaccagattctctcctttacaagaacaaagcctctggtcctatattggggtggcgcaaacgcagttcaatgcgacgcaaaccttcctctgccacctttggccaaaagggtgaccaacccgtcttcaatgacaagaaggaaaggccatcttctgatgcgaagccacccatgaagccctcttcttctgatacagacgaagaggagcttcccaaagctaaggaaaagcctgttactggagcaagaagcttgaggcggagcaacaagaacctcaatagtaatagtagtaataataataataagaaaccgtcctctatctccactcctaaggcagggtcctcggggaacaagccttcggagactgttaaaccggaaaagagaacgttccaagaaatgatttccaaagcttcatagttagcctcttttgttcctctcctgtatattaattattattattattattattattattattattattattgtcaaagcatgtgtttttttgctttaggaggaggaagtaacagcagcagcaaatgttggcggaggtggtaatggtgccaaagagcagaagaaaatggtgaacaatggaaagggagacaaagggaaagaaagggcatcaaggcataataacgttggaggaggttcaggctctgcggataaaaggaataataagaatacccacgcgtccgctcagtcaaagaggagtgttggtagacctccaaagaaagcagcagagacaaatgcaggtagtgcaaagcgtgggagagaaaatagtgctagtgctggaaaggataagcgccccaagaaacgttccaagaaatgattccaaatttcatggttagcctcttttgtttgtcctctgtatattaattattattattactattgtcaaagcatgtatttctttctttattttattttatactgctaatttattgatcagctgtagcctgtagtcagttgctaggtacatgtaacagtattttgatttgggctaaaaccttgtaacaacattgtcctcttggggactgcttttcttgattttttggtttaacaggaaagtatagtcaaagcttgtgcttgttttggtcaaaaactagaaaaacatggaaaatg

SEQ ID NO: 26923 - DNA, 1606 bp, Glycine max
  Clone ID: TF_GmC12104_8
caatttgagagtgatgtatttttaatttgctcaaatgcaatgcaatacaatgcaccggagactatataccacaaacaggcgcgatcaatacaagaacttggacggaagaaatttgagaagttaaggattggctttgagcactctcagattgaactgaaatcagaacaaaaagcaggatccaattatttggttaagaagcagccaaagaagccattggcacgtgcctcacaagaacctgttggctctgatttctcctcaggggcaactcttgctactattgcagatgtacagccaacttcccatctgatgcaaggtggtagatgtgagaggtctggcaatcttgatggtattttggaggcaaatgctttctggattgatgcaaatcaagagaaagctgaagatgttttgttagggaaaggtcttctctctaagtggggaaggaagtcctttgcgcttgatgaaagtcgtcgtgcatcttacaatatgtccaatcaaccaattgttaaaccagattcaatatttatgacctttgagagaggaatgaagcatctggttactgttggacttcatgcagaatattcctatgctaggagtttggcccgttttagtgcatctctaggacctattgcttggaaaattgcttcccacaggattcaacacgcactgccagctggatgtaaatttggtcgtggttgggttggagagtatgaaccgctttctaccccaatattaatggttaataatcgtgtccaaaaagaaaatagtttggttatgaagttgcattccactactgaattaccaaagggtaaccaaaattgtaagaatgtggaatccagcatcatgcatcctgtaaatggacagatgcttgagggaaaacgtccttcaatgcctgatttcaaaggaaaacctttatttcaatcacacaaacagccttaagttgattgctagagctcatcagcttgttatggatggatttaactgggctcatgaacaaaaggtggttaccatttttagtgcacctaactactgttaccgatgtgggaacatggcttccatattggaggttgatgattgcaagggccacacatttatccagtttgaacctgctcctaggagaggagaacctgatgtcactcgtagaacgcctgattacttcttataatgtagctgttgaatgtcatactgttatatcatggttacctctactgcactaattttaggtagtagcgcatcctcatcacgagattgccgtaaacatttaaatccatggatatacgtgttccgtgcttttggggttgtccaaagactgctttgatgcataataggcaggtaacattccactgatctgttacactttgaggaattgctggacaccttgtctggagaagtcgccaagatgatgtcagaatacatattgttccagcaaaatgtggatattttttgtttgtttttcatcttttttgtctcttatgttcagtaaaacccttttatggctttacaagctatatgactggattttttttttttgtctcgtggatgtttttgtcatgttctatcattttcagttaaagttgcatgataatagtgattcatttttgttcttacg

SEQ ID NO: 26924 - DNA, 1413 bp, Glycine max
  unsure (1)..(1413): unsure at all n locations
  Clone ID: TF_GmC303_4
gaaaccagactgatatactcttagtgtcttacacacactgtggctttggcagcgcgactcgtcttcgttccttaccctcgggttgatctgtgagaggggcttgatagccctctctctctctgctgctgcaattcagattgttggcaactattttttatacagacgatttgtcttcacatggaagcattgcttgcttgagggacgcctttgtctcaaaggagttggaattttcgggttttttgtgggattggagatttagagagtgcccttgcactccctgttttatttcatcaccatgattgccactgaaactatagtaccaagtacaaaattgaagatcaagttctcaaccaaaaggatagagattgattctgggccaaaatgtgagtttggacagaaagtgtatcacaatgataaaaacaggcgctgtaattctaatgaaaattcctcagcactgaattctaacaagaggggaccaccagtaagtgttgagggccaaaaggagaaaagacaaaagattgatcggaaagggtcgatgcagtgtgctacaatacttaagagtttaatgtctcactcatatagttgggtgtttcttaagccagtggaccctgtagcattgagtattccagattattttacaatcatatctcatccaatggatttgggcacaattaaatctaagctggagaaaaatatttattctggcactgaggagtttgcagctgatgtcagactgaccttctcaaatgctatgaaatataatcctcccagtaatgatgttcatttgatggcaaaggaactcagcaaaatatttgacagaaaatggaaagacttaggtcggaaatggaagtgtgaagatgagcatgataaaagcgaatctgaaacaattaaggaaactgggagaaaaagtcttgacatgctgtcccggcatagagattccttgcccaaaaagacacaagtatctgaacacaaaggaatgcccaagattagatcattggcaacaaaattgcaagcgtgtagttacctaattcccagacaagaggtaattaaggcagatatagtcaaaagactagattccaaacaatatgtgcatttacaataattgtctgtttccctgtctaaaaggatataaacagttagcgctggcagaactgaatacaccttcatgcagttaaaaatttccccttcttcaaagcctccgttcaaaacctcctcatcttcatctgcggtaaagtcttccttgataaataaaccaagccgctccaatgggttctcaaactgaggtttatccaatgtctccaatgcaactttgtagccatttctacagcccacggctttataagatagcgtgcatccactcaaactttcaagttctttaataatctncacattatgttctatatcaacggttct

SEQ ID NO: 26925 - DNA, 383 bp, Glycine max
  Clone ID: TF_GmC1259_1
gagaatgtactaaaccgattgatgtctcatcagtttggttgggtttttaacactccagttgatgttgttaaattgaacattccggattattttactgtcatcaagcatccaatggatttgggtactgtgaagaagagaataacctctggcgaatattcaaatcccatggattttgctgctgatgtgcggctgactttcgaaaatgcaatgttttataatccagctggcaatgatgtacacacatggcagagacccttagtaaattttttgaaacaaggtggaaggccatagagaagaaaattcctgctattgatagtgtcgcatctgagccttcaagacctactcacgtggaaacagaaatttctgatcgagttcctcccccc

SEQ ID NO: 26926 - DNA, 946 bp, Glycine max
  Clone ID: TF_GmC12104_17
aattcggctcgagtgcgagaagacgacagaagggggacacttatggtgtgtttgcggaccctgttgatccagaagagcttcctgattatcatgatgtgattgagcatcccatggactttgctactgtgaggaagaagttgggaaatggatcttatactaccttagaacaatttgagactgatgtctttttaatttgctcaaatgcaatgcaatacaatgcaccagagactatataccacaaacaggcacgatcaatacaagaacttggacggaagaagtttgagaagttaaggattggctttgaacgctctcagaatgagctgaaatcagaacaaaaagcaggatccaattatttggttaagaagcaaccaaagaagccactggcacgtgcctcacaagaacctcgcttaactgatttggttttggtatttttccttgctactatatgagatgtacaaacaactgcacatctgatggatatgggtgtcaatgcagggaatgctaattagtttgcttggaaacttgtctctgctttcatactttgccaagaagagagaaaaggaagccatggtagtgcagacgttgggtgtggtttcaacatacgtggtccttgttcagctggcattggctgaaaccatgccgttgccttactttttggctacttcagttgttgtcatctctggccttgttctgaatttcttgaattactttggtatactgaatgctggaatctggcgcttttgggaagatttcattacaattgggggtttatcagtgcttccccaagtaatagtgctttccttctctcaccctaggatcaatacattatcaatttataatggcataatatctgttcacacagttggatacactattcttttatcacaacttttactacttatctcacactgcctaatttacaatctggatgcagacggacgcgtgg

SEQ ID NO: 26927 - DNA, 2375 bp, Glycine max
  Clone ID: TF_GmC533_1
tcgatcaagaagggataaaaagccggcgatgtccagttctgcaccaaggaataaagcgaagccgggtaataagaatcagaagcctcgtggatggaaccggggttcttctgggaagtttgagtctgcggtccagtctgcttcaccatccactgcgaatgctatgttgatgaaagattgtgagttgctgttgaaacggtgagaagcaaatgagtatgcttgggttttcaacacccctgtggatgtggtgaagttgaatcttccagattatttcactattattaagcgtccaatggatttgggaacagtaaaaagcaagttagctgctggagaatatgctggtccactggaatttgctgatgatgttaagcttacattttcaaatgcaatgaactataatccgtctgggaatgatgtccatctcatggctgataccctcaataaatattttgagttgagatggaaagcaattgagaagaaactgccaaaaagtgatgttctgccaatacctgcaaagccagacaatagtgaaggtgtaaaaactaaaagacaagcgcctccttcaaaaaagaggaaaattgcctcattaccccctcaacctaaagttatgccacctacaaagaaggttatgtcggatcaagagaagcatgatctaggtcgagaattggagtctcttctgggagaaatgcctatgcatatcattgatttcttaaaagaacatagttcaaatggtagagaatgtggagatgacgagattgagatcgatattgatgatctcagtgatgataccctgttcacattacgaaagcttttggatgactttttgcaagagaagcaaaagaacaaagcaaaagttgaagcatgtgaagtagaggtgttgaatgattctggaccaagcaattcctcattgcaaccatttaaaggtaatgatccagcggatgaagaggtggacattggtggaaatgagccccctgtgtcaagctattctcatgtggagattgaaaaggatacaacttacagagtgaacaaaagcctaagcccaggcagctcaaatgatacagactctgatagttcttctgatagcgaagccgatgatgttaaagcaagtccagcaaatgtagcaaaggcaccagaaaatctgggttctgaagctcagttggatgaaatgaccatggctgctgctactcttgaaagaaatcaatctgttagtggcttagatcaacttgaggataactctcagcataagccaagttcttttgattctgattgccaacaagatggggacagtgctccaactgagagacaggtctcacccgataaactttatcgagctgctgtattgaagaaacgatttcttgataccatcttgaaagctcgagaaaagacactgacacagggtgaaaagggggatcctgagaaattgcgccaggaaagggagaaactggagatggagcaaaagaaagaaaaggcaaggctacaagcagaagcaaaggcagctgaagatgctcgaaagcgggcagaggaagaagctgctgcagaagcaagacgaaaaagggagcttgagagagaagctgcacggcaagcattgctccagatggaaaagactgttgaaatcaatgagaattctcgaattcttgaagatttggaactgcttagagctgtacccactgagcaattgccaagttctgtagatgagacgagtcctgcacactctcaggatggtctgggtagtttcaagtttgggagtagtaaccccttggaacaactaggattatatatcaaagccgatgatgaagaggaggaaggagagccaccctgtattccaaatcctgtaaatgatgtagaagagggtgagattgattaaaagttatgcacatattgtatgataaattgaggatcgaagtatacttaatcttgatcccaaaaaagttcccaaattaatgcattaacataagtgggacgaagcatattttcttatggaagcattcagcttctagaagggtaatatattcagttttgggctgtgatggcaatagaggaacagtttgaacagaaactaagctatgtttggggctgtttgcaatgaaaatagaagtaatacatcaaccttcttgtttttatcaatactggctggtggctagaggctaaagcatcgcatcccttcgtagttcgtatgggttatgttgtacaaaaaaaatagaatttgggaacatacattgttgtagctccatctttggatacttcgcacttgtatttgtgtctggctattcctttattaacttataattttggttaaaattttaagggatgtttcatcttcagacattgtaaacgtttaggtatacagcgtaagttaaggaaacaagattaattgtccc

SEQ ID NO: 26928 - DNA, 745 bp, Glycine max
  Clone ID: TF_GmC7409_1
aaaaggagatctgttactgagttagaaaagattggtgcagattatatgccgccaacaaaacgccaaagagggggagggggagaggttggtttggcaaatatcttggagagcgttgtggacaccattgtgaaagataggtatgatctatcgtatcttttcttgaaaccggtgtcgaagaaggaggctcccgactacctggacgttatagagaggcctatggatctttccagaatcagggagagagtacggaatatggagtacaagagccgagaagatttcaggcacgacatgtggcagattacttttaatgcacataaatataacgacgggcgaaatccaggaattcccccgcttgcagatatgcttttggaatattgtgattatttgttgaatgagaatgatgatagcctcactgaagcagaagctggcattgaaattagagatttctaaaccatttcaaattcagatcatgatctggaggtctgtttggtagagctaaatgatttttcaaatgttgtgtaaatatggttttaaaagataccaaaatgcctcctgtatttttattaacgatatgcaaagagggttgcaagttgtaaacaagggtgatgtatcaaccatgtagctcgttaaattttcagcgtgtaacaatgtagattgagaccactaaaaagaattcttttagatgataaacaaacaaaataaaagcagaatagcagtagttatggacaaaaaatatatatatggg

SEQ ID NO: 26929 - DNA, 519 bp, Glycine max
  unsure (1)..(519): unsure at all n locations
  Clone ID: TF_jC-gmXLIB3563P012bc09d2
gcctcataacgacaattgaattaacaaggatgagtttgtatatatacacatgtgacagctgatatttaccaccacaaccacctatgaccaccttcattttataaaaccaaattacccaccaactaattctccaaaattggattaaagaatgaaaaacaatgttaaaagaaacctataaaatccaatttgagctttctatatcctttcaagtttccttctaaaccattctgatattctcctgatcttgcccaccagctgaacattctttgtaattttaaaatattcttccgcatttgataacattatcattatatcatggttgacaccttccacactccgatagtagtcattcttcaaccttgattgaattagttcaggatagaatggggcaggaaacctgtaatacaaatccaaagatattaaagtcacacatttaactagtcgctgtctctgacattnttacattntgtttacttagtttcaaggactggaaatttctagaacaggtctgtataaaaa

SEQ ID NO: 26930 - DNA, 471 bp, Glycine max
  Clone ID: TF_GmC343932_1
ggtcacaatgcctcttagcagtagaacagttttgtattcacgagtgctcttggagtagaagactaaggcattgttagtgagtaggagcaagtccctgaaaagttctacactcgacttaattgtctggctgctaattcttgaccttatagtgtcaaagtccatatgttgccggatcattttcttgtaccttcctctcttctgactatcaagtctgcgtcggaaagccggagcacctttagtttcaaatataaaatccaaaatctccatcatgtcttccaccctatccttttttaagttcctattttgatcatctacaccacatgatttggcaacttcaccacagttgctggtcgaactttctttacaccatgacacaatgtcagccgaatctaacaagtcactttccccaacacttgcttccttcatatttctgccacaatccttcctcttcctcttccctctccgtttttt

SEQ ID NO: 26931 - DNA, 400 bp, Glycine max
  unsure (1)..(400): unsure at all n locations
  Clone ID: TF_uC-gmroLIB3258057e03a1
gtaggtagataccaattttatttcatcaattccagtaattatattgtattctttagtattacaataagacttttctccctcacatacaacaacacttactctagcatcttttgttgccaatgatctaatcttgggcattcttttgtgttcagatacttgngtctttttgggcaaggaatctctatgccgggacagcatgtcaagactttttctcccagtttccttaattgtttcagattcgcttttatcatgctcatcttcacacttccatttccgacctaagtctttccattttctgtcaaatattttgctgagttcctttgccatcaaatgaacatcattactgggaggattatatttcatagcatttgagaaggtcagtctgacatcagctgcaaac

SEQ ID NO: 26932 - DNA, 2097 bp, Glycine max
  Clone ID: TF_GmC4529_1
cccggggacgagctagtgtccggcattgtgaagttgagaagatagcagaagaagaagggaagagatccattccatggcgtcgtcgtcttcaaactgaagaccggagagagtcaccgtcgtcactttccggagaacagaacagaacaagtgcataagagaatcatcgaattttcattcctttgtatagaagatgaagcgcaagcgtgggcataagaaagggaaggcaaaaggcagcactaaccatggaagcagtggtgctgatgctaacaaggaagaaacctctggtttggaggttgacacaccttcttccacggggaccgggatggatcagcagcagcattacaatcttgctaacataaatcctgatggttctgttgataaggctattgggcgtgttaaggtgaagctcaagacacctaaaatcttagactcccaacccacctcatttgatgctcccagtcccacacaaagcgatactgagagaatggaagatagtgcaaattctttgcctgatatgaaactcagtactctgtttaagagagctgctagcattaaaattaagtcttcatcaaaccacacattgtcggcttccactgagatcaccctcccaaaagaaagaaagaataagcaggaattggatgcttccttagtggttttaaggaaggtaatgaaaatggatgcagctgaacccttcaatgttcctgtcaatcctgaagctctgggaattcctgactatttcgatatcataaacacaccaatggattttggaactatatgtaacaatcttgaaaagaatgaaaagtatatgaattccgaggatgtatttaaggatgttcaatacgtttgggacaactgttacaagtataacaataagggtgactatatcttggatcttatgaggcgagtaaagaagaactttatgaagtactggacagcagctgggctatacagtgaacaatcaaaagggaccaaggagaggacttcagcagaagatattgcactttctggtgatggaaaagcagggaagggtggtcaattgaagcagaagacaaaaaagcgtcatggaagacaccataaacatgattgtttatgtgctatttgtgttctaaagcgacgtaggaaggaacgggaagagaatgctcgaattgctagaagcaattttggatctggtggtgataagcatgctaatgagtttaagcacgaggaatcaatacaagtagagagtcctggtggtgaagattcatcatcaaatatagatgaatctatgggcactgatggagatgttgatgaagacaaaggagaggtggcaaagatggagattgctgagaaggagttgtagcccttctgagagaaagcatgtgagcattgatgttgataatgatgatgacaatgatgaccatggcctagaggaaggggaggaggaggagaatggagaggaagaagatgaggaagagattgaaatgaacagccagaagggagagatgaatgaaactttaaaacatggtggaaccttggaagagaaatcaaatgttggtgatgcaaccgctctacatgatgaatatagaacaaagcaacaagaaggacaatctgcggcagtccagcaacagaagaaacacaaggggtcacaagataaacagcagaaagctaagctccttgagagcttatatagtgaaaaccacaagctttcaagtttatgtggaattctcttcccccaaaatagtcagtctgtctggagtggaccacactcactaatacagaagagaaattctgctcgtactagttcaattcacgctgctattaggactttcatggggtagcttttatcttgatcagtttattacacttcccagcagcctatgtcattaatattttagttgacatcccttcgttacatgatgtgtgtattatagtcacaatttcttggtagcaacagcagattttgtaatttttctttctgttctttttattttctcgttatgctatggaatgacgtatatgaaagaatttgtgcttcaaacccgttttactttataaatcatgaaagtaaaagtaaactgccccttgcagtcatagctcaagtggtcaagtttcgttttg

SEQ ID NO: 26933 - DNA, 1789 bp, Glycine max
  Clone ID: TF_GmC629_1
ctcgagccgcgaaaccgaaacaaaaggcagagcggtagcatttaaagggagaaccggtgccgtgaagcgttatcttatcactcaaatttagcttcggcaccgtctgtgtttctctcatctcagccatttcactttccctgtgatggacgccgatcctcctcaacttgatgatcatttggaacctttcagggtttctgtgaatcaaattctcaccacagtcaacaagcttgagaagcaagtgactgaggttgaacagttctatgaatccactgataatgttcaaggtaataactctaaaggtggctcacttgcaaaagagaagggcagggagaagcatattactggtaccaaaaagccactgcaagatgcatcacatacagaagcttcttctgcaaagagaatgcaagagcttatgcgccaattttccacaatattgcgtcagataactcagcataaatgggcttggccattcatggatcctgtagatgtagaaggtcttgggcttcatgactattatgagattattgataagcctatggattttggtacaataaaaagcaaaatggaagctaaggatggcacaggatataataatgtccgggagatctatgcggatgtaaggttgatattcaagggaaaaatggctgcaacttttacctaaaatgatgtccatgttatggcaaagaccttgctggaaaaatttgaggaaaaatggctgcaacttttacctaaagttgctgaggaggaaaagagacaattagaggaagaagcacaggcacaactagacattcagcttgctctggagaccacttatgccaataaggccaaggatataagtactgagctttgtgagattgatatgcatttgaagagtctcaaagaaatggtgattcaacagtgcagggcgttggatataattgccgagactaacccaatgttccaaccttcttctactgaagatgtggtccttgacttagatgctcagagtgactacactctatggaggttaaaggcttttgtaaaagattcactagaagagcaagtaaaggtcaatgcaggcgcaggtattaatcctaatgataaccctgatgacaagaaaaacaagaagaggcgagattctggtgattcttcgggcaagacaaacccaaaaaggaagaaactatctacattgtgattcattagttgcaacataagagacattagtttagtgtgattgagttaaagttgctgaagacaatgagttggacaataatgcaattggaacaatctggaaatccttctatagatattcactgctatgttgatgatgccaataaaattccttaatttacaacattgtttggcctcaagtgtgctttgtaggaactaggaagcgaaacctttgcaattccatgaacataatggaaatcgtttacccgttgggtctagttagtgttatcttgttctgaggatattctctaattctcaagatttgagacatctatgcctgcaaatggttagttactatatgcgtagaaagaaaatccacgtcgtggccattaaatgtgcagaagcataggaaaaactgaaaaagcttgcacaagcacaagtaccttaatggagcagcttagatcactaaattgtagggacctcaatatcattttttatttgttggcaacatatttgtatttgttaagagttgtgatgagatataaactcgacttgtacatgtgattctggatgctttttatttttgttatccgtatgaatggaagataatgtgtggaggtttataataatttatacaccc

SEQ ID NO: 26934 - DNA, 2954 bp, Glycine max
  Clone ID: TF_GmC1758_1
gaatgctcccgggatcttatactcctctcttgtctgtgcaatcaaaacaacaacattcattcatactgatcacttccttgcctattgcacattcttcatcacttcattcaacatttctctctcccttagctagtttttaccaatggcctgctgggttgtgctgcgtctctttcattacttcattcaacatttcccccttagcttgtttcccaatggctgctgcggttagtgctgcagtctcttttccatccaccaagtctacctctcttccaagcaggacctccctcattgccccagagagagttgtgttcaagaaggcttcattgcaaaacagagatgtttctagcagtggacgggtagtttccatcagagctcaagtcaccactgaggcaccagccaaggttgaaaaagagtccaagaaacaggatgaaggtgtggttgtgaacaagtttaaacccaagaccccttacattggtagatgcctgctcaacacaaagatcactggggatgatgctccaggagaaacttggcacatggtcttcagcaccgagggagagattccttacagagaaggacaatcaattggggtaattccagatggtattgacaagaatggcaaacctcataaactgagattgtattctattgctagcagtgccattggtgattttggagattccaaaactgtttctctatgcgtgaaacggctggtgtacacaaatgaaaatggagaaattgtcaagggagtctgctcaaatttcttgtgtgacctgaagccaggagctgaagtaacaataactggacctgttgggaaagaaatgcttatgccaaaagatccaaatgccaccatcatcatgttgggaactggaaccgggattgccccatttcgctcatttttatggaaaatgttctttgagaagcacgaagattacaagttcaatggtttggcatggctcttcttgggtgtccctacaagcagctcattgctttacaaggaggaatttgagaagatgcaagagaaaagtcctgacaacttcaggcttgacttcgctgtgagtcgagagcaaacaaacgagaaaggggagaagatgtacatccaaacccgaatggctcaatacgcagaagagctttgggaattactgaagaaggataacacttttgtgtacatgtgtggactaaaaggaatggaaaagggaattgatgacattatggtgtcattggctgccaaagatggcattgattggactgagtacaagaggcaattgaagaaagcagagcaatggaatgtcgaagtctattaatttctgttcacttgcacaaatatcatctcctactttatgctgcagcaagtctatcaaccctcctgcgttgtgtagatatatgacgaccctgtaatttttctttgacgatttttatactgttcatgaacaacttcattgccagttttactagtactatttttgagggatgatgcaatatagatgaatccaacttcactgtgtcatttccaaaaaaaaaaaaaaatttctgtagttcactgcttgaaaaattgatgagacacaagcatggttgggtgtttaattctcctgttgatgttgagactcttggtttgcatgattattttactatcatcactcatccaatggacttgggaactgtgaagacaaggctgaacaagaattggtacaaatcaccaaaggagtttgcggaggatgtgagactcacttttcgtaatgccatgacatataatccacagggacaagatgttcatattatggcagagcttttatcaaagatattcgaggacagatgggctataatcgagtcagattacaatcgggagatgagatatggctttgattatagggcagctccccctgcaccctcaccttgtctagaagtctgcatttatgatatgaaattttggatagatcattctgaacagactccaagactcatgagcatcactccatccagtagaactccagctccaaaaaagccaaaggcaaaagatcctcataaaagagacatgacatttgaggaaaaacaaaaactaagcactaaccttcaaagtttgccttcagagaagcttgatgctattgtacaaatcattaagaagagaaattcagcacttaatcaacatgacgatgaaattgaagtggacattgatagtgtggatgctgagactctctgggagcttgatagatttgttaccaactataagaaaagtttgagcaaaaacaaaaggaaggctgaacttgctcgagctagagcagaagctttgcagcagaatgccatccagaagagtcaggcaccagctatggcagagattccaaaagaaacacaaacagatgaaaggagtcttccccaacccttgcctgtgcaagggagaaatcaagcggataatgggagtaggtcaagcagttccagtagctccagcagtgattctggttcttcttcaagtgattctgatagtgacagttcctcagcatctggatctgatgcagggtcgcaagggacctgactatgctctgtcagatctcagatttttagagtagatagtgtcttgatgccagcctattttggttttttgaagcttccagattatggattttagtgtaacagtcgggttataaaggaagcgttctgaaggccgtgggtgatcctcctgatgcagcctgggattttttcttcccatttgtttgaactgctactccaatgctaatcgtggccttgttggaattcttgacacaaattcttgtataatatttggtaggatgtgatgatagttaggtagctagatttccgtagcatatgtacattgctaactactgctgcgcattgagttccatttataacttattttttacttttgtgctagcagattcaagatcttggtatcatacgaagataatatgtaattcattcgtgaaatctcattccgtgtagtttac

SEQ ID NO: 26935 - DNA, 392 bp, Glycine max
  Clone ID: TF_LIB3138-023-Q1-N1-B1
attaaatctaagctggagagaaacatttattctggcactgaggagtttgcagatgatgtcagactgaccttctcaaatgcaatgaaatataatcctcccggtaatgatgttcatatgatggcgaaggaactcagcaaaatatttgacagaaaatggaaagactttggtaggaaatggaagtttgaagatgagcatgataaaagcgaaactgaaacaattaaggaaactgggagaaaaagtcttgatgcaatgcttccccggcataaagattccttgcccaaaaaaaacacaattattcgaacacaaaggaatgcacaagattagatcattggcaacaaaagatgccagagtggagacacctaaattatcacagattccttgcaagttgattg

SEQ ID NO: 26936 - DNA, 1247 bp, Glycine max
  Clone ID: TF_GmC105619_1
gaacaaacaggcatagccgttcaattaattcaaaattttaaatttttgtaatatcaataagtatttacattattttggatctgggacagggtttaatttttctattgaaaacaaattccaatgaacaatgagaaaatacaattagagcgactatattaacaaccagcctgtcacctagtttaatcccacaatataatttatgctatggaacaactgtttgcccaagcacaagactaacagggataacgcaattcacgcaactacgctggatagcattggctaaagtaacaactactatgaaataataaattagttggggaaaattaactatatacaaaaataacatctttgggtctattgaagtgtccctactgaattttggtaccaggctggaggcctgcttgcactttgctttgaaagtgggcttctaaccttgtagaacatttgtaataaatggtttctggagaattataggtgcgtgcattcgcaaacattcttctggcatccgcaacaaacatctcaaatgttacataatattgctctgaatccaccctcttagacattgtcttcaaatccattggatctttgatgatgtcataataatcagggacatcccgtgcatcaactggttccttgaatggccaagcatcagcgtgatcgaacattgactttagaagtgaacgcataaacccattcaaatgtttttgattagtagcattgtcagaagaaacatttaaagttctgaatcgtgaatgaccccactgatcaggagtccacccagcctctctcaaaccagggatgtcatcaataatttttttaggaataccagcttctttcttctgaaaatcaattccagcataaacgatgtgacagtttgacagctctctgattttttcatcaattgcctgcctttgacgacggatcatagttgacaaatcagtgtaagggagctttggatcaatcttgcattccatgagaattcctccatcgtaatcctttatataaccttgccatcgatctttctccaagtgaatctcttttgtaaatccctgtttgataaaatagccaacagcattattgtcagcatatgtgaggaaatgtgtcagcccatccatatcacgtgcaaactgttttaagtgattcatcaatcgggtaccataaccctttacttgctcatcagctgtaattgcacaaaaggctatctcaccgaacctctggctagcatatgggcgatatgtaatgcctcc

SEQ ID NO: 26937 - DNA, 1035 bp, Glycine max
  Clone ID: TF_GmC399618_1
ggctcgagatctcaattactggggttccacatgatgcagttcaagtttttattcgattcttatacacttccagttgtgagaaagaagaaatggatgaattcgtcctacctttgttggtgttgtcacatgtatacgtcgtccctcacttgaagcgtgaatgtgaacagaagttagaactgagtttactcaccatagataatgtggtggatgtatttcaacttgccctactttgtgatgcaccaagacttaaccttatttgtcaccgaaaggtgctgaaaaacttcaaagttgtttcagaaacagaaggatggaaaacaatgaagttgagccacccagctctagaaaaggaaattgtcgagtcaatggtcgatgaagacattattaaaaaggagaaaatcagaaaaaataaggaaagagagatatatttgcaattatacgaggccatggaagcccttgtcacatttgtagagatggttgtcgaactattggtcctcacgacaaagactcaatagcaaaccaaccatgtaagtatacagcatgcaacggattagaattgcttgttcgtcattttgctggatgcaagttgatagtccgtggaggttgtgttcattgcaacaggatgtggcaattattggagttacactctcgattatgtgttgatcctgattactgtagagttcctttgtgcaggaactttaaagagcgaatatcaaaacaaatcaagaaagacgaaattaggtggaaaatattggttcaaaagatcttgagaacaagaggaattgggatagcatcatgctttctgccacaataactatggccatctggtgggtatatagaatgtgtttgtaagaaatggccttcaaagattaagtgtttctcgtctcaaccttattgatgaaataaataagaagcaggggaacacttttttctaatatttttatcttatttttttaaccataaaattatttgtatgtctaaagatctggacattaatttatatcttgtattcaataatagttatttagttagtatacc

SEQ ID NO: 26938 - DNA, 521 bp, Glycine max
  Clone ID: TF_GmC328_8
ctgaattttatgtatagtaataccttgagcattacttcaccacctgctttattggatgtgttgatggctgctgacaaattcgaagttgcttcctgtatgagatactgtagccgattattgcggaatatacctatgacacctgagtctgcattgctttaccttgagcttccttctagtgtcttaatggctgatgcagttcaaccattgactgacgcagcaaagcagtatcttgccagtcgatacaaagatataacaaatttcacatatgaccaggttccaggaagaggttatgggcttgcctctagctggaatagaagcaatattgtctagtgatgaactccaggttgcatcagaggatgctgtatatgactttgtgttgaagtgggtccgaacacagtatccaaaactagaagagcggagagaagtcctgggtacacgacttgcccgtttaattcgcttcccttacatgacctgtcgaaaacttaagaaggtcttaacctgcaatgactttgaccatgatg

SEQ ID NO: 26939 - DNA, 1017 bp, Glycine max
  Clone ID: TF_GmC935_2
gttaggagcgtgcgtgagaagacagcacctcatggtacggaatcggagaaagatgcttccgcggcggtgcacggcgtctatgggcagcagcaacgggagcgagagcgatgcgtcagacttggtgatgcggtgcccctcgtgcgaaggggaatacgacatggacgactcgggacccttcagggagtgcttcccggaggcccacgaggctgaggaggagctccgccgcgaaatcgaagagcttcaaaaccaaagtctccttcctcaactctcccctatcccaaactaaaagcttcaaccgccgaaatcatccccgttcccgtcgaagaattccaagccgttccaattcccgctcacaagcacctttctggttaagtcgctcttcctgttttcaaagcaatgcttgagaacatatggcagaaaggcggagtggcaccatcaagatttctgacgtatcatatgatacccttcatgcttttgttaattatttatacactgctgaagcgtcccttgataatgaattggcctgtaacctgttggttttaggagaaaagtatcaggtgaagcatctcaagacatattgtgaaaagtatttgatcgccaaaatgaattgggataaagctatttctaactatgcctttgcatatcaatacaattgcaaacaattacaaagtgtgtccttggcagtgatcttggaccacatggactcgctcactcaaaatgaatgttatgcggagctggtggacactaatcctcgtcttgttgtggaaatatatgaaacatacattggcaggctattaaatactgcaggcgcattttaggttataggaacagagctaaggaagctagtgaaatcatctttaagctggggtttgatacttcagttgggattatattcttgattggtaattagtctgttttagtattttaattgtacattatcatgcactaacagttaaacatgcaattggacctaacacctctttcattatagtattgttctttctagattaaaaaagg

SEQ ID NO: 26940 - DNA, 345 bp, Glycine max
  Clone ID: TF_LIB3056-012-Q1-N1-E9
ggaaatttctgttgtatgctgctattaaacatgcagggactccaacaactgcgttcaacaggctagttcagtgacattagcatttacattgagggtcaaggtctcattgctcgggctcataaagtcattctcgggatatatagcgtcctattaacaaagatgttcacaaatggaatgtgtgagagcaactcacctgaggtttgtttaaaggatgtgtcttcagcagcattgaatgctatgcttgaattcatgtactgtatggatctcaagtattgagcataatgatgacttgggaccattgtactccaacttcctctgttatctgacatattcttaatctttttt

SEQ ID NO: 26941 - DNA, 1443 bp, Glycine max
  Clone ID: TF_GmC523_9
ggattcggtgaactatagaaggccggccgggcgcgaataattcttcattgctctcaattatcaatggctccccaaaccatttccattctcaacctcttaccagaacctgatgtcttcattcacacttcccatggaacacgcattccagcccacgcacccattctggcttctatgtccccggttctggagaacttgatagatcgcccacgtaagcatcggagctccgagagaataatccaaatccacggcgtcccctgcgacgctgtcaccgccttcgtccgattcctctactcctccaggtgtacggaggaagagattgaccagtacgggatgcacctccttgcattgtcccacgtgtacatggtgcagcaactgaaacagaggtgcatcaagggtttgacccaccgtttgacgacggagagcgtcgtcgacgtgctgcaactcgcgcgtctctgcgacgcgccggatctccacctccgctgcatgaagctcctcgccaagaatttcaaggcggtggaagcaaccgagggatggaagttcctcgtgaaacacgacccctggctcgaactcgacattctccgcttcatcgacgaacacgaaacaaggaaaaagaaatcgaggaggtataggatggaacaggggatatacgcggagctgagcgaggcgatggagtgtttggaacacatatgctatgaggggtgcacccacgttggaccgtacgatgcggaggtgaagagggagaggacgccgtgtgggagattcgccacgtgccagggtcttcaggttctgatccgccactttgccacgtgcgagaagaaggttcgcggtggctgcgtgcggtgcaagagaatgtggcagctctttcgactccattcctatgtttgtcacgacaccgattcctcctgcaaggttcccttttgcaggcaatttcaattgagaatgcagcaagagaaaaggaaagatgatgctaagtggaaactactagcgaggaaggtggcctcagccaaagtcatgtcttcattgtcactgccaaagaggaagcgagatgaagaaacaagagtgacgatggacaatcccgggattagaagttttaaattactatgaatattcttataaataatgatgtataggacagtgtgttccgtgttagatacttgatagagcagtttctatagggagagagtattctgcttgccggtttgttctgtgtaaaagcagggtttttgatggtgtgaacttcttgtacttggctcttttacttgagaaaatggcaaattgagtggtaccttgtaagttgtaacggtaaattttgtttgtttgaacctcattttgcgttgtctgagcatttgagaatattgtaaagctagtgttcaatttgatgaattatttgtgtagaatattcaaatattcattttaaatagttatatttatccttggaatggt

SEQ ID NO: 26942 - DNA, 1444 bp, Glycine max
  Clone ID: TF_GmC523_10
ccaagctaagactcaacaatttgccattcaggtacaagaagttgttcacactatccaaacctgcttttacacagaacaaaagcagaatattctctccctgtagaaactgctctatcaagtatgtaacacgaaacacaccgtccttcctatacatcattcatcattcatcattcatggctccccaaaccatttccattcactaccacaccacccgcttcttacctcaacccgatgtcttcattcgcacttcccacggaacacgcattccagcccacgccggcattctggcttccatgtcccctgtttttgacaactttatagatcgcccacgtaagcatcggagctccgagagaattatccaaatccacggcgtcccctgcgacgccgtcaccgccttcgtcggattcctctactcctccaggtgcacggaggaggagatggacaagtacgggatgcaccttcttgcattgtcgcacgtgtacatggtgccgcagctgaagcagaggtgcatcaagggtttgacccaccgcttgaccacggagaacgtggtggacgtgcttcaactcgcgcgtctctgtgacgcgccggatctccatcttcgctgcatgaagctcctcgccaacaatttcaaagcggtggaagcaacggaggggtggaagttcctcgtcaaacacgacccctggctcgaactcgacattctccgcttcatcgacgaacacgaaaccaggaaaaagaaatcgaggaagtataggatggagcaggggctatacgcggagctgagcgaggcgatggagtgtttggagcacatatgctatgatgggtgtacccacgttggaccgtacgatgctgcggaggtgaagagggagaggacgccgtgtgggagattcgccacgtgccaggctcttcaggttctgatccgccactttgccacgtgcgagaagaaggtgcgcggcggctgcgtgcggtgcaagcgaatgtggcagctctttcgactccattcctatgtttgtcaccacaccgattcctcctgcaaggttcctttttgcaggcaatttcaattgagaatgcagcaagagaaacggaaagatgatgctaagtggaaactactagcgaggaaggtggcctcagccaaagtcatgtcttcattgtctctgccaaagaggaagcgagatgaagaaacaagagtgaatataaacaatcccgggattagaagttttaaattactatgaatattgtaatgaataatgatgtataggaaggacggtgtgtttcgtgttacatacttgatagagcagtttctacagggagagaatattctgcttttgttctgtgtaaaagcaggtttggatagtgtgaacaacttcttgtacctgaatggcaaattgttgagtcttagcttggaaaattgcatatgaagccttgcttaattttcgtcaattccgtt

SEQ ID NO: 26943 - DNA, 615 bp, Glycine max
  Clone ID: TF_9258031
tagggaatttggccctcgaggccaagaattcaagcctgaatctctttaagctagctaggaaatatgaagaaggggtttcagtttgcagggtatgataaagccaccataggaactataactcttgactgtcaaagtccctatggagagaagcgtaaccgatgtgcccttctaccacctaatgttcctattcttgctcattccttagaacgtacacaacgaaactggattgctaggtcaaattcccctactgatataattatacaagttggtgattctagctttcacttgcacaagcttgcaattgcctcaagaagcgaatatttgaaccggcttgtatttcagaggggaagcaacagagaaaaagctggtgacagcctcatcatccaaatgaaaaatcttccaggtggtaaaaaaacttttgaattagtagtcaaattctgttatggaagaaaaattgatattaccgcagccaacattgttccattgtattgttctgcacatttcttggaaatgagtgaagatgttgaagatggaaatctcatatccaaaacagaatcatttctaacctttctaatactatcttcatggaaagacacatttcgaatacttagagca

SEQ ID NO: 26944 - DNA, 758 bp, Glycine max
  Clone ID: TF_GmC248068_1
atttatggcctccatggaaataacagtagagcatccgcgcaccccttgaaaaccgtgtgttttcaatcaaagccaaggtcctcaccgatgagatgaggggttggaaccaatttgagaccatctacgaggaagaacaggagctttcttcaacctcctctccctttctttcaccatcttcctcctcttctcctcctcctcctccatcactccactccatagtcaatgcttggtctcttgactccgggtctgaaccagatgtcttgatatgtgttcaaggaacctcttttcgtctgcacaaggttcgtttgatatcacgaagttcatacctcaaacgacacctaacgggagtttctgacttaactctctccccgccgttaaacttaacggccgagactttcgccgcggtagccgaattctgttacagccgcagagtccacttaacgccgagcaacgttgccgccgttagagtggcggcggagttattgggcatgacgggggaagagaatctccgtgaagtaacggaatcgtactttgagagagtcgttggcattggcgcgtcgatggttctgcgttcgtgcgtggctctgcttcccgaagccgaaacgacggcgtcgcttgccagcaggtgcattgaagcgttggtttgggaagacgacgtttcgtgtatgagcgacgtcgtaggaatgcaccctcaggattttcaaacgggttcgtattcactgaacagacgggtacccaaccacgacgttctatacaag

SEQ ID NO: 26945 - DNA, 383 bp, Glycine max
  Clone ID: TF_GmC138527_1
gcggtttcgaacattcggaggaatttctctctcgctctctctcttcaattcaacacttcgagaatcgaaggcacagtaggtaaagagatttttcatcacacaccctactcaatcaaaaacttaagatttctgtatggtgggatcttaaaaaatatagtgattccaaatattaaatggggtgtctttgaactgatgatgaggtatgtataaactggaacagtaaatgtcaatttggatattgctgaggacctctggagagctgcagatcaatatcttctggaccaccttaagagatatttctgaggaaaatgttgcactaatgtatgtcgaaggaaggattgggatgttacttcatcaaaacatgcatgtatacggtttatgct

SEQ ID NO: 26946 - DNA, 1317 bp, Glycine max
  Clone ID: TF_GmC6774_1
ccacgcgtccgcaaccccgaaaccaaaacctccttcaaccacgctagttcaactcaaccaattacttcatattcatatatatggattcccctgcagtttcctctatccactttcacaacgcccatgtcttacccgaaccagacctttttatgcacactcccggtggtaaccgcattccagcgcacgcaaccattctggcttcggcatccccagttttagaaaacgtcattgcgtccaaccgagtcgtcaaaatccacggcgttcccgacggcgccgtcacggccttcgtagcgttcctctactcctccaggtgcacggaggaggacatggacaagtacggaatccaccttctagcattgtcgcacgtgtattcggtgccgcagctgaagcagaggtgcatcaagggactggcccagcgcttgagcacggagaacgtggtggacgtgttgcaactctctcggctctgcgacgcaccggatctctacctcaagtgcgtgaagctcctcaggaaccgtttcaaagccgtgaaggaaacagagggctggaaattcctcgagagccacgacccctggctcgaactcgacgttctccgcctcatgggcgaactcgaaaagaggaagaggagggtgaggaagtggagggaggaggagaggttgtacgtgcagctgagcgaggcgatggagtgtttggagcacatatgcacggaggggtgtacggaggtggggccatacgaggtggaggttggacgacagaaaacgccgtgctcaaagttcgccacgtgtcagggtttgcaggtgttgatacgacacttgggaacttgcaaccggctcgtgaaaggagggtgtttgcggtgtaagcgtatgtggcagctcttcaggctccactcctccatttgcctatgccagaattcatgcaaggttcctctttgcaggcaaattcgattaaaaatggagcaagagaacatgaaagatgacgcaaggtggaaactactggtgaggaaggtggcctcggccaaagccttgtcttccttggcgctgccaaagaggaaattagatcagagctagggaccatatatataaataaataatggcaagttgtgcctacatgtttcggggggattacaaaatgatcgagaaataatggcaagttgtagtgttaacatgtcattagtatttcttttctcacgggttatagccttattggtacctattttatatgaaaggtataatatactcattgagataatctctagtacttttcttcttgttttaatgctggggaaataattataatgaacgaggaaagaaaattttattt

SEQ ID NO: 26947 - DNA, 1022 bp, Glycine max
  Clone ID: TF_GmC54082_1
cgtaagctcggaattcggcttcagcaattccattctctttgcctgcctagtttcaattctgtccaatttccaaaaccaaaacaagccacacaagttcatggcaactcccaataacagactctctcttgccatggagagaactgggcaatgggttttctctcaagacataccaactgatgttatagtggaagttggagaaacaactttctctctgcacaagttcatgctagtggcaaaaagcaactacataagaaaactgatattggaatcagatgagagcgaactcaccagaatcgacctctctgacataccaggaggcccttcaatcttcgagaaaaccgcgaaattctgttacggcgtcaacttcgagataacggtccacaacgtcgccgttttgcgatgcgccgcggagttcctccagatgacggatcagtactgcgagaacaaccttgcaggccggacagaggagtttctcacgcaggtcgcgttcttcacgcttaccggcgccgtcacggtgctcaagtcctgccgccatctcctcccctatgctgacgatatcaacgtcgtgaaacgctgcgtcgaagccgtcagcgccaaggcctgcagcgaggccaatttccccagccgctcgccgccgaactggtggacggaggagctcgccctcctcgatatcgatttcttcgccagagtcatcgacgccatgaagcagcgcagcgcgaaggctcttaccgtcgccgctgcgctcatcacctacacggagcgcgccctacgagatctcgtccgtgaccacaccggcaacggaatccggtcctcagatcccggcgattccgattccagatccaaacagcggaagcttctggaagcaatcgtggatccgttcccctcggagaaagccgcgtttccgatccacttcctctgctgcctcctccgatgcgcgatctacctacgtgcctacgccggctgcaaaaccgagctcgagaagcgaatttcagcgatcctcgagcacgttaccgtcgacaacc

SEQ ID NO: 26948 - DNA, 1319 bp, Glycine max
  Clone ID: TF_GmC7983_24
ccacgcgtccgcttgaggtgaaaggcttgtcatgcttgaaaagcttaatacatactctagatatacatcatccctagaaagctatggatcatttgataaacttcaactggttattaacttaattgggttgacttgtctttcaagtttaccagagtatcaaagctgtatcatagagagcaaagggataaaagcaattgttcttcttgtgaaacgatgcttaagtaatgatattcatgtagaaaggcgaaacttcactcctcatttgcacacaacattccaggaaaggtcttgttgctgtatggataaagaagattgggaaggttccaatgttctcttattttatagtttgttgggattgtctgaaattcttcgtcagtgtgaccttctacaagataattctcagcaatattctagagaggtgacaaatattagagctcagttagttagcaaacttcatgagatctgtagtggcaactctttcagtcctggagtgagatggtatgttttgtatattctaacttattttggattttacggtttcccaaatgagttagccaaaaggattgggaaatctctcaataaggaagaatactcagatatgcggctcgttgtatcttctcatgttgaatatgaagcattggtgttattgttgaaatatgaatacttgggatgtttacatgcaggagaagaaacagtgaagaagctgaaaattcttgctaagcgctgcaaactacagcatctcctgcaaatgctttatagacaacgtccaaagtggggcacacctttccccagctttaatcttactccatctcttggttcagccggaagttgtttttcggatgctatattggaagctaaatcaaataaacttgttgggtggacatgcaacatttgttctgacacagtgccccatatgcatgttcacaaagttatattgcagtctggttgtgattatttacaaggtttattccggtcaggaatgcgagaaagtcattcacaagtcataaaagttgatattagctgggaagcattgatcaaactagtgcagtggttttattctgatgagctgcctaatcctccttctggatgcatgtgggataatatggatgatgaagaaaagctattcaatctacaccatatgtggagctttgttgacttgctgagttctggattttggaaaatattcaggaagcctgctggaatgtgattatgtcttgtcttgataatgaacagttttttattcaaattcatactataaactctggatgctattatcgcttagagaattaagggttttgatgctattattgattgaattt

SEQ ID NO: 26949 - DNA, 1102 bp, Glycine max
  Clone ID: TF_GmC68877_1
ccacgcgtccgcacatattcctcgctgtaccctcaatagggttgattttcttgcatgcaacaagaccctactttgggatttcataaaagttaattatttgtttcatgatcttcaggtcttaactccccctcattatccatggagcttctcattcgaataatatttcaaagggatataatataaaaaactatagccacctggaattctgtctctgacatggtcgatgatgacaagagaaataataatctacgacagctgctagtgatttgtctctgaaagaattaggagcttattttatttctagtgccatgaagagagcaagtgaatgggcttattctcatgagattccaagtgatgtcaccattcaagttggcgaagtttccttttcgttacataagtttccattagtttccaagagtggatacatagggaaactggtctcagaatcaagtgatgccttcattgaactctatgatgtccctggtggagcagaagcatttgaactggcaacaaagttctgctatggcataaactttgaaataagcatcgaaaacatcgctatgcttcgttgcgtggcagagtaccttgacatgacagaggattactcagttggaaatttggtgggaagggctgattcttacttgaatgaagtggcactcaagactatttcaggggctgtgtcaatcttacacatgtcggaacgcttccttccgattgcagagaaggcaaaactggtgagtagatgcatagatgctattgcattcatagcctccaaggagactcaattctgttcacctatgagaggtgacattattggtactgatggcatggcttctcaccaaaggccagtggttcattggtgggctgaggatctcacagttctcagaattgacatctttcaaagagttctgattgcaatgatggccagagggtttaaacagtttgctcttggccccatcattatgctctatgcacagaaatctctgcgaggtttggtaagactaaaaccccttaccccaaaggttttaacatacaaatagaccagggtttaaggattaatgactttgggccatggaaagaattccttctggtaatgcccttt

SEQ ID NO: 26950 - DNA, 667 bp, Glycine max
  unsure (1)..(667): unsure at all n locations
  Clone ID: TF_GmC253982_1
cggaattcccgggtcgacccacgcgtccgcggacgcgtgggggaccttataagaatctgcagaggagtgcagatgtgaatcactgcataaagttcttgagaaagaactgattcatcaaaagtatgcagattataaggcactgggtgatgtagataactctcagaaacggtatatcttacaaggtctatcccttccccaagaagataggcttcctgcggccttgcatcgaatccttctgaccgccctttcaaattcaacccgccaaagtggtcaagaagatgaaattgataagttggtaactaggatgggtgccatgcagatggcgaaatctctggatgatctcgctgatgtttgtgtaagagttgatagaaaaattttccgctgtcaccaagttattctggcatctaggtcagaatatttcaaagcaagattatcacatatgaaggacttccatgaagacatagatgagttatctgttgacatccttccttgccttgaagaacatgacttgagcatggaagctnttgagaaaatgattgagtatatgtacactggatcgtttgcaggatataaatccagatcaggctgaggaaatgttggatgttgcttctagatacttattgtttcctctcagcgggcggtggctgatgtcttgttgccacacttg

SEQ ID NO: 26951 - DNA, 1426 bp, Glycine max
  Clone ID: TF_700895650_FLI
ggctgctaaaagtcctttcttctacaaggtagatgtctattttttattggttagatttgaaaatttctgctaaaaatgtgtttgcttagttgtgtttattttgcagcttttttcaaatggaatgagggagtcggagcagaggcatgttgccctaagaattaatgcttctgaggaagctgctcttatggagcttctgaatttcatgtatagtaataccttgagcattacttcaccccctgctttattggatgtgttgatggctgctgacaaatttgaagttgcttcctgtatgagatactgtagccgattattgcggaatatacctatgacacctgagtctgcattgctttaccttgagcttccttctactgtcttaatggctgatgcagttcaaccattgactgttgcagcaaagcagtatcttgccagtcgatacaaagatataacaaagttccaggaagaggttatgggcttgcctctagctggaatagaagcaatattgtctagtgacgaacttcaggttgcatcagaggatgcggtatatgactttgtgttgaagtgggttcgaacacagtacccgaaactagaagagagaagagaagtcctgggtacacgacttgcccgtttaattcgcttcccttacatgacctgtcgaaaacttaagaaggtcttaacctgcaatgactttgaccatgatgttgcatccaagcttgtactcgaagccctctttttcaaggctgaggctccacaccgccagcggatactagctgctgagtctgcttccttcaatcgactttttgtggagcgggcatacaagtatcgccctgttaaggtggtggaatttgaacttccccggcagcagtgtgtggtttacttggatctgaagcgggaggaatgtgccaatttgttcccatctggccgagtatattcgcaggcattccatttaggcggacaagggtttttcttatcagcacattgcaacatggaccaacagagctctttccattgctttggcctgtttttaggaatgcaggaaaagggctctgttagctttgccgttgactatgaatttgctgcgaggtcaagaccaacagaggaatttgttagcaagtacaaaggcaattatgtattcactgggggaaaggccgttgggtatagaaacttgtttgcaattccatggacaacgttcatggctgaagatagtctttactttatcaatggtgcactccaccttagagctgagctcaccatcagacactgactgggatttatatgtgtaaaccttttcttctagttggtagctctgactttttttgggcaatgtgtctcattttccgataacctgctgtaatcttaactaatattcaggcaatgtgcactaggtggttagtgctggatgtgagatcaaatgaattttcgggacctt

SEQ ID NO: 26952 - DNA, 317 bp, Glycine max
  Clone ID: TF_GmC130929_1
caaaaaattcaacaccaccaagagggcgcaacaataatgtctctccagcagcaatagaattttgggagcgtcttttttatcacggttataaagcagatgtttgcattaatactgataacggtggcgttgtttatgctcattctaacattcttgccatgtctactcctgttttcaggggcatgttgaagcaagcaaattgtcatcgtcgatggcgaacaatctcaattactggggttccacatgatgcagttcacagttttattcgattcttatacacttccaggtataagaaagaagaaatggatgaattcgtccta

SEQ ID NO: 26953 - DNA, 1868 bp, Glycine max
  Clone ID: TF_GmC337_1
gcgtctccaactctcttagaatctaaaccctaggaaatttccccttttctttcaatcaaacgataccttagaaattcgtcgttttgtcttccaaattttgacaaccttcctcatcctcacctaacttcttctcatttatccctcacttatccaatccccacccaaattccccgcatcgacctctcccccctaaattcccccatcgtcgtcctctctcaccgcggaattcatctcattagccggttccgctacagtgcgtatcccatgggtaagattttccgagaaaacgcgaagccgtcggcaaattcctcatcggcgtacccctctgcggcgcccgccaccacttcgtcgacatcggtgacggagacggtgagggggtcacaccagttcaagatgacggggtactcgctctcgaaggggatcgggattgggaagtacatggcctccgacgtgttttctgtcggagggtacaattgggcgatttatttctaccccgatgggaagagcgtggaggacaatgcaacctacgtgtcgctcttcatcgcgcttgccagcgaaggcaccgatgttagggcactttttcgagttgacccttttggatcagagtgggaaggagaggcacaaaggtgcatagccatttctgagaggaactcttgagagcggggcctatacaccgttaaaataccgtggtagtatgtggggttacaagcggtttttcaagagaacagctctagagacatcagactaccttaaagatgattgtctgtctgtgaattgtagtgttggtgttgtgaggtcacacacggaaggtccgaaaatctataccatagcaatacctccttctagcattggtcagaaatttggacaactgctggaaagtggtaaaggcagtgatgtaaattttgaagttaatggtgatatttttgctgcacataaattggtactagcagctcgttcacctgttttcagagcacagctttttggtcctatgaaagatcagaatacccagcgtattaaagttgaagacatggaggctccagttttcaaggcattgcttcattttatatactgggactcactaccagacatgcaagagcttactgggttgaactcaaaatgggcatcaaccttgatggctcagcatcttctagcagcagctgatcgatatggcttagagagacttaggctgatgtgtgaagcgagtctctgtgaagatgttgctattaatactgtggctacaactctagccttggcagagcagcaccattgtttccaactgaaagctgtctgtctcaagtttattgctacctctgaaaatcttagagctgtgatgcaaactgacggatttgagtacttgaaggaaagctgcccatctgttctgactgagctattggagtacgttgccagatttactgagcattcggacatcatgtgcaagcataggaatgaagcattacttgatggcagtgacataaatgggaggcgggtgaagcaaaggctctaatatgtgaagaacactgcacagctttctgtacatccctcttctactctccgttttaaaagatagcgagagcatggttagagggagaatatatataatcttttataggatcagaggcaatttttaattttcttagcttattcatgtgtaagagatgtaaatgtaatttgtgttgttgctgttactgttctgtttcacgtgtaggtttctgtaatatcttcagtatcactttttactggaaaacatgccttgcaagtgttgatcattactttttatattctgtatgcttattattcaaatgtagtagcgtaagtgcccttgaaacatttgactggcatcatctttttctattctctatatctttacg

SEQ ID NO: 26954 - DNA, 867 bp, Glycine max
  unsure (1)..(867): unsure at all n locations
  Clone ID: TF_GmC141051_1
tcgggtaaattaggaaaatgaacaatacattattacagtgattcgattacaacggagcgttgcactgaatcggcaagaaaaagccaaacacaatgaattgagagaagaagaagaagaagattattaattacaataaataaataaatcgccgtgcaaataaaaccgttggatcgatcgagaatgagaatgagaatgagaatgaaagtgtgcgtttgatgagtatggaggaacctcagttccgcgaacatcccaaagccaaaatcgccaccattccgccgtcgcagcactccgacggcgccgccgccgaattgcgcggtgccgattgcaacctggcttccctctgcgagcatgtccaaatcgaaggcttcaattcgggttccttctctgatatcgtcgtcaatgccatgggttccacttatcacctccaccgtcttatcctctctcgcagttcgtatttcaggaacatgcttcatgggccttggaaagaagccggtgctcctgttgtggctcttcatgttgatgataagaatgttaatgatgaggcaattgcaatggctttggcatatctatacggacaccaccctaagcttaatgataataatgcttttcgngttcttgctgctgctgtctttcttgaccttcaggatttatgtggaatttggacggatttcattatttctgatctgtggactttaaacttcttggcttataaggtgtttgcggagaaccatgactatggcatgcatggggagcgtggtagaactggttgctggggctacctctggcaaagtggtggcatggaatttgaagagggggctcctaaacttttattttaaacatttcatgccattactgacttctaaggaa

SEQ ID NO: 26955 - DNA, 1894 bp, Glycine max
  unsure (1)..(1894): unsure at all n locations
  Clone ID: TF_GmC1088_1
tacaaaataatgttgttaccttcctctctctaacctgcaatttaacaactccttcgtttcttctttcttttttctaaaacctcaaaaccaaaaacacaacaccaactttcgtaacgtgtctctcccttcttcccctcctctctccggttccctaattctgccctcactgcacccaattccaattccccctcaccccccaattcggggaattagggtttcgccccattcattcatcgatgcaccaccaccatcgtcgctagggtttgcttcgatggcggaattggaggaggagcggatgggaggggatttcaagcatggcggaattggaggaggagcggatgggggatttcaagcccttctcggaaggttcttcgtgctcgcgttcgatcagcgaaaccgtgaacggctcgcaccaattcacaataaagggttactctttggccaaagggatgggtgctggaaagtacatcatgagcgacactttcaccgttggtggttacgattgggctatttacttctaccccgatgggaagaaccctgaggacaattccatgtacgtttcggtctttattgcgctcgctagcgacggaaccgatgttagggctttgttcaagttgacgctggtggatcagagtgagaaggggaatgataaagttcatagccatttcgatcgccctctcgagagtggaccttataccttgaagtataaaggcagcatgtggggttacaaacgcttcttcagaagaacacaactggaaacctcagagtatctaaaaaatgattgccttgtcatgcattgcactgttggtgttgttaaaactcgttttgagggatctaaacagggtgttattgtgccacagtcagacatgggccgggattttaaggacttgttggaatctgaggtcggttgtgacatacttttcaaggtcaaaagtgaaagcttcaaagctcataagttgatacttgcagcccgatctcctgtgtttagagcccagttttttgggcttgttggggatcctaccttagaggaagtagtggtagaggatattgagccctttatcttcaaggcaatgcttctctttgtttactctgacaaacttcctggcatatatgaggttatggactcaatgcccttgtgctcatacaccgtcatggtgcagcatctcttggctgctgctgatctctataatcttgatcggctcaaactgctttgcgaatcaaaattgtgtgaagaaatcaatactgacaatgtggccacaacacttgcgctggcagagcaacatcactgtccacagcttaaggcaatctgtttaaaatatattgcaaatcctgcaaacttgggagctgtaatgcagtcagaagcttttgtgcatttgaaagagagctgcccctcaatgctgttggaattgctggagacatttgcatcagtggatgataactcaggccagacattgagcagaaagagaagtggcagtagcatatatgggcaagatttagcagacggggcagctgctgaatcagttaatccaaatggcaggcgagtaaggaggcggacataagcatagtttacaatctgaatctgcaacctttaaaacttaaaagtgtgatatagttaaccccctagtcctgtcaatgtaagtgattcaccattttcatttccacctgatccctgagattttatatgtcaagttttctggccttcgcaccttgtctcaaggggctactttggacagcattttcaatggtagtttgacattagagcagttctaatgtagggtatatcatgtttgatgacgttaataaaaagtaaatagctgatatatttgttttttataagncgccnnggaagaaaacacacaagaaaagngaaaaaanagangaaggaaagaacnng

SEQ ID NO: 26956 - DNA, 423 bp, Glycine max
  Clone ID: TF_GmC127114_1
ccaaacagccgaagagatcgttccgcgatgcgtctaagcagaaggtcatggccgagaagctggatacgcgcaaggacagtccaatgatggatggtggctcaccagcgctcacctcttccatcgtgacagtcatcgttggttccgaccagcgactgttcgccgcgcatgaagatgtattaagtcactctccgtattttgctgaactgctgcggggccagttcttcgagtccgctaatcgccgcatcgatctgcccacggaggaacctgagattttcagttgtatcctcgagtatttgtacaagggcgactactacccacgccttgtccaagacaagcgccgccagacctggatgctcgaaggtgcaattgcctcacccgacccaaacaaacccggcgaccgcgcagctgctgtcgagccaactt

SEQ ID NO: 26957 - DNA, 877 bp, Glycine max
  Clone ID: TF_GmC6844_2
ctagaaagtgggaaagacagtgatgtcagttttgaagggcatggagaaattttcgctgctcataaattggttctagcagctcgctcacctgttttcagggctcaacttttcggtccgatgaaaaatcagaatacccattgtataaaagttgaagacatggaggctccagtctttaaggcattgcttcatgttatatattgggactcactacctgacatgcaagagcttactgggttgagctcaaaatgggctactaccttgatggctcagcatctgctagcagcagctgatcggtatggcttagagagacttaggctcatgtgtgaaacaagtctctgtgaagatgttgcaataaacaccgttgctacgactctagccttggcagaacagcaccattgtttccaactgaaagcagtctgtctgaaatttgttgcaaggcctgaaaatctcagagctgtgatgcaaactgatggttttgagtacttgaaggaaagttgcccatctgttttgactgaacttttggagtatgtggctagatttactgagcattcggacttcttgtgcaagcataggaatgaagtgatacttgatggcagtgacgtaaatggaaggcgggtgaagcaaagactatagtgcgaacactgacaagtttctctgtacaaccctctgctccttgttgcatttaaaaatttctgtgagagccatagatagagggagatgctaagcatttataggattagtggcaatttctaattttcttagcttacttcatgtctaggagatgtaaatgtagtttgttttgatgctgttgcaggtctgtctgtgataactttgctcgtaaaacatttgtcttaaaaaagaaagtattgatcactgc

SEQ ID NO: 26958 - DNA, 874 bp, Glycine max
  Clone ID: TF_GmC1493_3
cgcgcacgtaagctcggaattcggctcgagctttgcttcattttatttatagagacactctaatagatgatgaagagctctttatgtcacgttcatcattcttgccttcggtttctgaatcatttgcagcaaagttgttagctgctgcagaaaagtatggtttgccaagacttaagctgatgtgtgagtctgtactttgcaaagacatctctatagattctgttgcctatattctggctcttgctgatcgttatcgtgcaacagaattgaagtctgtctgtctacaattttctgctgaaaaccttgtcgctgtgatgcaatctgatggttttgagtatcttaaggaaaattgtcccttgctgcaatcagaactgctaaagactgtggctggatgcgaggaggaatttagtggagaaggaaagtgtcgaagtgtgtgggctcaattttctgatggtggtgacaccaatgataggagtgtaagacaacaaacctgggaaaatggtgttgaaagaagtcaaagcttatgggttcacctttcggatggtgttaacaacaatgataggagtccagggcaagaagcctgacaaggtaaggtaccatcatttgtctgttaggcttaaatggtagattaaaagttactactgcagggataagattaacaatgtaaagaaagaaggctgagatactaccgccattgtaatatgtcttataaatactgtttttctttgataatatgattacaaggatgtagtggcagcaataagtaataacattgatcattgtatgaaagtttgttgggaacattttcatgaagaaactggccatgctttacttggtgtttgtattacatgaagaaatttattttcgggctaaa

SEQ ID NO: 26959 - DNA, 1800 bp, Glycine max
  Clone ID: TF_GmC976_1
cgaaaaatgggtaaaagcaaccccaaaattcttgcgtgtccgaaacctctgaaagaaattgcaatctaatcaaagccagagtgaatgctgttgaacgctgtctgaattttttgagctaaataaaagaagaaaaacagggtgagagagaaacagagtgagagagaaacagaggatcttcatatgaagagtgaagtgagttggagaataaagattcaacaacctgggaaagccgggagagtttttcttggagggaattttggactccatccatgaaatcacaacagctcttgcttttgctgataggatgagcgattctgcatacagagtccaaaccacaccaaaccttgctcaatggagaatcgaaaacttggcttcttgcacttaccgcaaatcaaaatccgatcctttcaagatcggaaactggaattggtatttctctctccatatctatctatatatctatctatctatcttatttggaatgttatttttcaatgcagggaggagaatgatagcataaaaaacttttacactattaatttatttctatgaagttaatctatttacattttgagagcatactgcatggggtcatggtcatagtccccttgtatcatgactgttcctatttaatatctgattgaattggtgcattgcactcagaatacaaataccttaccttacttggaaatcttacgagagacttcccagaatgctaacagatggtattcacacagacatctccatcagtgcttctgatggaagtataggagctcatagagctgttcttgctgccagatcacctgtcttccgcagcatgttctcacataatcttcaggagtaagagttatcaaccataaacatctcagacatgtcatttgaatcattccatgcatggcggagaaccttgttccatttgggcagaaggatttactcagcaaagatcaaatgcaaaagccatagagtctcttggtagaatgctaacagaaggcatccacacggacatcaccatcaatgcttctgatggaagtataggagctcatagagctgttcttgctgccagatcacccgtcttccgcagcatgttctcacataatcttcaggagaaagaattgtcaaccataaacatctcagacatgtcacttgaatcatgccaggcttttctcaattatctttatgggatcatcaaacatgaagagtttctgactcataggctggcccttctgcacgcggccgacaagtatgacatatctgatttgagagatgtatgccatgagagtcttctagaagatattgacacaaagaatgtacttgataggctccaaaatgcatctctatatcagttgatgaaactgaagatgagttgcatccgatatcttgtgaagtttggtaaaatatatgaaattcgtgaagatttcaataccttcctgcaaaatgcagatagggatctgattgctgaggtcttccatgaagttcttgatgcttggaaaggattctgaagatcttgcaacttcaaagaaagataggaaggcttgttgttattcaacatacctaagaataggttgtttcaatttgttgtgcaggatttgttttgatgaacctaattctttcgctcagatgaattttttatgattttatgtacatacttatgttgtgctcttcaaatgtaaaccataaggtattattgtttacagaaaatgtatatcatataaaaagaaaagtaacatatattcaggagtgcaaaaggtcctcctgaattctgatgatacaagaaaaagaaagtgaccatgtttcctttgg

SEQ ID NO: 26960 - DNA, 1819 bp, Glycine max
  Clone ID: TF_GmC337_2
aaacaatcatttttttttttcttctgccccctttctctctctgaagcgaaaccctagaaattcatcatctttcagaatctgacaagtttcctcaaccgaacctaaattctctcaccaaatcctcacttatccaaattcgatactccaatccccacccaaattccccgcatcgactcccctccccaaaattcccccatcgccggcgtctcccgcggccgaacgcatcacatcgccgattcggctacggcgctaacagtggctatcgtatgggtaagattctccaagaaaccgcgaagccgtcggcgaattccacatcggcgtacccctctgcggcgcccggcaccacgtcgtcgatgtcggtgacggagacggtgagggggtcgcaccagttcaagattacggggtactcgctctcgaaggggatcgggattgggaagtacatggcctccgacgtgttttccgtcggagggtacaattgggcgatttatttctaccctgatgggaagagcgtggaggacaatgcgacctacgtgtcgctcttcatcgcgctggccagcgaaggcaccgacgttagggcacttttcgagttgacccttctggatcagagtgggaaggagaggcacaaggtgcatagccatttcgagaggactcttgagagcgggccttacaccttgaagtaccgtggtagtatgtggggttacaagcggtttttcaagagaacagctctagagacatcagactaccttaaagatgattgtctgtctgtgaattgtagtgttggtgttgtgaggtcacgcacggaaggtccgaaaatctataccatagcaataccgccttctagcattggtcagaaatttggacatctgctggaaagtggtaaaggcagtgatgtaaattttgaagttaatgatgatatttttgctgcacataaattggtactagcagctcgttcacctgttttcagagcacagctttttggtcctatgaaagatcagaatacccagtgtattaaagttgaagacatggaagctccagttttcaaggcattgcttcattttatatactgggactcgctaccagacatgcaagagcttactgggttggactcaaaatgggcatcaaccttaatggctcagcatcttctagcagcagctgatcgtcatggcttagagaggcttaggctgatgtgtgaagcgagtctctgtgaagatgttgctattaatactgtggctacaactctagccttggcagagcagcaccattgtttccagcttaaagctgtctgtctcaagtttattgctacctctcaaaatcttagagctgtgatgcaaactgacggatttgagtacttgaaggaaagctgcccatctgttctgactgagctattggagtacgttgccagatttactgagcattcagacatcatgtgcaatcataggaatgatgccctacttgatggcagtgatataaatgggaggcgggtgaagcaaaggctctagtatgtgaagaacactgcacagcattctgtacaaccctcttctactctccgttttaaaagatagcgagagcttagttagagggagaatatatatataatcttttataggatcagaggcaattcttaattttcttggcttattcatgtgtaagagatgtaaatgtaatttgtgttgttgctgttactgttctgtttaacgtgtaggtttccgcaatatcttcagtattactttttactggaaaaacatgtcttgcaagtgttgagcattacatatttttatatatacatagatacatatatatatatatattctgtatgttt

SEQ ID NO: 26961 - DNA, 1469 bp, Glycine max
  Clone ID: TF_GmC337_3
ttcatttctctctcgttttctctcagaatccaaaccctaggaaatttccccttcagacgaaaccctagatttcctctcacaaatctctctcagcttccccattctcgggattcggcgtccagatcacagatcccgttcaattttttttccgcatcccccgatcgggtttggattctgaagaaagttcaattccgcacaaattcgagacaattgctgctgtcgaggctcgcgttgcgcatgggtaagattctgagagaaaccgcgaggccgttctcgaattgttcgtcgtcgtcggcgtctccgttgtcggcgccgccggcaacgacgtcgtcgacgtcgttgacggacacggtgagggggtcgcaccggttcaagatcacggggtattcgctgggattgggattgggatgtacataccttttgattggggttacaagcggtttttcaagagaacagctctagagacatcagactaccttaaagatgattgtctgtctgtgaattgtagtgttggtgttgtgaggtcacgcacggaaggtccgaaaatctataccatagcaataccgccttctagcattggtcagaaatttggacatctgctggaaagtggtaaaggcagtgatgtaaattttgaagttaatgatgatatttttgctgcacataaattggtactagcagctcgttcacctgttttcagagcacagctttttggtcctatgaaagatcagaatacccagtgtattaaagttgaagacatggaagctccagttttcaaggcattgcttcattttatatactgggactcgctaccagacatgcaagagcttactgggttggactcaaaatgggcatcaaccttaatggctcagcatcttctagcagcagctgatcgtcatggcttagagaggcttaggctgatgtgtgaagcgagtctctgtgaagatgttgctattaatactgtggctacaactctagccttggcagagcagcaccattgtttccagcttaaagctgtctgtctcaagtttattgctacctctcaaaatcttagagctgtgatgcaaactgacggatttgagtacttgaaggaaagctgcccatctgttctgactgagctattggagtacgttgccagatttactgagcattcagacatcatgtgcaatcataggaatgatgccctacttgatggcagtgatataaatgggaggcgggtgaagcaaaggctctagtatgtgaagaacactgcacagcattctgtacaaccctcttctactctccgttttaaaagatagcgagagcttagttagagggagaatatatatataatcttttataggatcagaggcaattcttaattttcttggcttattcatgtgtaagagatgtaaatgtaatttgtgttgttgctgttactgttctgtttaacgtgtaggtttccgcaatatcttcagtattactttttactg

SEQ ID NO: 26962 - DNA, 2583 bp, Glycine max
  Clone ID: TF_GmC141_1
accacagccgattaaccatacacttattcatcaaagagaaaccaaaaggctcaaaacacatactaattctccaagaataagagaatccaaaagtctctacaaaaaataaccatgatgatgcatgtcctttgcttctcagtgttcctagcagcagcaatgcaaggaacactggcggctgaatacagtgtcaccaacaatgccctctcaacccctggtggtgttcgtttccgtgatgcaataggggacgaatacgccaaacaaacactttgactcagccacccaattcatatggggggtctgcagattaggagtagaatggcgaaggagatagtgaaagagcttcttcctctaattcgagtgtacaaggatggcagcgtggagcgtcttctaagctctgaaaacgtggcagcctcccctgaagatccccaaactggagtctcatccaaagacatagtcatcgcagacaacccctacgtctccgctcgcattttccttcccaaatcccaccacactaacaacaaactccccatcttcctctacttccacggtggcgccttttgcgtcgaatccgccttctcctttttcgtccaccgctatctcaacatcttggcctcagaagccaacataatagccatctccgtcgacttcagactcctcccacaccaccctatccctgctgcctacgaagacggttggaccaccctcaaatggattgcttcccacgccaacaacaccaacaccaccaacccggagccatggctactcaaccacgccgacttcaccaaagtctacgtaggaggtgaaaccagcggtgctaacatcgcacacaacctgcttttgcgtgcaggtaacgaatccctccccggggatctgaaaatattgggtggattactatgctgccccttcttctggggctcgaagccaattgggtcggaggctgttgaggggcacgagcagagtttggccatgaaggtctggaactttgcctgccctgatgcccccggtggaatcgataacccctggatcaacccctgtgttcctggggcaccctctttggccactcttgcctgctctaagttgctcgttactatcactggcaaagacgagttcagagacagagatattctctaccaccacaccgttgagcaaagtggctggcaaggtgaacttcaactctttgatgctggcgatgaggagcatgctttccagctcttcaagcctgagactcatcttgctaaagccatgatcaaacgcttggcttcttttctggtttgatggatggcttgtcatgagagattccaaacataataaatcgtgcgtgccttcacctgtcttgtctactactccagttttagattgaattttatgttttagttattattcaacaaaaacacaataattccctctccctcgttgtttttgtttttgtttttgtttgtcaccattatcaatacctatcactgtatgtggtcattattcaacaaaaggatgccgtacactcctgaattaatatttcaattttcaaattattatttaggagagcagtacgtaaacaatgctacgttgtctgacgttacatttttggttgaaggcaaacgattttatgctcatagaatttgtcttcttgcatcatcagatgcatttcgtgcaatgtttgatggtggttacagggagaaggaggcaagggacatagagattccaaatattagatgggaggtttttgagttgatgatgagatttgtatattgtggatcagttgatgtcactctggatattgctcaaaatcttcttccagccatcgatcaagaggtttttgaacggcttatgagatttagtgagtatggaattgtacatgatatatcgcttgagaatgtgtcaagtatgtatgaacttacagaagccttcaacgcaatatcattgaggcatgcatgcatcctttttatcttggggatatttgataaattgagttcaaggccagggcactctcttctgattcagcgcataacaccagagatccgtaattacttcgttaaagctcttacaaaggccaactctcaaaacgaccgactctagtatgcacccattttattcttgacctctaaccgattgtgttgtacaaaatgtatatgttgttcctttttttgtaccaggaagcaatctcctgtatggtatacagtttggctaaaagaacattctaacgccggaatcatgcttcttcttctttttaatctttttgttagcccctttctggaagtctcttattatcattacagcagcgattaaaaaaattatctaccatcacgttcatgtacgttcatttctgatgcagtgtaagtcccttctagctgtaacgtcattgtcttagatatagcaaatatgaccttcacgaacattgttttttactcgtgcaaatattgtgatggttgagactttctctttctcaagcatctaatgttgagtttatgagtagtataggttgcccaagcatctaatgtatatatgacaattagatagttgtcttcatattatataatgaaatcttaaagccttttcactaaaaaaaaaaaaaaaaaaacaaacaaa

SEQ ID NO: 26963 - DNA, 3010 bp, Glycine max
  Clone ID: TF_GmC1416_1
aattcggcaccagcttgtctcgcactctctctcccctgcccctcgcgatgcttctcgtttctccggctgatcaagttgaggacgaggttgatgcagcagactgttacaattacaaaaacatggattatgacaaatgggggctcaaaaaattcctcgagagttgggacttgtctgatgtgttattcatcgttggtaaagaggaaaaacccgttcccggcccgagggcaattttagctgcatctggaaagttttctctgtgctcctcctcctttgtcatcaacctacccactgtatcttatctacttttccgtgcactgcttcactacatctatgttggctggacccagattccccaggaacaactcggttctttgagggatttaagtctacagtttgaagtgacaccactggtgaagcagtgtgaagagactatggaacggtttaagctagataagaagttgtttgacacgggcaagaatgtggagttaacatatccatctatccgacctcattgttcaactttgccctcacttcctgtcagcactcagcaactgaaacaattgaaattaacaggccagtacagtgatgtaaacatctacattgagggttatgggctcattgcacgagctcataaaattgttcttagcttatggagtatcccctttgctcggatgttcacaaatggaatgagtgaaagcatgtcctcggaggttactttaagggatgtcccaccggaagctttcaaggctatgcttaactttttatatgatgggcaattgaatgacaaagttatagattctggtgtgggacttgtctgatgtgttattcatcgttggtaaagaggaaaaacccgttcccgctcacaaggcaatattagctgcatcgcatgagtctcagaggactcagtatgtccactcctccaagtggtttcttcaatgccatcatgtagacttattaaagaatcattgcagaggagaatttccatgaactttgactattatatcagtgcgagtactgactttgtgttattagatgagacaactttaatcaatatcattaagcatccagatctgacagtaacgtctgaagagaaagtccttaatgcaattctaatgtttggcatgaatgcaaaacagttgtttgggtgggaagtggtggatcagttaatggaaaattcaaaaccagaactcctttttggtaagaggcttcagttaatctatgacttgttgccatttgtgcgatttccactactacaatattccttacttaagaagttaaattgttcttcgcttgggaagcatccccttgcttcgaaaagtcacaaaaaggaggctatcaattttgttaaatgtgggctggcagagtcagaaaatgaagagaatgttagattccaacatagacggtccagttacagggaactccagtacatctgtgatggggatgaccatggagttctgtactttgctggaacatcctatggtgaacacccgtgggttaatcctcttttggcagagccaaggaaaattaccatcacagctagcagcccccactcaagatacactgatcccaactctttggtctcaagaacctacctgggaacatcaatttcatgggcctcgattggaaaatggacagaactgtagatggtggatgggggatctttggccaatatcagtgcgagtactgactttgtgttattagatgagacaactttaatcaatatcattaagcatccagatctgacagtaacgtctgaaaagaaagtccttaatgcaattctaatgtttggcatgaatgcaaaacagttgtttgggtgggaagtggtggatcagttaatggaaaattcaaaaccagaactcctttttggtgagaggcttcagttaatctatgacttgttgccatttgtgcgatttccactactacaatattccttacttgagaagttgcagcatagcagcattggccggcatattcctgttttccaaaatcttgttaacgaggctatcaattttgttaaatgtgggctggcagagtcagaaaatgaagagaatgttagattccaacatagacggtccagttacagggaactccagtacatctgtgatggggatgaccatggagttctgtactttgctggaacatcctatggtgaacacccgtgggttaatcctcttttggcagagccaaggaaaattaccatcacagctagcagcccccactcaagatacactgatcccaaggttttggtctcaagaacctaccagggaacatgttttgctgggcctcgattggaaaatggacagaactgtagctggtggatggtggatcttggccaagatcatcagcttatgtgcaactactatacctcggggcagaactattctaaggcagttcccggattttggcatgttcagggcccacgtgacgcatcgatccgggtattttcgggtttcgatcaaagtaatcggattatatgtaaccctggccagtttgccttgcagttgataattggccttatagctctacttcccttcatggattaacaatatgaataccatacaatccaaattatttgcaccaactcctgcatgtacggtattggttccttgttaacttaaagattttaaactgttcatggatcaagggtcgtagttctaagatcatatataagtatttatgtagattgtagtatcttatgtattcctaaaaaattaatctattggcccataattggccccaacgctctgcttcccttcaggtatttccgggttgtgctcacaggaaccaccaccgatgccaccaatccctggaatttctgcatttgttacttggaattgtatggctacttcctttaaaagcctagccatgccaataccataccttcctaaaatacaattccagctccttcatgtacattatggtttgcttattgactaaattatttgaatcaagtcatggataaagggttgtggttctaagagaagatatagtaaaacgaacgcgtgggcgc

SEQ ID NO: 26964 - DNA, 1194 bp, Glycine max
  Clone ID: TF_GmC130_1
acggttgcgagaagacgacagaaggggatacagaatacagattgacagagtccaacgttgcattgcagaggtttggtgtttgtcatgtcataaggcatgggcgatagggtggaaacgcttgccagattagcccagtggaaaatcgacaacttcggactttgttcctacaaaaaatctgaccccttcaaggtcggaatctggaactggtacttttcaatagtgaggaataggtacctctacatacatctttttccagaaccttcgcaggttttgaaggataacccaccctttgctcgattcattcttcgagtctccaatgccggatcatcccgcagctttcatatttcccctgttcaagaaaagctgcttaggacacatgacgactttgtctggcctgtggatacaacttttgttggtcgcttcatcattgatgttgagtttctagacctaaagatatgccctcctaatggtggagaaactagtcctgtatggccatctgatggaaattctcaatccattgcatttcaaagtagcattcttcgttgcctctctcgtatgcttgatgaggctatacatgctgacctaactatcatgacagccgatggaagcacgttgagagctcataaggcagttctctcagcaagttccccagtgttccagagcatgtttcatcacaacctgaaggaaaaagagtcctccacgatccatatagaagacatgccactcgagtcctgcacggctcttctaagttacttgtatggagcaatcaagcaagaagatttctggaaacaccggcttgcattgcttggagctgctaataaatatgacattggaagtctcaaagacatctgtgaggagagcctcctggaagatctcagcgcaggaaatgttcttgagatgctaaatgaggcttggctttatcaattgcacaagttaaagaaaggatgtttggtgttcttatttcaatttggtaagatacatgatattaaagatgaaataaataattttttccagcatgcagatagggagctaatgctggagatgtttcaggaggtgctttcaatttcgaacccgatataggttaactcatggatcctgtatatgatatatcgatgtgtataataaagtttgttgtttctaccgcaaaaaaaaaaaaaaaaaaaaaaaaaaaaagcggccgctctagaggatcca

SEQ ID NO: 26965 - DNA, 1530 bp, Glycine max
  Clone ID: TF_GmC141_3
attcggctcgagctcgagccggataatgtgtccgattttattagggtaggtggaattcagagactgcaggatggagagtttattgttcaggcaactaaagattgtgttgcaaagacattgaaaagattagaagagaagattcatggccgagtgctgaaccatttgttatatctcatgcgagtttcagaaaaggcttttcaaagacgagttgctttaactcttgctcacctttgttctgcagatgatcaaagaaaaatatttattgattataatggtttggagttgcttatggggcttcttggctcttataaccccaagcaacagcttgatggagctgtggctttatgcaagttggccaataaagctatgactctgtctcctgtagatgccgcacccccatctccaacaccccaggtctatttgggagagcagtatgtaaacaatgttaccttgtccgacgttacatttttggttgaaggcaaacgattttatgctcacagaatctgcctccttgcatcttcagatgcatttcgtgcaatgtttgatggtggttatagggagaaggaggcacgagacatagagattccaaacattagatgggaggtttttgagccgatgatgagatttatatacactggatcagttgatatcactcttgatattgcccaagatctcctccgagcagctgatcaatatcttttagaaggacttaagagactctgtgagtacacaattgcacaggatatatcactggagaatgtgtcaagtatgtatgaactttcagaggcctttaacgctatatcattgaggcacacatgcatcctttttatcttggagcactatgataaattgagtggaaagccaggacactctcatctgattcagcgtataatacccgagatccagaattactttgttaaagcccttacaaaggccaattccaacatcctgccgtaatgcgctgttatattattgacatctaaccagttgcgatgtacataatgtggttgatgttctttttgttgagcctgcgaagtaaatctcctggatcaagtacagcatggcttaaaaaatatatctaacatcaggtcatgtacgttcatttctgatgctgtgctagtcccgtctagctgtaacgtcattgtcttagatatagcaaaaatgaccttcacgaacattgtttttttctcctgcaatattgtgatggttctggcttgatagttctctttctcaattgatttggcattacaattgttgagtttatgagtagtataggtttcccaagcatctaatgtatatatgacaattagatagttgtttgtgattgctgatgaatgtattgtaaattaaatgcaaatgcatttaaagaattcgtcatttaagccatgctgaattcagttgctgcttataaaaattggctctttgtctatgcagtcaagcggcaacggaatcgaggtttcacgtacaagaattgctatgggtccctaccaacttttagaattcatggaaaaaattattttaccccagttc

SEQ ID NO: 26966 - DNA, 2318 bp, Glycine max
  Clone ID: TF_GmC328_2
ggctcgagcggctcgagcaactcacatctaccgttcttctctctaaagacaaccataataaaacacaatatctcaattaaaaaacataatttcggttaagaaggtggaacgcatgagctaacaaccaaactaacaaataccgcaccaaacaaaaactaaaaaacgaaatcaaacggaatttaattactaattccaagtttccaacccttaaaataaattatttaaatcgcttagcgcaacaattcacagcttgtgcttttatgttgttttcctaacaaaaattaaataaatagaagcatcttctgttcttttatttcaccgccattcatttcattgacatatagggcttgcgttcttcttcttcttcctttctctgcttgcagttgcagaggtaggaggggggcggtgattgtgttgtgtgctttagaggatgaaagatttcaattcggatctattcgacccgggaacggtgatggactcttcctcctccgattactctcgcagtgcttcctcttccgacgccgatttcgggttcgctttcaatgacagtaatttctccgacaggatcctccgaatcgagatcatgggggaccccgtcgaggcccgacccgattccgacggttgcaccactatcgccgactgggctcgccaccgcaagaggaggcgcgaggatatcaagaaggataacgttgttgatcttactttattgcctgacgagcaaattttgaacgggaatcagcctgatatggatgattttgtaccctccgagaatcaagatgaagatgcggttgcaatggttgaagaacccccttcaggtgatgaggcggcaaatagcaatgattcaaattggaatatggattgctctgcagttgtgagagttaaaacactacacatcagttctcctatcctggctgctaaaagtcctttcttctataagcttttctcaaatgggatgaaggagtctgagcagaggcatgtcaccctcagaattaatgcctctgaagaggtttctctcatggagctactgaattttatgtatagtaataccttgagcattacttcaccacctgctttgttggatgtgttgatggctgctgacaaattcgaagttgcttcatgcatgagatactgtagccgattattgcggaatatacctatgacacctgagtctgcattgctttaccttgagcttccttctagtgtcttaatggctgatgcagttcaaccattgactgatgcagcaaagcagtatcttgccagtcgatacaaagatataacaaagttccaggaagaggttatgggcttgcctctagctggaatagaagcaatattgtctagtgatgaactccaggttgcatcagaggatgctgtatatgactttgtgttgaagtgggttcgaacacagtacccgaaactagaagagagaagagaagtcctgggtacacgacttgcccgtttaattcgcttcccttacatgacctgtcgaaaacttaagaaggtcttaacctgcaatgactttgaccatgatgttgcatccaagcttgtactcgaagccctctttttcaaggctgaggctccacaccgccagcggatactagctgctgagtctgcttccttcaatcgactttttgtggagcgggcatacaagtatcgccctgttaaggtggtggaatttgaacttccccggcagcagtgtgtggtttacttggatctgaagcgggaggaatgtgccaatttgttcccatctggccgagtatattcgcaggcattccatttaggcggacaagggtttttcttatcagcacattgcaacatggaccaacagagctctttccattgctttggcctgtttttaggaatgcaggaaaagggctcagttagctttgccgttgactatgaatttgctgcgaggtcaaggccaacagaggaatttgttagcaagtacaaaggcaattatgtattcactgggggaaaggccgttgggtatagaaacttgtttgcaattccatggacaacgttcatggctgaagatagtctttactttatcaatggtgtactccaccttagagctgagctcaccatcagacactgactgggatttatatgtgtaaaccttttcttctagttggtagctctgactttttttgggcaatgtgtctcattttccgataacctgctgtaatcttaactaatattcaggcaatgtgcactaggtggttagtgctggatgtgagatcaaatgaattttcgggaccttactttttctttcacttacatttacaagagtttgagtagctacaggaaggacgtttctcgtt

SEQ ID NO: 26967 - DNA, 1182 bp, Glycine max
  Clone ID: TF_GmC120817_1
ctcgagccgttttgacacagttcaaccctggtctttctgcctgtgattctcccttcttctccttcgatctccgcactttcccaatagccacagcaacacactcagttactcaccagtcaccaccgacatcatgtccgattcgaaggtcgaaaccatcgccagattagcccaatggaaaatcgacaacttcggaccctgctcctacaagaaatcagaccctttcaagctcggaatttggaactggttcatgtccatagagaggaacaggtacctctacatacacatctttccggagccttctcggcttactaaggaacagccacccgtggcacgcttcatcctgcgagtctccaacaactctggccctacccgcaaattttacatttcccctgttcatgaaagggtgcttaggacatgtgaagactttgtctggcctgttgatactgcattccttggtcgcttcgttattgatattgaatttcttgacctgaggacctgccccgtgaatggtgaaaccagatctgtatggccatctgatggaaaactgcaaactgttgcagctcaaagcactcttcgatgcttgtcccgtatgcttgatgaggctatacatgctgacctcaccattatcactgcagatggtaccctgagggctcataaggcagttgtatctgcaagttctactgtgttccatagcttgtatcttcacaatggtgatgagaaagagacatctacaatccacatagaagatatgtctcaagaatcctgcatggcccttctgagttacttgtacggcactataaagcaacaagatttctggaagcacaggcttgcattgcttggagcagccaataaatatgagattggtgatctcaaagatgccagtgaggaaagcctactggaagatcttaactcgggaaatgttctggataggttaaatgatgcttggctttaccagttgcaagcgttaaagaaaggatgtttctcatacttattttattatggtaagatttatgatgttagagacgaaatggatacctttttccgacatgcagatagggagctaatgctggagatgtttcaggaagtgcttacaatttcgaaataggttgccatgaaactcttagcacccttgtatcttgcaaatgatggatccttttgtgcaatcatgtttttttactttcc

SEQ ID NO: 26968 - DNA, 1551 bp, Glycine max
  Clone ID: TF_uC-gmrominsoy195d07_FLI
tgagaatcaagatgaagagcctgatgcaatggttgaagaacctcattctggtgatgaagctacaaacagtaatgattcagactggagcatggattgctctgcaggtgcagttgttagagttaaaacactgcatatcagttctcctatcctggctgctaagagtcctttcttctataagcttttctcaaatgggatgaaggagtctgatcaaagacatgtcaccctcagaattaatgcctctgaagaggttgctctcatggagctactgaattttatgtacagtaataccttgaccactactacggcacctgcattgctggatgtgttgatggctgctgataaatttgaagttgcttcatgcatgagatattgtagccgattattgcggaatatgcctatgacacctgactctgcattgctttatctggagcttccttctagtgtcttaatggctgatgcagtccaaccattgactgatgctgcaaaacagtatcttgctggtcgatacaaggatataaccaagttccaggaagaagttatggccttgcccctagctggagtagaggcaatattgtctagtgatgatctccaggtcgcatcagaagatgctgtatatgattttgtgttgaagtggtctcgacagcagtaccctaaactggaagataggcgagaagtcctgggtgcccggcttgcacgactaattcgcttcccttacatgacctgccgaaagcttaagaaggtcttgacctgttccgactttgaccatgacattgcatccaagcttgtactcgagggcctatttttcaaggccgaggctccgcaccgccaacggtcgctggcagcagaagactccgcttcttcaaaccgtcgttttgtggagagggcatacaagtaccgccccgtgaaggtggtagaattcgaacttccccggcagcagtgtgtggtgtacttggatctaaagcgggaggagtgtaacaacctgttcccgtccggccgggtttattctcaggcattccatttgggtggacaaggttttttcctatcagcacattgcaacatggaccaacaaagctctttccattgctttgggctgtttttgggaatgcaggaaaagggctcagtgagcttcgccgtcgactatgagtttgctgcgaggtctaggccgacggaggaatttgttagcaagtacaaaggcaactacgtgttcacagggggaaaggccgtcggctatagaaacttgtttgctattccatggacttcgttcatggccgaggatagtctttactttatcaatggtgtcctccaccttagggctgagctcacaatcaaacactgaccccaatttctagtggtaaactcacattctattccagttggtagccttgacctttttttagatctcgaattctcattttctgttaacacaagtaaatgagtaatctatcaaaagcttaaatatacaggcatgtgcactaaagtggctagtgttgcttgtgattgagaagatataactaggaccgttatatgttatctagtattctaggttaagtg

SEQ ID NO: 26969 - DNA, 1017 bp, Glycine max
  Clone ID: TF_GmC1416_4
aattcggctcgagctcagcaactgaaacaattgaaattaacaggccagtacagtgatgtaaacatctacattgagggttatgggctcattgcacgagctcataaaattgttcttagcttatggagtatcccctttgctcggatgttcacaaatggaatgagtgaaagcatgtcctcggaggttactttaagggatgtcccaccggaagctttcaaggctatgcttaactttttatatgatgggcaattgaatgacaaagttatagattctggtgctttgttgctccaactccttctattagctgatcaatttggagtgacttttcttcaacaagaatgctgcaaaatgcttttagaatgtctctcagaggactcagtatgtccactcctccaagtggtttcttcaatgccatcatgtagacttattaaagaatcattgcagaggagaatttccatgaactttgactattatatcagtgcgagtactgactttgtgttattagatgagacaactttaatcaatatcattaagcatccagatctgacagtaacgtctgaagagaaagtccttaatgcaattctaatgtttggcatgaatgcaaaacagttgtttgggtgggaagtggtggatcagttaatggaaaattcaaaaccagaactcctttttggtgagaggcttcagttaatctatgacttgttgccatttgtgcgatttccactactacaatattccttacttgagaagttgcagcatagcagcattggccggcatattcctgttttccaaaatcttgttaacgaggctatcaattttgttaaatgtgggctggcagagtcagaaaattaaaagaagtaagttcttccccttagtttgtctccttagcttcttcattggggtatttaagtcaggcactgccctttgactgtgtaatttttcaatatttagactgtagcctctgcagtaaataacaatagcttatttggttgtgaaaataatctgccctcttattaattattg

SEQ ID NO: 26970 - DNA, 1264 bp, Glycine max
  Clone ID: TF_GmC976_2
acctgggaaagccgggagagtttttgttggagggaattttggactgcatccatgaaatcacaacagctcttgcttttgctgataggatgagcgattctgcatacagagtcgaaaccacgccgcgccttgctcaatggagaatcgaaaacttggcttcttgcacttaccgaaaatccgatcctttcaagatcggaaactggaattggcatttgtcggtggagaaaaacagggttttgtttgttaaattgttcccagaaatatccaatcttacgagagacaaccccccaattgcatctttcatcgttcgggtggttagttctgttggagatcgcaaggccatcacacatccagaaataaaggacaaagtgttaaagaacaacgaggattttgtttgggcaattgaggttccactaactggaaaattcattattgacgtagagtttcttgatttgaagactgcatccccaaacggaggagaaggcataatgtattccttgttccatttgggcagaaggatttactcagcaaagatcaaatgcaaaagccatagagtctcttggtagaatgctaacagaaggcattcacacagacatcaccatcaatgcttctgatggaagtataggagctcatagagctgttcttgctgccagatcacctgtcttccgcagcatgttctcacataatcttcaggagaaagagttatcaaccataaacatctcagacatgtcacttgaatcatgccaggcttttctctattatctttatgggataatcaaacatgaagagtttctgactcataggctggcccttctgcaggcggctgacaagtatgacatatctgacttgagagatgtatgccacgaaagtcttctagaagatattgacacaaagaatgtacttgagaggctccaaaatgcatctctatatcagttgatgaaacttcctgcgaaatgcagatagggatctgatttctgaagtcttccatgaagttcttgatgcttggaaaggattctgaagatcttgcagttcaatttaagtgtgttttgttctgccttcaaaaggacatgaaagatgaaactgcaaatgtggaccaccaagttttgctcacataactctgatttttgaagtcttccatgaagttcttgatgcttggaaaggattctgaagatcttgcagttcaatttaagtgtgttttgttctgccttcaaaaggacatgaaagatgaaactgcaaatgtggaccaccaagttttctcacataacta

SEQ ID NO: 26971 - DNA, 1247 bp, Glycine max
  Clone ID: TF_GmC130_2
cccacgcgtccgtaatgagtgagtagatgttacaggagaatttataattgctcttcttcttatatactatggtatatgacataagtttggaagtcaaaatggtttagacacagtccaacgttgtaggtttggtgtttgtcatgtcataagacgaagaaaggcatgggtgatagggtggagacgcttgccagattagcccagtggaaaatcgacaactttggaccttgttcctacaaaaaatctgaccccttcaagctcggaatctggaactggttttgaaggataatccacccttttctcgattcgttcttcgagtctccgcagcttcatatttcccctgttcaagaaaagctgcttaggacacatgatgactttgtctggcctgtggatacgacttttgttggtcgcctcatcattgatgttgagtttctagacctgaagatatgccctccgaatggtggagaaactagttctgtatggccttctgatggaaattctcaatccattgcatttcaaaataacactcttggttgcctttctcggatgcttgatgaggctattcacgcttgcttacccatcatgactgctgatggcagcacattgagagctcataaggcagttctctcagctagttctccagtgttccagagcatgtatcatctcaacctgaaggaaaaatagtcctccacaattcatatagaagacatgtcacttgagtcctgcacggctcttctaagttacttgtatggaacaatcaagcaagaagatttctggaaacaccggcttgcattgcttggagctgcaaataaatgacattggaagtctcaaagacatctgtgaggaaagccttctggaagatctcagcacaagaaatgttcttgagaagctaaatgaggcttggctttatcaattgcataagttaaagaaaggatgtttggtgttcttatttcaatttggtaagatacatgatattaaagatgaaataaataattttttccagcatgcagataaggagctaatgctggagatgtttcaggaggtgccttcaatttcaaacccggtataggttaactcatggatcctgtaaatgatatatcgatgtgtataatcaagtttgttacttttttattgtacagtgtaacttttcgtaatacttaactgtcctctgcctaaaggcctggaggttaagggtaaatgaaagtgtatttgagtgatcatttacaaggtatattatttagtacttatgg

SEQ ID NO: 26972 - DNA, 2130 bp, Glycine max
  Clone ID: TF_GmC1467_1
cccacgcgtccgctccacccaacaaaccacctctccttcctctcccccaaaatttttaatcaaaattcaaattccaaattcctcagattcgcaaaaatccctttctgcgtcgtcgcattgtatgagcctcgaattccgatcccgataggcatggccggagcggcgttatcgccgccgacgagttcgaagtcggtgacgcagacggtgaacgggtcgcacaagttcgtgatcgagggatactccctggcgaaagggatgggagtggggaagcacattgcgagcgacgtgttcacggtgggagggttccactgggcgatctacttctaccccgatggcaagaatcccgaggacaattccgcctacgtctccgtcttcatcgcgttggcgagcgaaggcaccgacgtcagggccctcttcgagctcacgctcctcgaccagagcggccaggggaaacacaaggtccacagtggttatctttcccaggctctccttatatggaaaattgatgctagatcagtctgaaagtatgctgttgtgttgacatgtgtaaaatcttgatctctttttgtgctttcatagggggtacaagcggtttttcagacggtctttgcttgaaacctctgaattcctcaagaatgattgtttgaaaatcaactgtacagttggagttgtggtttcagcaattgattgtccacaacttcactctattaacatcccggaatctgacattggatcacactttggtgcactattggataatatggaaggttcagatattacttttgatgtagctggggataagttccctgctcataagttggtgttggctgccagatccccagaatttcgatctaaattttttaatggtttagatgaagaaaagaatgagattattgtaacagatttagaaccaaaggtttttaaggtaaaaactatatgtttcccctttccatattttctttccctggtagcatcaagcttgtttaggatttattctgttattctgtatttttctgttagattttcttgttaggtttctttttcttgatagaaaaaggatcttacaggagttcaagtcttcaagaggtaaagtacaactagggaggatgaatatcctgatttttcctctttttacaggccatgctgcactttatctacaaagatactcttacagaagaggtggacacggtttcatcaaccacaactagtgactttccggtttctgagatattgacagcaaaattgttagcagcagcagacaagtatgacttgggtaggcttagattgatgtgtgaatctcgtctttgtaaggacatttgtgtgaattctgtagccaatattttaaccttggctgatcattgccatgccacggagttgaaagctgtttgcctaaaatttgctgctcaaaatctagcagctgtcatgagatcagatggatttgagcatatgaaagaaaaaggcccatggctacaatcagagatcctgaagacaattgctgggtgtgagggtgatggttgcagcgcagtggaaaagtctcagagtgtatggggccaactttcagatggcggtgacatgaatggtagaagggtcaggcagagaatctgatacctgttgcacactggtatctctctgattctttggtaaaatgcaggtgataatgccgaaaaattggggggtaaaaaagaaaaaggcaaagaagacgaaaaacccttttctcttctgtccaacttttccatgttccaatggaaagtttagaaaaagcgggtagactagatgtataaaaagagatgtcattagtgtgtgtacgttgttagtgcagagtggtcattgaaaatgaacttatctgcagtagactattgatattgactatactttggaagtggatatttggttgctggactttatctcttccatttgctttccccttttctgtactcgattccaacagaatgttagtagaagtaggttcattaggatggctattgttataccatgtacaaaatattcattttgtaacaattgttttttcatggcacacctgccatacaaagagccagtgattctggtttggtggtctgttttgattgacgttgatgactaaaaaaaaaaaaaaaaaaaaacacgccccgc

SEQ ID NO: 26973 - DNA, 2229 bp, Glycine max
  Clone ID: TF_GmC1493_1
ggctcgaccgaaaaagaagaaaaaaaaaagcaaagaaaatcctgtttcccgataaaaaccccgtccgtacatggtctggtcacgcggatcgggttgattgagatgcacaccgcgagcaggagcaacggcggcggcggcggcgtgctggcgtcgcggacgagttcgcggtcggtgacggagacggtgaacgggtcgcacaagttcgtgataaagggatactcgctggcgaaggggatcggagtcggaaaacacatcgcgagcgagacgttcacggtaggagggtaccagtgggcgatatacttctaccctgacggcaagaacccagaggacaactccgcctacgtctccgtcttcatcgcgctcgcctccgagggcaccgacgtccgcgccctgtttgagctcacgctgctcgaccagagcgggaatgggaagcacaaggtgcatagccacttcgatcgctcgctcgagagcggcccctacactctcaaataccgcggcagcatgtgggggtataagagatttttcaaacgggctcaactcgaggcgtcaactttcctcaaggatgactgcttgaagataaactgcactgttggtgttgtggtgtcttccattgattgttccaagttaaacacaatacaggttcccgaatccgatattggggcacatttcgggatgctgttagagaatgaggagggatcagatgttactttctctgtcggtggagaaaggtttcatgcacataagcttgttttggctgctcgatcaactgcatttgaaaccgagttttttaatgggatggaggaggatgatcatgatgtagttgttactgacatggaaccaaaagttttcaaggctttgcttcattttatttatagagacactctaatagatgatgaagagctctttatgtcacgttcatcattcttgccttcggtatctgaatcatttgctgcaaagttgttagctgctgcagaaaagtatggtttgccaagacttaaactgatgtgcgagtctgtactttgcaaagacatctccatagattctgttgcctatattctggctcttgctgatcgttatcgtgctacagaattgaagtctgtctgtctacaattttctgctgaaaaccttgtcgctgtgatgcaatctgatggttttgagtatcttaaggaaaattgtcccttgctgcaatcagaactgctaaagactgtggcaggatgcgaggaggaatttagtggagaaggaaagtgtcgaagtgtgtgggcccaattttctgatggtggtgacaccaatgataggagtgtaagacaacaaacctgggaaaatggtgttgaaagaagtcaaagcttatgggttcacctttctgatggtgttaacaacaatgataggagtccagggcaagaaacctgacaaggtaaggtacaccatcatttgtctgttaggcttaaatggtagattaaaagctactgcagggataagattaaccaattgtgcggactggcaaaaggttagaaatgcaaacaatgtaaagaacgaaggctgagatactgcctccattgtaataatattatgtcttataaatactgttttttctttgataatatgattacaaggatgcagtggtagcaataagtaattacattgatcattgtatgaaagtttgttgagaacattttcattaagaactggtcttgtttacttggcggttgtatttcatgaagaaatttgttttcgagctataaaaatagccgtattttctggtctaaaatgaaaatttgttgggaacattttcatgaagaaactggccttgctttacttggtgtttgtattacatgaagaaatttattttcgggctataatctgatcttcattgcatgcagtgttgtttttcttttcttttaacgggggatagtggttgactggttgcgaatagtagattcatcttgtaacgttagtgatgtatcttttaacatcaatgaatgctagcaagttaacaaaatgagatgaagtgacaaaacaaaagttcttggttacctttggttgtatctatagatcttttctcttttagggttggaggttgtacaccccgtttgctgaacacaggacaactcatttatgattgctgtagctttacaccgtgggaatcttcatccttgtgaattgtgaaacctatggatcaaattagacttgtatatagcccttaaaccatcaatataatgtggctttatctaa

SEQ ID NO: 26974 - DNA, 1301 bp, Glycine max
  Clone ID: TF_GmC141_7
ggctcgagaaaagggcccacgcgtccggttgctttggctcttgcacatctttgctcttcagatgatcagagaataatttttatcgatcactatggtcttgagttgcttattgggcttcttggctcatctagctctaagcagcaacttgatggtgctgtagctttaagcaagttagccaataaagccttgaccttgtctcctgtggatgctgctcctccttctccaacaccacaggtctatttaggagagcagtatgtaaacaatgctacattgtctgacgttacatttttggttgaaggcaaacgattttatgctcatcgaatttgtcttcttgcatcatcagatgcatttcgtgcaatgtttgatggtggttacacggagaaggaggcaagggacatagagattccaaatattagatgggaggtttttgagttgatgatgagatttgtatattgtggatcagttgatgtcactctggatattgctctagatcttctccgagcagccaatcaatatcttttggaaggacttaagagactctgtgagtacacaattgcacaggatatatcgccagagaatgtgtcaagtatgtatgaactttcagaagccttcaatgcaatatcattgaggcatgcatgcatcctttttatcttggagcaatttgataaattgagttcaaggccagggcactctcttctgattcagcgcataataccagagatccgcaattactttgttaaagctcttacaaaggccaactctcatgacaaccaactgtagtatgcacccattttattcttgacctctaaccgattgtgttgtacagaatgtagtagatgttattccttttgttgtaccaggtagcagtctcctgtatggtatacagcttgggtaaaagaaatatctaacgccggagtcatgcttcttcttctttttaaatgaggtgtaagcccctttgtgtctgtaacgtcattatcatagatatagcaaatatgaccttcaggaacattgtttttttctcatgcaatgtgacggttatatgacttaacagttcttctctcagatagctacgttcagggaattaccattgttgactttatgattatatgtgtaaatattgtttcccgtgtatatatgaacaagaagttttctgcaaggaaattgtgccgctggggttacttctgccagaccattaaaaactgtcacctgacatggaatgtgttgtaaattattgttgcaaatacttcattcaaatattcaaagtcgaaggcatgctgctgatgcggcccaaaattgttctt

SEQ ID NO: 26975 - DNA, 1867 bp, Glycine max
  unsure (1)..(1867): unsure at all n locations
  Clone ID: TF_GmC44146_1
gacccatgcgtgaaatgcttattattacaaacaacagaaataacaaatcaaaatactcaaaggatttaaaatgacagaggccgacacagatgatgttggtacgaagtgtaacttctcgttcgcattcaacaacatcaatttctcagaccgaattctcaacattgaggttatacccgaccctcatttcatccgcgcccaatcccattctctctctaccctcgctccaaatcgtaagagacgcagactctctcttatgaaagccaatgatgtcctcttgcaacctgaggaaaaattaaattgtaatttaccagatgcagaggaagttgtggcaatcactgaggcatcactttcaggtgatgaagtttctcatggcaatgattcatcattgggcatgagttggtcaaaagttcttagagttaggaccatacagataagttctccaattcttgcagaaaaaagccccttcttttacaagttgttttcaaatgtgacgcgagagtctaagcaacaaaatgtgactcttcaaatccatgattctgaagaggctgccgttatggacctacttaattttatgtatagtaatactttatcaagaacgacatctgctgctgtattggacgtgctgatggctgcagataaatttgaggttatgtcatgcataaggtattgcagtaggatgttggggttaatgcctatgacctgtgagtctgccttactttatttggatcttccttcaaacattttgacattagatgcaattcaaccactggtagacacagcaaagttgtttcttgccacacactacagagacataacaaagtttgcagatgaactgctgaatttacccttggctggcattgaagcagtgctatctagtgatgacctccagatgccttcagaggatgttgtctttgagtttgtgctcaagtgggctaggatacattatccaaaaattgaggaccggaaagatgtccttgaagcacgccttggtcgactcatccgttttccatacatgagctcccgaaagcttaagaaggtcttaacatgcaatgacttccatcctgactttgcatcaagggttcggctcgaggctctcttctacaaggcagagacaccatatcgacaacggtctcttgctgcacaagatgctggcaccacctactctcgattggtggagcgagcttacaagctccgccatgtgaaggtggttgaatttgcattgccccgtccacggtgtgtggtatacctggacctaaagaaagaagaatgtgcacaattttttcctaatgctcgaatttactctcaagcattccccctaggggagcaatggtttttcttgtcagctcgctgcaatatggaccagcaaaatgcatctcattgctttgggcttttcttagcagtgcaattcaagggatcagtatctcttcatgttgactatgaatttgctgctagatcaaaatcgactgaggagtatataagcaggtgcaagggagattatactttcacggcgggcaaggctgtagggtataggaacctgtttggtattccatggactgcattcatagcagacgatagccattttttcatcaagggattacttcatctaagggctgaacttactattagacaatgactcctttgtaggattggtgctctctactttctagcttttgatgactaatgtcctatatttttctgtctctaactgcattaaggagatgaaagaataggatttggtgtaattatacatactaataatttgattgtagaatagttccgaactggtgtagacattgactgtcatgacattgcttactcgaactggtgtaaatactgaacgatgtcacactatcacattcataattna

SEQ ID NO: 26976 - DNA, 544 bp, Glycine max
  Clone ID: TF_GmC581776_1
gcaagatcagaaatatttaagaacatgctagagtgcgatgaatgcaaggcagcaccaagtaacgccataactatacccgatttgaaccatgaagaactagagtctctccttgagtttctgtacagtgggacattgaatgtggaaaaattggagaaacatgtctacgctttgtcacaagcagctgataagtatgtgattccacatttgctgaaacacttcgaaagatatatgctgagttctataagcacttccaatggtcttgaggcactaggaattgcggatacttgttccaacctcaaagtgaaggagccaaccttgaactttttagttaaaaacattgagcacatggtgtcctcacctaaatttgaagcttttgtccataggagcccacatcttaatgtggagctagttgcaagggcgtttgtgaatggtgccaaataatcaaaattgtctccaccaatgttttttcctttttcaatttaataatgtatttatccaagcctataaacataataatataattcatgccttgttctcttcaaaa

SEQ ID NO: 26977 - DNA, 975 bp, Glycine max
  Clone ID: TF_GmC129068_1
tgtttctctctcttccactctctctccaacaaaaaatatctatctatcataataccctcactcacgcatacacaagaatttttcccatcctaaaaccatgaccctccattcaccattcaccgagcgaatcccataaaaacaacacccacagtaccatcatcatcatcatcatcatcaacaaaaaacggatgaacccaaccttctcccttccctcactattccatctctctcaccttttccctttaacaatccctctctctctttctctctctcttgctcttgcttttgcttagcaataagttacaaccaccaaccctagagagcgttgaggcgacaacacagtacatcaggaacagcaaacaaggcagtaacaaacaacagcaacagttaccatcaccaccaccatcatcaccatgtcccttgaagagtcgctaagatctctttctcttgattacctcaacctcctcatcaacgggcaggccttcagcgacgtcactttcagtgtggagggccgcctggtccacgcgcaccgctgcatactcgccgccaggagcctcttcttcaggaaattcttctgtgggccggacgcgccgtgcggcctcgaccctgccggaccgcgaggcgttaactcctcgcgctccggggtaatccccgtcaactcggtgggctatgaggtgtttctcctcatgctccagtttctctacagtggccaggtctccatcgtgccccagaagcacgaggccaggcccaattgcggcgagcgcggctgctggcacacgcattgcacctccgccgtcgatctcgccctcgacaccctcgccgccgctagatactttggcgtcgaaccgctcgcattgctcactcagaaacaactggcgagcatggtagagaaggcttcaatagaggatgtaatgaaagtgctgttggcatcaagaaagcaagacatgcagcaactatggtcgacatgttcccact

SEQ ID NO: 26978 - DNA, 2619 bp, Glycine max
  Clone ID: TF_GmC141_2
ccttcacgcccgaacttattcaccaaagagaaaccaaaaggctcaaaacacaaccatgatcaatcatgctctttgtttcttagtattcctatctgcactccatgcaacacatgcagttgaatacactgtcactaacaacgcactctcaactcctggcggcgtggctttccgtgacaaaataggggctgaatacgccaagcgaacacttgactcggccacccaattcatatggaggatctttcagcaaaacaacccttctgacagaaaaaatgtgcagaaggtaagcttattcgttgatgacatggatggtgttgcatatactagcaacaatcaaatccatctcagtgcaagatacgttggaaacaataaaggggacgtgaaaacagagataacaggtgtgctgtaccatgaaatggtgcacgtttggcagtggagtgggaatggtcgtgctcctggtggattaattgaaggtattgcggactatgttaggctgaaggcaaactatgcacctagtcactgggtgaaagcagggcaaggacagaaatgggaccagggttatgatgttactgcacgcttatttggactattgtgatagtctcaaaagtgggtattgtggcacggctttaactcgagccgaatcggctcgagcactaatcttgctcatgagaacagcagcattaaaactcgtgtcaggaaggaaggcgggattccaccgcttgttcatttgcttgaatttgcggatacaaaggtgcaaagagcagctgctggtgcattgcgaacccttgcttttaaaaatgatgaaaataaaaatcagattgttgaatgcaatgcccttccaactcttattctaatgcttcgctcagaagatgctgctattcattatgaagcggttggtgtcattggaaatctggtccactcttcccctgatataaagaaagaagttcttcttgctggagccttgcaacctgttattggactacttagctcctgttgctctgaaagccagagggaagcagcattgttacttggacagtttgcagcaactgattcagactgcaaggttcacattgttcagagaggtgctgtccgacctctgatagagatgcttcagtcctctgatgttcagctaaaagaaatgtctgcctttgcattggggagattagcccaggacacacataaccaagctggtattgtgcacaatggtggtttgatgccattactgaagcttcttgactccaaaaatggctctttgcaacataatgctgcatttgctctttatggccttgcagataatgaggataatgtgtccgattttattagggtaggtggaattcagagactgcaggatggagagtttattgttcaagcaactaaagattgtgttgcaaagacattgaaaagattagaagagaagattcatggccgagttctgaaccatttgttatatctcatgcgagtttcagaaaaggcttttcaaaggcgagttgctttaactcttgctcacctttgctctgcagatgatcaaagaaaaatatttattgattataacggtttggagttgcttatgggacttcttggctcttataaccccaagcaacaacttgatggagctgtggctttatgcaagttggccaataaagctatgactctgtctcctgtagatgccgcacccccatctccaacaccccaggtgtatttgggagagcagtatgtaaacaatgctaccttgtctgacgttacatttttggttgaaggcaaacgattttatgctcacagaatctgcctgcttgcatcttcagatgcatttcgtgcaatgtttgatggtggttatagggagaaggaggcacgggacatagagattccaaacattagatgggaggtttttgagctgatgatgagatttatatacactggatcagtagatatcactcttgatattgcccaagatctcctccgagcagctgatcaatatcttttagaaggacttaaaagactatgcgagtacacaattgcacaggatatatcactggagaatgtgtcaagtatgtatgaactttcagaggcctttaacgctatatcattgaggcacacatgcatcctttttatattggagcactatgataaattgggtggaaagccaggacactctcaactgattcagcatataatacccgagatccagaattactttgttaaagccattacaaaggccaattccaatatccagccgtaatgtgctgttctactattgacatctaacccgttgcaatgtacataatgtggttgatgttctttttgttgaacctgcgaaggaagtctcctggatcaagtacagcatggcttaaaaaaaatatctaacatcacgtcatgtacgttcatttctgatgcagtgtaagtcccttctagctgtaacgtcattgtcttagatatagcaaatatgaccttcacgaacattgttttttactcgtgcaaatattgtgatggttgagactttctctttctcaagcatctaatgttgagtttatgagtagtataggttgcccaagcatctaatgtatatatgacaattagatagttgtcttcatattatataatgaaatcttaaagccttttcaatgg

SEQ ID NO: 26979 - DNA, 2112 bp, Glycine max
  Clone ID: TF_GmC1802_1
ctccacaaaaacaaacagaaccacaaagacaggttttgttgctcttctgtggttcttccagagagagagagagagggttgaagaggatgttctgagaggaccgctttatctgaaaaaagatcttggtttgcagaaagtcatctttcagagagagagagagagagagagaaagaggtgtaatagaaaaagagtgttgtcttttgtttgtttgtaactttacattgaattccattatttttttctctctctctcttgtgttactcgctacaagctatatgactataaccgactccatcttttaccgtggaagaaggaaatgaatatcacaagtggaagaagacacagaaggcgctaggagcatagctactttaagagagaacaaggagcaagagaagaaaacaacaaaaacaaaagcttttaggttgttctttctcttgtgtcatggcttcttcaaagaccaccaacccaacaacaactactacacaattggaaccactcccaccacctcaacaacgccatcctcctcctcctcatcatcagttgcaacaacaccaccaccaccaccatcatcatcaacaaattcatgaccatcatcaaatttcttttggaatgatgcaatcctcttcttcattttcctctatccccggaaactaccttataagcaaggattccggagcttatgacttgggtgaattggatcaagcctttttcctctaccttgatggacaagcagacccttctagtgttcaagaccaaagacaaaactcatcatcaggaatgaggcctccaactctcaacattttcccctctaagcctatgcatgtagagccatcatcatccaaggccaaggctaacatagagctagtttctccacaaacaagtggatcaaagaggccatcagagccgtcgatggagttggccaaccctcgaaacgaaactgcttctgcccctcagccacccaaacctgtcaagcgagagagcaaccgcaaaggtccaacgtcaagttctgaacatgaaggacctaaaacaccagatcctaagacactcagaagacttgctcagaatagagaggcagctaggaaaagcaggcttaggaaaaaggcatatgttcaacaactagagtcgagtaggattaggctgaatcagctggaacaagagctacaacgtgctagaactcagggcatgttcttgggtggaggcgcacttttgggtggagagcaaggccttcctgtcactatgaatactattagcacggaggctgcaatgtttgacgtagaatatgctagatggcaagaggagcaccaccgcatagtgtgtgagctaagagctgcagtgcaagagcaccttcctgaaaacgagcttagactgtttgtggacaattgtttggcgcattatgatcaagtgatgaacctcaagagcttagtggccaaaacagatgtgttccatcttgtttctggcacgtggaagaccccagctgaacgttgcttcatgtggatcggtggtttcaggccatctgaactcatcaagattattgtgcgtcaaattgagcctctcacggagcaacaaatattgggcatatgtggattgcaacaatctacacaagaagcagaagaggctctctcccaagggctcgaggctcttaatcaatctctctcagacactataacatcagattctcttagttatcctcccaatatggctaactatatgggacagatggctgtagccatgaacaagctctccactcttgaaggtttcgtgagacaggctgataatcagaggcaccaaaccattcaccgtctgcaccagatcctaacaacgcgtcaagcagcaaggtgttttctggccatagctgagtacttccatcgtcttcgagccctcagttctttgtggctggcacgccctcgccaagaataggctcagtactccctagctctagctagctatatatgcatgcccttaacttatatatatagcttcttaatttctctttaattataaattaaatgttatatctctcttcatcactcctctctcccactgcatcatgggctgtatagatacagtgatatatagacagatcattaatatagaatttaatgttaacaacta

SEQ ID NO: 26980 - DNA, 1891 bp, Glycine max
  Clone ID: TF_GmC6275_4
acacaccaatccacttattcacattcaatttatattgtcaattgtttacaggattttcactttgcaatgggagcattgcagtgttattggtagtatgtgaaatacacaacagcaatgaacacacgtacaaaagtgcagctagcaggatttgtttccttatagaaaattggattgatgatccacttgtagctagcaggatatataatcatatcttgattccaggcagaatctcacaactagaataccgagctctctgcatcatctttggtgaaacacattggtggcttgatcctaaaaacatttccatgcagccctcctttttcaactagaataccgagctctctgaatttaatccataaaataacaaataaaaattctcgtcgtattaatcattgatctagcctcttctctctctctctctctctctctctgtctatgaacacaacccttctttccttccgcgacgacaacaacaacgatgaccaactacgcaattccaaccgacacaccttgcaccaaccttgagttcatctcacgcgccaattctgaaccaacacagtgacgggaaggaagggtcttgcgttgctctgcggtttgatagatagctgccctgttggcatgaagatttgagcgggaaaataataagacaacatacataacgttttctcaaagtggtttttttattttattttttttatcataagacggcagtttgcctgcactgatcagttcttagagcatgaattcagcatccccgcagtttgtttcctcaagaaggatgagtgtgtacgatccgatccaccagattagtatgtggggagaaggcttcaaaagtaatggaaatttaagtgcagccatgcctctaattgatgagacagacatgaagtttgatagtcagtcagaggatgcttctcatggtatactgggagagcctaataagtatgaccaagaagctaacaaacctactgataagggtgacaatgacaagtatgttagtcctgccattttggactttgaggaatctgtatttaatttggatatacaaagacgtcttgcacaaaatcgagaggctgctcgtaagagtcggttgaggaaaaaggcctatgtgcagcagttagaatcaagtcgtttgaagttgatgcagttggagcaagagcttgaacgtgcaagacagcaggcaacaaaactgcagggaatttatataggcggtgggttggattctaatcatctgggttttgctggatcagtaaattcaggaattacaacctttgagatggagtatggacattgggtgaatgagcaaaatagacaaatcacagaactgagaaatgctttaaatgctcatattggtgacgtagagctcaggattttagtagatggtatgatgagccactatgccgaaatgtttcgcatgaaatctgctgctgcaaaagcagatgtcttctatgttatgtccggcatgtggaaaacaacagctgaaagatttttcctatggattggaggctttcgcccctctgagcttctaaaggttcttggccccctgattgaacccctgacggagcaacaacgtttggatatctataaccttggacaatcatgtcaacaagcagaagatgccctttcacaaggtatggacaaactccggcaaacacttgctgatagtgtagcagctgggcagttcatggaaggaacatatattccacagatgacttctgcaatggacaagttgaaagctctggtgagctttgtgaaccaggaaactttgcagcaaatgtctcgaatacttacaatccgtcaggcagctcgatgcttgcttgctttgggggaatatttccaacgcctgagggctttgagctcactgtggtctaatagacctcgtgaacctgcttag

SEQ ID NO: 26981 - DNA, 554 bp, Glycine max
  Clone ID: TF_LIB4198-005-Q1-N1-F7
ctcatgaataaattatttaaaactctacaacatatttttttgtcactaaatggaaaaaggacctagtaaaaggcttaaaattttatgattttcataataaacccaacctatgattagaaaggctatataatgaatggtaaaactagaatgttccccaggaaatttttactacaaggatttcactgaggtgttataactagacaagcctaataagaagaacaaataagccgttggatgcaaatgcatcaaatagctactattcctgagagacaagaagtctgttgtcaactcacattaaactaaaggaagcatcccttgatgcctcatatctacaaacctgtccttacaggtacagatgtcagaatgaagccgatgatgttcggcgaatctggtatctaggttcaggaggtggattgcttgacaacattttctctagctcctgctgtctcctcagcttttcgttttcctcttccaaacgagagactttgtgctccaattcagttgtgtaagcctgtttccttgctctagaacgggcagcagattcccgattcttg

SEQ ID NO: 26982 - DNA, 1770 bp, Glycine max
  Clone ID: TF_GmC1880_2
ggagaaaagaggaaacgagaggagcattgcagaggtggggaacctggaatggaatctctgatccattttgtgtgttgaatttgattttgtattgttatagattacagatttggtgggcaatggatagggacaacaaatctcctccaccttcttctctttatgtgaaatcatcatcttcatccttcagccacgacgacataagcgccatgccggagaatccacccaagaacagaggccacagacgcgcccattccgagattataaccctaccggacgacctatccttcgacgctgatctccttcccgacgacgacaacgacttgctctccctctacctccaattcgatcagctcgattcctcttcacttcctcctcctcctcctcctcctcctcctcacaacaacattaatgaaaggtcaactagggttagacaccaacacagccactccatggatggctccatccacctggagatgctgctctctgccgcctccgccgccgatgacgtctccggtggcatcgacaccaaaaaggctatgtctgctgacaagcttgctgagcttgccttagttgatcccaagcgggctaagaggatatgggcaaatagacagtctgctgcaagatcaaaagaaaggaagatgcgttacatttccgagcttgaaaggaaagtgcagacattgcaaactgaagcacatccttgtctgcacaattaactcttttgcagagagatacacatggaaatgactgctgactgaagcgagttgattgtccgattgcttccatggagcaacacgtcgagatacacatggattaactgatgcgttcagtgagttgaagttgcgattgcaaaccatggagcaacaggtccacttgcaagatgcattaaatgatgcattaaaagaagaaattcagcatttgaaagcactgactggacaagttatgccgaatggaggaccggttaattttgcttcatttggtggggggcaacaattctatcccaacaatcaggctatgcacactcttttagctgcacaaaagtttcaacaacttcaaattcattcccaaaagcagcagcagcatcaacttcagcagcaacagcaatttcagcatcaacttcagcagcaacaacagtttcaccagcagcaacaacagctgcaactgcaacaacagctgcagcaacagcaacaacaacagcagcagcaacagcaacaacaaacagcagcaacaggaacagtaacatcaacaaacgggggacatgaatagggaggggacacagatagcacctcatcaaatgtaaatccttctgcggcagaggattttagagactacaaattgctttctcttcatcacttttaattacccttttgtttagagtttgtttaggtcacagtcattatatttcttattcatgaaacactacagatagtcctagttagagattgagaattatgcattggatcttggctatgcaaaattctttgccacctttggttgtggatcagcggggcggatttatgtttgttaagtctttcaattgctttcgcctatggctatgcctgcacaagtggtctgtttagattcacaatttccgcgggaattgctgtatgttctcctaaactagcatcccaccgaaaacacttgggttgtctggcacttaacagagggggttccattcaagtttcttttaggttgttgatgttaaatttctacatttgctctaacaatttttataattattctcagaaattttacattctcaggaatcatttt

SEQ ID NO: 26983 - DNA, 520 bp, Glycine max
  unsure (1)..(520): unsure at all n locations
  Clone ID: TF_jC-gmro02910021c05d1
ggctcgagctttttcaccttccccctttgtttctcaacatcattctcctcattcccctacctacccccaattttcccttctgtatttctctttttcaattctcgatttcccttctcccttttgtggcttcataatccagatcctctactggctctacgtcttgtcatgaactaactccctctcaatcccctaccctaattcctccaatttccccatttttttttctaattaatcagatttgcaaaatcctaatttctctatcctaacaaaacccccaaattcaaacaaatccaatggcttcgattccgcgtccggctgcgatggacgagagaaagaggaagcggatggagtcgaaccgcgagtccgactgacgatcgcggatgaagaagcagaagctgctcgaagacctatccgacgtancgagtcgccttcaaggcgagaacgtgcgcttagcgcagagcataaaggcgaaggagggagcgtacgttgagatcgaagccgcgaacgacatcctcagagc

SEQ ID NO: 26984 - DNA, 1410 bp, Glycine max
  unsure (1)..(1410): unsure at all n locations
  Clone ID: TF_GmC1347_1
ngaatctcgataaataaattattttctcttctccaaaattcaactcaataatcccttccctggttcccatcatggacgaattagaagaaaccctactcacccaaatcgactgggaatcgttcctcgacgacatacctgaacttaacgtcgatgattttttgcaggacgacaacgccgttcctgttgttaccgacaatcattcctccccgaacgacgaccccgttttgtccgagatcgagaacatgctcatgacgcaggccgaaaacgacgctgtcgttttgcccgagacgccgtcttcggaggccgggtattacaagctcttcgaggagattctggtggaggagcccaaggaaggacccgtgagcccgccttcaaaaatagagtccgaggaaggctccgacaaagacaagaccgatgatgctgcttccgatgaacccatgtcgaagaaattaaagaggcagttgaggaacagggatgctgctgtgaggtcaagggagaggaagaagttgtatgtgaaaaaccttgagatgaagagtaggtacctagaaggggaatgcagaagactggggcatttgctccagtgctgctatgctgagaacaacgctttgcggctttgcttgcaattgcgtggtacatatggtgcttcaatgaccatgcaggagtctgctgtgctcttgttggaacctctgctgttgggttccctgctgtggtgcatgggcatcatatgccatctcagtctgcctctaatgctgtgggttgcagcagtacttccaagagaaaacatcgagcagaagggcctaagaagggtaactcaaaaaggatcagaaagtaagatctctgagtgtttccagatgcaatcatttttaaagagtagaaaaagccgagcttcaagaacaaagatgaaattcaattttatagtgttctaatgttctataacttctgaagtgggggctctaaggttttctattcatctcttctttctttcgttcgttttctcttttgttttattggatttataaatacggtcgaacttgttagaggttctgtgatatgcttttttaggtgctgttcttgtaacttatattgggaccataacatgttgcgttcttatctttaacatagacgtcgttttgagtttttggcagttcaatgaaacttattgtttgcaccaaacctgctctaaaaaaaatgtaaattttctgcttatgccaaaatcagaacaaatttataacatggaaattccaacggactcaccaaacaagaagattcacttttatgcatgctaaacagagagtgattttaagatgtcaaaataataataatatccaagtcccgtgtggtcattattggtgaagaatgtgttatgaagctgacctaatgcagttcatgttaattagatgtcattttaaa

SEQ ID NO: 26985 - DNA, 2126 bp, Glycine max
  Clone ID: TF_GmC726_2
ccgtctttatgtccctttatttttttgagggttaaaaactgctgtgaaatatttttctaggattttggctaatcgtctatcagctgctcgctcaaaagagaggaagatgcggtacatttctgaattagagctcaaagtacaaacacttcagacagagacaaccacattgtctactcagtttaccaaattacaggtgtgtacggtctgagttgagccaatattcccttttcttcagtttttcaattatattttattgtgttgaataatgtttgcttctagcattcatttattcttttctttcctttcttttgttgtgcttgtctacagatggataattcagagctgaaaagtgagaataatgagtacaaattgaggattcaagccttggaacagcagtcccaactaaaagatggtatgcatatgcatttctcttctactttatctattagctcaaatctgctctagcttgttccacccagtaaagggtgaacttttccaactttatacagaaataacttatatttatcatctggttcaatgatctctgattttcatttagtaaatggattttatgtgtgataacacggttcaatattgtgttggttctcaacatgtaaatggctgatgttaattcactaaaagttgagtgattttctatccaattatgttcaaaatctctgcacaactgcgcctttgaaatctacctgtctggtctaggaatttgattcaatcttgcagaatgcaaagtacatttgcactagtagtctagtaccatgtttttctaaagttcttgttttgcatttcatggcctctttagaactgcatatgagaaaatgttagtgtaattttgccaacacagatggtgtcacttaaactctccttgatgccaaaatagaaagaaaaagagagagagaacacgatactaggaagggaattctgatagtcaaggttcaaatgttctttttattgtacatactaaaataatagaactctttatatatgatgtttcgattcttaatggaaaatagttgaaaactacactaatttcgttattaccacaaaacttctgttgtcttcatgcctaatgcctttatcagcagtgacttctttactagatgtttctttgtaatgcaattatacactgtaaacttgtatctccaagaccaaggcattggcaatatgtttttagcagcttgaacttgtaactcaatatgtatctccatttcatcagcctctcccttctaaaatgcactgtactgccttgtttttgtgctggagatgaatactttagctgtgctatccatcatttgtgtgcttgttttggcagctctgaatgagaccttggatgctgaagtgcggcgtttaagacgcacagttgcagaacttggtggagagtctcttctgctcaagtcgcatggctcaacagcttgctattagccaacaagtgttcccagttacagcaccagcagcaccctaaccagcttagacatgttcaactggacaatagccattcccaggagcagacacagactcagtcacagtgccacaatggcaaagctactgcctactgattagcactctgataccatgtatgctcaatgtttgtgatatgaatctgaataggatattgcatgaccaaacaagctcaagtaaaaaaaaaaaagactcgattctaagagaggacccgttaacaaaaagaaaagttcaaaagatacaagaggcaaaaggagtctgtgaatgcaattcctatctaataaggttgtagttcgacttgtgcaagcccaaggatatgattatatgaagactcaaaatagtgtataattgttaactttattgcctaagatttgtagttattatttgtaaatctaatgatgatttgagatagatttcattagaatttatgattgattttattaagatttgttttaattgatttttttaaaatttgtttcgtctattaaaatgaagattctatcatttgtttggatatgtttcttattattatgatttgttttctatttttcttcttctatcatttaaactcacaattgtttaaatgaattaagagctttcatctggctcatgtaatttaagttagattttgaatgaaatatcaaatatgagtt

SEQ ID NO: 26986 - DNA, 700 bp, Glycine max
  unsure (1)..(700): unsure at all n locations
  Clone ID: TF_LIB4390-054-R1-K2-B7
cttcgaggagattctggtggaggagcccaaggaaggacccgtgagcccgccttcaaaaatagagtccgaggaaggctccgacaaagacaagaccgatgatgctgcttccgatgaacccatgtcgaagaaattaaagaggcagttgaggaacagggatgctgctgtgaggtcaagggagaggaagaagttgtatgtgaaaaaccttgagatgaagagtaggtacctagaaggggaatgcagaagactggggcatttgctccagtgctgctatgctgagaacaacgctttgcggctttgcttgcaattgcgtggtacatatggtgcttcaatgaccatgcaggagtctgctgtgctcttgttgggtaaggcttgcgattgcaagctgtattaccttttattgccattgctgttttgttttgggcattcagtggagacaacaacaactttgcttgattaatttgctttcatgatttggcatggtttagccttccactttggttgttntcttaaaatgaattatatgctaatacttcattgtttcatgtattggcatcgccagagcccagagcattaataagttataaacctgtcttcaatgaccaaagtttttgtgaacataaatacgttataacccttgtcttcattgaccaaagttttttgtgaacatatccatgaaccatgctaacttgatattaaatat

SEQ ID NO: 26987 - DNA, 438 bp, Glycine max
  unsure (1)..(438): unsure at all n locations
  Clone ID: TF_LIB3138-098-P1-N1-A10
ccggaattcccggtcgacccacgcgtccgcccaaatggagtacaggccctgcaaacattgaccatgacaaattcaagcagtgctcagcagggggcgatcctccagtacgcgcagacctctgacggacagcagatactcgtnccgagcaaccaggtggtggtgcagactgcatcaggagatatgcagacctaccagatccgtaccacaccatctgccacgtcacttccacagaccatggtgatgacttctcctgttacccttacatctcagacaacaaagacagatgacccccaactcaaaagagaaatacggctgatgaaaaacagagaagctgcccgggagtgccggcggaaagaagaaggagtatgtgaagtgcctggagaaccgagttgctgttctggaaaaccaaaataaaaccctaatagaggagctaaagac

SEQ ID NO: 26988 - DNA, 1227 bp, Glycine max
  Clone ID: TF_GmC505_1
ggctcgagtaatggttggcacaattcggctcgagcagtcagagtatattcctcgggaaccaagagagccttctggttctggagccgatcaagaaactacaaataaagatgttaataagatgctaagacgcctagctcagaatcgagaggctgcccggaaaagtaggctgcggaaaaaggcttatgttaaacaattagaatcaagccgtttgaagctcatgcaattggagctggaaattgggaaagcaagaaagcagggtctgtatatgggcactgcattagatgccggctatataggatcaacatcagaaacaataaatccagggattgttgcttttgaaattgaatatggacaatgggttgaagagcaagaaaggcggaatgaagaacttagacatgcatttcaaacacaagcacctggtgtacagctcaacgtagtggttcagagtgtcttaaatcattactcaaatcttttcagaatgaaagcagaggctgtaaaggctgatgtcctctatttactctctggtgcgtggaaaccatcagtggagcgaattttcctttggattggaggctcccgtccatcgcagcttctaaacatcatcgtgcctcaacttgagcctttgactgatcaacaaattgttagtattaacaacctccgcctatcgtctcagcaagctgaagatgctctttcacaaggattggaaaaacttcagcagagtttggtccacgacatggcagttgatccattgggtgtaggaaacttgggacttcagatggctcgtactatggaaaaatttgaggcactagaaggttttgtaaaccaggcagatcaccttaggcaacaaactctgctgcacatgtcacgcatcctgtcaattcaccaagctgctcgcggcttgctggctctcggggaatactttcatcgtcttcgtaccctttgctctctctggtctgctcgttcatgtgaacttgcctaggctccttagaggaagagacctagctgctctgcttcaactgaatcatctcttctgtgcttttcaaaacagttactcgattttggatatgaatgagttaatgccgtgtaccagcatgaagcaaaattatgtgatttgctgctcttgtgagtgtgcttgtacataaacagtgtatcatctttagtactatattatatatattatgtaaaactttctagtatctttcggaataaaatgtccattatgttactttt

SEQ ID NO: 26989 - DNA, 1184 bp, Glycine max
  Clone ID: TF_GmC293864_1
ctgtctggtgggttaaaccttagtcacatcccaaatgccaaaaccctaggagagagaaagagacagacacatacagagagagagagagacgttgagttgaaattgaatgatcgatggcgacttcgaattcacgaaaatcagaaacctccccttccccttctcccaccaccaacttcatccccatccccgccgcccccgcccctaaaaccgtcgatgacgtgtggcgggagatcgtggccggcgaccgccgtgagtgcaaggaggaggcccccgacgacgactacgacaaggagatgatgaccctcgaggacttcctcgccaaggccgaccaagaccaagaacccgactacgacaacaacaactcaagatgccaatgccactcaccgagaggctcggcagcggcaccctcttctccttcgaccaccttcccacgacgccgtttcacgactccgccgccgcagaaggctccgtcataggcttcggaaacggcgtcgaggtcgtcgaaggggggagggttaaaagacggcgtcccgttttggagcagttggataaggccgcgcagcagagacagaggaggatgataaaaaaacagagaatctgctgctaggtccagggaacgcaagcaggcataccaagtggaattggagtccttggcggtgaaactagaggaggaaaatgacaagctcttgaaggaaaaggctgagaggaaaaaggagaggtacaagcagctaatggaaaaagtactccctatcgcgcagaagcaaaagccaccatgtatactccgtagggctcgctccttgcaatggtagatcaaattttccagtggtgcaggacaggaactgaatattaaccacatcagtggtggggaaataagcaaattaatcattatctcttaaaaatcatagttctcagcctaacggttagtctcaagggcaatcgtggttaaagatgtgaagagatagaaggaattggaacctgaatcgccaagaaaaattccttattacttaagaaacaacatttgcttattctcaggaggtaaaagcagaaatatggagttggaccgtgtagtttagatacaaattaaacatcctgtttgctaccctgcgcagaatgccaatgtgtaatagtagagggcataggggatttgtagactagtatataatattataatgtagtcatggctt

SEQ ID NO: 26990 - DNA, 3283 bp, Glycine max
  Clone ID: TF_GmC217_1
ctcgagccgctcgagccgctcgagccgctcgagccgctcgagccgatggatgcattccggcatccgctctccgcgacattcgcctatggctctcccagcccttcgccctcctccggttgtggggcatcttccacgggccgcatgcctcccgccaggcggaagctgcgctctcccgaggggtggatgcattgcagcaatcacctgcggcagcagtgcattacggcacgcgctgcgcatcttaacccccgggcaatcagctcgagctcccctcgccatcagtgattattgctcacggctgcgagctctgagttctttgtggcttgctaggccaagggagtgaagcatttcacagctccattagtggacttctttcatacctgacccccttaaagactgatcgttgaatcttgtgctctgaatgagttcaatggaagctggtgtcttttgacaatgaattcctctagaagcctagttgtatttcacagccccattagtggacttctttcatgcctgactcccttaaacaccgatgatcattgaatcttgtgctctgaatgagttcaatggaagctggtgtcttttgacaatgaattcctcttgaagcctagttgtgatgctataaacattaaatgctatgatttttctactctgccaactgctggtgtggtgcaacatttttctttaagcttttgtggttttaaaatagtctcaataatttgattatataggtgtatgatagatagaagctgttgaagggaaaaatgtagaaatagtgtatctgtatttttaggttatagctgttcattgtatttcagaaatcagcttttatttgagggggtatttacctctctttagtttcatttcctgcttaatggtttgtggttggagagaaaatgaaatgtctagaaatggctcttgtctcagtcaccaccgcaaattcttcgaagtatattctcttacgcactctctctcgttctcacgctttctccttcgctctccaccgtcaattccaactactctcgtcttcctccgctgtgctccgccgtcttccccggttcctcgccgcctcccccggttctccgctcccaccttccgaaaacgattccagcaggcaccttgactcgttctccatctagtgagatcggtttcttcttctgggtgtgttgcttaaatctgtggaaagttcatttttttttccgattttcatgtgaccagggtcttttggggctaataaggtttgtggagagagaagatgatcgttgtgctgagcatgattattgatgggtagcagaagtagaacggtaaacgttaacaactaaggacactgacaaggttctgaacgggatgccaagctacgctcctccattgccttcttctaattccatagccatggaagcaactaatgctcatccttcccgcatttctgaatttggaaccctggagcaatctcttggatttcgtgttgaagataccattaatcttagcagaaatccgatgtttaatcaaatgaaatcaaatagccaagctctaggtgctgatattcaatttggtgctttaaataagtcaattgcaacatcagatataaacctctctgctgctattgctgcgtctcaagcattggtattccaaaaagattcacaaccaactctggcttcaacatctgctggtcgtgagaactggggagagaccaacttggctgatgctagccctaggactgatacttcaacagatgatacagaagacaaaaatcaaaggcctgaaaggggtgaatccagtggatcaaaagataaatcagatcaaaagacattaagacggcttgctcaaaatcgtgaggctgccaggaaaagccgactgaggaaaaaggcatatgtgcaacaattagagagcagtaggttgaaactgacccaacttgagcaggagctccagcgagcacgccagcagggaatatttatttcaagtactggagatcaggcacagtcaatgagtggaaatggcgctatggcatttgatgtagagtacgcacgatggttagaagagcataatagacaaaccaatgagctaagggctgcaataaattctcatgctggagatattgaacttcgaaccattgttgacaatttcatgacacaatttgatgatatcttcaggctgaaaggtattgcagcaaaagctgatgttttccacattctgtcaggaatgtggaagactccagctgagaggtgtttcatgtggattggaggctttcgctcatccgaactactcaagcttcttgaaagtcagttggagcctttaaccgagcaacaattgatgggcatctacaacttgcagcagtcatcccagcaggctgaagatgctctttcccaagggatggatgcattgcagcaatcactgtctgagacattggctaatggttcacccagcacatcaggctcctcgggaaatgtggcaaattacatggggcaaatggctatggccatgggaaagcttggtactcttgatgggtttcttcaccaggctgacaatctgcggcagcagacattacaacaaatgcttcgaatattaacgaccaggcaatcggctcgtgctcttcttgccatcagtgattatttctcacggctgagagcgctgagttctttgtggcttgccaggccaagggagtgaagcatttcacagccccattagtggacttctttcatgcctgactcccttaaacaccgatgatcattgaatcttgtgctctgaatgagttcaatggaagctggtgtcttttgacaatgaattcctcttgaagcctagttgtgatgctataaacattaaatgctatgatttttctactctgccaactgctggtgtggtgcaacatttttctttaagcttttgtggttttaaaatagtctcaataatttgattatataggtgtatgatagatagaagctgttgaagggaaaaatgtagaaatagtgtatctgtatttttaggttatagctgttcattgtatttcagaaatcagcttttatttgagggggtatttacctctctttagtttcatttcctgcttaatggtttgtggttggttgcacataaggctccatggtgtatgtatttatacgttctcttttggtatattagaaagacattactaactaaaaattgttttttgggatttttgagcagatgttgctacatctttatccaaaattcaagatagaatacagatcttctttgctgttcttttctggatgtctctagtcgtttgggcttccgcctgggatgggaggaatag

SEQ ID NO: 26991 - DNA, 2592 bp, Glycine max
  Clone ID: TF_GmC420_1
ttcccgggtcgacccacgcgtccggcagaacaagacatttagagattggaatcatccgtgttcctctctctcatctctctttctctctgttccctcggtttccttactttgaagtttaatccaatccaataatccaataactacatacaaagttgaacaataccaccatcatagcgtatcatcatcagaattccaaggtggatttgcttcatcttttactccggcttcatgctgcatgagtaaaggccgttatgttatgctcatggtggatttttgtgcaactgggactaggggaattgatgatgtggtggtggtgagaatgatgtatggggagtagaactaccaggagggttgttggtgttgaagatgacaagggagctgaaagaggaatgcctagctccaattctgagttatcccactgatcctttgactttcttcttctctctacatccagaaattggattgatcctttctctctctctctctctctatctccattcaaggcctcttcctttcactttaatccaacaataataattattcgcaaaaaaaaaaaaaaaatacacgttgaacagataccatcatcattcatcttcatctcccacatcatcagaatttcaagactcagtttttgactcactaagtaagtagccaaacaatttctcgggttcctgttcaagttgattcctttgataagttaccaacttcactcgataaaaacccattaacaaaccaaacagagtgacaaagtttgcaattacaaaaggttcaattatcaaatctggtcagtggtgatacggaacaccaggaagagtctgccatggctgacgccagtcctagaactgatatttctacagatgttgacactgatgataagaatccacggtttgatagaagtcagtcccttgttgctgtggcttctgactccagtgacagatcaaaggataaatcagatcagaagactctccgcaggcttgctcagaatcgtgaggctgcaagaaaaagtcggttgagaaagaaagcttatgttcaacagctggaaagtagtcgcttaaagttgacccaactggagcaagagcttcagcgagctaggcagcagggaatctttatatcaaactcaggtgatcaagcacattcaatgagtggaaatggggctatggcatttgatgtagaatatgcaaggtggctggaagagcagaatcgacaaattaatgagctaagagcagctgtaaattctcatgcaggtgatacagaacttcgcatgattatcgatggtataatggcacattatgatgagatatttaggctgaaggccaatgcagctaaggctgatgtcttccatttgctgtctggaatgtggaagacaccagcagagaggtgttttctatggcttggtggttttcggtcatctgaactcctcaagctcctggtaaatcagttggaacctctgacggagcaacagttagtgggtattaccaacttgcagcatggtatcttaacaagcagaagatgcattgtctcagggcatggaagcattgcaacagtccctttctgagacattatccactggatcacctggctcctctggttcatcagggaatgtggcaaattacatgggtcaaatggctatggccatgggtaaactagggacacttgagggattcattaagcaggctgacaacttgcgccagcagacgttgcatcaaattcaccgcatattgacaactcggcagtcggctcgtgcactacttgcaatacatgactacttttctaggttgcgtgcccttagctctctttggcttgcccgcccaagagactgatgggggtaaatagtgtgtcattaattttcatggatctggcaccagaatcctttggcataggttttttactcttgcaattttactgtgttgtagttttcacattactgatattagtttcagtaagttattatctagaaactgaattggtgacatgacaagggtatgtattttgtttattactactaacgtaataatattgtctattgtaacacagttgaaggaatttagatgattttatacaaaaaaatggttgggatgtgatgaataagatagggacacttgaagggttcattcaacaggctgacaatcttcgccaacaaactcttcaacaaatgcaccgtatactgacaactcgccaatcagctcgtgcactccttgctatacatgactacttttcgcgtctgcgtgcactcagttcactctggcttgctcgccctagagattgatgggcgcggtaaatagtatggcaaattaattttcatggatccatcactagcaatacttggtcatcataactcttgacaagttttcttgtgttgttttgttgtactctttgtatcactgatgttagtgcttcattgagtcagtctagaaacgaaattggtgacaagaagtatgaatattactaataatattgtccattgtaattgaagggctttgttttttccatataaatatagttgggccatatgatatattttaagggttgtttcagtcgccatagtttacccttggatctgagttcatacaaaattgttgagtttattctttt

SEQ ID NO: 26992 - DNA, 479 bp, Glycine max
  unsure (1)..(479): unsure at all n locations
  Clone ID: TF_jC-gmro02800043g12a1
ggctcgaggttagataatcagtttcaggtgcaatcagaggatgatactcatggaatatttggcacatctgtgaagtacgaccaagacactaacagacttactgataagacacaacgacgtctagcacaaaatcgagaggctgctcgcaagagtcgattgaggaaaaaggcatacgtgcagcagttagaatcatgtcgtgtgaagctcttgcagttagagcaagaggtagatcatgcaaaacaacagggattgtatattggcaacggattgggttctaataatttgggttttgctggctctgtaaattcaagaataacccttttcaagatggagtatggaaactgggtggaggaacaaaatagacaaattttggaactgagaactgctntaagttctcatatcggtgacatacagctcgggacacttgtacaaggcataatgaaccactacaccanactctttggcatgaaatctgctgc

SEQ ID NO: 26993 - DNA, 1618 bp, Glycine max
  Clone ID: TF_GmC107_2
ggctcgagctcgagccgcttgatacttgatacagctgttaactttcccctttgaaatcctttctgagttctgcgccaactgaatcaagcagatcgaactccgccatagtcttcatcgagacagagatcggaatctgattcccaaacgggcacagtatgagcgtcatcgacattctaacccgagtcgattccatttgcaagtcgaacggttgagacttgccactccaggtcagccaaatgggcttgttttctcctcctggacctccttgcagactctcgattagaaaccttccttcttaggcgcttcacatcaatagcgtttgtgctttgttcacaaggacctgcttcatcatcctcatcagatggctcacgtgaggaaccacttgtagtggtggtggccccttttacttgattatctctcgcgtttggtttattagcagacaatgggcaagtacgacaaatacgacgtcgaaaagcaccgcgatgccaatgtctccggcgacgatgcctttgccagactatacgcctccgtcgacgccgacatcgtggccttgcttcagaaagcagaaagtgcttctaaggagaaaggtaaggcatctgctgttgcgatcaacgcggagattcgtcgtactaaggctcggttgctggaggaggttcccaagttgcagagattggctgtgaaaaaggtaaaagggctttcgtcacaagagtttgctgcccgtaatgatttggttcttgcattgccagatagaatccaagcaatcccagatggggctcctcctgtgccaaaacaaactggaggctgggcagcttctgcctcccgtcctgaaattaagtttgattcagatgggcgatttgatgatgaatacttccaacaaagtgaacaatcaagtcaatttaggcaggaatatgaaatgcgtagaatgaaacaggatcaaggtttggatgtgattgctgaaggattggatacattgaaaaatatggcacatgatatgaatgaggaactggatagacaagttccactgatggatgagattgacactaaggtggacaaggcatcctctgaccttaagaatacaaatgttagacttaaagacacagtgaaccagcttcgatccagtcgaaacttctgtattgatattgttttgttgattataattttgggaattgctgcctacttatacaacgtactaaagaaatgatgtgtacaaaggctgatggatgttcgaatggtttgccttgtattttgaggatatcttctgatttttttattttatttctaccattgtgaaaatttcctgcgacttgagaggcgtgcccttgtgctttataagcagtcctgtgtaatgtgtatgcagtcatgtcagataccattagtatgtgtatgttaaatagttgctgcttattttatacacttgttttggtatatgttatagtattataaattgacgctgatgaattaggaagggagtttaatgtcaatgtcgtgacagtctatacatgttgggttgtgattagatgattttgtaaaactttttgcactgggttgtgattagatgattctgtaaaactttttgcactgggttgtgattagatgattctgtaaaactttttacact

SEQ ID NO: 26994 - DNA, 891 bp, Glycine max
  Clone ID: TF_GmC128657_1
cggctcgagctgagttagttctatttattctccatcagagttttttctccaaggccctgcaatcttttgttcatatatacattgctacataaaccatgcaggccagggagatcacaggactcaattatttactcccttcagacccttgtccttaccctggtcactacagcatggttcagaacaccatccccacatttcaactccacaaactctcaaaccaattctatggtttgcagaaacctcctcctaaagtgcttgcagacttcagcccccctcagtcctcatgcatcagcagcaactcaacctctgatgaagcagatgagcagcagcaaagcctcatcaatgagaggaagcacaggaggatgatatcgaaccgcgaatcggcacgccggtcacgcatgaggaagcagaagcaccttgatgagctgtggtcacaggtggtttggctcaggaatgaaaatcacccagctcatggacaagctgaaccatgtgtctgagtcacatgataaagttgctcaagagaatgttcagctgagagaagaagcctcagaacttcgccaaatgatatgtgacatgcagctacacagtccataccaccctcctcccttgagtcccattgatgatgatgtttctccctatgtcaaatctgattcctcaatcacagactctttggacctgcttggttgaatttgaagacaaggccaaagtttttatcattatatctcttcaatttttcttctttttaagttcttcttctgtgtgtgtgtgaattgttgtgggaagtacaaaatagtagtagtctttgcctcccttttgagatgtatgaggtgaaaccataacataaacggcaatgacatgtttttttgagtttctaattttaaaaaaaaaaaa

SEQ ID NO: 26995 - DNA, 1376 bp, Glycine max
  Clone ID: TF_GmC6275_3
cttagatagattgatgcctttatttttatctttgttttgaactactatgattactgttttctgtataggagtatgtgttgaatgattattgagttgcagcactgatcagttcttagaacatgaattcagcatccccgcagtttgtttcctcaagaaggatgagtgtgtacgatccgatccaccagattagtatgtggggagaaggcttcaaaagtaatggaaatttaagtgcagccatgcctctaattgatgagacagacatgaagtttgatagtcaggtgcaagtctatgaaatccgtgctttgtttcattggcaaataaaaatgcctattctgcctactaaccaaattcgtttgtgctgtttaatacccagtcagaggatgcttctcatggtatactgggagagcctaataagtatgaccaagaagctaacaaacctactgataagggatctaatatggtcaaacatgcagatacaaagacgtcttgcacaaaatcgagaggctgctcgtaagagtcggttgaggaaaaaggcctatgtgcagcagttagaatcaagtcgtttgaagttgatgcagttggagcaagagcttgaacgtgcaagacagcagggaatttatataggcggtgggttggattctaatcatctgggttttgctggatcagtaaattcaggaattacaacctttgagatggagtatggacattgggtgaatgagcaaaatagacaaatcacagaactgagaaatgctttaaatgctcatattggtgacgtagagctcaggattttagtagatggtatgatgagccactatgccgaaatgtttcgcatgaaatctgctgctgcaaaagcagatgtcttctatgttatgtccggcatgtggaaaacaacagctgaaagatttttcctatggattggaggctttcgcccctctgagcttctaaaggttcttggccccctgattgaacccctgacggagcaacaacgtttggatatctataaccttggacaatcatgtcaacaagcagaagatgccctttcacaaggtatggacaaactccggcaaacacttgctgatagtgtagcagctgggcagttcatggaaggaacatatattccacagatgacttctgcaatggacaagttgaaagctctggtgagctttgtgaaccagttttttgggttaagggtattgttgaagttatttgaagctattgatcttgctgatcatcttcggcaggaaactttgcagcaaatgtctcgaatacttacaatccgtcaggcagctcgatgcttgcttgctttgggggaatatttccaacgcctgagggctttgagctcactgtggtctaatagacctcgtgaacctgcttag

SEQ ID NO: 26996 - DNA, 1398 bp, Glycine max
  Clone ID: TF_GmC486_1
tatatatctaatcttgattattccatgtgttagctagcttctactacttaagtaacattttaatattttctctaatgtatttggtaggttaacatgggattaccctccacacaaaccagtactggctcaaagagacaaccagagacatccatggccaagcccaatccacacactgaagccccttctgcacctgagccacccaaagctgtaaagcgagagggcaatcgcaagggaacaacatcaagctctgagcaggaagcacccaaaacaccagatcctaagacactaagaagacttgctcagaatagagaagcagcaaggaaaagcaggctcaggaaaaaggcgtacgttcagcaactagagtcaagtaggattaagcttaatcagatagaacaagagttacaacgttctagagctcaaggcatattaatgggcggaaatacacttctgggtggggagcaaggctttcctatggccatgagtggaattagctcagaggctgcaatgttcgacgtggaatatgcgagatggttagaggagcaccaccgcatagtgtgcgagctaagagctgtactccaagaacaccttcacgaaaacgagcttcgtttatatgtggacaattgcttggctcactatgaccaagtaatgaacctgaagagcatggtggccaaaaccgacgtattccaccttgtttttggcgtgtggaagaccccagccgaacgttgctttatgtggattggtggcttcaggccatctgaactcatcaagataattctgggtcaaattgagcctcttacggagcaacaaatacttgggatatgtgggttgcaacaatctacacaagaggcagaagaggctctttcccaagggcttgatgctcttaatcaatctctctcagagactataacatcagactctctgtggtgtcctccaaatatgactaactacatgggacaaatggctgtggcaatcaacaaactctccacccttgaaagctttgtgagacaggctgataatctgaggcaccagacaattcaccgtctccaccaacttctaacaacacgccaagccgcgaggtgtttggtggcaatttctgagtacttccatcgtctcagagccctgagttctctgtggtcaactcgtcctcgccaagatcagtagtgagtggtggcggccggcggtaatagtgacattccataactctcaagctatggctagatagctatatattagatatatatgaccttgtagcttcttaatttctcttaacttataaatttaatattttctcaattttattttggtaccaccctcttgatttctctccctctggactttcccatctatatgtatatagatatacattaacaaattaaaaatagaagtaattgtaatgtt

SEQ ID NO: 26997 - DNA, 2566 bp, Glycine max
  unsure (1)..(2566): unsure at all n locations
  Clone ID: TF_GmC299_1
aattcggctcgagggattcgtggtggacctccatctgagcagtaactaagtagccagatcttaaggttgctttgccaaaaaattatgctaaaacagggatttctgttggctattcttctggaatacattgtaaatcatttgatggagcacatgatgctggattcaattagtgcaccccgntggttttttttttttctttataaaaataatataaaaccacgtgtccgcccacgcgtccgattttattttgacgaatatgccctgatgcttccgccctgtgtagctgcgtgcctacctccatcgcatcatacgatatggatagggtgttctcagtggacgatatctccgatcacttctggcagccgcctatccctgtctccgccgcccaaacttcctcccagatgagccgcagcgcctccgagtgggccttccaacgcttcctccaggaagcttccgcctccgcaccctctcctccgtcttcttcctccgccgccgacgtcgtattcgtcgagatcgaagatcaacctaaacccgcccctccccctccgtcaaacggcgccgttctccccaatgcccctggtcccgtcccccttgactccgacgaataccaggccttcctcaagagcaagctcaacctcgcatgcgccgccgtcgccatgactaggggatctttggctaaatctcaagacccgtcccctttttctgaaggatctattccttctgaaaatgatccatctaagttacaagataaagataccaatgtaccagttgggattccttccatacctgccatgcaaaagaaacctgctgttgcaattaggccatctacaagtggatcatcaagagaacagtcagatgatgaggacattgagggagagacatctatgaatgcaaccacggacccgccgattgtaaaacgagtaaggaggatgctatctaatagggagtcagcccgacgctctagaagaagaaagcaggctcatttaactgacctagaagacacaggtttcccaattaagaagtgaaaattctaccttgttaaagcgcgttacggatgttagacagaaatacagtaatgctgctgttgacaacagagtactttagatgagctgtataatagagactgtctctgaagttcaaggactagatcgcagactgaattactggggtgaacgacttgggtcttccaattattgagccatcatccttggcagtcccatcgtttcacgaatgtcagtctgacagaccatgacgtcgtactggtccagagcgaaaagcaaccaaaaatcgccgctgtcaccccgacaatcagaatcgtttaggagacattcctttgactgaaaccgtgcagctgaatggtgcatcagtggtatgtgacatcaaaacggggagaccaacttcccggcatagggtggctagcttgaaacatcttcagaagaggattcgtggtggtgtaccctcacggtgacccctgctaacggacaacttataatggattttgatctacttcatcattttcttgtttctgctagtgataacgacgggcgcactattagtattaatgggctcgttaccctggaatatcttcagaggcgcattcgtggtggtgcagattcacatggaactaattgtaatagtgagcaattacgtaatacgggaattcacgattgacaacacagacggtaatgatgtcaaaagagtagttagggcaaggtgtaagaaggagcaagttcccgtcgacagaataagaatgtagattctgttaactaatctaatgacgagttttctcaattaagaggtgaaaattctaccttattaaagcgccttactgatgttagtcagaaatacagcgactctgctgttgacaacagagttttaaaagctgatgttgaaacattaagaacaaaggtgaagatggccgaagagaccgtcaaaagaattactggattgaacccattgcttcatgccatgtctgatatatcatcactgggcctgccatcatttgatggaagaagcccttcagacacttcagctgatgcagctgttcctgtgcaagatgatccacatcatcacttctatcaacccacatctactaatcctattcccagtcatgatccgatagtcaacaatggattggggggcatttcttcaattgaaaatgtgcagcagaatgctgcagtagtgctaggtgggaacaagatgggtcaaacagcatccctgcagcgggtggctagcttggaacatctataggagcggattcgtggtggacctccatctaatggggagcagtgactaattagccaaatctcctggatgctttgccaggaaattattctaaaacagttatttctgttggttataactagaggcctattcttctggaatacattgtaaatcaattgatggggcacatgatgttggattcaattagtgcaccccgtatttttttaaaaaataatataaaatgaactttactttctagtttataaaaaaaaaaaataaaaaaaaaaaaaaaaaaaaaataattaataaaaataaaaataataatgggtcgtccgcttattat

SEQ ID NO: 26998 - DNA, 1158 bp, Glycine max
  Clone ID: TF_GmC1611_1
acgagccccagaagagtacactaaagagacaaaaaacttgtgtgcctttctcccaagttaattgtgtggaggagttacaaatctttctaaaccacagtgcaatacaccaaaacaatggcagataaagatgctttttgctacccttatcatattcatgattgcacatcaccacaagagaacttgcccaataaagggccttttcattcagaaatgcttccctaaaattctaggaaaggagctggttacacatcggtgaagccacttgatgcaaagacactgagacgtttagctcaaaacagagaagctgcaaggaaaagccgtctcaggaaaaaggcttatgtgcagcaactagagtcaagtagattaaagctcacacaccttgaacaagaccttcaaagagctcgctctcaggatgagtttatgggatgtggtggtgctggtggcagtataagttctggtgagtttaattagccttatctcttgttggttttttaaactcaatttcatttttctgatacctcagattggaacaaagatagaagggtgtgaatatgtcaaaattttctggcacatcgtatatatgattatggagcatggaaaaacttgttacaatgagtacctgaaagatttagttggcgtgatcttttgactcttttttacactttggaacatgagacaaagaattaagagactcgttagggagcagcaattgctgttattgacacgtaacttcttcctagctatgtcctttgaatcttttttagtgccaaaaataaataaaaagtcaaatttaaccaaaatctagaatcaggtggagaagtcttggaatttgaccaaaatctgtggcctaattcacgtttgaatccacattattcttcctagccataattaagtggatttcgttgggctgctttacaaatgaatgccagcgtctcctagaagaaaaatatttatttatttttcttttcaatcttctatgttctcttgtgtctttatgttttattgtaaatgtaaatctaggttttatgtgcatgatgaggctttagctgaagagaaatagaaaaaaaaaagtttgagtttaagagaaggtgcacgtggcatggatgtagataaagtctccatacaattgactctatcttctagttagctaatggctta

SEQ ID NO: 26999 - DNA, 1213 bp, Glycine max
  Clone ID: TF_GmC80973_1
agccagaaatgaactccacaaaacagaaaaataggtcatgggactctttttcaaatgccatgacaaatccagttggtgttccctcaggcaaagacagtgctgcttttcagagttcaggattgcaatgtacaccacatgaagcagatgctcttccaccagctgcaagtgaaaagcatgattcagtagaattgggtttacaggatgcaaaatcctttcctgaaaaaaaggacatttcacatgcaaagtcatctgcctctgaaactgatacaaaacgtgctaaacagcaatttgctcaacgttcacgggtccggaaacttcagtacatagcggagctggaaaggaatgtacaagctttacaggcagaagggtctgaagtctcagccgagcttgagtttcttaaccagcagaatcttatcctgagtatggagaataaagcactcaagcaacgtttagaaaatatagcacaagagcagcttatcaaatatttggagcaggaagtactggaaagagagattggaagattacgtgcattgtatcaacagcagcaacaaccaccacagacacagccacaacagcaaccatctggtagtcacagacgctcgaacagtagagaactcgaatctcagtttgcaaacctttctctaaaacacaaggacaccaattcagggcaagaccctgctctcagaatttagatttgcagtagctgtagccttgttcggcctctacattcaaccggtgttgccacacccgcgatagaattgtttccttcccttcccatgcatgggattgtgcagagatttccatcctatgccctctctctgcctgccagctttgctgatttcatccttctcttagtctttccgttttctatttacttatattattaccatttaatgtgcacctggtggtcattgccgaaatcttattctatttgtcagttgacctaccagaggtggtaaccaacatttccaagctttcaacccccactgtattttcagtgaatatgtagctgtataccccctcttgtgaatctccactattgtggaatttggcccagtgcaaatagcaaatatctcagggccatttgaatgtgccttatttgtatggataatgtttagctaatgcttgtaatgttattttaatgaagttaatgttttcttaacatcttgtttggtagcaatgagaaaattgatctaggccattattttggtcc

SEQ ID NO: 27000 - DNA, 768 bp, Glycine max
  unsure (1)..(768): unsure at all n locations
  Clone ID: TF_LIB4280-018-R1-K1-F1
ccggtnccggaattcccgggtcgacccacgcgtccggggatagaaagattgcgcgtttttgttttacaaacagagcatcgatcggaaagaacacacagaagacaatggccacacagacgcaagatccacgttcaaaccctaaccctaatcccaatgcaatgtcggcaacgccatcttcctccttcttcatccgcgccgccggcggcaacggtccctccgccgctcccgtcgccggctccggcgagtcgcactcgcaccaccggagggcgcactcggaggtcagcttccggctgccggatgacatgattgacttgtcgccgtcggatccgttcaacggcggatcctcgacggcgagcttcgaggagatcggatccgaggacgacctgttctccacctacattgacgtcgagaagctcggggctggacgcggcggaaacggatcggatcagagcggttatggaaatggcgccggcagcagctgctacaacgacggcgagaagagtccgagcaccgccgctgcgcggccgagacaccggcacagtagctccgtcgacggttccacgtcgacgagcatgttcggagagatcatggatgcgaagaaagccatgcctcctgataagctcgcagagctttggaacattgatccaaagcgtgccaaaagaatactggctaatcggcaatctgccgcacgttcaaaagaaagaaaggcacgctatatacaagaacttgagcgcaaagtccagacccttcagactgaagcaacaacac

SEQ ID NO: 27001 - DNA, 435 bp, Glycine max
  unsure (1)..(435): unsure at all n locations
  Clone ID: TF_LIB3242-186-Q1-J1-C6
cactaagctagaattcatctcgagcggagccgattcgactacacaccacaaaagggcactaattataattttaaattttgaaagtgaaataatcccggactgacactaatattgtcatagactgggcacaaacttttaatatatacttcaattcttttatgtcaaactcgtatgccctctcatcattactattatgaaggattctttctaatagagagtcanccatactctcaagaatgagaaaccaggctcatttaactgatcttgacacacaggtctcccaattacgaactgaaaattcttcggtgataaagcaactcacggatgtcagccacaaatacaataatactgcattttacaacagaatacttaacactgatgttgcaacattaataacaaacgtcaagatctgttaagaaacagcaaaaataatta

SEQ ID NO: 27002 - DNA, 304 bp, Glycine max
  Clone ID: TF_LIB3056-014-Q1-N1-C12
gtcgagccgattacgttagagagtggacggcattggattcacagagtacaggtcgatatacgagtgcctctggtggggaggtggttagaactgcatagaggatgcatactaggttgattctgaataaggaatctgctgctaggtcacagtcatgatgacaggcatacgcacatgaactggagattaaagtgtcacgattagaagatgcgaatgtaaggattaaaagactaaatgaaatggagagcgcattgacatctgtgccaacagctgaacctagaccgaagctacagcttatcagaactag

SEQ ID NO: 27003 - DNA, 3306 bp, Glycine max
  Clone ID: TF_GmC2191_1
tacggctgcgagaagacgacagaagggtaatatattttttacaggcaattttctttttgagacatgtaccgaaagaaacatgttttaaaataaacaagttttacccttatactaaattactaatgcattattatattatttaatgaatttaattttttaacataattaaagtcattaagtaattatccataaaagtatttatagtaacaatgcatcaaaattagttaaaaaaaggtttaggaagtcagattgagtcattgaccaatcaacctaattcaactcaattcaagtttggtatctgcgtctccagtactgtcggatgccccaatttcttcaactcgacctattctctctcctactgttaacgttttctgtttttctttaagatggcgatgacgacaacgacggagtccgatctcgattacgagcttcgctatctcagtctcgccgtaaccgataccttcactgctttccaaaacctcttaccggatgcgatgacttccttttcagcttgtggactaatagaccctctttgttctcaaaacctcactcccaagcattccaccatcactgcaaccattgattctcagtcatcgatttgcgccactagtaatgttgggagcccagtctcagctaataaaccagagggcagagagaatcatacgaaaagagccacaagtatttagtctgagccatctgatgaggatgatgaagcaggtgcttgtgaacagagcacaaatatagctgatgtgaagcgccttttaatgaaggttactaatcgcgactctgttagaaacacaatttcaaggttgcatctttaattctctactgttcactaataagctgtaaaacttattgaagataatgcatccctatacaagcagttcacggatgcttagccaacattttcgtgaggcagatacgaataaccgagtgctgaaatcagatgtagaagctttgagagccaaggtgaagttagcataggatatggtgactaggagctcttttactacgttaaacaatcagctttttcagactcaacatcatcaaatgagcacaccccagcaactgaacacgactaatctgcggcgcatggcgcatgtttcgccaacaatcaccgttcatggaaatgatgtctcgtacaataatggtggacagaattcagcacttggaaacttggatatgagtttcaatgacatcaatgaagtcatgaacgatgctatgagttgtggaactatttggccactcgactagacagactctctctgtagcttccaattagatcgatccatcttttatattttacgtcttgtctaatttgattagtaggctatatatgttaatgtcaagctatgctatttgtcttcgcttgattcctctttaatgatgcctgtttaaaatggcgtcttctttcgttgtatgtagttttgtataaaaggacttgattgctttatccatttctgattgtaattgcaaaacaaaatgttttctaattagggtcatgccaatgcttatggagcatttggctgacaaaatataatacatgagttaattttgatttagtcatcgatttgcgccactagtaatggtatgagcactagtgcactacgtacattattacttgcatgccaagtgccattcatcttagcatattattattagaggaaaaaaggttgcgcacagtatgcaaattaaattaaaagtcatactaatagtaatttgtgattgaatgacgttacatggtaaactttttaacattctggattgaattgcaaactgtgcagttgggagcccagtctcagctaataaaccagagggcagagagaatcatacgaaaggagccacaagtggttcctctgagccatctgatgaggatgatgaagcaggtgcttgtgaacagagcacaaatccagctgatatgaagcgccttagaaggtatctcaaagataaagcattaaacttaggttgtgtttgggtaaatttttctgtgagaagacgactcacagaggtgcataagttggttttagccgagaggaattcaattaattttactttcttatttttttcccctgatattttaaattatgttatggttttaggaaggtttctaatcgcgactctgccagaaggtcaagaagaagaaaacaagcgcaattgtctgaccttgagttgcaggtaactgatctgttgggagagtacatgaatggtatttaatttgataagtctttaataagggaatgaaatatagtgatattaattcttagagctatattttcgtacgaacagttgttgataaagacagtggaacgttactagcactctgaatctctttgtttttggaatttaagcattaacattcaatatttggtaaaatgcacaagaagcaatacaatgtttttttcgtttgaattttgctttctcaggttgaaaaactgaaagtggaaaatgcaaccctatacaagcagttcacggatgctagccaacattttcgtgaggcagatacgaataaccgagtgctgaaatcagatgtagaagctttgagagccaaggtataataggttcttctgcaatattattctatagctaagaaaaggagattacaactttataaaagcagggaaaagtagtaataaccaagaatgaaggaagcttggtttttaattaaggttgatgaaaaatatctcaatagaatttcaactgagtactgctccgaagaattaagataagctaatctgtctaggttaatttaaaaagagttttaagagagttattataaaagtgtataaaaatgtttgatattgtctggctggcatatataggtgaagttagcagaggatatggtgactaggagctcttttactacgttaaacaatcagcttcttcagacacaacatcatcaaatgagcacaccccagcaactgaacacgactaatctgcggcgcatggcgcatgtttcgccaacaatcaccgttcatggaaatgatgtctcgtacaataatggtggacagaattcagcacttggaaacttggatatgagtttcaatgacatcaatgaagtcatgaacgatgctatgagttgtggaactatttggccactcgactagacagactctctctgtagcttccaattagatcgatccatcttttatattttacgtcttgtctaatttgattagtaggctatatatgttaatgtcaagctatgctatttgtcttcgcttgattcctctttaatgatgcctgtttaaaatggcgtcttctttcgttgtatgtagttttgtataaaaggacttgattgctttatcc

SEQ ID NO: 27004 - DNA, 510 bp, Glycine max
  unsure (1)..(510): unsure at all n locations
  Clone ID: TF_jC-gmXLIB3563P051cd04a1
ttctgaaccaacacaatgatggaatggaagggtcttgcgttcttctgcggtttgatagatagctagccatgttggcatgaagatttgagcgggaaaataataagacaacatacataacgttttctcaaaacggcagtttgcctgcactgatcagttcttagagcatgaattcagcatccccgcagtttgtttcctcaagaaggatgagtgtgtacgatccgatccaccagattagtatgtggggagaaggcttcaaaagtaatggaaatttaagtgcagccatgcctctaattgatgagacagacatgaagtttgatagtcagtcagaggatgcttctcatggtatactgggagagcctaataagtatgaccaagaagctaacaaacctactgataagatacaaagacgtcttgcacaaaatcgagaggctgctcgtaagagtcggttgaggaaaaaggcctatgtgcagcagntagaatcaagtcgtttgaagttgatgcagttggagc

SEQ ID NO: 27005 - DNA, 860 bp, Glycine max
  Clone ID: TF_GmC420_3
gaaattggactgatcctttctctctctctctctctctttctcctcaacgcctcttcctttcaatttaatccaacaataataattattcgcaaaaaaacgttgaacagataccatcatcatcacccacatcatcagaatttcaaggtcttgtattgcaaggttattgaggatatgatggtgtgtgtggagtagagccggtgtttgtgtagaagatgaaaagggaacagcaagagggatgccgagctttgattcacaattgcccaattccaatgcatgctatacagagggaagcgcaattgattctttttgtgtgtttgactttgatcaatcagttggatatcgcatagaggattgtgttgccttgaggggaaactcagtttttgactcactaaaagtaagtagccaaacaatttctcggggtcctgttgaagttgattcctttgataagttaccaacttcactcaataaaaacccattaacaagccaaacagagcgacaaagattgcaattacaaaaggttcaattatcaaatctggtcagtggggatacggaacaccaggaagagtctgccatggctgacgccagtcctagaactgatatttctacagatgttgacactgatgataagaatccacggtttgatagaagtcagtcccttgttgctgtggtttctgactccagtgacagatcaaaggataaatcagatcagaagactctccgaaggcttgctcagaatcgtgaggcagcaagaaaaagtcggttgagaaagaagcttatgttcaacagcttgaaagtagtcgcttaaagttaacccaactggagcaagaacttcagcgagctaggcagcaagggaatcatta

SEQ ID NO: 27006 - DNA, 808 bp, Glycine max
  Clone ID: TF_GmC76867_1
ggctcgagatctaatttaaaacacctctatcttctagactccatcatcatcttcctctattggttgttctatgtctgctcatgaactaactccctctcaatcccctacctaatccctttcaatttccccatttttttttcctaataaatcagatatgtaaaatcctaatttctctaaccctaacaaaacccccaaaattcaaagaagaagctggagatctgcgcgagttcaagatcgtcggagggaggaggagatccagtggtgatggatgagagaaagaggaagccaatggagtcaaaccgcaagtccgcacgacgatcgcggatgaagaagcagaagttgcttgaagacctaaccgacagaggaggaagcatatgttgagatggaagctccgaatgatcctcagagcacagaccatggaacttgtcggctggttaaggtttctgaactccattctcgagattgccgatgaggtcggcagcggtggtgaatccttcgagattctgcagattttgaactctctcttgatgccttggtaaatccctcaccctatgatggcgtcgcctgacatgtttctccatggaaatcaaggcttgtttgcttggtagtatttcaataggctaggtttattgttgatgttccttcgagatgtatttttttctatataaaaagaattgagatttgttttgaaagatgaagattgaagggagaagaagataagtgtaggtctgaaggatgactggaaaaagggttttaatgtttgatttatgtattttttatgtattttgacagttttctaatgggtagt

SEQ ID NO: 27007 - DNA, 385 bp, Glycine max
  Clone ID: TF_LIB3056-004-Q1-N1-G6
agggaacaaataaagacggcagtttgcctgcactgatcagttcttagagcatgaattcagcatccccgcagtttgtttcctcaagaaggatgagtgtgtacgatccgatccaccagattagtatgtggggagaaggcttcaaaagtaatggaaatttaagtgcagccatgcctctaattgatgagacagacatgaagtttgatagtcagtcagaggatgcttctcatggtatactgggagagcctaataagtatgaccaagaagctaacaaacctactgataagatacaaagacgtcttgcacaaaatcgagaggctgctcgtaagagtcggttgaggaaaaaggcctatgtgcagcagttagaatcaagtcgtttgaagttgat

SEQ ID NO: 27008 - DNA, 1050 bp, Glycine max
  Clone ID: TF_GmC114277_2
ttaaccttgagagaatttcctctccttttcctggttcacaaagctcacaagtgcttctagtctctccattgcagtatccatttggggaatgtgagttccttcaactagttgtcctggtcctacagagtcagcgagcatttgctgaagtttttccataccttgtgaaagagcatcttctgcttgctggcatgatttttcaaggccataagcatcaaaccgttgttgctctgtcaaaggttctctgagagggaccagcacctttagaagttcagaggggcgaaatcctccaatccacaagaaaaatcgttcagctgttgtcttccacataccagacataacatagaaaacatctgcttttgctgcagcagatttcatgctaaagagtttggtgtagtggttcattatgccctgtacaagtgtcccgagctgtatgtcacctatatgagaacttaaagcagttctcagttctaaaatttgtctattttgctcctccagccagtttccatactccatcttgaaaagcgttattcctgaatttacagagccagcaaaacccaaattattagaacccaatccgtcgccaatatacaatccctgcagttttgttgcctgttgttttgcatgatctacctcttgctctagctgcacgagcttcaaacgacatgattctaactgctgcacgtatgccttcaaacctttttcctcaaacgactcttgcgagcggcctctcgattttgtgcaagacgtctttgtgtcctctggatggtctgtcatggtaggctccctactatggacaggcttatcagtaagcctgttggcatcttggtcgtacttcacagatgttccaaatattccatgagaagcatcctctgattgcacatgaacctgattatctaacttcatctccacctccccaattatggatgtggatacagttaaattattagtatcattacttttgaaagtttcttcccacatgctaatttggtggataggatcatatacacccattcttcttgaggaaacaaactgtgaggatgtagcatccat

SEQ ID NO: 27009 - DNA, 795 bp, Glycine max
  Clone ID: TF_GmC667331_1
ggccccatcttgcacacacacacgtactagtactacacatttacacttttttccttcgttaaaaaatccctttcctgttgccctgggttgttgtagctacccttcagagcaaagaaagagagaaaaaaatgtctcttccaagacccagtgagggtaaagccccttctcagctgaaagaaggagtagcacctgctgctgctgcagcctcatcctcttcttcatggaataataggctacacactttccctcctttgtctctacacaacaagagtagcaaaattgaagacagtgatgaagatatgttcacagttcctgatgtggaaaccacaccagttagtgttcattctgcagcgactcttcaaaatagtaaccttactcaacgtaatgtgacagaccctcaatttcaaactggctttcctggaaagcgccgcaggggaagaaaccctgcagataaggaacatagacgcctcaagaggttgttgcgaaacagggtctctgcccaacaagcccgcgaaagagagaaggtttatgtgaatgacttggaatcaagagctaaagagttgcaagataaaaacgctatcttagaagaacgtatctctactttaatcaatgagaacaccatgctgcggaaggttcttatgaacgcgaggccaaaaactgatgatagcattgaacaaaagcaagaccagttaagtaagagctaacaagcaaagctagagggtgcgtcaaagtaaggcattcaagagatgcatttatgatttattttagacactagaaattgtaaatttataaata

SEQ ID NO: 27010 - DNA, 2098 bp, Glycine max
  Clone ID: TF_GmC383_1
ggctcgagacgagctttccacttacgttccgtccgaactcctgcgagaggacggcaacaggggacgaccttcccattgtttcctcaccgtgaacaacacaacaccacccactcacaattccttttttctaaagcctaacgaaccctaattcttgattattcctcaattctttcgttcccttcccatcttggcggacacgcaaattccccttcttcctcatttcgcaaacaaattcctcttccaagcatccccaattttcttttaatctattttttcgccttgttatttcacccatttaaacctgtggcttcttttcgacgccccccccccccatgtgtcagaatggattagtgtaaattattgaaagatacccatatataaaagcatgggtagtagtgacatggacaaaactccgaaagagaaggagtctaagacacctccagctacatcacaggagcagtcatcaacaactgccatgccaacaactaatcctgactggtctaactttcagacgtattctcctatacctccacaagggttcttggcatcaagtccccaagcccacccatatatgtaggggcgtccagcattatatgccttcctatggcactccaccacatccctatgttgcaatgtatccccatggtggcatatatgctcatccatctattcctccgggatcttatccttttcagtccttttgccatggcttctccaaatggtattgcagatgcttcgggaaatgccccaggccgcatcgaagttggtggtaaacctcctgaagtgaaggaaaaattacctatcaaaagatcaaaaggaagtgctagtggtggtaatttgaatatgtggattacagggaaaaataatgaacctggtaaaataccaggagaatctgctaatgggattcattccaaaagtggtgagagtgcaagtgacggaactagtgaaggaagtgatgagaactcccagaatgattctcaattgaaatcaagggagaggcaggactcttttgaagatgaaccatctcaaaatggaagttcagtacatgctcctcaaaatggggtacataatagacctcagacagttgttaatcaaactatgtctatcttacctatatctaccacaagtgctcctggagcagttcctggtcccacaactaatttaaatataggaatggattattggggcacaccaacttcgtccaccattcctgcattgcatggaaaggttccttctactgcagttgctggagggatgattgctgctggatcacgagatggtgttcagtcacaagtttggctgcaggacgaaagagagcttaaaagacaaaggcggaagcagtctaatcgggaatctgcacgcagatccaggttacggaagcaggctgaatgtgatgaactagctcagcgtgctgaagctttgaaagaagaaaatgccactctccgatcagaagtgagccagatcaggagtgagtatgagcagctacgttctgagaatgctgccctcaaggagagacttggggacatacctggtgtcgcgacgcctgggaaggaggatcttaggtctggtcagaatgatcagcatgtgagtaatgacactcaacagagtggtcagacagaggttgtgcagggtgttcattaggatcttgcttcctgctgcatgttgctttttaggtagataacctaaccaagtagcaacagcaagttctagtttttggttcaaattgtattaaaggtgatcatatgtagtattaggatctatttatgtcatatgatccctcattcctaatttgtcatgtttatgacggccaaaaacttgtattgtagttagtgtgtgaatacttggttataccttctctgctacttcaaaagttagtgttagcagtaagaaagtatgattagtgaaactagttattgtccattatatggattgccgtgcttctgcgcaaataatttaatcaggaagatatattaaggaaatggaaatgaagttcagccctgagaaagttatggtttgagtatagccagtcaaccatcgtggattttataagaattttgtattgcattatgaattatgaatacataatcacctatttatg

SEQ ID NO: 27011 - DNA, 1834 bp, Glycine max
  Clone ID: TF_GmC754_1
acttatatgtactgtacctctttattaatttgcgtttgcatgttctaaacaaatttgaactcgcgcggtggctgctcaaattcaacagacacatccatctcatcctcacctcagtatcataagaataataagctcttgtcactgttacaaaaggaacttcatttaccagcttcgctttcgaatttcaatttccaggaagaagaaaaagatggtgattgaggagggcgagatgaagtcccaaggtgaggtggaatcatggctccagcaagaagcgaagaagaaccaccattctccattattctcatcttcttcatatctgggaagacaaacatcatcgatatactctctcacactggacgagttccagcacagtctatgcgagagcggcaagaacttcggctccatgaacatggacgagttcctcagcagcatctggaacgctgaagagaacagccaagccatcaccaacaacaacgtccctctgtcgtcgaccctaacaatattaaggaaacagccaagcctccctcgccaaccctcactgtccctccctgctcctctttgtaggaaaaccgttgacgaggtttggtcccagattcaaaaagaacaaaacaagaacaacaacattagcaatgttcttaatgataataccgagtctgcccctcgccaacccacttttggtgagatgactttggaggattttttggttaaggccggtgtagttcgggaaacaacgtgtgcaccgccactaccggtgtctcactctcatcagccgcattacgcgaataataacaacaacgttgcaatggctccttcttttgttggtaggcatgttggtgcagtgagtaacgtggttgcaccgggttatcaacaagttgttggggaggcttctggtgggtatggtaagagggatcataatggtggtgggtatcattgttttggaggtggtggtggtgggtatggggtggggcccacaatgggaatgggtgggcctgtgagtccggctaattcgtctgatgggatagggaatgatggagggcagtttgggcttgacatggggggtttgagagggagaaagagggtggtggatggtcctgtggaaaaggtggtggagagaaggcagaggaggatgatcaagaatagagagtcagctgccagatctagagccagaaaacaggcatacacagtggaattagaagcagaactaaaccagttaagagaagagaactcccaactgaaacaggcgctggccgagctcgagaggggaagaaaacaacagtgttttgaggaagtgaacgttagtgttaaaaccaaagctcagaaagcaaaagagaaactgagagctttgagaaggaacatgagttgtcctttgtgaagaaactgcacggtaatggtagcagtgaaatacttggattttagtacgcacaacaagagtttgttgtgatgcatctactacttgtgtggctaaacgaagaaatagtcatgacacaaatcaagaggggagaagaaaactaaagaactactcaagtcaaagccggttgaagaaacagagaaacaaaaggtcggagttatgaaatttaattataaagccaagctgcaagagtcctcaagttcaagatcaacgaaggattagatcatccaatttggaaacttctttatcatatgataactagttactcaaatgtacaacatagttattgtattgttgatgacatttcatcttgtttacgcttaccagttaccacacccttgtttagttactgatttgatcgttggtcggcactattgccagatataagtaattaattaccagaatcaatctaattatttatgaaac

SEQ ID NO: 27012 - DNA, 1951 bp, Glycine max
  Clone ID: TF_GmC299_3
ccacgcatccgaaaaaatgactatgtttagcatcgaaaacataaatgcttctggtcttgaggagttgattgtactatcatgtgctgatatataaccaaatgtttggcctaccagataaactgattataatattaaattttgaaagtgaaataatgcgtgacttacactaatattttcataaactgtgcacaaacttttgatgtagacttgaattcttttatgtcaaactcgtatgcaatttcatcattactattatgaaggaaaggttgcacaagtattataatttttgtgttattggttgagctagctaaatgaatctggattttattgtttcttcctaaacagattctttctttattttcctttattagaaggcattcattttgttcagttcaggtactggtacaaattctgccttgtttaatttaaagcctaacaatttgtctttcaggatgctttctaatagggagtcagccagacgctcaagaaggagaaagcaggctcatttaactgagctggagacacaggtctcccaattacgaagtgaaaattcttcgttgttaaagcgattcacggatgtgagccagaaatacaataatgctgcagttgacaacagagtactgaaagctgatgttgaaacattaagaacaaaggtgaagatggctgaagagacagtgaaaagaattactgggttgaacccaatgcttcatgccataactgagatgtcatcaatggcaatgccatcgtttgatgaaagtccttctgagacatcagctgatgctgctgtttctgtgcaagaagacccaaatcatcaccgttgtcaacccacttctaataatgggttgggaggcatttcttcaattgaaactgtgcagcagaatgttgcagcagtggtaggtggcaacaaaacggggagaacaacttccctgcatagagtggctagcttggaacatcttcagaagaggattcgtggtggtgcagattcacgtggacctccttctaatggagaacaataacatagtagttaaatttacattatgctttttatgaggaaactattctaaaactcttgtttctgctagttgtaagtaagagcaaattcttattgatgtatgtgaatcttattgagcatattctgctggataatcctatttttcttttttttttttgtgtgtgtggactcctccaaatcttaattcatggctgatggggacaaaggagtgtaactagtgttggtagaggtcgccttatccaaattggatattgtttgcttcctccttactcgttttacatcagcagggtccgtgttgtcattcatagatgtctctccctcaatgtcctcatcatctgactgttctcttgatgatccacttgtagatggcctaattgcaacagcaggtttcttttgcatggcaggtatggaaggaatcccaactggtacattggtatctttatcttgtaacttagatggatcattttcagaaggaatagatcctttagaagtagtctgagattcaactagagaaggattagtcggctgtgatccaccttcagaaaaaggggacgggtcttgagatttagccaaagatcccctagtcatggcgacggcggcgcatgcgaggttgagcttgctcttgaggaaggcctggtattcgtcggagtcaagggggacgggaccaggggcattagggagaacggcgccgtttgacggagggggaggggcgggtttaggttgatcttcgatctcgacgaatacgacgtcggcggcggaggaagaagacggaggagagggtgcggaggcggaagcttcctggaggaagcgttggaaggcccactcggaggcgctgcggctcatctgggaggaagtttgggcggcggagacagggataggcggctgccagaagtgatcggagatatcgtccactgagaacaccctatccatatcgtatat

SEQ ID NO: 27013 - DNA, 754 bp, Glycine max
  Clone ID: TF_GmC609_3
attggaatggacttgtggaatgcatcttctggtggcgctgaagctgcaaaaatgagacataatcaatctggtgccccgggagttgcccttggtgatcaatgggtacaagatgaacgtgagctgaaaagacagaagaggaaacagtcaaaccgagagtcagccaggaggtcaagattacgcaagcaggctgagtgtgaagagttacaaaagagggtggaatcgctgggaggtgagaatcaaactctcagagaagagcttcagagactttctgaagaatgcgagaagcttacatccgaaaataattctatcaaggaagagttggagcggttgtgtggtccagaagcagttgctaacctggattaaacagcaacacatttcagttcctcagtgtagtgtttgatggtaacggcaaaatttgatagattcttaattaagacgaatctgcagctggaattttcttatcaatggcccggccttcttaattgagaataggatataatgtttttttttttctttgtcatactaatttatatcattaaccctcaattgtaattgcccttgtgattttacatgtcatttgtttgtaatattaaccagtaccgtagaatagaaaatgtaggctacttgagcactttttgtttagaacttagtattgcaagtgatgttaagaatcctgcttcaacttttcaaatcttcactagttgactatggagtcatttttgttctactatgcatgtgcttgagctgattgatg

SEQ ID NO: 27014 - DNA, 857 bp, Glycine max
  unsure (1)..(857): unsure at all n locations
  Clone ID: TF_GmC143038_1
ggggcgaagcatggcctcatggccacccaaacctacagtgcgtttgtgtgtgcgtgcgagggcgatggcctcggccccatgtgattgctggccccggccttcttcttcttcttcttcttccattgaacatgtctggaacgacatcaaactcgcctctctctccaattcctccgttgacttagacttgaacaacaacaactcactctgtctccgtttcttctttccttaaccaacctctttccacttttctcactctcacttctacttcctcttcctcctctgtctttcacaaacatgaccactctcttctctctgtctccgaccccaacaccctgcaagatcaacgccatacgcgtgtgatcaagaatcgagaatccgcggttcggtccagagccagaaaacaggcttatagaaaaggcttggaagttgaaatttcccgtttaacggaagagaattccagactaaaaagacaattgaaagagttgcagcgctgtttgtgctcctctcacactcccagaatggccgctccgtgtagaacctcttcatctccattttgagaaggaaaggaacccgtgaatatggcatgactcttgcatgttttcaactttcaaatgtttgtgaaagaaacacaaggattataaatggattgaattttaatagggttttttttttgaggaagagttttgataaccctggttttgtagttttgactaagtttgtctagtagttgggatttgagtaattaacatggaatcttaaatttaagcttcgttaccattattgtatatattaaaaaaaaactggctgctttctgttagcaagactaataaannnnnnnnnnnnnnnnnnnnnnnnnn

SEQ ID NO: 27015 - DNA, 1291 bp, Glycine max
  unsure (1)..(1291): unsure at all n locations
  Clone ID: TF_GmC535_1
cggctgcgagaagacgacagaagggaacctcactttttttctctataaaatccaacctaaacactctaagagaaccttctcccgataaacctttttcaccttcccctttgtttctcaacatcattccccaatttccccttctgtattgtttttcttcatttctctttttcaatccccgatttcccccttcttcgttttgtgtcttcataattcagatcctctcttcaatctagggttcctggcttaacgaacaatcaaatgtttaaggaagaatttctatgacgattcgcaaccccatgcgacgaatccgtctcctccactccttctccgtcgtcttcctctactggttctacgtcttctcatgaactaaccccctctcaatcccctaccctaattcctccaatttcccccttttttttctaattaatcagatttgcaaaatcctaatttctctatcctaacaaaaaccccaaattcaaacaaatccaatggcttcgattccgcgcccggcgagttcgggatcttcggagggaggaggagatccggctgcgatggacgagagaaagaggaagcggatggagtcgaaccgcgagtccgcacggcgatcgcggatgaagaagcagaagctgctcgaagacctatccgacgtagcgagtcgccttcaaggcgagaacgtgcgcttagcgcagagcataaaggcgaaggaggaagcgtacgttgagatcgaagccgcgaacgacatcctcagagcacagaccatggaactcgccgaccggttaaggtttctgaactccattctcgagatcgccgatgaggtcggcggcggtggtgaatccttcgagattccgcagattccggaccctctcttcatgccctggcagatcccccaccctatgatggcgtcacctgacatgctcctccatggaaatcaaggcctgtttgcttgatagtacttcaattaggctaggtttattgttgatgttccctagtgttttggtgaataaagaaagggaatggtgttagatgtttatgagttatatcgtgtgttggtgtgctgttttttttttttaagatctgtgtctatgttttgtgtgtgcactatcgtcgttatatagttgaattgaatgtatctgctttgtcacagtgactggtattgtggtgttgcaaattgcggttgtttgtatgaaagtctaaaattgattttgaagagaaagggattatgcttagatattttattataaaatcaaagaaacttttcagctatggnnnnnnnnnnnnnnnnnnnnnnnnn

SEQ ID NO: 27016 - DNA, 851 bp, Glycine max
  Clone ID: TF_GmC535_2
cggccgctcgaggcggcgggccgcccttgcgtgtcacctttttcaccttccccctttgtttctcaacatcattctcctcattcccctacctacccccaattttcccttctgtatttctctttttcaattctcgatttcccttctcccttttgtgtcttcataatccagatcctctcttcgatctagggtttctggcttaattaacaatcaaatgtttaaggaagaatttctatgacgattcgcaaccccatgcgacgaatccgtctcctccactccttctccgtcgtcttcctctactggttctacgttttctcatgaactaactccctctcaatcccctaccctaattcctccaatttccccattttttttctaattaatcagatttgcaaaatcctaatttctctatcctaacaaaaaccccaaattcaaacaaatccaatggcttcgattccgcgtccggcgagttcgggatcttcggagggaggaggagatccggctgcgatggacgagagaaagaggaagcggatggagtcgaaccgcgagtccgcacggcgatcgcggatgaagaagcagaagctgctcgaagacctatccgacgtagcgagtcgccttcaaggcgagaacgtgcgcttagcgcagagcataaaggcgaaggaggaagcgtacgttgagatcgaagccgcgaacgacatcctcagagcacagaccatggaactcgccgaccggctaaggcttctgaactccattctcgagatcgccgatgaggtcgacggcggtggatgatccttcgagattccgcagattccagaccctctcttcatgcactggcagatcccccaccctatgat

SEQ ID NO: 27017 - DNA, 767 bp, Glycine max
  Clone ID: TF_GmC6275_5
cggacgcgtgggcggacgcgtgggcggacgcgtgggcggacgcgtgggttctgaaccaacacaatgatggaatggaagggtcttgcgttcttctgcggtttgatagatagtcagccatgttggcatgaagatttgagcgggaaaataataagacaacatacataacgttttctcaaagtggtttttttattttattttttttatcataagacggcagtttgcctgcactgatcagttcttagagcatgaattcagcatccccgcagtttgtttcctcaagaaggatgagtgtgtacgatccgatccaccagattagtatgtggggagaaggcttcaaaagtaatggaaatttaagtgcagccatgcctctaattgatgagacagacatgaagtttgatagtcagtcagaggatgcttctcatggtatactgggagagcctaataagtatgaccaagaagctaacaaacctactgataagatacaaagacgtcttgcacaaaatcgagaggctgctcgtaagagtcggttgaggaaaaaggcctatgtgcagcagttagaatcaagtcgtttgaagttgatgcagttggagcaagagcttgaacgtgcaagacagcagggaatttatataggcggtgggttggattctaatcatctgggttttgctggatcagtaaattcaggaattacaacctttgagatggagtatggacattgggtgaatgagcaaatagacaatcacagaactgaggaatgctttaatgctcat

SEQ ID NO: 27018 - DNA, 2194 bp, Glycine max
  Clone ID: TF_GmC853_1
gcagtcgtgatttatattttgaaaattaaggagccagtgaaagtactgcacaaaatagttcatctcattattatttctatgaattctacatattcagaagccgagtcccatggtttaatacatttgtatagacaggttctctagacttatgcgagtcgattttcttatttgcatagatatggtttccaggataatgctctgctttttctccaccgctgtcttactgtgtgtcgagttgcccttgatcgtgcaaggcataaagttttaagcattacgcagagttattgattgctatgggtgattggtgagtggaagattagtttgctgagtctgtggaaggtgttgagcaaagaaaaagttctatctctggtggtccagttctcagaccaccaaaccagaaacatggtataccaccctctcaccctaatatcaatatttcaccttcagcaactccttgttcccgatattctcagcgattgcgttctccgggttcctcccattcgaggtctttgtctcaatctcccattttctcgttggattcattgcccccattgagtccttcccctgctgctgttacctccatgtttgactcaatctcaacaactgatatgtctgtggaggaaagtaatgtttcctctcaggtgcccctcaatggagggcatgcccttcttcctcctaggaagggacacaggcgctctagtagtgattcccctttgggaatctctggttttatgcagtcttctccagttccctccggaggagagagctcggggttcgagaagccgattcagttggtcttgaaggcgtcctttagggacagcctggatgggggtcatgctaatgagcctgttaatgggaggaaggaggaggctgcggatgatttgttcagggaatacatgaatttggacaactttgataatctgaactttcctggcatggaagataaggacttggatagcaggaccagtggttccaagacagttgagagcagcgataatgaagttgagagtcatgtcaatgggaaggcgagtggggctcagggggcaagttcaagctgctcggaggaaaggagggaaggagtcaagaggagttcaaatggggaggttgcaccgggttcccggcatcggaggagtttttcgttggatagttccatagggaactttaacattgaagatggattgcctaagcttcctccttcgaaaaatcaaatgggtcagcactcacctagcaattcgatggacggcaaaatgtcagaaacctccacggagtttggaaatggcgaatttagtgcagaggaggtaaagaaaataatggaaagtgataaactagctgaaattgcttcgactgatcccaaacgtgcaaaaaggattttggctaatcgtcaatcagctgctcgttcaaaggagaggaagatgcgatacattgctgaattggaacacaaagtgcaaactcttcagacagaaacaaccacattgtctactcagtttaccaaattacagagggataactctgaccttaaaagtgagaacaacgagtgcaaattaaggcttcaagccatggaacaacagtctctattgaaagatgctctgaacgagactttggatgctgaagtccggcgtttgaggcgtgctgttgcagaacttggcggtgaatccctcacaagttgcatggctcgacagcttgctattaaccaacaaatgttcgagttacagcatcagcagcccagccaacagagacattttctactgcaaaatcaccatactcaggaagagatagagtctcgatcacagcagattcaaggcaatgaattgcatccccaggcacagattcagtcacagcagattcaacgcaatgaattgcatccccagccttaaattgcagagaaatatgttgcctattaatggtgccaaatagtggaagcaaaatacttttggacgtggagctggtgaggtataagtataatctcaatcgtacataagcagtgatctagcattagtttgcttgaagtttcataagatcggttcatcatctttatttaatttattattttgactgttttacctgcatacaaactcggactatcctattcatgtagtaaaccttattgtcatgaatacaacccacctttctctattgagaggggtcatgttgttgcataatctatgttactctacaaaaaaaaaaaaaaaataaa

SEQ ID NO: 27019 - DNA, 1803 bp, Glycine max
  Clone ID: TF_GmC609_7
aaacaaaacacacttacataaaaaatcatccttatctatgccacttccacttggacttccacctcacccactttctctgcgccatggaaacagtacgttgtctggcatgtgtacttgttcaaggtgacatatgacctaaacaattattagaacttaatctgatcacaaggcagtttttttgagctgatctggatgggaaccggtgaagaaagcacagctaaagttcctaaaccatcttctacttcttcaattcagataccactggcaccttcatatcctgattggtcaagctcgatgcaggcttactatgctcctggagccactccacctgcattttttgcctcaaatattgcttctccaactccccattcttatatgtggggaagccagcaccctctaattccaccatatagtactcctgttccatatccagctatatatcctcctgggaatgtctatgctcatcctagcatggcaatgaccctgagcaccacacagaatggtacagagtttgtaggaaagggttctgatggaaaagatcgggtttctgccaaaagttcaaaggctgtgtctgcaaacaatggttccaaagctggaaacaatggaaaggcaagctcaggtcccagaaatgatggcacctcaacaagtgctgaaagtgggtcagagggatcctcggatgctagtgatgagaatactaaccaacaggaatcggctacaaacaagaaagggagttttgaccaaatgcttgttgatggtgctaatgcacggaacaattctgtgagcatcattcctcaacctggaaatcccgctgtgtcaatgtctccaactagtcttaatattggaatgaacttgtggaatgcatctcctgctggtgacgaagctgcaaaaatgagacagaatcagtcttcaggagctgttactcctccaaccataatgggacgtgaagtcgcgctgggtgaacactggatacaagatgaacgtgaactaaagaaacagaaaaggaaacagtctaatagggagtctgctaggagatcaagactacgcaagcaggctgagtgtgaagagttacaaaagagggtggagtctctgggaagtgagaatcaaactctcagagaagagcttcagagagtatctgaagaatgcaaaaaacttacatctgaaaatgattccattcaaggaagagttagaacaattgtttggaccagaagcagttgctaatcttgaataaatcaacttcttattatcatgccaagcatcgggcggaaaatgtccaactcctaggaggaggatgatttgcagctgaaatttttatcaatggcgaaaatgaacataggatataatttttttcccttggtttactatttacaccattaacccttaattgccaccccccttatgttttgcccatttagtattgtaaaacaaatcatagcaaaatattattttcaacactttttttggacagatttttttttatgtaggtcatagtaaataaccttgacttacattatttattgagacttacgtgcaattcagtgataataaatattgtatcaaagagagtgttccagtcacaatgtaactccagaagttgatcttgaagctaaagtaaggctggaccaaggattgtgtgccttcttcagatgtcacggtgcttttgaggaagggtaatatccagaagggtccagattgtgttcaaagaaatgacatatttttagtatttgcttgtgccgatgaatagataattttatgctaattgggcacttctattcggtgttcagtagtttcacattcactttcaaa

SEQ ID NO: 27020 - DNA, 3281 bp, Glycine max
  Clone ID: TF_GmC1648_1
tcagtcaaaaccgaaactagtagcctgcctcttgtcagcattttcccgaactgaaacctcagtgcgctgcatattcggacgagggcctcctcataaatcctccagagtctgggcgattaacccttggagctggaccagatgatcttcccacgcgtccgcccacgcgtccgtacggctgcgagaagacgacagaaggggaagacaatttttttttcccttgtttctttgttgatcgttttggatttgaaaaagactttcttattttcttttcatcaagttgctggcatggctttttggttctataaattctccggttgaagcatacagagtccccttccactttcttccttctttctcatcactcttttaagatatttttgttacatagtttatggtctacgagagccctgcctctgtagagtgtagaccaacctccttttctttgctttgagctcgctcgatcttcttccatttcatgtcttgttttattttattttatttatttaagccttttaaatgcccaacattttgttcttgatgtttgagattgatgtattcaattctgagtgaaatcttcttttccgggtgtatgatcaattccactgtgagacgcaggacccatttagttcaatccttctctgttgctttcctttactggctctactacgtttcatgatttctaaccccctctccaattattaattaaataaaaccctattatatatctcttacatatttttatctgcaaaaaaaaataatctttttttgttcttgttcttgtttagtgtctgggtcctgcgaactccaagtacaagaagggtcaatttttgtttttctgttaacttttgattactatggcttgttcaagtggaacatcttcaggggcgacgtcgtcgatgcttcaaaataactcaggttcggaggaggagctgcaggcactgatggagcagaggaagaggaagagaatgatatcgaaccgcgaatcggctaggcgatctcgaatgaggaagcagaagcacttggatgatctagcatcgcaggtgactcagctcaggaacgagaaccaccagattctcacatcggtgaacctcactacccagaagtacttggcggtcttgtttcttttaagatatttttggtcacatagtttatggtctgcctctgcgtagtgcttcaacagccccctgctcgctcgatcatcttgattattttttaagccttttaaatgcccaacatcttgttcttgatgtttgagattgatgtatccaattcttagtgaaatcttcttttccgggtgtatgatcaattctactgtgagacgacgcaggacccatttagttcaatccttctccgttgcttttctttactggctctactacgtttcatgatttctaattattattaattaaataaaagcctattatatctcttcttacatatttttatctgggtctgggtcctgcgtagtccatttttgtttttgttaagtattggttactactatgactatggcttgttcaagtggaacatcttcagggacgtcgtcggagctgcagggtatgatggatcagaggaagaggaagagaatgatatcgaaccgcgaatcggcaaggcgatctcgaatgaggaagcagaagcacttggatgatctagcatcgcagctgactcagctcaggagccagaatcagcagcttctcacgtctgtgaacctcaccagccacaagtacttggcggtggaggctgagaactctgttttgagagcacaagtgaacgagctcagccacaggttggactctctcaaccagatcatccacttgttgaatttctttgagcccgatgctagtactagtaccttcttcaacaaccctttcaatttcagcctcccgattatggcttcagcagacatgttgcagtactgagacagagagaagagaggagggggtgtgatgtttgttagggaattcatatcatagagcgggtaagcctgcttgttgggtgccgcttctgtagtcttccagatcaccctattattgttgcaactgtacttccctatattattagacttgtattatttgtcatatgagaccaagtcatataatttgcatgtaattttagtgtcaatgtaaaagagtttatgaaaatggggtttgaatttttaaccgtaaagacatatctctttcccctgccaccaaattgtgtttttgactccataaaattctcttttgaaactggattatatgatgcatctctagtgacaggctgaacttctgattcttttgcactggatgaaatattgcttctctttccaactacattttgattcccccgcttatccaattggaaactagtagaagttctactgctattattatgaacatgggaagactcaattcgaccctgctttattccagcaatattttctgcattctcacttggcagtgaaccttgtgataagtttcctcgagcccctggttggctgtcaacagaatgatgcctgatctcatttttcataaaggaatcagaagtttctggagcagtttgaactggcatttgacctccagggttatgactgtggatgcagatgcagtggcatctgtatagaaccaatctgtatggcaggtacgggtgatggtatcaaagatggaccagaaaacagaccaaattgaagcttaatgggtacctcagcttgacttggagcattagaagatgagtagtgaggggcaacagtaactggactcggtgttgtactatgttgggtcaacaggccattagatgcttcctcattaactaaactctcagacaccacaggggaaagagaattactaggctgaatgaccaaatcttgagcaggcttcctcgagtcctggaagccagtggaagtgctgttaagattcacttgagaggtatcattaacaggttggagggccttgccattatcacgtgcattatcataagatacacattcttctgaagcctgtggtgccataaatgtcgtttcttcatctttcaatgtcctttcaaactcttcattaggcatcccaacctgtacaccctcatcaaatcctaatacaaggttatccatcaagtggggcaatcctttctcctgcaaatgcatatcttcaaaatcttggttgagttgagcatgatcatctccttcatgcacttcatcttcttcctgataatcttcatcttcatcatattcctcttgttcctggaactgctcattattctcagtagtccattcatcatcatccccactagagacaggacatggagtaact

SEQ ID NO: 27021 - DNA, 2286 bp, Glycine max
  Clone ID: TF_GmC217_2
aaaatcgtgaggctgccaggaaaagccgactgaggaaaaaggcatatgtgcaacaattagagagcagtaggttgaaactgacccaacttgagcaggagctccagcgatctcgccagcagggaatatttatttcaagtactggagatcaggcacagtcaatgagtggaaatggtacttaaacattgtgtacctccgattgtatgttttgagggttaaacatattggagtagttttaggggatgttttgaggctgataataataatccatagtcagtgcaaaaacgattgacacttggtttgacattcaattaacaatatgtgcatcccgaaattagtgtatatgtaaattttgcattggcaatttggcagaaacctgataaaggcacctctattgagttgctgtccctaaccaacatggaatttctacatgctaaaatatttatggttgatttaagtgcttcatctagttctctgatattattctttttcgtgaaacaaaccaaagttcctgtaaagatatagtaccatctctaagttggattccatttacgttggttcatatttttcattgacaaacattggttatttggttgcatcttgcatcatttcagttgcactgaagtactgcattcttctgatacaccatagagcttggtgttatttgctgtgattgattgcatcatacgtgatgcaagcctattatgtgatttttgaactctgacaacatggtactcagtagcatggatggtcatgggcagggttttgcaaaagtttgtgctctgtttcaaatcctaaatcaatttaataatcttgttgtacaggcgctatggcatttgatgtagagtacgcacgatggttagaagagcataatagacaaaccaatgagctaagggctgcaataaattctcatgctggagatattgaacttcgaaccattgttgacaatttcatgacgcagtttgatgatatcttcagactgaaaggtattgcagcaaaagctgatgttttccacattctgtcaggaatgtggaagactccagctgagaggtgtttcatgtggattggaggctttcggtcatccgaactcctcccaagggagaagtttctcttatctatgttttgtaaatgttttttctggtttgaaaattgcttcactaatatctggttgaacattgattgcattccatgcttcccaacaatataaagtgagaaaagcaacaaaagaatcaaaatagataggacctttttttcttgacattattgaaacctaaaattcaagatatagtttcggaactttcccaattgaagaaatatcagttttaaccgttttgtgtttacgataattgattctgttgttgagttttaaagttcatagactttttatcacgttatgctgtctaagattggattgaaactgttgcagcttcttctaagtcagttggagcctttagccgagcaacaattgatgggcatctacaacttgcagcaatcatcccagcagactgaagatgctctttcccaagggatggatgcattgcagcaatcactatctgagacattggctaatggttcgcccagctcatcaggctgcctcgggaaatgtggcaaattacatggggcaaatggctatggccatgggaaagcttggtacacttgaggggtttcttcaccaggctgacaatctgcggcagcagacattacaacaaatgcttcgaatattaacgaccaggcaatcggctcgtgctcttcttgccatcagtgattatttctcacggctgagagcgctgagttctttgtggcttgccaggccaagggagtgaagcatttcacagccccattagtggacttctttcatgcctgacccccttaaacaccgatgatcattgaatcttgtgctctgaatgagttcaatggaagctggtgtcttttgacaatgaattcctcttgaagcctagttgtggtgctataaacattaaatgctacgatttttctactctgccaactgctgctgtggtgcaacacttttctttaagcttttgtggttttaaaatagtctcaataatttgattatataggtgtatgatagatagaagttgttgaaggggaaaaatgtagaaatagtgtatctgtatttttaggttatagctgttcattgtatttcagaaatcagcttttatttgagggggtatttacctctggttggttgcatatatggctccatggtgtatttatgtatggatgtatatatacgttctctcttggtatattagaaagacattaccaact

SEQ ID NO: 27022 - DNA, 1215 bp, Glycine max
  Clone ID: TF_GmC114277_1
acatgaccttaataaacacgtatttacaacttctcaatgctggaaaaatgcgagcagccggaagaggatgaggagtttaagggtgttttgctagaattaatgctaatgtttgatgactgacttagtaagttcttgaggacgattagcccaaagtttgctcaaagcccgcaggcgttgaaaatattcacccaaatcaagcagaaatcgaccagtctgacgtgtggtaagtattcgatacatttgcctcaatgtttcttgtcgtagatgatcagcctggttcacaaagctcacaagtgcttctagtctctccattgcagtatccatttggggaatgtgagttccttcaactagttgtcctggtcctacagagtcagcgagcatttgctgaagtttttccataccttgtgaaagagcatcttctgcttgctggcatgatttttcaaggccataagcatcaaaccgttgttgctctgtcaaaggttcacttagagggaccagaacctttagaagttcagaggggcgaaatcctccaatccacaagaaaaatcgttcagctgttgtcttccacataccagacataacatagaaaacatctgcttttgctgcagcagatttcatgctaaagagtttggtgtagtggttcattatgccctgtacaagtgtcccgagctgtatgtcacctatatgagaacttaaagcagttctcagttctaaaatttgtctattttgctcctccagccagtttccatactccatagagccagcaaaacccaaattattagaacccaatccgtcgccaatatacaatccctgcagttttgttgcctgttgttttgcatgatctacctcttgctctagctgcacgagcttcaaacgacatgattctaactgctgcacgtatgcctttttcctcaaacgactcttgcgagcggcctctcgattttgtgcaagacgtctttgtgtcttatcagtaagcctgttggcatcttggtcgtacttcacagatgttccaaatattccatgagaagcatcctctgattgcacatgaacctgattatctaacttcatctccacctccccaattatggatgtggatacagttaaattattagtatcattacttttgaaagtttcttcccacatgctaatttggtggataggatcatatacacccattcttcttgaggaaacaaactgtgaggatgtagcatccat

SEQ ID NO: 27023 - DNA, 358 bp, Glycine max
  Clone ID: TF_GmC322_1
gtcactcttctgtggccggtgtgaatgcccgcaagcgtgacaagcccctgccccctatcgttatcgatgaccctagcgacatcgtcgccatgaagcgtgctcgtaacactcttgcagcacgaaagtctcgtgagcgaaaggctgctaagttggaagaacttgaggataagattgctaagctggaagctgagcgcgatcactggaagaggatcgctcttgcgcaaaccggcatgcaataatggattaaaagtggaatttctttcctttgccaacacgggatttcgttggtttgttactgtgttttaatcaggtttcattgattcttatagtcaatcagtcaattaaattgcttctcttg

SEQ ID NO: 27024 - DNA, 509 bp, Glycine max
  Clone ID: TF_jC-gmst024169c09b1
ccacgcgtccgggcgcgacatccagagcgccggcggcggcggcggcggccgtcagccctccatgggcgagatgacgctggaggacttcctctcccgcgccggcgtcgccgtcgatgccgccccgcattggatgcaccagtacccgcagcagcagcagcagtacgcgctgccgcggcccctgccgcttcccggcccggctctggacgccgcgtaccacggcgaccggcccggtgttttcctctcgcactcgcaggtggccgggcggaagcgcgccgccacggcggccgtggccggggacggcgtcgtggagaggacggtggagcggcggcagaagcgcatgatcaagaaccgcgagtccgcggcgaggtcccgggccaggaagcaggcgtacaccaacgagctggagaacaaggtggcccggctggaggaggagaacaagcgtctcattgagctcaaggtgctgaaaccactggagccactggagccgccaccggcggagcagaacaaga

SEQ ID NO: 27025 - DNA, 783 bp, Glycine max
  Clone ID: TF_GmC137634_1
ggcccctggtggtggggtccagagtttgagtgtgcaaggtggagggattggtggtatggttggtttggcacctggttctgttcatgtagctactggctctcctgctgctaaccagctgtcctccggtgataggattgggaagagcaatggtgatacctcgtccgtgtccccggttccttatgtctttaatggtggtctgcgagggaggaagagcgggggagctgtcgagaaggtgattgagaggaggcagagaaggatgataaagaatagagagtcagctgccaggtcgcgggctcgcaaacaggcttataccatggaattagaagcagaagttgcaaagttaaaagaggagaacgaagaacttcagaaaaaacaggcagaaattatggaaattcagaaaaatcaagttaaggaaatgatgaatttgcaacgagaagtgaagagaagacgcctaagacgaacacaaactggtccatggtagagtgaacactcgactacgattgaagcgttaaaatatatgtacataattataaaaacgtatccagttgtagattgaggctgtggtagtttttagattagcacttgaaaactttcacgtcttacttctcttttggacacatgttagggagggtatcacagtaccatgagaatatgtttcagcacacgtccaatttcttgccatcattggttagacaatcttcttttgcagtatagcactttcgctgaatttgattcggtgagattgtgtccaaaataagcactatattaacggtagtttagatc

SEQ ID NO: 27026 - DNA, 1756 bp, Glycine max
  Clone ID: TF_GmC1880_1
tgaaacggcaaagcaaaggtcgcagctgctgctgaatctggtttaacgcaacgcaacattctccatcaaatcaaatcaaagttccagatttggtggcaatggataatagggacaacaaatcgcctcctcctctcccaccttcttcttcccgttacgtgaaatcggaacaacaagcttcattatcagcatcgtcgtcgttcagccacgacgacataagcggaatgccggagaatccaccgaagaaccagagggcacaggcgcgcccattcggagattataaccctacccgacgacctcaccttcgacgttgatctccccgatgacaacgacttgctttccatctaccttcaattcgatcaactcgattcctctccacttcctcttcctcctcccggctcgagcaacagcattgctaataataataataataataataataagaataataataataataatgaaaggcctactagggttcgacaccaacacagcctctccatggatggctccatccacccggatatgctgctctccgctaccgctgccgctgccgatgatgtctccggtggtggcatcgacaccaaaaaggctatgtctgctgacaagcttgctgagcttgccttagttgatcccaagcgggctaaaaggatatgggcaaatagacagtctgctgcaagatcaaaagaaaggaagatgcgttacatttccgagcttgaaaggaaagtgcagacattgcaaactgaagcaacttccttgtctgcacaattgactctcttgcagagagatacaactggaatgactgctgagaacagtgagttgaagttgcggttgcaaaccatggagcaacaggtccacttgcaagatgcattaaatgatgcattaaaagaagaaattcagcatttgaaagcactgactggacaagttatgccaaatggaggaccggtaaattttgcttcatttggtggggggcaacaattctatcccaacaatcaggctatgcacactcttttagctgcacaaaagtttcaacaactccaaattcattcccaaaagcagcatcaacttcagcagcaacagcaatttcagcaacaacagcaatttcagcagctgcaacagctgcaactgcagcagcaacaacaactgcaactgcagcagcagcaacaacagcagcagcagcaacaacagcagcagcagcagcagcagcagcagcagcagcaactgcaactgcagcagcagcagcagcaacaggaacagtaatatcaacaaatgggggacatgaatagggaggggacacacctcatcaaatgtacttcagcggcagaggattttagagactacaaattgctttctcttcatcactttacccttgtgtttagagtttgtttaggtcacagtcattatatttcttattcatgaaacggtacagatagtcctagttagagattgagaattatgcattggatcttggctatgtaaaattctttggcacctttggttatgaatatgcggggcggatttatgtttgttaagtcttacaattgcttttgcctatggctatgcctgcataagtggtctgtttagattaaaaatcacgttgtctcgcaatttccaccggaattgccatatgtactcctaaactaggataccaacgaaacacctggggtgtttagtagagggggtttccttttaagtttctcttaggttgttaatgttaaatttctatatttgctatgacaattttaaaaattattctcag

SEQ ID NO: 27027 - DNA, 885 bp, Glycine max
  Clone ID: TF_GmC299_5
ctcgagccgaatcggctcgagacgacagaaggggactgattataatattaaattttgaaagtgaaataatgcgtgacttacactaatattttcataaactgtgcacaaacttttgatgtagacttgaattcttttatgtcaaactcgtatgcaatttcatcattactattatgaagtgctttctaatagggagtcagccagacgctcaagaaggagaaagcaggctcatttaactgagctggagacacaggtctcccaattacgaagtgaaaattcttcgttgttaaagcgattcacggatgtgagccagaaatacaataatgctgcagttgacaacagagtactgaaagctgatgttgaaacattaagaacaaaggtgaagatggctgaagagacagtgaaaagaattactgggttgaacccaatgcttcatgccataactgagatgtcatcaatggcaatgccatcgtttgatgaaagtccttctgagacatcagctgatgctgctgtttctgtgcaagaagacccaaatcatcaccgttgtcaacccacttctaataatgggttgggaggcatttcttcaattgaaactgtgcagcagaatgttgcagcagtggtaggtggcaacaaaacggggagaacaacttccctgcatagagtggctagcttggaacatcttcagaagaggattcgtggtggtgcagattcacgtggacctccttctaatggagaacaataacatagtagttaaatttacattatgctttttatgaggaaactattctaaaactcttgtttctgctagttgtaagtaagagcaaattcttattgatgtatgtgaatcttattgagcatattctgctggataatcctatttttcttttt

SEQ ID NO: 27028 - DNA, 2133 bp, Glycine max
  unsure (1)..(2133): unsure at all n locations
  Clone ID: TF_GmC1081_2
ccacgcgtccgcggacgcgtgggtttcaggattttggccaaccggcaatcggctgcgcgatccaaagagcggaagatgcggtacatttcggagctagaacacaaggttcagactctacagacagaagccaccacactatctgcacagcttactctgttacagagagattcggctggactcactaaccagaatagtgagttgaagtttcgccttcaatccatggaacaacaagcaaagcttcgagatggtatttctgtcctttaattcatagtctatctatcagattttctctccattttgttttattgatttgtggctgaaatctgccaggcatcactagttaattattcacctatagcattggttgaacttgtagttgcaatgttgcatagattatatatatatatatatatatatatatatatatatatatatatatatatatatatatactatttatcagngaatgttaatcgctagtttgttaagtttttggtagcaaatgtgattaaacctgcaaccggtaggcaaccacatttgaactcatgacaatcagggcatttcacagcaagaaataaatttcaacaggaaggagacagtggaagtctcatcatgttaaaaggtgacattggtgagaaaccgcgaccaattgggataatatggggaggaactgctaacagaggccgccttaagttaaaagttgggcaacctcctgagaattggactagtggggtggatctagggcgtcttctcaatctacttgaacttgatctgataacgactgatgaaggacttcaagtggcagtgcaagaacaaagagctgtgtcagccacagtaattggctctacagtcggtgattcctcacctcctgatggtgtacttccaaaagataaagctgaagacaagtatgagccacttggtcttcaaattcagtccattcccttaggagttgtacctagtagccaagacatgaaaccatcaataatggagactgaatttaaattagaagatggaatcaaggttggtcccagtatcgaacaccagttcattccgagcttcattgggcggtctccattgcataaaaacagcatacaggacagaactgcaacagagaacttgtcttcattgaggaataactgtgatgaagatttgtgtgtttcactgcagctgggtgacaatgaagcaaagagaaggcgttctgaagcctcaactagtactgaggaacctcagtgaaacagattatttgcataagctggaaaaactgacttataagtctaatcacctcagaatgtgttgtttatggccactgtggtactgtgtttatgcttagcagctctgacagtgtgcaatgatgtgattggagttcacattgtcattgaagttcaagtaaatttgtgaccttggagagccatttagttcctaaaatgcttgaatttctgaactgaattatgtcacttttcaattaacatgggcatacattgccaattaactgttgctcacatcacatggccctgaccatggtttatatgctgtgataaactgatgggagttggatttttatcatgtccttttgcttcccccatcctaggtctgcaaaaccttccacataaataaaaagagtagtgctagcaattttttaatgccacagctgaactaagtggcgattcgcatggttctggctgtttgattcctcaacattctgtcaatcctctgatgttccagcaacagcagcagcctcctactgcatcccaacaaaacattcatcttcaacagcagcaacagcagcagcatcagaatggtaatgccaactcaaattccgacttaaaacaatagtttgggaaggagttcctgcagctgcatggttggctcactgcagtcagtttcgcatatttacaaaaaggttttccttagttgttatggtctcaagtttgatttgcattattacctgtccagctcagacagaaagtccatatacaagttctaattcctgtcttttatctaaattattatagagcatatttaatttcagtatatatattaaattgtaagcattatttggacatgatttgttttatgatggcattttagagaaactgttcaatctttctttttgtaaagaatgaccattctgtt

SEQ ID NO: 27029 - DNA, 671 bp, Glycine max
  Clone ID: TF_GmC749653_1
cagattctcaacataccttacaatcagacccttaaaccatcatcttgaaaaatagttctaaatttcccaccatggttcctagtgagatcagaggagtccactatctagcacctgaaaatccattcctagttccaccaaactttagccttctgcaaagtgacatccctaatctccatcttaacaccctcctaagcaactttccaaactgccacttccctccttcaggccatgaatttgttgttcctccctcttcatgcctcagcagcaactcaacctctgatgaagctgatgaaatccagttcaacatcatcgacgaaaggaagcaccggagaatgatatcgaaccgagaatccgctcgcaggtcaaggatgaggaagcagaagcacctggatgagctgtggtcacaggttgttaggctcagaactgagaaccacaaccttattgacaaactcaaccatgtgtctgaatcccatgacagagtcctccaagagaatgcacgcctcaaggaagaagcttccgctcttcgccaaatgctagcagacatgcaaattggaaccgcttttgcttgcaccatggaagatttggaggaccttccatgcaacacttctcaactcaaacctgatcccttaaaccaatcaatcactcctgcagacatgattcatgaatgaggc

SEQ ID NO: 27030 - DNA, 2796 bp, Glycine max
  unsure (1)..(2796): unsure at all n locations
  Clone ID: TF_GmC1716_1
ctctcagaatataaatattanagtgtcattcctgtggtgcattgtatcacctattctgtgttttgtgagttgttatcaatatgtacccctaatcaatgtcagactgaaattatgcactgaattgctactggatttggcaatcagttggggtaatatctaggatgagatgtgctttgtccctggattgctcaatctgtaaaaaaaacattgattcgatggtataaaactattaattttatccctttcaaattggttcacccagcaagttttcaagtgtgtttggtctctagtgtagtgaatagtgactgtattataatttaaaatgtctactatatcttctatttaagtcagtatggacactggctttacgtccgggctctttccctcgttttttaagagagagaaagtagagagagagacaaacacaactcccacaattgctttgccaaaccttaatttcagggcacttccaagctaccaggaccagttgttgttgttcttccctttttgtgttttttgattcagcgatttttggttttcgttttttttttttcacaaggagaaagttcgatgtctttaagttgaataacttgttgggacatatttgactcggtgctttttcttttggtgcttgcctcatgggaaacagtgaggaagagaaatctgttaaaactggaagcccttcttcttcacctgcaacaactgagcagaccaaccaacctaatattcatgtctatcctgattgggctgccatgcagtattatgggccaagagtcaacattccaccatacttcaactcagctgtggcttctggtcatgctccacacccatacatgtggggaccaccacagcctatgatgcaaccttatgggccaccttatgcagcattttattcgcatggaggggtttatactcaccctgcagttgctattgggccacactcacatggtcaaggagttccatcttcacctgctgctgggactccttcaagcgtagaatcaccaaccaaattatctggaaatactgatcagggtttaatgaagaaattgaaagggtttgatgggcttgcaatgtcaataggcaattgcaatgctgagagtgctgagcgtggagctgaaaacaggcagtcacagagtgtggatactgagggttacagcgacggaagtgatggcaacactgcaggggctaatcaaacaaaaaggaaaagaagccgagagggaacaccgaccactgatgcagaagggaaaactgagctacaaaatggtccggcttccaaagagactgcatcttccaaaaagattgtgtcagctactccagctagtgttgccggaacattagttggacctgtagtttcttcaggtatggccacaacactggaagctgaggaacccttcgactgttcattctaaggcaaattccacaagtgccccacaaccttgtgcagttgtgcgtaatgaaacttggttacagaatgagcgtgagctgaaacgggagagggagaaaacaatctaaccgtgaatctgctagaaggtccaggctgaggaagcaggccgagactgaagaattggcacgaaaagttgagatgttaactgctgagaatgtgtctctgaagtcagaaataactcgactgactgaaggttctgagcagatgaggatggaaaattctgcattgagggaaaaactgataaatactcaactgggacaaagggaagagataactttgagcagcattgacagcaagagggctgcacctgtaagtacagaaaacttgttatcaagagttaacaattccggttctaatgatagaactgcagagaatgagaatgatatctgcgagaacaaaccaaattctggtgcaaagctgcatcaactactggatacaaatcctagagctaatgctgtagcagctggttgaaaccagtaactgcactggctaattatgtaattttggcatattacaagcccaaaattacagcttggtgctaacagttttcagagggatggatcagctgaattttacaatctaattccatctatatagaccagaactaattctttgcttgtgagtttcttagggcataaactctgtattttactagatttcacagaattgaatgacaactttaaaagtttgtaaattgaagagtattagggatttagtttagactttaagagaggcttgtcggccgctgtataattggttgtgtattaactatattggtgtgatctttctaatggtatcttagtcaaggcattctgacttttggttagttttggttttgtatactttaaagcaattcctcatgttgtggctgtggttgccttttaccatgtgtttgttaccacttagtgtgcatttggattgaattaattttagaaatgttaatctgaatgataaaaaatgtaaaatgaagagaactagagatttcagattggatggggtttgttgaaccgctacataattgcgtatgtattaacgattggtgtggactttcaaataaaaaaaaaagaaaaaaaaaaaaaaaaaaaaaaaaaaaacataatactagaaaaaaaaataaagactaacaaaatgctatacaataattcatattatcagtatatctggcaagaagttaatgttaaataactcgtacaacaatgacacaaatggaaaaagaagttttttgcgtatttgaatactgcttggaaataactaagaatcaactttttgaaaaataacaaattggccctaaccgaaaagccataaaaaaaaaatgggcaaccaaaatagaaaaatgagacaacaacctaaaa

SEQ ID NO: 27031 - DNA, 935 bp, Glycine max
  unsure (1)..(935): unsure at all n locations
  Clone ID: TF_GmC306390_1
cctttctccctcctcagctcctccacctctagtttcagaaaaacctcgtcactctgcccccatgctttctctccctccctccgaccccttctccaccttctccgccggcttcacgccgtgggaccacgatgaggattcccacgccctcttctcccccaaacccgtctcttccagctccggctctgacgacaaatccgaaccgaaccaacatgtatccgcctcctccacggcgatggaggagcggaaacggcgccgcatgatatcgaaccgggaatcggcccgcaggtccaggatgcggaaacagagacacctggagaaccttcggaaccagttgaacaagtgcagggtcgaaaaccgggaactgagtaaccggttgcagttcgtcctgcaccacttgaaccgcctccgaaccgaaaacgaatggttacactccgagcgaaccttgctccgccaaaaagtcgccaacttaacacaaattttgattttccaacaattccaaactttctcccctgcatggacatgcaccaacaacaacacctcgctcatgacaattaatcaagttaattaaaccctatatatatatatagagagagagatttataataaggtcttggtaaaaaattccaagtggtctaagatgtcctatatgtaattattgttaaaagttagataaagtcttaaagagatggtaaagggtgggatttttgggaaaaatattaggcaaggttttggaaaatattagttcatctttttcaaaaccaaaaggattattgtatattgccgattataatatatctgtgtaaggtattagttgggaaaatttttatttcattaaaaccaaaccatnggggtttttntntntnaccgaatataatnttttgttttaaaaaatacttttctttttttgtttccnaaaaaaaaaaaaaaaaaantcg

SEQ ID NO: 27032 - DNA, 678 bp, Glycine max
  Clone ID: TF_GmC535_3
tacggctgcgagaagacgacagaaggggaagcggatggagtcgaaccgcgagtccgcacggcgatcgcggatgaagaagcagaagctgctcgaagacctatccgacgtagcgagtcgccttcaaggcgagaacgtgcgcttagcgcagagcataaaggcgaaggaggaagcgtacgttgagatcgaagccgcgaacgacatcctcagagcacagaccatggaactcgccgaccggttaaggtttctgaactccattctcgagatcgccgatgaggtcggcggcggtggtgaatccttcgagattccgcagattccagaccctctcttcatgccctggcagatcccccaccctatgatggcgtcacctgacatgctcctccatggaaatcaaggcctgtttgcttgatagtacttcaattaggctaggtttattgttgatgttccctagtgttttggtgaataaagaaagggaatggtgttagatgtttatgagttatatcgtgtgttggtgtgctgttttttttttttaagatctgtgtttatgttttgtgtgtgcactatcgtcgttatatagttgaattgaatgtatctgctttgtcgtagtgactggcattgtgtatcgatataaaattatgtttctgtttaaaattacaaattggagtaagccgaattcagaat

SEQ ID NO: 27033 - DNA, 881 bp, Glycine max
  Clone ID: TF_GmC2191_3
ggctcgagcggcaaataaaccagagggcagagagaatcgtaccaaaggagccacgagtggttcctctgagccgggtgatgaggatgatgaagcaggggcttgtgaacagagcacaaatccagctgatatgaagcgccttagaaggaaggtttctaatcgcgactctgctagaaggtcaagaagaagaaagcaagcgcaattgtctgagcttgagttgcaggttgaaaaactcaaagtggaaaatgcaaccctatacaagcagttcacggatgctagtcaacattttcgtgaggctgatacgaataatcgagtgctaaaatcagatgtagaagctttgagagccaaggtgaagttagcggaggatatggtcactaggagctcttttactacgttaaactatcagcttcttcagacacaacaacatcaaatgagcacacccccgcaactgaacacgactaatcttcgccgcatggcgcatgtttcgccaaccatcaccgtccatggtaatgatgcctcatacaatggtgtaacagttggtgaacagaattcatcagcacttggaaacttggatatgactttcaacaacatcaacaatggagtcatgaacaatgctatgagttgtgggactatttggccacttgattagactctagctatgttatttgtcttgtctaatttgattagtagcctatgttaatgtcaagctgtgttatttgtcttcgcttgattcctctttaatgatgcctctgtttaaaatggtgtcttctttcgttgtatctagttttgtataaaaggacatgattgctttatccatttcccggaaggtaattgtaaaaagccccaaataaaaacttgccggatatatcatctaatagacagac

SEQ ID NO: 27034 - DNA, 1444 bp, Glycine max
  Clone ID: TF_GmC1471_2
ctctccctctttcctatcacactttctagatagctagcctgtaagatatatatatagatatttcatatatatcctatggtccgtgagtgcccttgttctgtaccaaccctttcttccacatgttgagtttcagcatcgtcctctcttgagtccccatatcaaatacccaccgaattcaaccccccatataacaaatctcctcccatcccatttttcagcaccaaagtttgaaacttttctcaattgggttgaggagagtttgactcaaatttttatttttctaacgaagcagtagctattagaagtgcaaaaattaaatgtccaacatcttcttgttgatgtttgagattcatgtatccgattctcagtgaaatcttcttttccgggtgtatgatcaattccactgttaggcgcaggacccatttagttcaatccttctcagttgctttcctctattggttgtactacgtttcatgatttctaaaccttccttagtctaataatcatctactactagttattattatcatcatcatatataataaaatctatctgcaatattatttttctgagtttgtgtctagttagtgtctgggtcctggtcctgccaattgtgtcaattaattgtattgaatcataaaagatggcttcctcaagtggaacatcttcagggtcatctctgcttcagaactctggttctgaggaggatttgcaggcggtgatggatcagagaaagaggaagagaatgatatcaaaccgcgaatctgcacggcgatctcgcatgaggaagcagaagcacttggacgatcttgtttcccaagtggctcagctcagaaaagagaaccaacaaatactcacaagcgtcaacatcaccacgcaacagtacctgagcgttgaggctgagaactcggtgcttagggctcaggtgggtgagcttagtcacaggttagagtctctgaatgagatcgttgacgtgttgaatgccaccactgtggcgggttttggagcagcagcaacatcgagcaccttcgttgagccaattaataataatagcttcttcaacccgttgaatatggggtatctgaaccaccctattatggcttctgcggatatattgcagtattgagatccatggtctctgagtctgagatttgatgaggatttcttcttcttcttctaggtttgagtctgttgagaaattgtaatcactaccatatggtgataaggaataataataatgaatgtgtatcgtaaaacggatgggattgttgggtgctggttctgtaaatgtggcatgggccattactgtaatttgtcaccctcctttcctatattattataataataatattgacctacttctctgtcttgatattctttttattttttgtttttttatgaataaatattaatttttattagaaagattatttgaagagatttt

SEQ ID NO: 27035 - DNA, 751 bp, Glycine max
  Clone ID: TF_GmC1471_4
cggctcgagcggctcgagcggctcgagttctaatagctactgcttcgttagaagtgcaaaaattaaatgtccaacatcttcttgttgatgtttgagattcatgtatccgattctcagtgaaatcttcttttccgggtgtatgatcaattccactgttaggcgcaggacccatttagttcaatccttctcagttgctttcctctattggttgtactacgtttcatgatttctaaaccttccttagtctaataatcatctactactagctattattattattattattattatcatcatcatcatatataataaaatctatctgcaatattatttttctgagtttgtgtctagttagtgtctgggtcctggtcctgccaattgtgtcaattaattgtattgaatcataaaagatggcttcctcaagtggaacatcttcagggtcatctctgcttcagaactctggttctgaggaggatttgcaggcggtgatggatcagagaaagaggaagagaatgatatcaaaccgcgaatctgcacggcgatctcgcatgaggaagcagaagcacttggacgatcttgtttcccaagtggctcagctcagaaaagagaaccaacaaatactcacaagcgtcaacatcaccacgcaacagtacctgagcgttgaggctgagaactcggtgcttagggctcaggtgggtgagcttagtcacaggttagagtctctgaatgaaatcgttgacgtgttgaatgc

SEQ ID NO: 27036 - DNA, 2109 bp, Glycine max
  Clone ID: TF_GmC609_2
ttggacttccacctcaccgttttcagccactttctttgcgccatggaaacaggtaatctgccagtttttccatatttgaagtaaggatattcatcttatgaccaagagtgtcaatctttcggattaagagttattgctttagttttatctagagtaaaggaccagctagtgagatgctatagatccttaattcaaatctcatcaaacctcactgcatggaaacagtacgttgtctggcatgtgtacttgttcaaggtgacatatgacctaaacaattattagaacttaatctgatcacaaggcagtttttttgagctgatctggatgggaaccggtgaagaaagcacagctaaagttcctaaaccatcttctacttcttcaattcagataccactggcaccttcatatcctgattggtcaagctcgatgcaggcttactatgctcctggagccactccacctgcattttttgcctcaaatattgcttctccaactccccattcttatatgtggggaagccagcaccctctaattccaccatatagtactcctgttccatatccagctatatatcctcctgggaatgtctatgctcatcctagcatggcaatgaccctgagcaccacacagaatggtacagagtttgtaggaaagggttctgatgaaaaagatcgggtttctgccaaaagttcaaaggctgtgtctgcaaacaatggttccaaagctggagacaatggaaaggcaagctcaggtcccagaaatgatggcacctcacaaagtgctgaaagtggttcagagggatcttcggatgctagtgatgagaatactgaccaacaggaatcagctacaaacaagaaagggagttttgaccaaatgcttgttgatggagccaatgcacggaagaattctgtgagcaccattcctcattcttcagtacctggaaatcccgctgtctcaatgtctccaactagtcttaatattggaatggacttgtgggacgcatctcctgctggtgccgaagctgcaaaaatgagacataatcagtcttctgcctcagaagctgttactcctccaaccataatgggacgtgaagtcccgcttggtgaacaatggatacaagacgatcgtgaactaaagaaacagaaaaggaaacagtctaatagggagtctgctaggaggtcaaggctacgcaagcaggctgagtgtgaagagttacaaaagagggtggagtctctgagaagtgagaatcgaactctcagagaagagcttcagagagtatctgaagaatgcaagaaacttacatctgaaaatgattccatcaaggttatacagtaaataaccttggcctacattatttatcgagacttcatgcaattcagtgataataaagattgtatcgaagagactgttccagtcacaatgtaactccagaagtaggtcttggaccaaggattgtgtgttgtgccttcttcagatatgacggtgcatatttctccaattcggggtttggtcaaaatcttgaaaaaatcgtaatcatgaatcatcccatgatcgtaagttgaggatagtgcttgccattgggtcgagcttctggaagggcattggcttggcatattcagaagccagatagtgttcaaagaaatcccatatttttagtatttacttgtgccgatgaatagatgattttatgctaattgggcacttctgttcggtgttcagtagtttcactttctcaacttctgctgatgtttacatgccgctttaatttccgagcaccttgtaagaggtaaccatggaaccatgtgtttgttctaccaatttatatttgagctttaaacaccaacacatttcagttcctcagtgtagtgtttgatggtaacggcaaaatttgatagattcttaattaagacgaatctgcagctggaattttcttatcaatggcccggccttcttaattgagaataggatataatgtttttttttttctttgtcatactaatttatatcattaaccctcaattgtaattgcccttgtgattttacatgtcatttgtttgtaatattaaccagtaccgtagaatagaaaatgtaggctacttgagcactttt

SEQ ID NO: 27037 - DNA, 602 bp, Glycine max
  Clone ID: TF_GmC6779_2
cccacgcgtccgtgaaatctgggggctggcaggattcttttgaagatgaaccatctcaaaatggcagtttggcatatactgctcaaaatgggggactaaatacacctcatacagtagtcaatcaaactatgtctatcatacctatctctgcaggtggtcccacgcgtccgtacggctgcgagaagacgacagaagggataggaatggattattggggtacaccagcttcatccaacattcctgcacttggcagaaaggttccatctactgcagttgctggagggatggttaccgttggatctcgggatagtgctcagtcacaactttggctacaggatgaaagagagcctaaaaggcaaaggcggaagcagtctaacagggaatctgctcgtaggtccaggttgcgaaagcaggctgagtgtgatgagttagctcagcgtgctgaggctttgaatgaagaaaatgcttctctccggtctgaagtaaatcgaatcaggagtgattatgagcagctagtctccgagaattcacctctcaaggagagactgggggaactacctgcgaatgatgatcatcacaggtcttgcaggaatgatcagcat

SEQ ID NO: 27038 - DNA, 1694 bp, Glycine max
  Clone ID: TF_GmC1711_1
aaagagacatgttggaaattttactgtattagactcataatataatacaaataatttatacttgtatttccacttgttcttcagcaaactcacaaccacaacccaaccaacccacctgaactactgaacaacaacctcttcttcttctctctctctctttagcataatcattcatcaccacacaagagaaaaaagaaaaagaacaaagaacaaataaacctttttttttttataaaaaaagaaagaaaaggaaataaagttttttgttttttcgatgaaccagaagttcatcggaaagccgccggcgacggtggacctggatcggatgccggagcgtgggtcccaccaccggcgttcccactccgacacctccttccgcttcgccgcgaacttcgacgaccttctcctcttcgacccctccgacttcgacatctccggcctcccgtcgccgctccctctgccatctccggtctccgccggcttggttccgatgtccgtcgactccgacgagtccggcaaacagccgaggccggccggggcgtccgccggcgggcacctgcggagtctgtcggtggattctgacttcttcgacgggctcgggttcggcggcgacgagagaggcgccgggaaaggaggcggcggcgagcggagggtggggcaccaccggcacagcaactcgatggacgggtcgtcgacgacgtcgtttgaggcggactcggcgatgataatggacggtgtgaagaaagctatggctcctgataaacttgctgaacttgctcttatggatcccaagagagctaagaggattcttgctaacaggcaatctgctgcaagatccaaggagaggaagattcgttacacaagtgagttggagaggaaggtgcagactcttcagactgaagcaactaacctttctgcacagcttaccatgcttcagagagacactacagatttgactacagagaataaggagctcaaactgcgtttagaggctttggagcaggaagcacagcttagagaagatctcaatgaggcattgaaggaagaactgcagcgccttagggcacaaagtactcgtttgggtgctattggtggtaacccttcttttggtgggatattcaaccagttggcttcccaattagccatgcaacagttgtctaattctgcaccccatcagcagacacaacaccagccacaggttggcatgcctcctcctccctctggacagaaccaccctaacttcatggacttcaatcagcagaagtaactcataatagcagtagcagtaaatgattgattacatgaatgtataactggtgagacttgtgaagggtatattgtgcagttcagtgtctttagtcctgtgttgtttatcttcagctctaggatgtgtactttacgcagttctaggttagaagcgcagcctctgaaatgttgtgttatagctcttgggtgaatgaagttaacataaatatgtagaaagacttgttgataatactatagatggtgaatgaagtttattaattagcttctggaattaaaaagggtgaatgagggtaacataaaggtgtagaaagactagttaataatagtatagatggtgaatgaagtttattaactagcttctggacttaaatagcatgctatatatgttaaaagttaaagcagaaagcatcttctcggtatgccttgct

SEQ ID NO: 27039 - DNA, 2623 bp, Glycine max
  unsure (1)..(2623): unsure at all n locations
  Clone ID: TF_GmC726_1
ccgcgcgtccgggtgccccacaaccaaatcatcgtcttcatcgctctccgacacttgaacctctcatgttgttcctctagaaacctcttccgctccaccgtggaattttcctgcttctgtagcacaaaaccacacacacacacaaactctgctttaatattattcacgcctgtcctttgtcgtggtgctggttacaagatagggtttgcactttttaatcagaaactagccatgaccaggtacagaaaactactgtgttagttaaaaaacattcatcgattattagcaactttttcagtagtagtgtagccttgtaggtgaactgtgtgttaggattttgaagtttgattaatagccgtgtgtagaaactagaaaggttagtgattgttgtagaatcaatggtaggtgttgatcagagtaatatgaatatgaatcgaaatagtggtgtatttggttcatcatctgggggtgctcttagacccccaaatcgattgaataatcaaatgggtgttgctgagaaccagaaccagaaaccctatggtatgccaccctcacaccctaataccaatattctgaattcatccgtttaagatgcacggtcggagaacctggtggagagtctctccgctcaagagcgtttgggttctcccaatttgagtcctgcgtcgtcccattccaggtctttgtctcagccctcttttttctctctggattccttgcccccattgagtccttccccttacaaagaaccttccttttctgactcaatttcgaccgacgtgtctgctgaggaaagcttgcctacctctcatgcccctttgcctaatcgtggacacgcgcttcagcttggccattctcttcctcctcgtaaaggacataggcgctctaacagtgattcccctttaggaatcgctgattttattcagtctgcccctcaatatgatacctgtgggacttggagctattgtgaaaataatgcttataggggagggaactctggttttgagaagccgattcagttagtgttaaaggaaccaattaaggatatggaccgtgttgatggttttggtggagaacctatggttgggaggaaagaggatgatgcactggatgatttgtttagtgcatatatgaatttggacaatattgatggtctcaatttttctggtatggaagataaggatttggatagcagaactagtggttccaagacagttgagagcagtgataacgaagttgagagtcatgcaaatggcaaagtgactggttctcaaggggctagttcccgctgttctgaagagaggagggaaggagtgaagaggagttctaatggagacgttgcacctggttcccgacaccggagaagtttctcattggacagctccataggaaatttccatattggagatgaatcgcctaagcttcctccttcacaaaaccgatttggtcaacactctcctagcagttcaatagatggtaagacatctgaaacaagcatggagtttggaaatggtgaattcagctcagaggagctaaagaaaataaaggagaacgataaacttgctgaaattgccatggccgatcctaagcgtgctaaaaggattttggctaatcgtctatcagctgctcgctcaaaagagaggaagatgcggtacatttctgaattagagctcaaagtacaaacacttcagacagagacaaccacattgtctactcagtttaccaaattacagatggataattcagagctgaaaagtgagaataatgagtacaaattgaggattcaagccttggaacagcagtcccaactaaaagatgctctgaatgagaccttggatgctgaagtgcggcgtttaagacgcacagttgcagaacttggtggagagtctcttctctcaagtcgcatggctcaacagcttgctattagccaacaagtgttccagttacagcaccagcagcaccctaaccagcttagacatgttcaactggacaatagccattcccaggagcagacacagactcagtcacagtgccacaatggcaaagctactgcctactgattagcactctgataccatgtatgctcaatgtttgtgatatgaatctgaataggatattgcatgaccaaacaagctcaagtaaaaaaaaaaaagactcgattctaagagaggacccgttaacaaaaagaaaagttcaaaagatacaagaggcaaaaggagtctgtgaatgcaattcctatctaataaggttgtagttcgacttgtgcaagcccaaggatatgattatatgaagactcaaaatagtgtataattgttaactttattgcctaagatttgtagttattatttgtaaatctaatgatgatttgagatagatttcattagaatttatgattgattttattaagatttgttttaattgattttttaaaatttgtttcgtctattaaaaagaagattctatcatttgtttggaaatgtttcttattattatgatttgttttctattttaaatcttctatcatttaaactcacaattggttaaatgaattaagagctttcatctggctcatgtaatttaagttagattntgaatgaaatatcaaatatgagtttctccaaaa

SEQ ID NO: 27040 - DNA, 1342 bp, Glycine max
  Clone ID: TF_GmC463_1
atacccacgcgtccgtacggctgcgagaagacgacagaagggggccaacctttttttttattattttttttctataaaacctaacctcagcctcaattatcacgttcttcttctttaccatagagccctttcttctcttcccccattttttcctctttcttcctcgcctagctagctccagaaaattaggatctgcttcagatctagtgtttccctgtcccaaatcacgagtccattgagtttgattttgtggatgaaaagcatagatagggcttttgcaaaactctccaatgtttcttgaaattatatgaccatgcgtcgaattcgtatgctgcactccttctccgtcgtgttcctctactggttctacgttttctcatgaactccctcttaaatccgtgattaattagatctatctccttagttaatccttgtcttttccaataattaattagatctgcgtctcctttttggattagtttcttttttggttctgttatcaaatcaaataaaaaatctccttctcggaaatggcatcaccgatccaacaacaacaacgctcgactactacaagttctggatctgaaggaggagatccgcatatcatcgatgagaggaagcggaagaggatgctgtcgaaccgcgagtcggcgcggcgatcgcggatgaggaagcagaaacagctggaggatctgaccgatgaagttagcagattgcaaagcgcgaacaagaagcttgcggagaacatagaggccaaggaagaagcgtgcgtcgagaccgaagcggcgaacagcattctgagagcacagacaatggaactggccgatcgattgcgcttcttgaactccatccttgagatcgctgaagaggtcgaagggttatccgttgagattcccgagattccagatcctctcctcaagccctggcagattcctcatccgatacaaccgattatggccaccgcaaacatgtttctgcgttgatcattcctgaggattttactttaattagggttattcagtgcggtagtaactttctctgttatgtgtattatattactattagtgttatctgtctgcatcaaaagtatcgtgtggtcatcaatgcattgggttcctgagagagatgaatgtgaggtacagggtgttgatggctggtagtggcagtgtgtgtccctttgcgcgacttgtaatcattttttatggtggctgttttattttaattaaaagtaatctcatcttctatgtttgttgttttatttttataattaaatctaatcatcgttatcctaaagcaatcatcttcattggtggtgttctaatacaagcggcggaccttctat

SEQ ID NO: 27041 - DNA, 1372 bp, Glycine max
  Clone ID: TF_1905784
cctcttccgaatgggctttccagcgcttcctccaagaagccaccgccgccggtacctccacttcatctccccctcagccacctacaatgacggcgtcttcctcgtcatcttcgcaccaaaacgacgtcgtggagatcaaggatgagaatctttctattcctaatttaaatcccagtacggcgttgaattcgaagccggcgtcgtcgtttggcctcgcacctccgccgaatattgccgttgattccgaagagtatcaagcattcctcaaaagccaactccatttggcttgcgccgccgttgctttgactcgcggcaagagtttaaaccctcaggattcaggctctacagctcacgacaaaggatcagagactgctagtgcagctcaatcaggatctcacgtctccactttaggatctggtcaggaagtggcaaaaattcaagataaggatgctggtggaccagttggaattccctccttgcccccggtgcaaaagaaacctgtggtgcaggtgaggtcaacaaccagtggttcatctagagagcaatctgatgatgatgaagctgaaggagaagcagaaacaactcaaggcatggatccagctgatgcaaaacgtgtaaggagaatgctttcaaatagagaatcagccagacgttcaaggagaagaaagcaggcccatctgacagaactcgagacacaggtttctcaactcagagtagaaaactcctctctactgaaacgtctgactgacataagccagaaatacaatgaagcagcggttgataatcgagtcttgaaagcagatgttgagacattaagaaccaaggtaaagatggctgaagaaactgttaaaagagttactgggttaaatccgttattccaagctatgtcagagatttcctcaatggtaatgccatcctactctggtagtccttcagacacatcggcagacgctgctgtacctgtgcaagatgatccaaaacatcactactaccaacagccgccaaataatcttatgccaacccatgatcctagaatccaaaatggtatggtagatgttcctccaatagaaaatgtagagcagaatcctgcaacggcagcagttggggggaacaagatgggtagaacaacttcaatgcagcgggttgctagcttggagcatctgcagaagcgcatccgtggtgaagtgagttcctgtggaactcaaggcaggggagagcaataaacacggttaaagccaccagctgcaccgaagattttgcacagcatgttgataaaatcatactgttccaattccaaccgtggcaggaattgcccattctttgtatgacaatgccttcttggatgagactaatgcattgacatctcttttct

SEQ ID NO: 27042 - DNA, 528 bp, Glycine max
  unsure (1)..(528): unsure at all n locations
  Clone ID: TF_6913416
gcaccaggatgcattgtcgaatgattcaaatagctccactaattactctagcaaatattcacctgactacacggataatattgataatcaaagtggaatagacagaagatctgaagatgatgttgccagacacacagcaataacaccaatcttaaaaaagaatataacaaagttttacgagcctcttgttgacaataataccgtatataattatgaggatgatcctgttgaatacaaaaaagctagaaagcgtattcaaaacagggaaagtgcttctagagtcagaagtaaaaagaggaactatgttggagatctcgaagttgaaatgaatatgattaagaaagaaaatgctgatcttaaagtgaagaatgcagctttaaaagctgaaaataacttgttgaaacaacaaacttgcttcttagaaaaaatgattatgaagaccggcccacaatctataacaaatacaccagctaataatgtggaacaaaactntcaagagtgcctattacctcttgttaacaaagctga

SEQ ID NO: 27043 - DNA, 2782 bp, Glycine max
  Clone ID: TF_GmC470_1
ccacgcgtccgctcctccatttctcagaaaccctctcgaatgactgagtcaatgcccgccgtggaaccgtcgccggagcctccggcgtccgatatcgtgttcgatgacttctccaccgacttcagcgccttccccatcccctccatggactcgctcttcaacactactgatgggctccccttcccctccgatctcgaattcggcatggatttcaacaacaacaacggagaattcgaaatcaccttcgacgacctcgatgacatctacatcccctccgacgccgaggatttcctcctccccgacgcctgtaaccctaattacgcctccgtttcgccgcccatcgacgattcctccgcgaagaattccgattccgacgcatccgcggtttccggcgacggcgtttccaggtttttcaattcgcaagtgtcggaatctgattccgccgataatgttagggttccgagcgttccttcgccggaggctgaattctgcgaacgggaggagtcttccaacggaccggtttcgtcgcagggttccggcaacggcggatcgggtgtatacgaggccatgcactcgccctcacctgattctggcccttacgagagagacataacatcgtttcatgcacatgcagctacaaacaatggtgtgaaaatggaggaagttccagcttttgatctgaagaggaagaaagggagttgcgagggaagtgctaccaagcacagaaggttctcttcctcggtggagaataataataataacaccgagaaacagtctcagtctggtttgaatggaattgacgatgaggatgagaaaaggaaggcgaggttgatgaggaacagggaaagtgcacagctttctaggcagaggaagaagcattacgtggaggagcttgaggagaaagtgagatcattgaattccatcattgctgatatgagtagtaagatgtcgtatgtggtggctgagaatgctactcttagacagcaagtgggtgctgctgctggtgtcatgtgtcctcctcctccagcacctgctcctgggatgtaccctcatcatcctccaatggcacccatgccttatccgtggatgccatgtgctccttatgttgttaagcctcaagggtctcaggttcctttggttcccattcctaggttgaagcctcagcaacctgcttcagcccccaagagtaaaaagagtgagagtaagaagagtgaggggaaaactaagaaggttgctagtattagtttgttgggtttgtttttctttatcatgctttttggtgggcttgttcctgttgttgattttaggtttgggggtttagtggacaatgttcccggtactggtagttctaattatgttagtgatagggtgtatggtcatggtggagggaaggtttggtctttgaatggtcctaggaatgggtctggaagagatggggatgtaggattttctaatgggaggtttagtgtttctgacagagtgaagaattatgagaagagaggccggaatttaagagaagaaaggcatgatcggaaaggcccagatgattccagtcgtcagggcaatgctagtgagccccttgttgcttctctgtatgttcctaggaatgataagatggtgaagattgatgggaacttgattatccattccattatggccagtgagaaagccatggcatctcaaactgctgaggcaaagaaggacaagagggaaactgggttggccattcctaaggatttggattctgcattggctattcctggagttggaagaagcagagatcaacatccacatgtgtatagggtttctcctgaacagaggaaggctcttggctctggttcaaccaaagctttgaaggaccatatgaagtcctctgcaactgatggtaaaatgcaacagtggttccgtgaaggtcttgcagggccaatgttaagttctggcatgtgcactgaagttttccagtttgatgcttctccaagtcctggagcaatagttcctgcaacatcagtagccaatgtttccaccgaaaaccatcagaatgctaccagtgttaagaagaccaggaatagaagaacccttcatgagctcccagagccgcttaatgggtctagtctgaacataactgaagaacaagtgaaaaatttgcagaaagaccacttccatggtaacaagtcttctatggtggtttcagtccttgttgatcccagagaggctggtgatggtgatgttgatgttgatggcatgatgaggccaaagtcactctctcggatttttgtggttgtgctaattgatagtgtcaagtatgtcacttactcgtgtggtctgcctcgtgcttctcctcatttagtgactggttatgtatgacaatccatccttcggtaaaaagttttgatgcagccgaagcatctaacctgagttgttctagtttctgtaacaaaggatgtgggggactgggaaggaaagaaactcatctccagttttgtacatattaacatatttaaagtagcagtcttaaaaatgtacctgagagaatttagaagctgggcttgaccaactgcgtgtactgagttgagacctttcttagaaacttaataatatatgccccccttaagttttaaagtggatcccttgtcatgcgttgttgaatttatagttgaaatgtgtttggcttgattttggataattatgattttacacagttgatttttttttatcaaagcacgagcttgattttatgatggttatttttctgtaaaattgatttagattaaaaaaaaaaaaa

SEQ ID NO: 27044 - DNA, 1201 bp, Glycine max
  Clone ID: TF_GmC9561_1
ggttctccagctagagcaagagcaaaaaagataaagaaaaagaaaaaaagacggctagaaacgcggcatggcggcgtacgcaggttggctcgacgaatccggcatcggcctcgaacctaatcctcgtcgtcgccttgtccgccatcttcgcctatatctcccctgtctcctcttctctccgatctgcacccaatggacgacattctcaagtccttcagccccaagtcggtcgacgacgtctggaatgacatcgttaccggcgccaccgtccacgacgccgtctccgccaccgctaccgactatgccgacgccgccatgaccctcgaggatttcctcaccaaggccgtaactgaggaagacgtcagaggggctcctcctcctcctcctcctcctcctccttcttcctttctccccttccctgccgatggctcttcctcctccgttgagcctttcgccaatggcgttagtgccgcgccgtcgaattcggttcagaaagggaagagaagagccgtggaggaaccggttgacaaggcaacgcttcagaagcagaggaggatgatcaagaatagagagtctgctgctaggtccagggaacgcaagcaggcttacacatctgagcttgagtatctggttcaccagctagagcaagagaatgtgcagttattaaatgaagaggctgagatgagaaggcagaggaaaaagcagcttttcgagtgcatcattccaattgaggtgatgcctaaaccgaagaaaaaacttcgaagagtaaattcagcacaatcattgtgatctgtttgtcatcactaatggacagactaggctttgtggcctggtgtagatataaggagggaaaggtttgagagattgcatgccattgcaggttctcggagttacattgttgtatagagaaaataggtgcagccaaataattccaagtaatttgattcagcctgaaagtattctattgatccactgcttgtggaagatccataagaagatccatggttctgggtgtgttttgcccggatttggccttgtaggaaaagttgaaataataatttgtgttaacttgtgcaatttgaatgccatgcttgatttggtagggggtgaggtacaggtgagaggaatggatgaaaaatgatcgctagattcgacataatctgtttttagattaaaagatcacctatatgtcacatgattc

SEQ ID NO: 27045 - DNA, 1851 bp, Glycine max
  Clone ID: TF_GmC299_4
ccacgcgtccggggtgttctcagtggacgatatctccgatcacttctggcagccgcctatccctgtctccgccgcccaaacttcctcccagatgagccgcagcgcctccgagtgggccttccaacgcttcctccaggaagcttccgcctccgcaccctctcctccgtcttcttcctccgccgccgacgtcgtattcgtcgagatcgaagatcaacctaaacccgcccctccccctccgacaaacggcgccgttctccccaatgcccctggtcccgtcccccttgactccgacgaataccaggccttcctcaagagcaagctcaacctcgcatgcgccgccgtcgccatgactaggggatctttggctaaatctcaagacccgtcccctttttctgaaggtggatcacagccgactaatccttctctagttgaatctcagactacttctaaaggatctattccttctgaaaatgatccatctaagttacaagataaagataccaatgtaccagttgggattccttccatacctgccatgcaaaagaaacctgctgttgcaattaggccatctacaagtggatcatcaagagaacagctgtatttctgactaacatcagtaaggcgctttaaaggtagaattttcacctcttaattgagaaacctgtgtttctaggtcagttaaatgagcctgctttcttcttctagagcgacgggctgactccctattggatagcatcctccttactcgttttacatcagcagggtctgtgttgtcattgagggagagacatctatgtcctcatcatctgactgttctcttgatgatccacttgtagatggcctaattgcaacagcaggtttcttttgtatggcaggtatggaaggaatcccaactggtgcattgatatctttatcttgtaacttagattgatcatttccagaaggaatagatcctttagaagtagtctgagatccaactagagaaggattagtcggctgtgatccaccatcagaaaaaggggacattgagggagagacatctatgaatgacaacacagaccctgctgatgtaaaacgagtaaggaggatgctatccaatagggagtcagcccgtcgctctagaagaagaaagcaggctcatttaactgacctagaaacacaggtttctcaattaagaggtgaaaattctaccttgttaaagcgccttactgatgttagtcagaaatacagcgactctgctgttgacaacagagttttaaaagctgatgttgaaacattaagagcaaaggtgaagatggctgaagagaccgtcaaaagaattactgggttgaacccaatgcctcatgccatgtctgatatatcatcattgggcctgccatcatttgatggaagaagcccttcagacacttcagctgatgcatctgttcctgtgcaagatgatccacatcatcacttctatcaacccacattgaataatcctattcccagtcatgatccgatagtcaacaatggtttggggggcatttcttcaattgaaaatgtgcagcagcagaacgctgcagcagtggtaggtgggaacaagataggtcaaacagcatccctgcagcgggtggctagcttggaacatcttcagaagcggattcgtggtggacctccatctgagcagtaactaagtagccagatcttaaggttgctttgccaaaaaattattctaaaacagttatttctgttgcctattcttctggaatacattgtaaatcatttgatggagcacatgatgctggattcaattagtgcaccccgtttttttttttttttttataaaaataatataaaatgaactttaccttc

SEQ ID NO: 27046 - DNA, 1092 bp, Glycine max
  Clone ID: TF_GmC311753_1
attaccatgggctaaaagctagcaagtagaaaccatcatgtttctggtgccaccaagggccagatacacttttttttctgttgagagattgcagctgaatttcattggggggtgcagaaagaaaacatggatgatggaaatgctgagctttctgataagctttcagataataatgttctatttttgaatccagagtcatgtagcagttttcaggcttcaagtagcagcagaacatgcacacacactcacacttgcaatccacctggccctgatgctgctcatacacacacatgctatcacacacacacccaagtttttgcaccagaagatgatggcaggaagcactcaaactccaagcaaaaaaggccttctggaaaccgagaagcggttaggaagtatagggagaagaagaaggcacacacagcatacttggaggaggaagttaagaaattgcatatggtgaatcaacaactagtgaggaagctacaagggcaggcacttcttgaagcagaattagcaaggttgaggagcattttggcacgacttagggggaaaatagacagtgaattgggtgcttggccctttcaaaaacaatattgtaacacttcttacattttcaaagaaggggatgctggtcttgagtgtcagaagaacaatttgccatgcttccatccacatgtaggatcatcatcccaggtcaacatttgtgcatgtggaaaatccatgattccattggatggaaactgccaacctgaaatggtagattgccaagtagatgcaaataacatgaccagtactgaaggacaaactgtggataacatcatgtcatctgcatctcaagacggatagtttagccagacaaaaatgtctttcttgtgagtttctatccaattgctatcacagatgatttgtttgtttagcatttgtagttgataggtaagatgaggtacataaaaatataatcactgttaccctaaaaggtatgtatgtaaggaccagcccaatagaaagtgagacctaaagcaaaaaaaaattgagagagactttatctatgttaaagaaaagagtgatatgtgtgaccttttattcagc

SEQ ID NO: 27047 - DNA, 796 bp, Glycine max
  unsure (1)..(796): unsure at all n locations
  Clone ID: TF_GmC128657_2
ctccttctcaaaccaattgaactctctccatcactcattactactactcttcctccaaacaattaaggcctcaataatcttcttccttccaaaaaaaaaactatgcaaaccaaggaagtagtctcaagcctcagttacttactcccttcaaacccttgttcctaccctcctagcaacaactacacctccatgatccaaaacagcattcccacatttcagttccaaagattctctaaccaaatatatggctgcaacaacagccacaacactacctatcaagttcctgacttcagtcctcaatcctcatgcatcagcagcaactccacttctgatgaggctgatgaccaaaacctaagcctcatcaacgagaggaagcacaggagaatgttatcgaaccgcgaatcggcgcgtaggtcacgcatgaggaagcagaagcaccttgatgagctctggtcacaagtggtgtggctcaggaatgagaaccaccagctcatagacaagctgaaccatgtctcagagacccatgaccaagtgctccaagagaattctcagctcaaagaagaagcctcggaacttcgccaaatgattagggacatgcagatacacagtccttgcggtggcccaaactccttcataacccctttggaagatcatgatgttgatcatgtgccttcagcatatctcagatctgatgattcttcaaaccaattcaattcgtgtaacaacaacatggacctccttggctgaatttgatcaagcaaggngaagccaaatttttaattatcatcatcttcat

SEQ ID NO: 27048 - DNA, 1082 bp, Glycine max
  Clone ID: TF_GmC299_2
caagcttaatctcgcatgcgctgctgttgctatgactcggggatctttggtcaaatctcaaaaccctgacagtggaccacaggcatctaatttttctgaagttggatcgcatgctaccttaaaaggatctggcccttttggaaatgatgatccctctaaattacaaaataaagatatcaaagcacaaattgggattccttcctcaccttccatgcaaaacaaatccgctgtcgtcgcaatgaggccaacaataagtggatcatcaggagaacaatcagatgatgaggaagcggaaggagagattaatatgactggaaacatgactcctgttgatgcaaaacgagtaaggaggatgctttctaatagggagtcagccagacgctcaagaagaagaaagcaggctcatttaactgagctggagacacaggtctcccaattaagaagcgaaaattcttctttgttaaagcgcttcacggatgtgagccagaaatacagtaatgctgcagttgacaacagagtactgaaagctgatgttgaaacattaagagcaaaggtgaagatggctgaagagacagtgaaaagaattactgggttgagcccaatgctccatgccatgactgagatgtcatcactgggaatgccattgtttgatgaaagtccttctgagacatcagctgatgctgctgttccagtgcaagaagacccaaatcatcacctttgtcaacccacttctaataatgggttgggaggcatttcttcaattgaaactgtgcagcagaatgttgcagcagtggtaggtggcaacaaaatggggagaacaacttccctgcatagagtggctagcctggaacatcttcagaagcggattcgtggtggtgcagattcacgtggaactccttctaattgagaacaataacataatagctaaatttacattatgctttccatgagggaattattccaaaactcttgtttctgctagttgtaagtaagagcaaattcttgttgacttgttgtaaatcaatttgatgtatgtgaatcttattgagcatattctgctggataatcctatttttcaattt

SEQ ID NO: 27049 - DNA, 1100 bp, Glycine max
  Clone ID: TF_GmC6779_1
tttttcacaggactctcaattaaaatcagggggccggcaggattcttttgaagatgaaccctctcaaaatggcagttcagcatatactcctcaaaatgggggactaaatatacctcatacagtggtcaatcaaaccatgtctatcatacctatctctgcaggtggtgctcctggagctgttcctggtcccacgacaaacttaaatataggaatggattattggggtacaccaggttcatccaacattcctggacttggcagaaaggttccatctactgcagttgctggagggatggttactgttggatcacgggatagtgctcagtcacaactctggctacaggatgaaagagagcttaaaaggcaaaggcggaagcagtctaacagggaatctgctcgcaggtccaggttgcgcaagcaggccgagtgtgatgagttagctcagcgtgctgaggctttgaaggaagaaaatgcttctctccgttcagaagtaaatcgaatcaggagtgattatgagcagctactctccgagaatgcagctctcaaggagagacttggggaactacctccgaatgatgatcatcatcataggtctggcaggaatgatcagcatgtgggtaatgacactcaacagagtgggcagacagaggccgtgcagggtggtcattagcaccaaccaaccacttcatgctgcctttcagggagataatctaacttaaatagcaagagcaagatcttgtttcggatagcttgtagttcaaattgtattaatgctgaccatttatcgtcttaagatctgtttaatgttatgtgatccttcattcctaatttacctttttttttactcattcaaaacgacctggattgtatgtagtgtgtgaattctgtgtcataccttatcttcagcttcaaagttagtgttctcattaagtaagcaatatagttaacggtgttgtccattatatcatttcatgtacaaatgatttatcaggaaaataaagaagagaaaatctctgatgctttgaaaaaaaaaaaaaaaaaaaaaaaaaaaaaaaaaaaaaaaaaaaaaaaaaaaaaaaaaaaaaaaaaaaaaaaaaaaa

SEQ ID NO: 27050 - DNA, 1896 bp, Glycine max
  unsure (1)..(1896): unsure at all n locations
  Clone ID: TF_GmC1611_2
cggtnccgattcccgggtcgacccacgcgtccggttttgttcttgtgatgaaattgagtttcttctacttagttagaaacttttaatttcaacttcagagaaggtgagaatggtctaagaagccttgcatggcgagccaaagaattggagaaacgggtttgtctgagtcgggaccttcaagtcaccatgttccttatggagttcttcatgggattagtacttcatcaggcctaatcaatcaagggtctgcttttgattttggggagttggaagaggcaattgttctgcaaggaattaagataagaaatgatgaagccaaagcatcagctttattcacaggcaggccttcggccacactggaaatgttcccctcatggccaatgagattccagcaaacctcaagaggaggttcaaagtcaggaggggaaagcactgattcaggatcaggagtgaacactctttcaaccaaaaatgagctaagatttgaaacagaatctccaataagcataaaagcatctccttcagatcatcatcaggcttttgatcagcaccttcaacagcagcagcaacaacaacaacaacaacaggagacagcaacagcaggcacatcatcacagaatcaatcagcagccaaatcacctcaagaaaagaggaaaggagctggttccacatcagagaagccacttgatgcaaagacactgagacgtttagctcaaaacagagaagctgcaaggaaaagccgtctcaggaaaaaggcttatgtgcagcaactagagtcaagtagattaaagctcacccaccttgaacaagaccttcaaagagctcgctctcagggtgtgtttatgggatgtggtggtgctggtggcagtttaacgagaggagccgcaatgtttgacatggaatatgcaagatggttagaagaagatcacagactaatgggggagctgaggaacgggttgcaagcaccgttatcagacagtgatatgagagtgatggtggatggatatctttctcactatgatgagattttcaggcggctcggtgtggctgctaaatctgatgtcttccaccttatcaatggcatgtggacttcccaagctgaacgttgtttcctctggattggtggttttagaccctctgatctcatcatgatgctgattcagcagttggagccactagctgagcaacagataatggggatgtatggcctgaagcattcctcacagcaagcagaagaagcactctctcagggacttgagcagttgcagcagtcacttgtggacaccataactggaggcccagtggttgatggtgttcaacaaatggtcgttgccatgagcaagcttgccaatcttgaaggttttgttcgccaggctgataatttgaggcagcaaactcttcatcagctatgtcgattactcacagttcgtcaagcagcacgatgctttattgttattggagagtactatggacgtcttcgtgcccttagttctctttgggcatcaagaccacgagagaccttgatcaacgacgataactcatgccaaacaactacggaaatgcaaatagtccaacattctcagaattatttctcaagtttctgagagatgtaattaaaacccattagcctgaaagaagtttgctcgccataattaaggggatttcgttgggctgctttacaaatgaatgtcagcgtcttcctaaaagaaaaatatttatttattttttcttttcaatcttctatgctcccttgtgtctttatgttttattgtaaatgtaaatctagtttttatgtgcatgatgaggaagctcctactttagctgaagagaaatagaaaaaaaaaagtttgagtttaaaaaaaaaaaaaagggcggccccttcaaaggaacccagcc

SEQ ID NO: 27051 - DNA, 1790 bp, Glycine max
  Clone ID: TF_GmC1716_2
aattcgctcgagcacacacagctctttccctcttttttttagagagagaaaatgcagagttaaccaccttaaccttaattgcttctccaaaccttaatctttttttttttatttttttatttttttgaggatacttggagctaccaggactagtttttttttttttacccttgtttctttttttgacgtttaggataataattggccaattgggtatctagtcagttgagacatttttcaagaagtagtaaagctccttctacaatattttttgacttggtgctttccttttggatcttacaatgggaaacagtgaggaagagaaatctactaagactgaaaagccttcttcacctgtaacaatggatcaagcgaatcagaccaaccagaccaatattcatgtctatcctgattgggcagccatgcagcatattatgggtcaccatgcatactaccgggccacactcacatggtcaaggagttccatcttcacctgctgctgggactccttcaagcgtagaatcaccaaccaaattctctggaaatactaatcagggtttagtgaagaaattgaaagggtttgatgagcttgcaatgtcaataggcaattgcaatgctgagagtgctgagcgaggagctgaaaacaggctgtcacagagtgtggatactgagggttccagcgacggaagtgatggcaacactgcaggggctaatcaaacaaaaaggaaaagaagccgagaaggaacaccgatcactgatgcagaagggaaaactgagctacaaaatggtccggcttccaaagagactgcatcttccaaaaagattgtgtcagctaccccagctagtgttgcaggaacattagttggacctgtagtttcttcaggtatggccacagcactggagctgaggaacccttcgactgttcattctaaggcaaattccacaagtgccgcacaaccttgtgcagttgtgcgtaatgaaacttggttacagaatgagcgtgagctgaaacgggagaggagaaaacaatctaaccgtgaatctgctagaaggtccaggctgaggaagcaggccgagactgaagaattggcacgaaaagttgagatgttaactgctgagaatgtgtctctaaagtcagaaataactcgactgactgaaggttctgagcagatgaggatggaaaattctgcattgagggaaaaactgataaatactcaactgggaccaagggaagagataactttgagcagcattgacagcaagagggctgcacctgtaagtacagaaaacttgttatcaagagttaacaattccggagctaatgatagacctgcagagaatgagaatgatatctgcgagaccaaaccaaattctggtgcaaagctgcatcaactactggatacaaatcctagagctaatgctgtagcagctggttgaaaccagtaactgcactggctaattatgtaattttggcatattacaagcccaaaattacagcttggtgctaacagttttcagagggatggatcagctgaattttacaatctaattccatctatatagaccagaactaattctttgcttgtgagtttcttagggcataaactctgtattttactagatttcacagaattgaatgacaactttaaaagtttgtaaattgaagagtattagggatttagtttagactttaagagaggcttgtcggccgctgtataattggttgtgtattaactatattggtgtgatcttcctaatggtatcttagtcaaggcattctgactttgggt

SEQ ID NO: 27052 - DNA, 1060 bp, Glycine max
  unsure (1)..(1060): unsure at all n locations
  Clone ID: TF_GmC306557_1
ctcttcttatctctctgctattggttctttgaggaatcaaagcatatattgttttgaaacttgatgagtgaagtccctggttcccggtttaggtttatgacccacttggttcaatctttctccgttgtcttcctctactggttctatgttttctcgttgatctccagtttcccatcgcatattattattatataacttagtaatatagttatcagtgtctctgggtcctgcgtcctaattaggattagtttattttataatatgtccatgtccatggcctcatcaagtggaaactcctctattagcacaaaatctcagagctcagggtctgagggtgatttgcaggtcgtgataacagacgagaggaagaacaagaggaagcaatcgaatcgtgaatcggcgagaagatctcggatgcgaaagcgtaaccacttggaccaactcactaagcagctctcacagctcgcaaagaacaacggcgaaatcctcgccaccatagacatcaccacgcagcactatctgaacgttgaggcagagaattccattctaagggcccaaatgggtgagcttagccaacggctccaatcgctcaacgacatcgtccacgacatcatcatcaacacaaccaccacctacgaaagggactgttatctaacaagcgcacaaaatttcaccaccaccacctacacgctctgtcttaaccaacccgtttttcagtggtgaattgtcaccctcgtcctctgtggatcttgaccataaaagaaaggaaaagtgtgcgtctgggtgaatcttctcttggaggaatcaatgtcaatcagtgaaaaaaaattaagttcatattagtacagtacttagggtggggctatgttaattgttaaacagaatttgcgcaaagtgcttattgaaaatgacatagtggcctgcaactatatttcagatcactagtactaatcgatcactcttgtccaatatcatggaaaaacagatttcagtgctagtgtaatttactattatttattatacctgtatgtatctattccatggtatgtttgcttnnngt

SEQ ID NO: 27053 - DNA, 1657 bp, Glycine max
  Clone ID: TF_GmC4292_1
gaaggaagagacttcaacttcagttcagttgtgttgtctgacaaaacgaacagcaattgggagcagatgcaagatccatcttcaaaccctaattccaatccaaatcccaatcctcacaacgccaatgccgcatcccagttaccgcgtccgccgcaggccacggcgtccaccgccgtcgccggcgccttctcgtcctctctattcgcgcgctccggcggacctcaccaccggcgagcccactcggagatgagtttccggctgccggacgatatgatggacctctcgccgtcggatccgttcgccggcgggtcatcgacggcgagcatggaggagatcggatcggaggacgacctgttctcgacgtacattgacgtggacaagctcagtggcgcgaacgggtcgggcggtgccggaaacggagcggatccgaccggcgaacgcgagaagagtccggcgaggccgcgtcaccggcaaagtagctccgtcgatttcggggaaatcatggatgcgaagaaagctatgcctcctgataagttagctgagctatggacaattgatcccaagcgtgctaagagaatacttgcaaatcggcaatctgctgctcgatcaaaggagagaaaagcgcgctatatacaagaacttgagcgcaaggttcagactcttcagacggaagccacaactctttctgcccaattgacattataccagagggacacatctggccttagtactgaaaatacagagcttaagctccgtctgcaagccatggagcaacaagcacagcttcgcgatgctcttaatgaagcattgaagaaggaagttgagagacttaaggttgctaccggtgaggggatgagccacactgaatcctttaatctgggaatgcaccagatgccattttccggatcaaatttcattccaatcccgccacaatcaggtccttctggtcaccagaacatgcagatgccaccatttggtcactccccatccacaatgccaactcatcaactgcatcaaacaagttctcatccatattcagaaatattgcaaaatgaacagcttggtcgtttccaagggcttgacattagtagcaaaggatcaactctcgtgaagtctgaaggcccctcgctctctgcaagtgagagtagcagtacattttgaatttgacagaaaatgcttgacctgctgacttatccatgctattcattgctcatagggttgacatttagtcaactagtgaaggtacctcatttcatgattcagatttgaggattaattcttaactatttattctaagggttgctcgccaaaaaggggaagcacccttggggttttgttgcaaagttcacagtaatcatgtttcagcatggcatttggtgtttctgggcgctggaatattgggaatgaaaggtcattcccattgtatctttgtatttgtatcatcgtttacgtgatagcatgtaaactgtgtgatttattgttgtgttttacttcattcatagtccaagatggactcttttttttttttctttgtataattagttttagatttattcatagtcgttgtacaatccaagagttttgggtacttgttgtattaaacttcttctgagataagaccttttttttgaaaaaaaaaaaaaaaaaaaaaaaaaaa

SEQ ID NO: 27054 - DNA, 703 bp, Glycine max
  unsure (1)..(703): unsure at all n locations
  Clone ID: TF_GmC1521_7
tcgcatgccacgccgcaacgtaagcctcggaaattcggcctcccacgcgtccgctctccccctctttctcttttccggtgacatggagtccaagtggggtggcgcccccgccagcatcatggcggcgaatttcgacgacttcaagtggatcgcctccatgttcgatcccggaaacgacgacgtcaagcccttctccgacgcagctttccaaaaccaggatgcagtaactgcattttcaacttgtggtggagtaacagatgatacccttgttcgttcccaaaacctcactcccattcaatccaccatttctgcaactattgattctcagtcttccttttgtggtaccgttccagtgtctgctaacaaaccaaacgtgagagataatcaagtaaaaggggtcgccaccactacaagtggttcctcacgtgagccatctgatgaggatgatgaagcaggtccttgtgaacaaagcacaaacgctattgatatgaagcgccttagaaggaaggtttctaatagagagtctgcaaggaggtccaggagaagaaaaacagcccatttggctgacctggagtgggcagttgaacggctgagactgggaaatgcanacctattttagcagcttacagatgccagccaacaatttcgtgacgctgatacgaataaccgagtcctaaaatcagatgtcgaagctttgagagct

SEQ ID NO: 27055 - DNA, 1776 bp, Glycine max
  unsure (1)..(1776): unsure at all n locations
  Clone ID: TF_GmC1716_3
cccacgcgtccgcccacggctcgagttttgaggacacttggagctgcgagcactagttttcccttttccccttgtttgtttttttaggataataattgaccaattgggtatcttgtcagttgagacatttttcaagaagtagcaaagctccttctacaatatttgacttggtgctttccttttggatcttacaatgggaaacagtgaggaagagaaatctaccaagactgaaaaaccttcttcacctgtaacagtggatcaagccaatcagaccaaccagaccaatattcatgtctatcctgattgggcagccatgcaggcatattatgggccaagagtcaccatgccaccatactacaactcagctgtggcttctggtcacgctcctcacccatacatgtggggaccaccacagcctatgatgccaccttatgggcctccttatgcagcaatttacccacatggaggggtttatactcaccctgcagttcctattgggccacatacacatagtcaaggagttccatcttcacccgccgctgggactcctttaagcatagagacaccacccaaatcatctggaaatactgatcagggtttaatgaagaaattgaaagagtttgatcacggggacttgcaatgtcaattggcaatggccatgctgaaagtgcagagcgtggaggtgaaaacaggctctcacagagatggagaagggaaaactgagatacaaggcagtccaatttccaaagagactgcagcttctaataagatgttgggagttgtccctgccagtgttgcaggaacaatagttggacatgtagtttcttcaggtatgaccactgcactggagctgagaaatccttccagtgttcattctaaaacaagtgccccacaaccttgtccagtattgcctgcagaagcttgggtacagaatgagcgtgagctgaaacgggagaggcggaaacagtcaaatcgagaatctgctagaaggtccagactaaggaagcaggctgaaactgaagaactggcacgaaaagttgaatccttgaatgctgagaatgcaacactgaaatcagaaattaatcgactgactgaaagttctgaaaaaatgagggtggaaaatgctacattaaggggaaaacttaaaaatgctcaactgggacaaacccaagagataactttgaagataattgacagccagagggctacaccntgtaagtacagaaaacttattatcaagagttaataattccggttctaatgatagaactgtggaggatgagaatggtttttgcgaaaataaaccaaactctggtgcaaagctgcatcaactgctggacacaagtcctagagctgatgctgtggcagctggttgatacagaaaaccagtaattgtactggctgatcaggtagttttggcatattacaagcccaaaattactgctaacaatttcctgagggatggatcagctgaattttagtatccaaatccatcaaaatcagaactaattcattgtttacttaggacctaaactctgtattctattagatttgacaaaaatggatgaccaagtttgtaaaatgaagagaactagagatttcagattggagggggtttgttgaaacgctacataattgcgtatgtattaacgattggtgtggagactttctaatgatatctaagtaattattctgccttattatttgtttggtttgtattttgtgctagctaaaaaaaaaaaaaaaaaaaaaaaaaaaaaaaaaaaaaaagggcgc

SEQ ID NO: 27056 - DNA, 674 bp, Glycine max
  Clone ID: TF_GmC1716_5
ggatactgagggttccagtgatggaagtgatggcaacacttcaggggctaatcaaacaagaaggaaaagaagccgtgagggaacaccaaccactgatggagaagggaaaactgagatgcaaggcagtccaatttccaaagagactgcagcttctaataagatgttggcagttgtcactgctggtgttgcaggaacaatagttggacctgtagtttcttcaggtatgaccaccacgctggagctgagaaatccttccagtgttcattctaaagcaagtgccccacaaccttgtccagtattgcctgcagaaacttggttacagaatgagcgtgagctgaaacgtgagaggcggaaacaatcaaatcgagaatctgctagaaggtccagactaaggaagcaggctgaaactgaagaactggcacggaaagttgaatccttgaatgctgagaatgcaacactgaaatcagaaataaatcgactgaccgaaagttctgaaaaaatgagggtggaaaatgctacattaaggggaaaacttaaaaatgctcaactgagacaaacacaagagataactttgaacataattgacagccagagggctacacctataagtacagaaaacttactatcgagagttaataataattccggttctaatgatagaactgtggaggatg

SEQ ID NO: 27057 - DNA, 597 bp, Glycine max
  Clone ID: TF_GmC118795_1
gctcggaatccggctattcggctcgatgaagctaacaatagccttgccaggaatgagccactactcaaaaggcagcaaacacttggggaaatgactttggaggatttcctagtaaaagctggggtggtacaagaatcatcatcactattcaagtcttcattactatatcaaaatcagattggtaacattgcaagtaatgggccattgagtgcaagttataggttcaggcatgtaatagggacaggatctagtgtgtcttgtaatgggcttgaaacacaaaacatgttggcacagaataacaacttagttataaaggatgtcactacaaatggtgctgtggagaaatgtccaagcttaggagaatcaagtgggaagggtaataggaagaggatcattgatggccctcctgaagtggtagtagagagaaggcagcgcagaatgttgaagaatcgagaatcggcggcgcgttctcgagcaagaagacaggcatatacagtagagcttgaagcagagctgaatctgctaaaagaagagaacgaaaagctcaaacaaactctggccgatgctgaacgcaagagaaaacacgagatttctcag

SEQ ID NO: 27058 - DNA, 709 bp, Glycine max
  Clone ID: TF_LIB4200-004-Q1-K1-C12
ccacgcgtccggttgctttcagtcttgaagtactaaaaaagttgagtgtgaggtgtgaagtgaattttaacagtgataattggtaaatggggacccaaactatggggactcatggtggtggtggagacagtaatgggaaacagtcaccactccagcctctggtgcggcaaaactcaatgtacagtctcacacttgatgaggttcagaatcaattgggcgatttggggaagccgctaactagtatgaacattgatgagcttctaaaaaatgtgtggaccgctgaggcaagtcagaccattggtatggacaatgagggcacagcacaagctagtcaagcttctctgcagcgtcaggctagtctgtcattaaccggtgcactaagcaagaagactgtagatgaggtttggagagatatccaacaaaacaaaatcgtaggggagaagaagttccaagacagacatcctactttgggagaaatgacattggaggatttcttggtgaaagcaggtgttgttgcagataatcagatggcaatgccatcgtctctgatgggaacaatgtcagatacgcagactcctggaagaaaaaagagcacttctgaggacatgatagagaagactgttgagaggagacagaaaaggatgataaaaaatcgggaatctgctgcccgttcaagagcaaggaaacaggcatacacatatgaattgga

SEQ ID NO: 27059 - DNA, 735 bp, Glycine max
  Clone ID: TF_GmC4092_7
caaaataactcaggttcgaaggaggagctgcaggctctaatggagcagaggaagaggaagagaatgatatcgacccgcgaatcggctaggcgatctcgaatgaggaagcagaagcacttggatgatctagcatcgcaggtgactcagctcaggaacgagaaccaccagattctcacatcggtgaacctcactacccagaagtacttggcggttgaggctgagaactctgttttgagagcacaagtgaacgaactcagccactggttggagtctctgaacgagatcatccacttcttgaatgccactgatggtggtccaccaccaccaccaagctccttctttgagcccgatgctaccttcttcaacaaggcttatctgagccagccgattatggcttcagcagacatgttgcagtactgagtgtgatggttgttggtttcttttaggttttagtctgttagggaaaattgtaatcgctggcagatagtgagtacgataaggaataatgatgaatgtgtaacatatcataaagcgggtaagcttgttggggcccctgtagtcttcagagatcagatcaccctattattgttgcaactgcacttccccatactagacttattatttatgtcatatcaccaaatcatataacattaagtttaatttagtgtcaaagtaaaagaatttatcaaagtggacttggaaactttaatcaaaattttaggtttatttttgttt

SEQ ID NO: 27060 - DNA, 968 bp, Glycine max
  Clone ID: TF_GmC12723_1
aattcggctcgagcgagcatgtccaatattcttcttcagagctctagctctgaggaggatttgcagcttctaatggaacaaagaaaaaagaagagaaagcaatcgaatcgcgaatccgcgagaagatcaaggatgcgaaagcagaagcacttggatgatctcattgcacaagtggaccacctcaagaaacaaaagagcctaaccctcatgaaagtggacatcaccacaaaacactatctcgaggttaaggctgaaaattccattctctgggcccagaagactgaactcacccaaagccttcaatcactcaatgatatcatcgatctcatcaacaccaccaacggggtctaccacacggattgctatgatatcaataatcataataatcataacaattattacaataataacaataatttcatgaatcccatgcacatggcatatcttaaccaaccaattgtggccactgcagacaacatgtttctgtggtgaacaaattaagattttgtgctagtgtgttgttctgttgggagttgcgtcacggtggaatcattcatgagtgatggtaaggtaaatattagtggtacctactactagggtgaggcaatgtttattaagaattgggttttgttaattggtgttcttagctgattgattaagaatattatattattggagtgtgagaagaacttgcttgctacatatgatatgattaaatagtggaatcaaatcacatagtggcatttatgcatagttctgttgttgttaggttaggacaggtcaggtcaccaaagtggcatggtacttgccactgtccaatgttttggaaaaatggatgtcggtgtaagcgtaactgtgcaagtgtgccttctctatttttttcttttctttttatatcattaatatgatatgtaatgttatgggtgtgcttttatataaaaatggtattggttcttgcccccgaaaaa

SEQ ID NO: 27061 - DNA, 933 bp, Glycine max
  Clone ID: TF_GmC1005_1
ggatcagaactaagaagaagacatggcatcgtccaaggtagcgacgacgacgacgacgacgacgaattcggatatttcgagccagcaggtatgggacggcgccaccatggagatggagtctcaagacaacatgaacatgagcatgagcctccaggatttgttgaccgaaaacgacgccgtgccaccctctcatagtcatggaaggggaaagagaaaaaccctagtggaggaacccctcgtcgtcgataaggtcactcttcagaaacagagaaggatgataaaaaacagagaatctgccgctaggtccagggaacgcaagcaggcttacacagttgagctagaatctttggttacacatctcgaggaagagaatgccatcttgttaaaacaagaggccgataggaaaaggcagaggttcaatcagctcatggagtgccttattccagttgaggaaaaacgtaaaccaaaaccaatgcttcggagagtgaattcatcccaatggtgatgtaatatgttgcttgtcctaatggactagttttcaagtcctggtgtatagataccaaacaaatgatgcatgatagtgttgaaaggataaatatgaaaaagagaggaaaagattttttttatatatacatatagctttgctgattattttccaggatcacttggagttacattgctgcagagagaaaatagatgcagccaaataattcaactaatttgattcaagctgaagcttattattggaagatccttgaattgatggatattgcggggatagatctttattgggggaagggagttgaaattagaatttatgtttaatgttagattgtctgctttttgatatttcagggagggaacactgataaaccttgaccatgtacaaacaagtatcgataagtggtatatacatgtgttatctatactgct

SEQ ID NO: 27062 - DNA, 1197 bp, Glycine max
  unsure (1)..(1197): unsure at all n locations
  Clone ID: TF_GmC295_1
tttcgtctttgtttccgtctctattttccttctaaatctctggttgctgtggttcccaaaacccacttattggttcctctgcaggaatcaaagcatagtatattattgttttgaaacttgatgtttggcattgatgactgaaatccctctttccgagtttattaggtttatgataaactcctccttcaaacccaggacccactgggttcaatctttctccgtggcctccctctacgggtcctatgtttcctaatggacctccactttcccgtcacatgtcctgatggtttaaataaggggtaacctataagggctttgggctccggcatcagctaattgcaattgttaatggttagatttttgtgcacgactttttcttttctcatttctccttttatcaccgagccaatcttatgagtgtgtgatttgcaggttgtggtagacgagagaaagaagaagagaaaacaatcgaatcgcgaatcggcgagaagatctcggatgcgaaagcgtaagcacttggacgaactgacgaagcaggtttcacagctcgcaaagggcaacggcgaaatcctcggcaccatagacataaccacacagcattatctgaacgttgaggcagagaattcgattctgagggcccaaatggaggagcttagccaacggctccaatcgttaaacgacatcgtcgacggtatcatcaacctcaccaacgcaaccaccgcctacgaaagggactgttatctaacaagcgcacaaaatatcaccaccaagaacaacacgctctgtcttaaccaacaagccgtttttcagtggtgaattgtcaccctcgctctgcctttgtggatctgacaataaaaataataatttgttctcttggagttgcttcggggaggaatcaatcagtgaacaaaaaatgaaaagttaatgtgaattagtacagtacttagggtggggctatatatatgttaagtgggagattgatagataaacagaatttgtgcaaagtgcttaatgaaaatgacctggtggcctgcaactatatgtcaggcaggtcattagtactaatggatcactcttgtccaatatcatggaaaaagagatttcggtgcatgctactgtagtttactattctatcgtgtgcttgctttaatgctacagcacttagctcttcatttttgattttataatgnaaaaaaa

SEQ ID NO: 27063 - DNA, 878 bp, Glycine max
  unsure (1)..(878): unsure at all n locations
  Clone ID: TF_GmC295_2
tttctacgcgtccgcttccttaatctctttgttggcggtctctattttccttctaagtctctggttgctgtggttcccaaaacccacttattggttcctctgcaggaatcaaagcatagtatattattgttttgaaacttgatgtttggcattgatgactgaaatccctctttccgagtttattaggtttatgataaactcctccttcagacgcaggacccacttggttcaatctttctccgttgtcttcctctactggttctatgttttctcattgatctccactttcccgtcacatgttctgataggctcgagaaggtgtaaactattagtgtctctgggtcctgcggattatttgttcttcattttttttatatgtccatggcctcatcaagtggaaactcctccattagcacaaaatctcagagctctggctccgagggtgatttgcaggttgtggtagacgagagaaagaagaagagaaaacaatcgaatcgcgaatcggcgagaagatctcggatgcgaaagcgtaagcacttggacgaactgacgaagcaggtttcacagctcgcaaagggcaacggcgaaatcctcggcaccatagacataaccacacagcattatctgaacgttgaggcagagaattcgattctgagggcccaaatggaggagcttagccaacggctccaatcgttaaacgacatcgtcgacggtatcatcaacctcaccaacgcaaccaccgcctacgaaagggactgttatctaacatgcgcacaaaatatcaccaccaagaacaacacgctctgtcttaaccaacaangccgttttcagtggtgaattgtcaccctcgctctgcctttgtggatctgacaataaaa

SEQ ID NO: 27064 - DNA, 1573 bp, Glycine max
  Clone ID: TF_GmC153952_1
tgacgacagaaggggtactaaaaaagttgagtgtgaggtgtgaagtgaattttaacagtcgttttcgggtcacggccccccttgctttgcggtctcgcgctcgcggcccgaacggcaacacaaaaagactcccacttcggccgtgaaaacctttgtgcattacccgacgcttcttcttttcttgttttcgctccaaaacccattgcttcaatcactaatactccactttcagatcggggtgtgtctctctccaacacgcacaaaaaaaggatttgaagatttggataagttgctttcagtcttggggtactaaaaaagttgagtgtgaggtgtgaagtgaattttaacagtgataattggtaaatggggacccaaactatggggactcatggtggtggtggagacagtaatgggaaacagtcaccactccagcctctggtgcggcaaaactcaatgtacagtctcacacttgatgaggttcagaatcaattgggcgatttggggaagccgctaactagtatgaacattgatgagcttctaaaaaatgtgtggaccgctgaggcaagtcagaccattggtatggacaatgagggcacagcacaagctagtcaagcttctctgcagcgtcaggctagtctgtcattaaccggtgcactaagcaagaagactgtagatgaggtttggagagatatccaacaaaacaaaatcgtaggggagaagaagttccaagacagacatcctactttgggagaaatgacattggaggatttcttggtgaaagcaggtgttgttgcaggtgcatcttctaatagaacaaataccagtactatagctggagttgattcaaacgtggcagtaccacagtttccttcacaagcacagtggatacaatatccacaagcacaatatcagcatccaccacaaagtttaatggggatgtatatgcctagccaaggtatggtccagccattacacttgggggctggagcttcattagatgttttgtttgcagataatcagatggcaatgccatcgtctctgatgggaacaatgtcagatacgcagactcctggaagaaaaaagagcacttctgaggacatgatagagaagactgttgagaggagacagaaaaggatgataaaaaatcgggaatctgctgcccgttcaagagcaaggaaacaggcatacacaaatgaattggagaataaagtctcgcgcctggaaaaggaaaatgaaaggctgaggaaacgaaaggagctagagcagatgttgtcatgtgcaccccctcctgaacctaaatatcaacttcgccgaatagcatcagctccattctgagatctgtacctagttgtagcggtttgtatatttgagtatcagggaattctccttgtggattactgtgtggttgaatccagtatgtcaagaatagctatgtgatgcatttgcatccaatgacttgcttttaattgttaagttctttataactcctctgtgaaggttctttagaaaaaaatgtaaaatattgtagttttaccattcacaatatagcccttttaatcatgccttgagaggt

SEQ ID NO: 27065 - DNA, 1256 bp, Glycine max
  Clone ID: TF_GmC2191_2
ataccccacaagctgctgctctcattcccttttccctccctattctctctcctactgttaacgttttctgtttttctttaagatggcgatgacgacaacgacggagtccgatctcgattacgagcttcgctatctcagtctcgccgtaaccgataccttcactgctgtccaaaacctcttaccggatgcgatgacttccttttcagcttgtggactaatagaccctctttgttctcaaaacctcactcccaagcattccaccatcactgcaaccattgattctcagtcatcgatttgcgccactagtaatgttgggagcccagtctcagctaataaaccagagggcagagagaatcatacgaaaggagccacaagtggttcctctgagccatctgatgaggatgatgaagcaggtgcttgtgaacagagcacaaatccagctgatatgaagcgccttagaaggaaggtttctaatcgcgactctgccagaaggtcaagaagaagaaaacaagcgcaattgtctgaccttgagttgcaggttgaaaaactgaaagtggaaaatgcaaccctatacaagcagttcacggatgctagccaacattttcgtgaggcagatacgaataaccgagtgctgaaatcagatgtagaagctttgagagccaaggtgaagttagcagaggatatggtgactaggagctcttttactacgttaaacaatcagcttcttcagacacaacatcatcaaatgagcacaccccagcaactgaacacgactaatctgcggcgcatggcgcatgtttcgccaacaatcaccgttcatggaaatgatgtctcgtacaataatggtggacagaattcagcacttggaaacttggatatgagtttcaatgacatcaatgaagtcatgaacgatgctatgagttgtggaactatttggccactcgactagacagactctctctgtagcttccaattagatcgatccatcttttatattttacgtcttgtctaatttgattagtaggctatatatgttaatgtcaagctatgctatttgtcttcgcttgattcctctttaatgatgcctgtttaaaatggcgtcttctttcgttgtatgtagttttgtataaaaggacttgattgctttatccatttctgattgtaattgcaaaacaaaatgttttctaattagggtcatgccaatgcttatggagcatttggctgacaaaatataatacatgagttaattttgattt

SEQ ID NO: 27066 - DNA, 1875 bp, Glycine max
  unsure (1)..(1875): unsure at all n locations
  Clone ID: TF_GmC1471_1
ctcgagccgaaacgatctctctttttctctcatacacttttttataataaaaaagcttttcaacttattttcccatgaagtgatcccaaagtatattagagcttactttgtttcttgtctcggatttcataattgataattaattaatttcaccaacttgttggcttttttagttctataaattccccgcttgaatcacacagagtcctctcttccactctctccctctttcctatcacactttctagatagctagcctgtaagatatatatatagatatttcatatatatcctatggtccgtgagtgcccttgttctgtaccaaccctttcttccacatgttgagtttcagcatcgtcctctcttgagtccccatatcaaatacccaccgaattcaaccccccatataacaaatctcctcccatcccatttttcagcaccaaagtttgaaacttttctcaattgggttgaggagagtttgactcaaatttttatttttctaacgaagcagtagctattagaagtgcaaaaattaaatgtccaacatcttcttgttgatgtttgagattcatgtatccgattctcagtgaaatcttcttttccgggtgtatgatcaattccactgttaggcgcaggacccatttagttcaatccttctcagttgctttcctctattggttgtactacgtttcatgatttctaaaccttccttagtctaataatcatctactactagctattattattattattattattatcatcatcatcatatataataaaatctatctgcaatattatttttctgagtctttgtgtctagttatccgtgtctgggtcctggtcctgcctattgtgtcaattaaattgagaatggtgtcttgtattgaatcatatatctatcatataaacatggcttgctcaagtggaacatcttcagggtcattatctctgcttcagaactctggttctgaggaagatttgcaggcggtgatggaagatcagagaaagaggaagagaatgatatcaaaccgcgaatctgcacgccgatctcgcatgaggaagcagaagcacttggacgatcttgtttcccaagtggctcagctcagaaaagagaaccaacaaatactcacaagcgtcaacatcaccacgcaacagtacctgagcgttgaggctgagaactcggtgcttagggctcaggtgggtgagtttagtcacaggttagagtctctgaatgagatcgttgacgtgttgaatgccaccactgtggcgggttttggagcagcagcaacatcgagcaccttcgttgagccaattaataataatagcttcttcaacccgttgaatatggggtatctgaaccaccctattatggcttctgcggatatattgcagtattgagatccatggtctctgagtctgagatttgatgaggatttcttcttcttcttcctaggtttgagtctgttgagaaattgtaatcactaccatatgtggtgataaggaataataataatgaatgtgtatcgtaaaacggatgggattgttgggtgctggttctgtaaatgtggcatgggccattactgtaatttgtcaccctcctttcctatattattataataataatattgacctacttctcataataatattgaccattatattattttattacccaaccttccaatattattaataaaaagattagttaaatactaaaaacaaaaaattacttnanaaannnnnnnnnnnnnnnnnnnnnnnnnnnnnnnnnnnnnnnnnnnnnnnnnnnacncnngnnnngggaatgggatcggagtcatttcannnnnannnnngnnnttttcgnnattggngtatcgggatgcattttcg

SEQ ID NO: 27067 - DNA, 1665 bp, Glycine max
  unsure (1)..(1665): unsure at all n locations
  Clone ID: TF_GmC1471_3
ggctcaagcattggctcaaggctcgagctcgagcctccctctttcctatcacactttctagatagctagccaaccagagtaagatctaaagatatttcttatatatcctatggtccgagagtgcccttgttctgcgccaaccctttcttccacatcttgcgtttcaacctcttcctctcttgagtccccttatcatcaaatacccttcttcttcaacctccaccaaattcaacccccacataacaaatctcctcccatcccatttttcagcaccaaagtttgaaacttttctcaattgggttgtagagagtttgactcatcaatttttatttttttatttttattttctctaaccaagtagaagtgcaataattaaatgtccaacatcttcttgttgttgatgtttgagattcatgtatccgattctcagtgaaatcttcttttccgggtgtatgatcaattccactgttaggcgcaggacccatttagttcaatccttctcagttgccttcctctattggttgtactacgtttcatgatttctaacccttccttagcttaataatcatctatctaaaatatcataatatcttctactagctagttttatttttattatcacaataaaatctatctgcaatatattgttatttttattttctgagaaatttgtgtctagttataagtgtctgggtcctggtcctgcctattgtgtcaattaaattgagaagggttgtattgtattgaatcatatatcgtatcatataaacatggcttgttcaagtggaacatcttcagggtcattatctctgcttcagaactctggttctgaggaagatttgcaggcgatgatggaagatcagagaaagaggaagagaatgatatcaaaccgcgaatctgcacgccgatctcgcatgaggaagcagaagcacttggacgatcttgtttcccaagtggctcagctcagaaaagagaaccaacaaatactcacaagcgtcaacatcaccacgcaacagtacttaagcgttgaggctgagaactcggtgcttagggctcaggtgggtgagttgagtcacaggttggagtctctgaacgagatcgttgacgtgttgaatgccaccaccactgtggcgggttttggagcagcagcatcgagcaccttcgttgagccaatgaataataataataatagcttcttcaacttcaacccgttgaatatggggtatctgaaccagcctattatggcttctgcagacatattgcagtattgattgagatgcttcatctctgagatttgatgaggatttcttcttcttcttcttctgggtttgagtctgtcgagaaattgtaatcactaccatatgatggtgataaggaataatattaataatgaatgtgtatcataaaaacgggtgggattgttaatgttaggtgctggttccgtaaatggggcatggggcatgggccattactgtaatttgtcaccctcctttcctatataataataataataataataataatactgacctctctatgttattattctcccaatcaaaaaaaaaaaaaaaaaaaaaaaaaattttgttatttttaatcgaatgatttgttttaaaaacaaaacagaaaaaaaagtncggacaagggctgctgattctacttcag

SEQ ID NO: 27068 - DNA, 1503 bp, Glycine max
  Clone ID: TF_GmC726_3
ggtcgaccacgcgtgccccacgcgtccgcccacgcgtccgcccacgcgtccgcccacgcgtccgagatgactcgctcagagagaagaaagaacgaacaattttagcttcaaacacacacaaacacatcgtcatcatcttcatcactctccgacacttgaaactctcatgttgttcctctagaaacctcttccgcaccaccgtggaattttcctgctccttttgcacaaaacacacactctgcttctattataattcatgcttgtccttgtccttgtccttgtgctggtttttttctagatagggtttgcactttttaatcagaactagccaagaccaggtacagaaagtactgtgttagttaaaaaaaaaaaaaactttcatcaattattatcaactttattcggtagtgtagccttgtaggtgaactatgtgtcaggattttgaagtttgattctcttttatattgattgaatagttgtgtgtagaaactagaaaggttagtgattattattgagtcaatggaaggtgttgatcagagtaatatgaatcgaaatagttgtgtatttggttcatcttcatcttcatcatcagggggtgctcttagacccccaaatcgattgaatagtaatgttatgcttattaatcaaatgggtgttactgagaaccagaaaccctatggtataccaccctcacaccctaataccaatatttatctgaaacaagcatggagtttggaaatggtgaattcagctcagaggagctaaagaaaataaaggagaacgataaacttgctgaaattgccatggccgatcctaagcgtgctaaaaggattttggctaatcgtctatcagctgctcgctcaaaagagaggaagatgcggtacatttctgaattagagctcaaagtacaaacacttcagacagagacaaccacattgtctactcagtttaccaaattacaggtgtgtacggtctgagttgagccaatattcccttttcttcagtttttcaattatattttattgtgttgaataatgtttgcttctagcattcatttattcttttctttcctttcttttgttgtgcttgtctacagatggataattcagagctgaaaagtgagaataatgagtacaaattgaggattcaagccttggaacagcagtcccaactaaaagatgctctgaatgagaccttggatgctgaagtgcggcgtttaagacgcacagttgcagaacttggtggagagtctcttctctcaagtcgcatggctcaacagcttgctattagccaacaagtgttccagttacagcaccagcagcaccctaaccagcttagacatgttcaactggacaatagccattcccaggagcagacacagactcagtcacagtgccacaatggcaaagctactgcctactgattagcactctgataccatgtatgctcaatgtttgtgatatgaatctgaataggatattgcatgaccaaacaagctcaagt

SEQ ID NO: 27069 - DNA, 520 bp, Glycine max
  Clone ID: TF_GmC143038_2
ggggtgaagcatggcctcatggccacccaaacctacagagattttttgtgtgcatgcgagggagaaagcgatggcctcatcgccatgtgattgctggccccatctctctcctccttcttccattgagcatgtctggaacgacatcaaactcgactctctctccaattcccctgttgacatagacttcaacaacaaccactctgtctctgattcttcttttcttaacctcacttccacttcctcttctgtctttcacaaacatgaccatgaccactctcttctttctgtctccaacacttccttcgaagcctccggctctaagaaaaccaccctgctagatcaacgccatgcgcgtataataaaaaatcgagaatccgcggttcggtccagagctagaaaacaggcttatagaaaaggcttggaagttgaaattgcccgtttaacggaagagaattccagactaaaaagacaattgaaagagttgcagtgctgcttgtcctcctctgataaccctcccact

SEQ ID NO: 27070 - DNA, 1177 bp, Glycine max
  Clone ID: TF_GmC463_2
tttccggtccggattcccgggtcgacccacgcgtccgctcttcccccattttttcttctttaatccctcgcctatatcttcagaaaattagatctgcttcagatctagggtttcccttttccaaatcacgagtccgttgagtttgattttgtggatgaaagcatagggatagggcttttgcaaacctctccaatgtttctcgaaattatatgaccatgcgtcgaattcgtatgctgcactccttctccgtcgtgttcctctactggttctacgttttctcatgaactccctctcaaatccgtaattaattagatcgatctccttccgtagttaatccttgtctctttttcaataattaattagatctgcgtctcctatttcctttttttgttttgttctgttatcaaaatcaaataaaaaatctccttctcggaaatggcgtcgtcaatccaacaacaacgctcgactgcaacaagttctggatctgaaggaggaggagatccgcaaatgatcgacgagaggaagcggaagaggatgctgtcgaaccgcgagtcggcgcggcgatcgcggatgaggaagcagaaacagctggaggatttgaccgatgaagttagcagattgcaaggcgcgaacaagaagctggcggagaacataaaggcaaaggaagaagcatgcgtggagaccgaaaccgcgaacagcattttgagggctcagacaatggaactggccgatcgattgcgcttctttaactccatccttgagatcgctgaagaggtcgagggattatccgttgagattcccgagattccagatcctctcctcaagccctggcagattcctcatcccatacaaccgattatggcccccgcaaacatgtttctgcgttgataatttcttttgctctttctcgtttggggattttagtttaattagtgtggtaacttttctctgttatgtgtattattactattagtgttatctgtttgtgtcaaaaatatcgtgtggtccgcaatgcattgggttcctgagagagatgaatgtgaggtcaggtacagggtgttgatggctggtagtggcagtgtccctttgtgcgtcttgtaatcgtttttaaatagtcgtgttttattttaatcaaaagcaatcatcttcaatggtggttgttttatttttatttata

SEQ ID NO: 27071 - DNA, 651 bp, Glycine max
  unsure (1)..(651): unsure at all n locations
  Clone ID: TF_jC-gmro02910074b08a1
ggctcgagctcctctcctccatcacctctagtttttgtataacccccgtcactctgctcccttaattaattagccaccatgctctccgccctcactccttccgaccccttctctcccttctcccccttctccgccggcttcacgccgtgggatgacaacgacgattcccacgccctcttctcccccaaaccggtctctgcttctagctccgcctctgactataaatccgaaccgaacccaaccgaacacgtatgcgcctcgtcctcggtgatgatggacgagcggaaacggcgccgcatgatatcgaaccgggaatcggcccgcaggtccaggatgcggaaacagagacacctggagaatcttcggaaccagttgaacaagtgcagggtcgaaaaccgggaactcggtaaccggttgcagttcttcctgcaccacctgaaccgcctccgaaccgaaaacgaatggctccgctccgagcgaaccctgctacgccaaanagtcgccattntaacacanatnttgatttttcaaccaattcaaaccaccttctccctgctgcatgaccacatgcaccaacaacaacacacctngctcatgacaantaatccagtantantaaanananattatatatatatatatattatatat

SEQ ID NO: 27072 - DNA, 2539 bp, Glycine max
  Clone ID: TF_GmC1081_1
gtcgtgggtgtagagagagaaagcagaaagagagttctttttttcttctggttcttggtttggtttgttgctcttgttctagagagagagagagggataagtgcctgctccttcggcatttccgtcagacaaagttaacacttccaagaccgattaatcaattcgccccttcaccattccctattacatgaactctcccaagattttaatttgaagctgaaagaagaatgggagaaaatgaagaagcgatgcagaggcttcactttctgaagcagccgttaaacatggagcaacttagcatcccgcaattcaacccctcgcaaatgcgcgcgaggcagcatcatcatcagaatcagttcgacggtgggaacagtaacaagcgggctggtataccaccctcccacccgcacccgatccctcccatttccccctactctcagatcccggtgtcgcgtcagcacaacaacatttcccctacacccacccacacccgatcactctcgcagccctcgtttttctcgctcgactccctccctcccctcagcccttcccccttccgtgactcctcctcgacttccgtgtcggaagctgctgacgtgtccatggaagatcgcgacgtgagttctcattccctgttgccaccctcacctttctccagaacactcaacaacagtaatttaccattaccccctcggaaagcgcatagacgctctaacagtgatattccgtttgggttttccaccgttttgcaatcttctccgccgcttatccctcttcggaaccccgtttcagcgaaacctgctcagttggtgaaacgggaaacaccgtgggacagggttgttgagcataatactaatactaataataataataatgtagagggatccggggagaagaaatctcctgaaggggaagtggtggatgatcttttctctgcttacatgaatttggatagctttgatgctttgaactcttctggaaccgatgataaaaatggaggcgaaaatcgcgatgatttggatagtagagccagtggaactaagaccaatggtggagacagtagtgataattcggctcgagtatgagagtgggcatggagggagtgagaagagggaagggatgaaaaggagtgctgggggtgagattgcacccactactaggcactataggagtgtctccatggatagtttcattgggaagttgaatttcgatgaggagtcgcccaagctgcctccttcccccgggcagagaagtgctctgatgtcgcctgctggtggaattgatgggaattcggcggccttcagcttggagtttggaaatggggagttcagtgggcctgaactgaagaaaattatggccaatgaaaagcttgctgagattgccttgatcgatccaaagcgtgccaaaaggattttggccaaccggcaatcggctgcgcgatccaaagagcgaaagatgcggtacatttcggagctagaacacaaggttcagactctacagacagaagccaccacactatctgcacagcttactctgttacagagagattcggctggactcactaaccagaatagtgagttgaagtttcgccttcaatctatggaacaacaagcaaagcttcgagatgctctaaatgaggctcttactgctgaggttcaaagattaaagattgccacagctgactaagttgctacagctgaactaagtagcgattcgcatggttctagctgtttgattcctcaacattctgtcaaccctctgatgttccagcagcagcctccttttgcatcccaacaaaacattcatcttcaacagcagcagcaccgccagaatggtaatgccaactcaaattctgacttaaaacaatagtttgggaaggagttcctgcagctgcatggttgtttctttatatattcgctgctgattcattgcactctcggtttcgcatatttacaaaaggttttccttagttgttatggtctcaagtttgattcgcattacctgtccagctcggacagaaagtccatatacaagttctaattcctgtcttatatctagattatcatagagcatatttaatttcagtatatatattaaattgtaagcattatttggacattttatgatgacattttagagaacctgttcaactttccttttgtaaagaatgactattctgttgtggatctgttccaattttccgatcggagtatgtggaagatgtagcgatcctgagagaagcagagcctggagtcggactccgccgaaagcttctcgaggatacggcgggagacggcgccggtgttgccggtgacggcgctgaactccgccaggacgaccgtgcctctggccaccaaagcgtagaagatcgccatcggcagaagattagggagaacgttctctgcctctagctagatcttcgacttcgcagcattggaaaaccacaacgagattgttgttatcaaatcggacgcgtgggcggacgcgtggccgcacgcgtgggcgaacgcgtggacggacgcgtgggcggtagaaaggg

SEQ ID NO: 27073 - DNA, 779 bp, Glycine max
  Clone ID: TF_LIB4280-015-R1-K1-G1
ccacgcgtccggttgggcttgtgggtagacacggatgtgctaaagttttcacttttgttttgacacacgttgctgatttttttctcacacgagttactccaactcaaggggaattgttgatgtggtggtgagaatgatgtatggggagtagaactacctggagggttgttggtgttgaagatgacaagggagctgaaagaggaatgccgagcttcaattctgagttacccaattccaattcatgctatacagaggggaacacaattgattcttttcgtgtttctgactttggagcatttgatcagtcatatcacatagaggatgctgttgacctcagtggaaacccagtttacaattcactaaaggtaaatagccaaacaatttctccgggttctgttcacattagtagccttggtcagttgccaatttcactcgaaaaaagcccattgacaaatcaaacagagccaccgcataggttgcgattacagaaggttcaatcatcaaatcctggcacaatattagttggtaatacagataactgggaggagtctaccatggctgatgccagtcccaggactgatatttctacagatggtgacactgatgacaagaatcatccgtttgatagaaatcaagcccttactgctgtttccgactctagtgacagatcgaaagataaatcagatcagaagactctccgcaggcttgctcagaaccgtgaagctgccagaaaaagccgcttgcgaaagaaagcgtatgtcccacagttggaaagtagt

SEQ ID NO: 27074 - DNA, 729 bp, Glycine max
  unsure (1)..(729): unsure at all n locations
  Clone ID: TF_GmC6275_6
cttagatagattgatgcctttatttttatctttgttttgaactactatgattactgttttctgtataggagtatgtgttgaatgattattgagttgcagcactgatcagttcttagaacatgaattcagcatccccgcagtttgtttccccgagaagtatgagtgtgtacgatccgatccaccagattagtatgtggggagaaggcttcaaaagtaatggaaatttaagtgcagccatgcctttaattgatgaggcagacatgaagtttgatagtcagtcagaggatgcttctcatggtatactgggagaacctaataagtatgaccaagaagctagcaaacctactgataagatacaaagacgtcttgcacaaaatcgagaggctgctcgtaagagccgattgaggaaaaaggcctatgtgcagcagttagaatcaagtcgtttgaagttgatgcagttggagcaagaacttgaacgtgcaagacagcagggaatgtatataggtggtgggttggattctaatcatctgggttttgctggatcagtaaattcaggaattacaacctttgagatggagtatggacactgnggtgaatgagcaaaatagacaaatcacagaactgagaaatgctttaaatgctcatattgggtgacgtagagctcaggattttagtagatggtttgatgagcccctatgccgaaatgtttcccatgaaatctgctgctgc

SEQ ID NO: 27075 - DNA, 1475 bp, Glycine max
  Clone ID: TF_GmC9762_1
aacttcgcgtccgcatctatcctcctcctaaaaattggtcaaaatctatccaatctctttgcatattccttcttatcatcatcttcttcttcttctctgttgcctctagaattgaaaagttcttcttcctgcccatagtctttgacacccttttccaacctctagattttttcttccctctataattatctccttcacagaaaccttcttatcccacatatcatcaattaccttgttcctctcaaagtttgattctttttctcttgaattggattgttataatttttgttcatacttacatgttatgcagttatgaatgattgagagacaacacaaatgtcttctccagtgatctccgagatcctcctctctggcttcaccataaactcttccctaagacgcaggacacacttggtgcaatctttctctgttgttttcctccactggttctacgttttctcatgaactaaataaattaacctcgtacatagtataaacatagtacgtaccgtgttcttttttcaataccatagcttattcaagtcattaaacctagctagcaaattagggttattatttctcacaaaactctggttctaatagcaaactagtgcatggcttctcctggtagaagtggaacctattcatctgggtaaaaggtctcttcaaaactctggttctgaaggagacagagacatcatggaacagaggaagaggaagagaatgctatccaatagggaatcggcacgtagatcgaggatgaggaaacagcagcacctggaaggtctcagtgcccaattggatcagctaaaaaaggagaacacccaaatgaacacaaacataggcatcagcacgcagctgtacctcaacgtggaagctgagaacgcgattctgagggctcaaatggaagaactgagcaagagattgaactctctgaacgaaatgataagtttgattaactccaccaccaccaccaacaactgcttgatgttcgatgaggcacaggagactacgactcagttgttcaatgattgtggcttcatggatgcttggaattacggaataccactcaatcaacaaatcatggcttacgctgacaatgacatgttgatgatgtattgattggtgaaattaattttgagttggagtttttgtgaatcctggtgctaatcctttgtaacacaactacaacacgtgtttgttgtctcttgttttaatttgtttttttgtttttgtttttcttgtaataagtaatgtctattgttttcagtttatgttatgtttagggttgtctttgtgtattttaagaggggttattttttcttctcgaaaatgtaaaaaatcgagcttttattttccatgtagtagtatatgtgattttcgtgaatttccactcatatcaattaaatctccagcttatgcatagtataatattccatatttgttatgatatttaaaaacggacgcgtgggcgt

SEQ ID NO: 27076 - DNA, 1389 bp, Glycine max
  Clone ID: TF_GmC9762_2
agccttccgccgcgtccttcctcctcctcctcctaaaaattggtcaaaatctatcctatctctttgcatattctttcttatcatcatcttcttctctcttgcctccagaattgaaaagttcttcctctgcccatagtctttgacacccttttccaatctctagtttttttattttcttccctctataattatctccttcacaaaccttctatccctcataacatcaattaccacaaacccaagccttgtacctctcaaagtttgattcttttctcttgcccaaagcgatttggattgctataatttttgttcgtactacatgttatgcagtcatgaatgattgagagacaacacaaatgtcttccccagtgatcagcgagatcctcctctctggcttcaccataaactcttccctaagacgcaggacacacttggtgcaatctttctcagttgttttcctccactggttctacgttttctcatgaactaaattaactgacctcgtacataggagtataaacatagtactcgtgttcttttttcaatactacatcacattcaaatcattaaatctagctagcaaattagagttattatttattatcattgcacaaattaaatagcatactagtacatggcttctcctggtggaagtgggacctattcatctggttcaagttctcttcaaaactctggttctgagggagacagagacatcatggaacagaggaagaggaagagaatgctatccaatagggaatcggcacgtagatcgaggatgaggaaacagcagcacctggaaggtctcagtgcccaattggatcagctaaaaaaggagaacacccaaatgaacacaaacataggcatcagcacgcagctgtacctcaacgtggaagctgagaacgcgattctgagggctcaaatgggggaactgagcaagagattgaactctctgaacgaaatgataagtttcattaactcccccaccacaacaactgcttgatgatgttcgatgaggcacaggagactaccactcagttgttcaatgattgtggcttcatggattatgcttggaatggaataccaatcatggcttccgctgacaatgaaatgttgatcatgtattgatcttgagttgtagcccaacacccacgtcttctcttgttttaattttttttttttttttattgtaatagtgatgtctattgttttcagtttatgttatgtttagggttgtcttgtcttgtgcgtatttcaagagggggattcttttttcttctcgaaaatgtaaaatatcgaccttttattttccaggtagtgattttcgttcctttccccttttttaaaaaaaaaaaaaaaaaaaaaaaaaaaaaaaaaaaaaaaaaagaa

SEQ ID NO: 27077 - DNA, 1943 bp, Glycine max
  Clone ID: TF_GmC1737_1
gcaggagtccgttgagcgtccgcttatgagtacgaatttgaagtttaaaactgtttactgtttcaggcgttgataacatttctttatacattaacctcctattatttttgtttggttcaaagaaaaaaaataaaaactagaactgtctattctgtttgctgtttcaatgatttctgtattcgcaactgagtatgttcttttgtatttttttcgaagtggaaaatgattaaatttatgctccctttttggtagatagtaaagttaggatttttatttcagcaatgtacgttcagctgttcggttgtaatgacccgcagggtgtttgtttgttgatggcttttatctttttttttgctctcatgtcatttcttatgtgcgtgccctgagcatctattctgtattactttgattcccttgaaatctgatctggcttatctttttttttttcttcttttgggaccaattttcacccactatttccaccctccacttcaaatttacttgctttgtgtttgtgagtgcctgttatcaaatctccaaaagctcaaagaaactggtattgtgttcggcataaggaattaggattgatttcagggtgtattctgtacctttttcatttttatctttgttttttcatttgtgctttctgaagagctttggagatgtatgatatagaattgtaggtttgtgttgttagggttgagaaaaatgggatctcagggtggggcagtgcaagagccaaagactactacccctttggctaggcaagggtccttgtataatctgacccttgatgaggtgcataaccaacttgggaatttggggaagccacttggcagcatgaatcttgatgagttgctgaagagtgtgtggagtgctgaagctggtggtggtggtgaggcttctggctgggactttggtgttggtgatgctactaacatgccgcatggcaaggctgctgcttccggctcctctctgaatcctcaggggagcctaactttgtctagggatcttagcaggaaaactgttgatgaggtttggaaagatatgcaactgaagaaggtcactaatagggataaaaaaatccaggaaaggcaagctacactgggtgagatgactctggaggacttcttggtgaaggctggagtggttgctgaagctttgcctaccaagggtggggctatgtcaggggtcgattcaaatggggctttctcacaacatggccattggttgcaataccagccgctccctgctgcgacgcagctcccgaatgtgagggggggtgatggggcggcccccgccattcagcagcctttccaggttggagtgaatctggttttggatgcagcatactctccgctcgtgcgtacgataatggggacgttatcggatacacaaactccaggtcgaaaaaggggtgcctctggtgttgtggtggagaaaactgtggagaggaggcagaagaggatgattaaaaatagggaatctgctgctcggtcacgggcaagaagacaggcatacacacaagaactggagattaaagtttcacgattagaagaggagaatgaaaggcttagaagactaaatgaaatggagagggcattgccatctgtgccaccacctgagcctaagccaaagcaacagcttcgcagaactagttcagccatcttttgatatcttaattgcaatgaattcctaattcttgcccatgctatcacatcacatagctctcatgtgcattatactcccgcctcttcaagtttggttatagatgggaggctattgtttgtgatgctatcagttctccccagcttgctctattctactaatgtttacctcttatgtatattttgattacaacttaagctgctctataaatatacttactctaattttgggcccatttgtgggaattatgaaattataagtcttactttttattt

SEQ ID NO: 27078 - DNA, 1148 bp, Glycine max
  Clone ID: TF_GmC11345_1
ggtgccacagagacggcgcttcagccgacctacaggggaatgagacataacaaggtttcggttagtggtggtttggaaagagaagatgctttcacacagcaacaaattgttaaactgaaaaaaaatgaggagtttggcaatgtatgcagaccaaacaatagtaaaaccaaccaacttcgtgggactctaaatggaaactgatcaattaggcaaaggaaagtaggtgagaacaataaacaactaccaaaacgacaacctcatccattaaaagtaaacttaaaacactctcaaagacaagtgcagaacaaagaccaacacccacaacatccaccacgactttttccaatgcgagtaaatgtgacttttgttagtgctcctacgcatttgttgaacaatgctcatgtaacagctagccctggcagtaaaatatcacctgatgttattacaaggagtaataatgttgataactctccaatatcaccgcattatgtaatcaacaggggaaggaaattcagtgccatagagaaagtggttgagaggagacaaaggagaatgataaaaaatagagaatcagctgcgagttcaagggctcgtaagcaggcctacactttcgaactagaagctgaggttgcaaaacttaaggaattaaacagagaattacaaagaaaacaggaagaaatcatggaaatgcagaaaaataaggatctggaccctgcatgcagaccaagggtaagtaaaatacactgcttgagaaggacacttactggaccatggtagattatgtgaatgtgagtcattgtttccaagtgacatctacacgaaggaagccattatgtcataagggctggggtatatatatgtatgtgagacgtgaggtaattgcagtccaaaactagatagggtggtagctattgttagtgttattatgtataggaactaggagagttgagttgtacattaaacttgtatctttggataacaaattattattatatgcttgaatgttattttcttttgtgttgcaggatgatatacaagaaaacacaaaagctttttcgtgttagtaaacgatgcgtattcgtgttgtaagttttcatagaggttgttgatttatcctaaattaaaaattagagattcttctcagcttt

SEQ ID NO: 27079 - DNA, 2417 bp, Glycine max
  Clone ID: TF_GmC858_1
gttcttcttctccttgtggccttcttccctctaacattccctgtggtttctctgaacatatttatataaaggttgtgctatagccttagaggctcatttggtttaatttgcctatgtcatatcatatgtactccttttttcatttcctctctcatttttggagtatttgattttatatgcatatatatacacacacattacaggtatatatatatatatataatcataaaatatataccaagttatgttttttgtttatttgtttatttatatatttctctctttcatttttgtacttcttctttcatcttttcatctttcttgtcttagagttgtgttgattgattggtgtgacccaaaaaaatggctcaattgccaccaaaaattctcaaacatgacacccaattggccagacttctcttctcctcaccaaaagaatcctttcctcaaaaaccacgtcatcaaaccaaaaccctcaatgggtgaaggagtttcttgagtcctcactgggaggccgcggggccccccggcggccggtgagcgactccgtcactttcctggaggcaccattgttggaccaccttcttggaaaaggtggcggtgtggtgggtggtggcggcggcaacaaagagtgcgagagagtttatgatgtacaattcttatccatgtttattgatgaagctctcagggaacaataacaataataataccatgatggcacacacgttgtcctcctcctacccttctacaccccctgatcacaacagcatcaatgatgagaaggaaatggaaaataaggaagaggaagagaaaaagcaagtacaacatgaaacagatgatgaagataaaagcgaatgcaaacacgaaatcacacaacttcccaacactaatgacactaataatactactaccaagagggtcaaaagaatcttggcaaatagtaatgcaaatgcaacatgttctagtgagaaaatcacagaccccaagagggtcaaaagaatcttggcaaatagacaatctgcgcaaagatcaagagtgaggaaactgcaatacatatctgagcttgagcgaagtgtgacttcattacaggccgaagtttcagtgttgtctccacgggttgcatttttggatcatcaacgtttgcttctgaatgttgacaatagtgctttgaagcaaagaatcgcagcgctggcccaagacaagattttcaaagatgcacatcaagaagcactgaagagggagatagagagacttaggcaagtttatcaccaacaaaacataaagaagatggacaatgctgcagggtcaccaccatcccaatccccaccatctccatcaccaaaaccacgatgtgaaactcacactgaaaaggaacagcttatcaatgtttgaagtttgaatttgaaccctccatttgaagactcactcactcaccctttatagactatgatcaaattaacatatcaaccacctagcttgttcaaaaaaatatcaaccacctagtgtatgctagtttagatgatctgtgattcctttcaatattaaaaaagaaattgcagaattttgaaaataggagaaaaggagaaaaaaaatatgtacaaaacttgaatgcatttataggtgattttggtattattatttttttatcagaatctgagttttatctcgataatctgtgtaattcatcaaatgccaacacaaatgccaacacagattaagtaaaaccctaattttgattagaaaataacaccaaaatacctattaaagtgcaattaagttttgtgattagaagaaaaaaaaaatgttgtgtgactgcttgtagttgtaatgtaatgaatgtcatcacgtactgttgggtagagagagggtgagaatttttattaggcaatcgatgatttgatgaagggaaatgttgttaaatgagaagagggtcatcacattacattataatgtggtgtggtgaggccacattggtggtggtaggcttttgctatcaaactgagacagtcacgtgatgtgtttactttaaagaaaagggggaccactcaagttgcatgattgagaatgcagggaaacacatgtgcaccagtgacatcaaagagagggtggaagaaaaaaacagttgtgtctgctttaactagattctttcagttattttttattatttcttattattatttgttttcttcttgattattttcttttaatttaatttttattttttcttgggttttttttcttccaatattcaagttggaaaacaaagactagtgggcgtgtgtgttgggatggatgaaaggaaggtatgtcattatcagtgaaagtctcatggctcttctctgagttttgttgcactttgtgttactgcttttaaggcatgtgattatctttatttgacgagttaatttgagagggaa

SEQ ID NO: 27080 - DNA, 2051 bp, Glycine max
  unsure (1)..(2051): unsure at all n locations
  Clone ID: TF_GmC16145_1
gtgggtgcgggacaagcaaacgaaaagtaaatcaatcaatcgttggaatcactcaaatgaaaggtacttcatggtatcgctattttctcttttcttattactttttcttgttagggatttgttctttagtgcaattgcaaatcacacattagttgtatttagtgaactattaggtgctttccggtttgaatttgggtgtttcccttgaaatcgatgacggcgagctttttttctccaagcatgaagtggtttcgagtcccaacatgggtaagcatccctgcagcggttcaatggacagtttcttcgacgagcttatcaaggacacgcacgcctgcacccacacccacacctgtaaccctcccggccccgatttctcccacactcacacgtgctaccatgtccacaccaaaatcgtccccgcccctgaggaggaccatgtcgccaccgatgacaccgccgagtccgccgagaagaagtcgtcgtcgtcgaagaagcggtctctggggaacaaagaggccgtccggaagtaccgcgagaagaagaaggcgcgtgcggcgtcgctggaggacgaggttgtgaagttgagggctctgaaccagcacttgatgaagaagctgaaggggcaggcggctctcgaggccgaaatcgcgaggctcaagtgtttgttggttgacataagggggaggattgaaggggaaattgggtcgtttccctaccggtggctggttcttatgtgatgaacccttgtaacttgccgtgtgatgatagggtggattgccttcaccctgatgggaggattggggagactgcggctttgaatggggaagagtttgatggttgtgaatttgagaacctgcagtgtctggcaagccagaatttggggctcaaggatcttcgcgcttgtggggttggggttggacacacagggtctaatgtaaattcttctgccttatcaaagaaaagaaaagggggatctcgtgctgcaacagctggttgaagaattgataatttggtggttttcatccttggcatggtaatatctccttccaatatctcgttaccagttgcagcatcagctatccatcaagtcattttttaaaaataattctctctttttgatccactactgcattataatggttcgattggctgctctactatggaagattagtcatagattaatgttttatttaaacaaaatagagtagttgatctgcagccagcatagcttatggccgagacagatttggtgcttctctttgcaattaagtttactggttttttttattatgcatgggacaagttaaactgccatcataaaagtttctatgctctgtcaattttaaatctgtcaagtatgtgagtagtttttactttgtttaataataataggatataaagtggtgatttttctaaattcgctagtttttcattgctggattacagaacttagggaagatggggtgtgtttcatctttcagtacttagtgatgtggacaggtgagacaccaatgtcattttgtgtaatataaaatcttgtgagtgaaataataaagttggcttgtatggttgtcggcgttgttcattgtttttcttaataatatgagaggtttacttctgtctttagcatttttgctggacaagggtagaaggaactgttgtcctctaactgaagattttgcatattggcatgtcttctacaagttaagacagacaagtgaatggttttgtatttgagggcgcaagtagctgtttcaaatcgatgatgggaaaagcatatgtgcctgtctgcacttagagaacaagtcttgaatagatttcgatagttataaatgctcttgttgatcctctcttaggcagggaattaaaaaaaaaaaaaaaaaaaaaaaaagcataaaaatgctcttttttttcctctttnggaatgaaaaataaaacattacattattgtatcttctacttcgaccgccgttttggacaaaatttgtaataattttactttgcgttagagtctctatagtaaataattgcttaaataaattgtttatctt

SEQ ID NO: 27081 - DNA, 1080 bp, Glycine max
  Clone ID: TF_GmC16145_2
gtggacccagaataaggagaagaggtagtggtcttggccctacgcgaattatcatcgtagaacaatcagacattcacacattctcgatcacatgtaagtctgagactagaagaatacgtataaattagaaccgattgaaagtaatcaatccgtggattctctgaacttatcgcttcttcccggtttgaatttgggtgtttccgtttcaatggatgacggcgagcttgatttctccaaccatgaagtgttttcgagtcccaacatgggtgagcttcccagcagcggttcaatggacagtttcttcgacgagcttctcaaggacacgcacgcctgcacccacacccacacctgtaaccctcccggccccgatttctcccacactcacacgtgctaccatgtccacaccaaaatcgtccccgcccctgaggaggaccatgtcgccaccgatgacaccgccgagtccgccgagaagaagtcgtcgtcgtcgaagaagcggtctctggggaacaaagaggccgtccggaagtaccgcgagaagaagaaggcgcgtgcggcgtcgctggaggacgaggttgtgaagttgagggctctgaaccagcacttgatgaagaagctgaaggggcaggcggctctcgaggccgaaatcgcgaggctcaagtgtttgttggttgacataagggggaggattgaaggggaaattgggtcgtttccctatcagaaaccaacgccgaatgcgaaccctccggtggctaacttgcctggttcttatgtgatgaacccttgtaacttgcaatgtgatgatcgggtgtattgccatcaccctgatgggaggattggggagactgcggctttgaatggggaagagtttgatggttgtgaatttgagaacctgcagtgtctggcaagccagaatttggggctcaaggatcttcgcgcttgtggggttggggttggacacacagggtctaatgtaaattcttctgccttatcaaagaaaagaaaaggtgggacgccattcatgccatgaactttctgattatagggggaattgaaatgtttgatttgttactagttagtaaa

SEQ ID NO: 27082 - DNA, 556 bp, Glycine max
  Clone ID: TF_LIB4391-035-R1-K1-D6
accccgtccattgcaaagacgcgggcccaaattccatggctctggaaagagaggatacgctagaacaatcacgtgttattgcatctggtcatcgtggatacagaccagcacactcaacagcgacagaaccaacaacagcatgtgatggtagtagacggagggactagccaagtggcctattcttctcactaccccactgcttgcatggcggcttctgccacgcccgctgtagctgctccttccccatctgacgctccagctggcttatgtacttctgcacaccagcttgactaccatcaggcacagaatgtacaccaccaacagctaaaacaccaacaacagcatgttcaaatgttcatcggccaaccatactgcactaaattgaccgaacaatagactatggaaaccatacgcttcctcttgctcgtataaaaaagataatgaaaactgatgaagatgttcggatgatactagcacactctccgtgcatatgagcgaacgctagagagatgtacatactatagttagacgagcgatcttggatccacacagtact

SEQ ID NO: 27083 - DNA, 1452 bp, Glycine max
  unsure (1)..(1452): unsure at all n locations
  Clone ID: TF_GmC6781_2
cttctccaatgtccgattctctcaccgatcttgcgccaaatacaaattcgttacatcctaacccagggttccgacgagcatggtggacggtccgacgagtccaggcaatggtagccatgagagtggcgagcatagccctcgctctaacgtgcgcgagtaggacaggtacctccccatcgctaacataagccccatcatgaagaaggcactacctacgaatggtaaaatcgccaaggacgccaaagagactgttcaggaatgcttatccgagtttttaagatcaacctttcagacacatgtattgagatggatggattacattcagcacaagcaagaatttgtaggtttatttgagaaaatattgttgcagaagcctggatttgagcccccggtaacacatcctgctggagttgtggaagctgatttaaaatcaaacaacactgagcaaagcgtaaagaatgtcagcaagacccccggccgggttcggattcgggccatgagattgcgggtgggtgggggagggagtggaggggcaaggtttgggtttccgaagtaaactcaagcaaggataaaaacaaagctgagggaaaggcaacaggaggaaaatcaactggagacaaagaacccaccaaagccaaggcaaaacctgctgacaaagaagtggctgagaaagagaacgaagttagcgtcagtttgcttaatattcaagttggattaattcgcaaagcatggaagcatccatctgcagatagtttgctagttgaggagatagatgttggggaggacaaagtgcggcaggttgttagtggtttggcaaagtactgcaatcctgatgagttgacgaatcgtcgtgttgtacttataacaaatgtcaaacctggaaaactacgggatgtgatgtctcaaggattggtcttatgtgcttcggatgaaggtccaaccattgtggagcccttgctccctccagaaggatcacagattggggaacgtatttctttttctgggattgatggaaagccagaagatgtactaaacccaaaaaagaaacagctggataagattacaccgcatcttttcactgatgacaagggggtagccacatacaagggaataccatttatgacgtctggtggaccatgcacatcatccattcccagagcaactattaaataatggagatatggcccattcattgttcttcgccactcatagatttttggtaccacaaaatatttgaagttttgattacgttaatgagacgttactatcttgttgacaagcttatgctgcacttgcacttgcatgctctttaatgctaccaatataatcttgaatccaatgattcttgaggtaataccatagtaactttctccacattgtaaaaagaacgaaagactttaaaattatacaacctaccaaccaagggttattatgcaaaannaaaagnaaagg

SEQ ID NO: 27084 - DNA, 353 bp, Glycine max
  Clone ID: TF_LIB3242-495-P1-J1-F3
ggaatgcgtatcctagttcatcagtttcatcaccagcgaggcctctgataagtgtgagagggaaaagagaaagactattaacggtgatgatttgctctgggccatggccactcttggttttgaggattatatcgatcctcttaaaatttacctcactagatacagagagatggagggtgatacgaagggtttagccaagggcggagactcatcttctaagaaagatgttcagccaagtcctaatgctcaggtagaatgcacccacgaatgtgcgaatcatgcttgactgcatttgtgggaatatgtgtagaatacaataacatctgattttggaatctttttgttgtgaaatc

SEQ ID NO: 27085 - DNA, 2560 bp, Glycine max
  Clone ID: TF_GmC17763_1
ggaaccgggtattgcgcacgctccttctttggagactgtttccgacatagggtgaaactgaaactcccgtgtcggggtgtttacactgcactgtcacaatgacttcctccaactctcttttttgtctctcttcgttttctttcttcccacgcgtccgccaaaaccgaaaagaagaaaaacgctgaaatccccaaaatcgaaaagaagaaaaccaaaagcgctgaaatccctctaaccgatggcaaaacgaagagggatagagaaatcgccaaagaggagaacaagaagaagactaagaaacccaagctcagcaatggcacttcaaaacagcgagacgagggatccaaaaagggagtagcagaaggaaaaggagaagaggggaaaatgaacgtgtttccgatgaatcgcatcagaacgatgattaagggcgaagatcccgatatgcgtgtttctcaggaagcattgttggccatcaacaacgctgtggagaagttccttgagcaattctcgcaggaagcttatgctttttgtgttcgggaccgcaagaaatgcctcagctacgatcacctagcacatgttgtaagtaagcaaaggagatatgactttctctctgattttgttcctgagagagtaaaagctgaggatgcattaagagagagaagtgcagcaggaaaaggaggaagttaaaaaatctaaagcaagctagtggagaatataagcttatactttatttaatcatgtaacattttgtaatggaaacatgcatcatgatgagtaatgctgtactttaagtttccatattgtatttattttagtaatcctattcccgtaagtgtatatgatttttcagtgactatgcatgtgcttgactctgcttgggtagagccacgcgttggtacggctgcgaaaagacgacacaacgtggcatcacgagagtaagtgagtgagagaaggagattctgatttgatctctcagatctgagcttaccgtcgccggaatccaactcaacctgggtcggattcttgggtatcatcgcatcgccattcgttttagcctctcaataagagattttagttcgcttcaaattcgaggtttgatttgaagttgaaagttggaatagcttaactgttgtgtaaaacaaccaacacacacgagcatgggaagccaagacaacaacgtagaattgtcatccaattcatttctagcttacaaatctgctaaggtgtttgttgctggtcaccggggtcttgttggctcggccattggtcgcaagctcacccaacttgggttcactaatctagtcttgcgctcccatgccgagcttgatctcactcgacaatctgatgttgaagccttctttgcttatgaaaaacctgaatttgtcattgtagctgcagccaaagttggtggcatccatgccaacaacacctaccctgctgatttcattgccatcaacctccaaatccagaccaatgtcatcgattctgcatatcgcaatggtgctaagaaactgttgtttttgggttcctcttgcatttaccccaaatttgcaccccaacccgattccggaagatgctttgcttactggacccttagagcccacaaatgaatggtatgccattgccaagattgctgggatcgaaatgtgtcaagcttacagaattcagcataagtgggatgcaatttcgggaatgcccaccaacttatatggaccatatgacaattttcatcccgagaattcgcatgtgttacctgctctcatgagaaggtttcatgaggcaaaggtcaatggtgctaaggaggtggttgtgtggggcaccggaagtccattgagggagttcttgcacgttgacgatttggcagacgcggttgtcttcatgatggaaaagtatagcggactggagcatttgaatgtagggagtggaaaggaggttactattaaggaattggctgagttgatgaaggaagtggtgggatttgaaggggatcttgtttgggattctactaagcctgatgggactccaaggaagctgatggatagctccaaacttgcaagcctgggttggacaccaaaagtctcactcaaggatgggcttgctgatacctacaagtggtacttggagaacgtaaatctatgattcagatggttaagcagaatgtgccatgtcaaattttataggtacttgtcatttcacaacgaagaattttttgttaaaaaaataattatccagagaacagtacttgaccaatttttctgtaccaattatgtcatgtgcaatgaaaatttcagtgctttttttcgtgttttcaaaagatcatgagattaagaaccatttgttggaaactatgaacagagtttttatttgcacatcatattaaagactcaaagtcgtgcatcaaataagtgttataattattgcgtgatgactattcgacacaaatggtggtgctccttcaaggcttctgaagtgtttgttgaataattttcattccaataagattcctttgtcaaaatctactgtggattataacttgaatgctttctcgtggatgagcatg

SEQ ID NO: 27086 - DNA, 426 bp, Glycine max
  unsure (1)..(426): unsure at all n locations
  Clone ID: TF_jC-gmro02910071g08a1
ggctcgaggaacgcagggttaactctaatatgaacatttcacatgcccttgcaaagatgactggtgcttcggctgatatcatcctaacatcctcgtcagccttcataatcttcttgatccttgccaggggaagactgtggttcttggaatcacactgaagagaacaaaaggcgaacacttcaaaaaaatgatattgctgctgcaatcacaaggactgacatctttgatttcttggttgacattgtgcctcgtgaggacttgaaagatgaagtgcttgcatcaatcccaagaggaacaatgcctgttgcagggcctgctgatgcccttncatattgctacatgccgcctcagcatgcgtccaaagttgagctgttggtgtattatggggtagcctgtgatggacccaacatgtatgctcagcagtct

SEQ ID NO: 27087 - DNA, 573 bp, Glycine max
  Clone ID: TF_GmC78471_1
agggggtgggcacacgacaaaataaaaataaaaactttcccactttgcttcttcgtcttcttcaacgacaaaataaagtggggtttcgccttcttctccaaaatatgaggaagaagctagatactcgtttccctgcggctaggattaagaaaattatgcaagctgacgaggatgtagggaagattgcaatggctgtgcctcttctagtctctaaagcactagagctatttctgcaagatttgtgtgatcaaacatatgagataactttgaggaggggggcaaagactatgaatgcttttcatttaaaacagtgtgtgcagacttttaatgtctttgattttctgaaagatattgtcagcaaggttcctgatttaggctcttctgttgcaaccggtgatgaccatgctgtcactaagaggaggaaagttgccggagatgatgataatgacagcgacgaggaactcaagagaaataagaagccagagcctggacatagcagtggcagaggaaggggtaggggtcgtggccgtggaatcagaactgtagatcaagagatagggttcacatgcccaa

SEQ ID NO: 27088 - DNA, 657 bp, Glycine max
  unsure (1)..(657): unsure at all n locations
  Clone ID: TF_GmC240_1
gccgcgtcgtagctcggacggaggaagaagaaagcggagtatcgatacaactggaattcccgaagggtcgggtgaagaagattatggcgctggacaaagacgtgaagagggtgagctcagaagcgttgtttctggtgtcgcgctccacggaattattcctccaattcctggctgaaaaatcggcgcaggttgcgattgaaaagaaacggaagaccgtgaatctggaacatataagagaggccgtgaagaggcaccagccaacccgggattttctcctcgacgagcttccgccgccatctcagcccaccaagcccgataggcccactcagcctgccggtcggcccaaattggatcctcctccccgtggtactcgccgcatcgatctatttttccggaaaccagaacttgacaacccagcccaagcccaaccacctgaaaatccagctcaagctcaaccgcctgaaaatccagaccaagaccaagcccaatcgccagtacccgtagatgagtcttaggttttgtttgtttatacacctgcgtttgagattttgtatccgatctgaatctgagataacatctaacaatgcattagcgaaaatatgggattctaattagttattcgcatattctattatggtccatattcnnncnnnnnct

SEQ ID NO: 27089 - DNA, 1670 bp, Glycine max
  Clone ID: TF_GmC1633_1
tcacggctgcgagaagacgacagaaggggcctccctttttaattgaaaccaaaccaaaccaaaccaaaccaaacctctctttctcagtttctctctcttagggttttctcctcccccattgacccaccgtccatcgcaaaggaagtcgcgcccaatttccatggtttgtagattaaatcttaaagcagtaagtcatcatggataaatcagtgcatactcagcagcaacatcagcatgggatggcgcgttgccacagttgctagccaaatggcctattcttctcactacccgactgctcccatggggggctccagcacccctgctattggcctattcttctcacaacccgactgcagccatgttggctactggtacgcccgatgtaacatatccttccgcacatcaggctcaagatgaccagcagagatacccacaacagcaggttcaaatgttctgatcaaaccaaatgcaacaaaatgagcaaacaaatgaccataaaaaccacagtcttccgcttgctcagatacaaaaaatagtgcaagctgatgaagatatacggatgatttctgcagaagctccagtcatatttgcaaaagcatgtgaaatgttcatattagagttgacgttgagatcttggatccacacagaagagaacaagaggagaactctacaaaagaatgatatagcagctgctatttcgagaaacgatgtttttgatttcttggttgatattatcccaagagatgagttgaaagaggaaggacttggaataaccaaggctactattccattggtgaattctccagctgatatgccatattactatgtccctccacagcatcctgttgtaggacctcctgggatgatcatgggcaagcccgttggtgctgagcaagcaacgctgtattctacacagcagcctcgacctcccatggcgttcatgccatggccccatacacaaccccagcaacagcagccaccccaacatcaacaaacagactcatgatgaccatgcaattcaattaggtcggaaagtagcatgcaccttatgattattacaaatttacttaatgcctttaagtcagctgtagtttagtgttttgcattgaaaaatgccaaagattgtttgaggtttcttgcactcatttatgattgtatgagctcttatgctgagttacttttggttgtgtttatttgaggtactggtgtggtagttaaattagtttgtagctgtccataagtaaacagcgtagctgcttaattaggaggtctgaaatgatgaaatagtttgtattgttattgcagaaggtaggttttattcagtatttcattttactgcaatggctgaatttattgctcatccgcttagtactagttgatgttttttcctgtcactcgttatgtgttgagtgtgaagaaaaattagtgtgccatttttcacctgtaaatgcacactacagccccggaagaacaaattgttccgatcattttcaattttttttcccggtaacatgaaaagtggttgatgttaaatgctgtccctgtaaaaaaaaaaaaaaaagaattgacagcaggaaaaaaaaaataacgagctgttctttttcttgattcaaaaccacataaatatatccagattagttttatagttaataattgattttattcggaag

SEQ ID NO: 27090 - DNA, 1275 bp, Glycine max
  Clone ID: TF_GmC1000_1
gcatgacggaagagctctctctctctcttgttcttatccatcgcattgaaaagcagcaccatcaccacccccacctcttaccccttctttcataaatatgcgtctctgcaacaacatgttcaccaccacctccttgttcttcacatcatcctcatcatcttcttcaatcagttgactcttcgttcctccctctattctttcggatggagcccatggacatcgttgggaaggccaaggaagacgcttctcttcctaaagcgacaatgacgaaaattattaaagagatgttgcccccggacgtgcgtgtcgccagagatgcacaggatttattgatcgagtgttgtgtcgagtttataaaccttgtctcgtcagagtccaatgaagtctgtaacaaagaagaaagaaggacgattgcaccggagcacgtgttaaaggctttaggggttcttggatttggcgagtacattgaggaagtttatgcagcatatgaacaacacaagttggaaacaatgcaagattctttaaaaggtgcaaagtggagcaacagagctgagatgactgaggaagaagcattggctgaacagcaaaggatgtttgcagaggcacgtgcaagaatgaatggaggagccattcaatccaaggagccagaggctgaccaaagtttagagagctaactttataggacacttttattttcttttgaagcataggcaagcagcatctcttactcttccctaatccttgtttatttaggctggattttgcacataatcccatattctagtttgcttgcctaccttaatggactctgctcgctatttgtgttctgttagtaattatatatgttaatgaatttatgagagaattaatctaaaatctcttcattattgtaatatgtattatatttcctttctgtagtatttaccttatgacaactttttgctcttactcttccctatgcgttgttaatttagctcgattttgcacatacccccattcactagtttgctggcctacgtgaatgtactcgccatttgtgttcttttagtaatccatatttgtaagttaatgtaattattggagttcatctaaaccctcgtctatttagaattttacatgtagattatttcatttacctgttgtatctcccacaccaacaacagctattgccttgattttgacaatagttgctatattagaatgtaacaatctattatattctgttatatagaaagtcgtgaaggttttacaccagcaaataaactattcttttat

SEQ ID NO: 27091 - DNA, 878 bp, Glycine max
  Clone ID: TF_GmC1000_2
cataaatatgcgtctctgcgacatgttcaccaccacctccttgttcacatcatcatcatcatcatcatcatcatcttcttcttcttcaatcagatggagcccatggacatcgttgggaaggccaaggaagacgcttctcttcctaaagcgacaatgacgaaaattattaaagagatgttgcccccggacgtgcgtgtcgccagagatgcacaggatttattgatcgagtgttgtgtcgagtttataaaccttgtctcgtcggagtccaacgaagtctgtaacaaagaagaaagaaggacgattgcaccggagcacgtgctgaaggctttaggggttcttggatttggcgagtacattgaggaagtttatgcagcatatgaacaacacaagttggagacaatggtgattatgttaatgaccaatgtgcatgatatatattacaacttaacagcataattgtttttgtcttgtataatattcatccatcaattgtttattgggtgattagttttataagaatccatgaattttttgggagcatggcctgtgtggtttgaccgagccagtctgggctcccatataatttgttgagggacccattaaaatggtattctgtaggaaaaagcactggaaaggccctaatgggctgataacctgaccatggtcccctcttctgttttcattaagtgttttaaatatatgatgtctgagagctcagcctataacttttctggctggtgaaattgaaattaccaatgatttatgaatctccacttatgtgtatggtccattctatagttgttgagtatcccatttgtaaattactgagtgctctgcaattgtgatttgtgattcataatgtaaggtttggtcatgca

SEQ ID NO: 27092 - DNA, 848 bp, Glycine max
  Clone ID: TF_GmC1000_3
atctatcgcattgaaaagcagcaccatcaccaccccctcgtcttccccccttctttcataaatatgcgtctctgcgacatgttcaccaccacctccttgttcacatcatcatcatcatcatcatcatcatcttcttcttcttcaatcagttgactcttcgttcctccctctattcatctgatggagcccatggacatcgttgggaaggccaaggaagacgcttctcttcctaaagcgacaatgacgaaaattattaaagagatgttgcccccggacgtgcgtgtcgccagagatgcacaggatttattgatcgagtgttgtgtcgagtttataaaccttgtctcgtcggagtccaacgaagtctgtaacaaagaagaaagaaggacgattgcaccggagcacgtgctgaaggctttaggggttcttggatttggcgagtacattgaggaagtttatgcagcatatgaacaacacaagttggagacaatgcaagactctttaaaaggtgccaagtggagcaacagagctgagatgactgaggaagaagcattggctgaacagcaaaggatgtttgcagaggcacgtgcaagaatgaatggaggagccattacttccaagcagccagacgctcaccaaagtttagagagctaactttaggacacctttattttcttttgaagcataggcaagcacatctcttctcttactcttccctatgcgatgttaatttagctcgattttgcacaaatccccattcactagtttgctggcctatgtgaatgtgctcgccatttgtgttcttttagtaatccatatttgtaagtaatgtaatttattggagttcttcc

SEQ ID NO: 27093 - DNA, 1553 bp, Glycine max
  Clone ID: TF_GmC1000_4
gcatgacggaagagctctctctctctcttgttcttatccatccccgtgaaaagcagcaccatcaccacccccacctcttaccccttctttcataaatatgcgtctctgcaacaacatgttcaccaccacctccttgttcttcacatcatcctcatcatcttcttcaatcagttgactcttcgttcctccctctattctttcggatggagcccatggacatcgttgggaaggccaaggaagacgcttctcttcctaaagcgacaatgacgaaaattattaaagagatgttgcccccggacgtgcgtgtcgccagagatgcacaggatttattgatcgagtgttgtgtcgagtttataaaccttgtctcgtcagagtccaatgaagtctgtaacaaagaagaaagaaggacgattgcaccggagcacgtgttaaaggctttaggggttcttggatttggcgagtacatcgaggaagtttatgcagcatatgaacaacacaagttggaaacaatgcaagattctttaaaaggtgcaaagtggagcaacagagctgagatgactgaggaagaagcattggctgaacagcaaaggatgtttgcagaggcacgtgcaagaatgaatggaggagccattcaatccaaggagccagaggctgaccaaagtttagagagctaactttataggacacttttattttcttttgaagcataggcaagcagcatctcttactcttccctatgcgttgttaatttagctcgattttgcacatacccccattcactagtttgctggcctacgtgaatgtactcgccatttgtgttcttttagtaatccatatttgtaagttaatgtaattattggagttcatctaaaccctcgtctatttagaattttacatgtagattatttcattaaactgatgaatctcccacaccaacaacagctattgccttgattttgacaatagttgctatattaaaaaggtgcaaagtggagcaacagagctgagatgactgaggaaaaagcattggctgaacagcaaaggatgtttgcagaggcacgtgcaagaatgaatggaggagccattcaatccaaggagccagaggctgaccaaagtttagagagctaactttataggacacttttattttcttttgaagcataggcaagcagcatctcttactcttccctatgcgttgttaatttagctcgattttgcacatacccccattcactagtttgctggcctacgtgaatgtactcgccatttgtgttcttttagtaatccatatttgtaagttaatgtaattattggagttcatctaaaccctcgtctatttagaattttacatgtagattatttcatttacctgttgtatctcccacaccaacaacagctattgccttgattttgacaatagttgctatattagaatgtaacaatctattatattctgttatatagaaagtcgtgaaggttttaccccagccaaaaaaaaaaaaaaaaaaaaaaaaaaaaaaaaaaaaaaaaaaaaaaaaaaaaaaaaaaaaaag

SEQ ID NO: 27094 - DNA, 364 bp, Glycine max
  unsure (1)..(364): unsure at all n locations
  Clone ID: TF_7924671
gaagcccatagacatcnttggaaaagccaaagaagacgcttctcttcctaaagcaacaataacgaaaattattaaagaaatattacccccaaacatacatatcaccagagatacacaggatttattaatcaagtattatatcaaatttataaaccttatctcgtcagaatccaataaagtctataacaaagaagaaaaaagaacgattacaccgaagcacatatgaagaactgttaaaattctgaaatttagcgagtacattagagaaggggatacagcatatgaacaacacaaagtgaaaacaatgcaacattctntaaaagatgcagagaagaacaacagacctgagatnactgaagaagag

SEQ ID NO: 27095 - DNA, 882 bp, Glycine max
  Clone ID: TF_GmC275948_1
atatcataataaaaatattatttatatatattatactatatgatatgatataatatataatggggaagggacatgaacttgttggtatgcatatcacatttaccattcaaccctataacgtaggatgggtggcatcattctattgccacttgcatcttgaatttgatcagcactgaccgcactttgagcaatggaactttctctataaccattgatccctcccatctcagtgaagctctttggagcagctacttgaggccccacagaatagaagccaccagcactgaaagtagtgttgttgaagtctgcagctttgttggttgctgccacagaatgatgcaacttgttgatttcaaccacccccatcaatattggtttgatgagttggagagtgttcttcttgttttgccatagaactcttttctccctcagtttccctgtagttgttcaggtagaacttcaagggtccaacatagttctcaaatcctagtgttgtcatggcccaaagaagatcatcaccattgattgtcttcctcttttccctctggcacttgtctgaggcctcaccagtgatgaagcttatgaactcagacacacactcttgaactgtttcttttgcttcctttgagattttggcattggctgggagtgcccttttcatgattcggctaacattggctatagggaggaacctgtcttgttcttttgaggaggagctgtctgagatgttaccagatgttggacttcccacaggacttgttgtaatttggtttctcttccctgtcatgttaatggaatagacaataatagagccactcacggaataagctaaacaattgagattctcaccttcaccctctctccctatgtgtgcaagttaag

SEQ ID NO: 27096 - DNA, 1085 bp, Glycine max
  Clone ID: TF_GmC720_1
cagccatgtctccacgcgtccgcccacgcctgcgagaagagacagaagggggtgaaaccgtcatcataaattcatatatcatcagcctcagccatgtcttcttcgctcttgcacctcctcttccttccacaactacgatcttcgatagtgctttctcagattcttccttcgtggtaaccggtcgaatcatggagcccatggacattgttggcaagtcaaaggaagacgcttcgcttcctaaagcaacaatgacaaaaattattaaagagatgttacccccagatgtacgtgttgcaagagatgcccaagatctattgattgagtgttgtgtagagtttataaaccttgtctcgtcagaatccaatgaagtttgtaacagagaggataaacggacaattgcacctgagcatgtattgaaggctctacaggttcttggatttggtgagtatgttgaagaagtttatgcagcatatgaacagcacaagctggagaccatgcaggactctttaaggggtggtggtaaatggagcaatggagctgagatgactgaggaagaagcattagcagagcagcaaaggatgtttgcagaggcgcgtgctaggatgaacggtggagccattgcttccaagcagccagatgctgaccaaagtttagatagctaactttaggatcttcattgaagcatagacaaagcaccaccctgactcctgtctgtgcttccaatgagctcgatggtgtacaaaaaccattcactagtttgctggcccatgtggatgtgctcatttgtattctttcgataaatccatatttgtaagtcaatgtaattagtgagagatcatgaaaaccctcccgtttagcatttacttgtaattatttaatttacgtttttgtatcttctacatactaacaactcctagcttgattctgacagtagctactatgttagattgtaacaaattattaaatatgtagaagcaatagtgctctgtttatttgttacaaaaaaagaaacaaaatgggcagatcatggaaggaacatatattccacaaatgactatatgtatggactagttgaaagatatagg

SEQ ID NO: 27097 - DNA, 693 bp, Glycine max
  Clone ID: TF_700872266_FLI
ctcctccgtttttcttatttatcatcgcctgcttttaatttataattccttgaattctgtagggcctctgataagtgtcagagagaaaagagaaagactattaacggcgatgatttgctctgggcgatggccactctcggtttcgaggattatatggatcctcttaaaatttacctcactagataccgagagatggagggtgatacgaagggctctgccaagggtggagactcatctgctaagagagatgttcagccaagtcctaatgctcagcttgctcatcaaggttctttctcacaaaatgttacttacccgaattctcagggtcgacatatgatggttccaatgcaaggcccggagtaggtatcaagtttattattgaccctcttgttgtaacgtatgttttctacgccagttaccaagtgctcacggcatattgaatgtctttttatgttatgtgaatactgacaggagatgttggttcttgtgtccgtttttttttttaaattaaggtttgtatattatctttggattcgaattattatttgaaagttattattatattgtaaatcctagagccctgttgtctgaatccatcaggcggcttggtaaagaccgagattttaggactgattgtaagcataaatccgaatattcttttcctaatttctttgcacaataatgtatgaagaa

SEQ ID NO: 27098 - DNA, 903 bp, Glycine max
  Clone ID: TF_GmC7912_1
ccacgcgtccggccgattcactactcgcacggcacatgcaccctcctctatctctctctgcagcataagcacagcatcatagaccctttctcaaaaaatagggttcctccgttagggttagaggtcacaccatcttacactatactaacccctagccagccagcgagtttgagtgcttgggggtgcaatggcgggagtgagggaacaggaccagtacatgccgatagcgaacgtgataaggatcatgcgtcggattctgccagcgcacgcgaagatctcagacgacgcgaaggagacgatccaggagtgcgtgtctgagtacatcagtttcatcacggcggaggcgaacgagcggtgccagcgggagcagcggaagacggtgaccgcagaggatgtgttgtgggcgatggagaagcttggctttgacaactacgctcaccctctctctctttaccttcaccgctaccgcgagagtgaaggagaacctgcttctgtcagacgcgcttcttctgcaatggggatcaataataatatggtgcaccccccttatattaattctcatggctttggaatgtttgattttgacccatcatcgcaagggttttacagggacgatcataacgctgcttctggatctggtggttttgttgcgccttttgatccttatgctaacatcaaacgtgatgccctgtgatcatgtaagaacaacaactagtgcatgctgctttttcccttggttagttatattcaagcccaagcccatgcaggtgcaggtgcaactatttagcttcatctacaaatcttttttcctctcttctaaacatgctttaattatttagagacaatacttgttattcattgttatgctcaattgctagcttctattcatcgtcgactgtctgt

SEQ ID NO: 27099 - DNA, 1217 bp, Glycine max
  Clone ID: TF_GmC1642_1
acgaggctcttataatcacacacacacctaccttaatagctatggaaactggaggctttcacggctaccgcaccacgcgtccgaagacgacagaagggggcctacttcatctctcttataatcacacacacctaccttatagctatggaaactggaggctttcatggctaccgcaagctccccaacacaacctctgggttgaagctgtcagtgtcagacatgaacatgaacatgaggcagcagcaggtagcatcatcagatcagaactgcagcaaccacagtgcagcaggagaggagaacgaatgcacggtgagggagcaagacaggttcatgccaatcgctaacgtgatacggatcatgcgcaagattctccctccacacgcaaaaatctccgatgatgcaaaggagacaatccaagagtgcgtgtcggagtacatcagcttcatcaccggggaggccaacgagcgttgccagagggagcagcgcaagaccataaccgcagaggacgtgctttgggcaatgagtaagcttggattcgacgactacatcgaaccgttaaccatgtaccttcaccgctaccgtgagctggagggtgaccgcacctctatgaggggtgaaccgctcgggaagaggactgtggaatatgccacgcttgctactgcttttgtgccgccaccctttcatcaccacaatggctactttggtgctgccatgcccatggggacttacgttagggaaacgccaccaaatgctgcgtcatctcatcaccatcatggaatctccaatgctcatgaaccaaatgctcgctccatataaaattaatgaagagtactgttcagtaggagaacaagacttcttggacttgattagcttaactctcagtgattggtgttagagtactgttgttgaggatggttaattttataattaagggctgggaattggggagttagtatatattcctaatcctaattatgtgcatctttaatttatggaataactttgttttttgttttaacttctgataatttggattttctgatgtcgaatgtggttttgtctatcccttattaacagtgccaagcttaaggttttacccatgctccaaaatggaaaacttgtactgtaatgttgtcctggtagtgatggtaattaaacctgcaagttatgtttatgtataaaccccctattgctcaaaattagagaaattatccttt

SEQ ID NO: 27100 - DNA, 1014 bp, Glycine max
  Clone ID: TF_GmC1642_3
acggctgcgagaagacgacagaagggggcctacttcatctctcttataatcacacacacacctaccttaatagctatggaaactggaggctttcacggctaccgcaagctccccaacaccaccgctgggttgaagctgtcagtgtcagacatgaacatgaggcagcaggtagcatcatcagatcacagtgcagccacaggagaggagaacgaatgcacggtgagggagcaagacaggttcatgccaatcgccaacgtgattaggatcatgcgcaagattctccctccacacgcaaaaatctcggacgatgcaaaagaaacaatccaagagtgcgtgtctgagtacatcagcttcatcacaggtgaggcgaacgagcgttgccagagggagcagcggaagaccataaccgcagaggacgtgctttgggccatgagcaagcttggattcgacgactacatcgaaccgttgaccatgtaccttcaccgctaccgtgaacttgagggtgaccgcacctctatgaggggtgaaccactcgggaagaggactgtggaatacgccacgcttggtgttgctactgcttttgtccctccaccctatcatcaccacaatgggtactttggtgctgccatgcccatggggacttacgttagggaagcgccaccaaatacagcctcctcccatcaccaccaccaccaccaccaccaccatgctcgtggaatctccaatgctcatgaaccaaatgctcgctccatataaaattatataattatgactaggattcagaacaagacttgatgatgattagcttaactctcagtaattggtgctagagtactactgttgttgaggatactttattttataattaagggctgggaagggagttagtatattcctaatcctaactatgtgcatctttaatttatgaaatcactttgttttaacctttgaaaaaaaaaaaaaaaaaaaaaaaaaagcggccgctttagaggatgttatgttgttctagtgggg

SEQ ID NO: 27101 - DNA, 795 bp, Glycine max
  Clone ID: TF_GmC885568_1
ctgtgtttgagaggactaaagttaacagatgggtgacaacaacataggcaaagtcttagagagagaaggctttaagtacaacttcacggcagctgcaagtgacacctctgcacaagatgaggtgattaaagagcaagatcggttgcttccaatagcaaatgtggggcgcatcatgaagcaaatccttcctcctaacgccaagatctcaaaggaagctaaagaaaccatgcaagaatgtgtgtccgagttcattagctttgtcactggggaagcttctgacaagtgtcacaaggagaagcgcaagaccgtgaatggcgacgatatttgctgggcccttgctaccctagggtttgatgactactctgagccacttaaaaggtacttgcataagtatagggagttcgaaggggagagagcaaatcaaaataagggtaacaacaacacttatgaaaacaacattgcaaacatataaattaattatgtggaaggtgaactctttctccaattcccatgatcaatgtgattgatagttgttaatctgatcttctagttttctcctgaatttgagatactcaaggggcttgtatccttatgtgatatatatatgacgtgagtcatgtatgcatactcacgtgttttagacctgatattttcatcaagggttgaaattaccctagatgaacacatggtagcttgagaatcatgtgagttacaactaatctttgtatttgtctatccaatgataagcttggatcctttccagaaaaaaaaaaaaaaaaaaaaaaaaaaaaaaaa

SEQ ID NO: 27102 - DNA, 1143 bp, Glycine max
  Clone ID: TF_GmC1633_3
cggatgcgagcccggacgcgtgggcggacgcgtgggcaaacttgtctttctcagggggtctctctcagggttttctgctcccccattgacccaccgaccatcgcatgggaacggcccgagctttctcaggttctctttcttagggttttctccaccgtccactgcaaagtcttgcgcccaatttccatggaactgtaaagagaggatagttagaagattaaatcttaaagcagtaagtcatcatggataaatcagagcagactcaacagcagcagcagcaacaacagcatgtgatgggagttgccgcaggggctagccaaatggcctattcttctcactacccgactgcttccatggtggcttctggcacgcccgctgtaactgctccttccccaactcaggctccagctgccttctctagttctgctcaccagcttgcataccagcaagcacagcatttccaccaccaacagcagcaacaccaacaacagcagcttcaaatgttctggtcaaaccaaatgcaagaaattgagcaaacaattgactttaaaaaccatagccttcctcttgctcggataaaaaagataatgaaagctgatgaagatgtccggatgatttcagcagaagctccggtcatatttgcaaaagcttgtgaaatgttcatattagagttgacgttgcgatcttggatccacacagaagagaacaagaggagaactctacaaaagaatgatatagcagctgctatttcgagaaacgatgtttttgatttcttggttgatattattccaagagatgagttgaaagaggaaggacttggaataaccaaggctactattccgttagtgggttctccagctgatatgccatattactatgtccctccacagcatcctgttgtaggaccacctgggatgatcatgggcaagcccattggcgctgagcaagcaacactatattctacacagcagcctcgacctcctgtggcgttcatgccatggcctcatacacaacccctgcaacagcagccaccccaacatcaacaaacagactcatgatgactatgcaattcaattaggttggaaagtagcctgcaccttttgattattacaaatttacttaatgcctttcagccagctgtag

SEQ ID NO: 27103 - DNA, 710 bp, Glycine max
  Clone ID: TF_GmC1633_5
cccactcgtccgaccaaacctatctttctcagtttctctgtcttagggttttctcctcccccattgacccaccgtccatcgcaaaggaagtcgcgcccaatttccatggtaagtcatcatggataaatcagagcagactcagcagcaacatcagcatgggatgggcgttgccacaggtgctagccaaatggcctattcttctcactacccgactgctcccatggtgttctggcacgcctgctgtagctgttccttccccaactcaggctccagctgccttctctagttctgctcaccagcttgcataccagcaagcacagcatttccaccaccaacagcagcaacaccaacaacagcagcttcaaatgttctggtcaaaccaaatgcaagaaattgagcaaacaattgactttaaaaaccacagtcttcctcttgctcggataaaaaagataatgaaagctgatgaagatgtccggatgatttctgcagaagctccagtcatatttgcaaaagcatgtgaaatgttcatattagagttgacgttgagatcttggatccacacagaagagaacaagaggagaactctacaaaagaatgatatagcagctgctatttcgagaaacgatgtttttgatttcttggttgatattatcccaagagatgagttgaaagaggaaggacttgggataaccaaggctactattgcattg

SEQ ID NO: 27104 - DNA, 1515 bp, Glycine max
  Clone ID: TF_GmC343_1
cttttgttctagcacttcgcagcttttgttctcgcacttcgctgtctgaggttctggattctcagtgtttgcgaacgctgcatcatcctttggggaagaatggatcatcaagggcatagccagaacccatctatgggggtggttggtagtggagctcaattagcatatggttctaacccatatcagccaggccaaataactgggccaccggggtctgttgtgacatcagttggtaccattcaaccgcttttgttctagcacttcgctgtctgaggttctggattctcagtgtttgcggagcgcagcatcatcttttagggaagaatggatcatcaagggcatagccagaacccatctatgggggttgttggtagtggagctcaattagcatatggttctaacccatatcagccaggccaaataactgggccaccggggtctgttgtgacatcagttgggaccattcaatccaccggtcaacctgctggagctcagcttggacagcatcaacttgcttatcagcatattcatcagcaacaacagcaccagcttcagcaacagctccaacaattttggtcaagccagtaccaagaaattgagaaggttactgattttaagaaccacagtcttcccctggcaaggatcaagaagattatgaaggctgacgaggatgttaggatgatatcagctgaagcaccagtcatttttgcaagggcatgtgaaatgttcatattagagttaaccctgcgctcttggaatcacactgaagagaacaaaaggcgaacacttcagaaaaatgatattgctgctgctatcacaaggactgacatctttgatttcttggttgacattgtgcctcgtgaggacttgaaagatgaagtgcttgcatcaatcccaagaggaacaatgcctgttgcagggcctgctgatgcccttccatactgctacatgccgcctcagcatccgtcccaagttggagctgctggtgtcataatgggtaagcctgtgatggacccaaacatgtatgctcagcagtctcacccttacatggcaccacaaatgtggccacagccaccagaccaacgacagtcatccccagaacattagctgatgtgtcgtggaaattaagataaccaggcaccggaatcagttgtgaatgtcaaactgaatggttgggaagatccatactacattgcgagcagaagctgtagctgatagtttacatgcaatgcagactataaacatatgtagataatgtgctagggaaaacttaaccttatctttgatttagctggaaaaaatggtatttttcattttaattcacaggtcatcagatgataatatttatttactggtgcatagcaggatttttacttgagtttaaacttgtcatgcgcccaaaatatatcccatctttttcattcatcatgcttccttgttatacctacctatctgtggttcgctttgtgggaaaattgagttatcacatgatttgcgcacaagttgtgcaagaac

SEQ ID NO: 27105 - DNA, 1012 bp, Glycine max
  Clone ID: TF_GmC343_2
cgtcaatcctcacgacagctctgctctgctctgcttcttttgttgtcgtatttttcttctgaaaccctaaattttgtctgctctaaactttgggatctttcacacttgaaaaaaactgcttcttgtgcccgacccagcacaattctcatactatagatctttgaatcaaatataatttctgatcattttttttgtttcgtccgcagcttttgttctcgcacttcgctgtctgaggttctggattctcagtgtttgcgaagcgctgcatcatcctttggggaagaatggatcatcaagggcatagccagaacccatctatgggggtggttggtagtggagctcaattagcatatggttctaacccatatcagccaggccaaataactgggccaccggggtctgttgtgacatcagttggtaccattcaatccacacctgctggagctcagctaggacagcatcaacttgcttatcagcatattcatcagcaacaacaacaccagcttcagcaacagctccaacaattttggtcaaaccagtaccaagaaattgagaaggttactgatttcaagaaccacagtcttcccctggcaaggatcaagaagattatgaaggctgacgaggatgttaggatgatatcagccgaagcaccagtcatctttgcaagggcatgtgaaatgttcatattagagttaaccctgcgttcttggaatcacactgaagagaacaaaaggcgaacacttcaaaaaaatgatattgctgctgcaatcacaaggactgacatctttgatttcttggttgacattgtgcctcgtgaggacttgaaagatgaagtgcttgcatcaatcccaagaggaacaatgcctgttgcagggcctgctgatgcccttccatattgctacatgccgcctcagcatgcgtcccaagttggagctgctggtgttataatgggtaagcctgtgatggacccaaacatgtatgctcagcagtctcacccctacatggcaccaca

SEQ ID NO: 27106 - DNA, 727 bp, Glycine max
  unsure (1)..(727): unsure at all n locations
  Clone ID: TF_LIB4199-001-Q1-K1-E11
cacgcgtccgcctctctttctagtttctctctcttagggttttctcctcccccattgacccaccgtccatcgcaaaggaagtcgcgcccaatttccatggactcagcagcaacatcagcatgggatgggcgttgccacaggtgctagccaaatggcctattcttctcactacccgactgctcccatggtggcttctggcacgcctgctgtagctgttccttccccaactcaggctccagctgccttctctagttctgctcaccagcttgcataccagcaagcacagcatttccaccaccaacagcagcaacaccaacaacagcagcttcaaatgttctggtcaaaccaaatgcaagaaattgagcaaacaattgactttaaaaaccacagtcttcctcttgctcggataaaaaagataatgaaagctgatgaagatgtccggatgatttctgcagaagctccagtcatatttgcaaaagcatgtgaaatgttcatattagagttgacgttgagatcttggatccacacagaagagaacaagaggagaactctacaaaagaatgatatagcagctgctatttcgagaaacgatgtttttgatttcttggttgatattatcccaagagatgagttgaaagaggaaggacttggaataaccaaggctactattccattggtgaattctncagctgatatgccatattactatgtccctncacagcatcct

SEQ ID NO: 27107 - DNA, 2957 bp, Glycine max
  Clone ID: TF_GmC89_1
ttatgctaaaggaacgtgaaagtaaaacggacggtggcgatagaagcgtctctcatctccatcgtctcctcactcctctcttctccagcgttcattttttctcgcgcccaaatacaaaatcacatcacaacagggttccgtgcgacccaatgtccgatagctctcggcgagtcctattgctggggcggctagcggaggcagcgaacgagagcggcgagcacagtccccgctccaatttccgccgagcaggagccgcttactcacccatcgccaacatcagccgcatcatgaagaaagcgcttcctcccaacgggaaaatcgccaaggacgccaaggaaaccgtgcaggaatgcgtctccgagttcatcagcttcgtcaccagcgaagcgagcgataagtgtcagagagagaagaggaagaccatcaacggcgacgatttgctttgggctatgaccactttaggtttcgaggagtatattgatccgctcaaggtttacctcgccgcttacagagagattaagggtgattcaaagggttcggccaagggtggagatgcatctgctaagagagatgtttatcagagtcctaatggccaggttgctcatcaaggttctttctcacaaggtgttaattatacgaattcttagccccaggctcaacatatgatagttccgatgcaaggccaagagtagatattgatcctctccttcagtgtttgacatgtgtgatctaaatgccagtggaacttttatgtcaatatgtgcccttggtatattgaatgcattttatgttatgtaaacactacatgcggggatgttggttcttgtgaccagatattatttattaagacttacatttatctttggaaaagaatcattattcataagttatattgtaaattctggaacaatgcttgtctgattccatcaatcgtcctggtaacgattttatgtacctgattggaagcataaattggtatattctttccttataccatcaacatattcttgagaaaggattactgctggaaggtctggttctggaaaatatcgataatcagcaagcccttcctttttcctcattgtaattgttctctgagagccttcttcccataaacgagtttcttgtactatctgatcttcccggccttgactatggagttgcacctgcctagaaatttcaaaatcaatagctctgctcactgatgaaaatgagttcaaattttttatttcaacctttgtcccaaactttgattgcccaataggtcgtattgatacatttacatcacaacgaagagaaccttcttgcatattgccattgctcactcccaaataccgcaccaacctctgtaattctgccgcatattctgctgcttcaataccatttctcatgtcaggctcagaaactatctcaagcaaaggtacccctgccctatttagatcaacctgtgagtaatttccattctctgcatgtaggagcttccctgcatcctcttccatgtgaacccttgtaatgccaaacctcttgtggcccccaccaaactcaacaggaatatccacatcaagaaaaccagcagtggcaattggcacatcaaactgagaaatctgatacccttcggaaggtcagggtagaaatactgcttcctgtcaaacttccctgctggggggagctaaagatacaggggaactggaattccttgggttattatccatgttgtcctctgatctctttctcttcctcacatcatctgctccaactgcaacagctttacctccttgaggcttttctgtttgaccatggccagaagcccttgatttggaactctgtttattctcggcagttacttttgatgggaaggtaggtcgcacaccaccaggaaatatgtagttaggaatgttactgcgtttcacatgggacacatggatattcattccaggtttccatagagtgtaagcattgacagaatgtttaaattcttcaacagttagccttatatcaaactgttcaccttcattcactggaactccttgcttacgctgcagacccataaagtaacagtggtgaaagggtctagaattgtctgagaattcaccaggatgtggatgacattgaagcataccataagtgtgcctctcaatcttcaatgtcaactggcggagacgagactcaacccaacctttccattgtctaaggtcatctgcattctctgctgttatatctatctgtagataattcttgtatgattcaaaaaaagggataaggctcaaaaagagtatcccaatcagccttgctagcctccatagcctcacatatttcacttccccttcgaaactcatctgacataacacgcaatgtacttgatgtcacattgtaagtggagttcatacagggataaacaggagtaattataggcattagatgatatctatccttgggatttcttctaggatcccaaactggtagtccaagagatccttcttcaatagcacaaagcatgactggatttggccatcgccattgagtatataccctaaagaatcgagacactaacatatcaggaagtgcattaggatataactggcatattcgagcaacaagcaatgctaggtttataccaccaagaaaacctgcaacatttgaatatacaccacgacgcttggcccaaaacctcatgcatctcaatgtcgtgcgaaaggtctgaatatttggaaccaatcgcaggacctgatcagttactctacaaccatttagactaagaacagtttgttcgtcaacactttgtaatattgattcctgtgatatatctaaatcttcaggaataacccacaacgctaatcttgcatacaggagatcaacagaaactccattaaacttgaatttcaccacagggacatgagcatcaggcacagggtgcaattctgttacttcttgcatctcagatagcatcttctgtagcc

SEQ ID NO: 27108 - DNA, 998 bp, Glycine max
  Clone ID: TF_GmC1427_1
gtgtgttctataataaggttgtatatggtttggtgggatttgtctagagtctttagaaaagatatccatggctgagtccgacaacgagtcaggaggtcacacggggaacgcgagcgggagcaacgagttgtccggttgcagggagcaagacaggttcctcccaatagcaaacgtgagcaggatcatgaagaaggcgttgccggcgaacgcgaagatatcgaaggaggcgaaggagacggtgcaggagtgcgtgtcggagttcatcagcttcataacaggagaggcttccgataagtgccagaaggagaagaggaagacgatcaacggcgacgatcttctctgggccatgactaccctgggcttcgaggactacgtggatcctctcaagatttacctgcacaagtatagggagatggagggggagaaaaccgctatgatgggaaggccacatgagagggatgagggttatggccatggccatggtcatgcaactcctatgatgacgatgatgatggggcatcagccccagcaccagcaccagcaccagcaccagggacacgtgtatggatctggatcagcatcttctgcaagaactagataacatgtgtcatctgtttaagcttaattgattttattatgaggatgatatgatataagatttatattcgtatatgtttggttttagaaatacaccagctccagcttgtaattgcttgaaacttccttgttgagagaatatagacattattgtggatggtgatgtggcatatgtggcatacacagaatttttgtattcttctttctctctatggatttttgtgtaagggcaggactatggctttgtttgctgatcgtatagctagtatggtgctatctaggttcggatttttttctttttcatgtataatgaaaaattaacggaggaaattactcttacgttactttgaaattaattaactaactgctgcttctgcctttttttttttctcctttctgag

SEQ ID NO: 27109 - DNA, 771 bp, Glycine max
  Clone ID: TF_GmC1427_5
ctttacacaacatattattgtaaggctagctagctagccatggctgagtcggacaacgagtccggaggtcacacggggaacgcaagcggaagcaacgaattctccggttgcagggagcaagacaggttccttccgatagcgaacgtgagcaggatcatgaagaaggcgttgccggcgaacgcgaagatctcgaaggaggcgaaggagacggtgcaggagtgcgtgtcggagttcatcagcttcataacaggagaagcgtccgataagtgccagaaggagaagaggaagacgatcaacggcgatgatctgctgtgggccatgaccacgctggggttcgaggagtacgtggagcctctcaaggtttatctgcataagtatagggagctggaaggggagaaaactgctatgatgggaaggccacatgagagggatgagggttatggtcatgcaactcctatgatgatcatgatggggcatcagcagcagcagcatcagggacacgtgtatggatctggaactactactggatcagcattttttgcaagaactagataacaggtttatgcatgtgttatctcatctgtttaagcttattaaggatggtgatatttgatttatattatgtttgattttagaaacaccccagctccagcttgtaattgttgcttgaaacttcgttgttgagagaatatagccattattgtggatggtgatgtgacatgcacagaatttttgtattcttctttcttccaatggatttatctcgggccc

SEQ ID NO: 27110 - DNA, 1984 bp, Glycine max
  Clone ID: TF_GmC1427_2
tgaagaagattcctggattgattgtgaagatggctgagtcggacaacgactcgggaggggcgcagaacgcgggaaacagtggaaacttgagcgagttgtcgcctcgggaacaaggaccggtatctccccatagcgatcgtgagcaggatcatgaagaaggccttgccggcgaacgcgaagatctcgaagggacgcgaaggagacggtgcaggaatgcgtgtcggagttcatcagcttcataacgggtgaatgcgtcggacaagtgccagagggagaagcgccaggccatcaacggcgacgatctcctacggggccatgacaaccctgggattcgaagagtacgttggagcctctgacgattcacctccagcggcttccgcgagatccagggaaaccccaccgttccgtttcacctttccccttcccgccggagccgccgtcaccggtcgctggccaccgtatccgaccctcccaatacaccctttccgagtcccacacaaaattgcacgattctgtgatttcaattttcaggtctcgaggatttcgtttcagaagcgcttccatttgacgcagaaccaccgactcaaaccgattcgcgccgagttcgtgactcgaattttcaacttctcattcatattccaaatcgaatttgaaactccgaagaaaaattcaccgaacactgaatctcagtttccaaggagcttcttctacgaagagcgcttcaattccacgcagaaccaccaagtcaagccggttcgtgactcggattctcaattcctcgttcattcccgaacgaattttaaattccgaagaaaaccgcaccgaacactgaatttcagattctgaacaagtttcttccgcgaaacagcacagcacttcaatttcacgtggaacagagacaaagggattcgtggttcgaattctcaatcgattttcaaattccgaacagcgaacagtacttcaatttcacgtcgaactagtcaaagcgattcaaatcgatttcgcgaactcgtccgatattttccctgcactgacttagtgattcgtttcatctttctcagcgcgtcttcgatttttccgttagtcgatggcggactccgacaacgactccggcggcgcgcacaacggcggcaaggggagcgagatgtcgccgcgggagcaggaccggtttctcccgatcgcgaacgtgagccgcatcatgaagaaggcgctgccggcgaacgcgaagatctcgaaggacgctaaggagacggtgcaagaggtgcgtgtcaaagtttcatcagctttcatcaccggcgagggtcgccgacaagtgccagcgcgagaagcgcaagacgatcaacggcgacgacctgctctgggcgatgaccactctgggcttcgaggactacgtggagcctctcaaaggctacctccagcgcttccgagaaatggaaggagagaagaccgtggcggcgcgtgacaaggacgcgcctcctcttacgaatgctaccaacagtgcctacgagagtgctaattatgctgctgctgctgctgttcctggtggaatcatgatgcatcagggacacgtgtacggttctgccggcttccatcaagtggctggcggggctataaagggtgggcctgcttatcctgggcctggatccaatgccggtaggcccagataaatgagcctattattattagtagtaagttaaaagaaaatgtgagattcaaagtggtgattaagtgaattagtatcaaaaaagtgcgactcatttgattaaaaatatatataaattattataagtcacctcttcatctctattcgattcttattgataaaaaaaaaattagagtgaactagtataataattctgagagagttggtttgtattctgatgatgatattattattgttgattgcgatatgtatagtatgacacacttctaggttcaaaggccaaccatctgttactgattaactgttgtatcatagaaaata

SEQ ID NO: 27111 - DNA, 1395 bp, Glycine max
  Clone ID: TF_GmC18981_1
ctcatctgatgtaacaccactatatgccctttgtgatgtccacattgaaagtatggaattctagtaaggtttataagaccttggctctccaacttatgtggtttggtgctctcaaggcgcttatcaattggtctgagaggctcccaccatgtttctgatctgtaaatcaatggtctggctggtaatgctggcattgcttgagattagtcagggggctagtgcacagccatcatgcatggtggccgttgcccagacctgctaagcatggtggaatgttagatccaattacacccacgcgtccgcttaaatttcccaatcaattccatccatcgggtctttactctcttacccaacccacacacactctttctctctctctctttccctgatcatcaaaatcagaaaaaattgggggaatggagaccaacaaccagcaacaacaacaacaaggagctcaagcccaatcgggaccctaccccgtcgccggcgccggcggcagtgcaggtgcaggtgcaggcgctcctccccctttccagcaccttctccagcagcagcagcagcagctccagatgttctggtcttaccagcgtcaagaaatcgagcacgtgaacgactttaagaatcaccagctccctcttgcccgcatcaagaagatcatgaaggccgacgaggatgtccgcatgatctccgccgaggcccccatcctcttcgccaaggcctgcgagctcttcatcctcgagctcaccatccgctcctggctccacgccgaggagaacaagcgccgcaccctccagaagaacgacatcgccgccgccatcacccgcaccgacattttcgacttcctcgttgatattgtcccccgcgacgagatcaaggacgacgctgctcttgtgggggccaccgccagtggggtgccttactactacccgcccattggacagcctgccgggatgatgattggccgccccgccgtcgatcccgccaccggggtttatgtccagccgccctcccaggcatggcagtccgtctggcagtccgctgccgaggacgcttcctatggcaccggcggggccggtgcccagcggagccttgatggccagagttgagtgacatcgatgccgatgatggacagtcaggagttatgaagattctgaacttgctgcaatttagaaatggttttgtttactaaatttttatgggatgacactgtgaacctgttaactcgatgaacagcatgatttaactacttttgtacaaaaatttaaaactaaacactgatccttctgtgtgaaacatgtatgatcatctgccaatactgtttatttcctcataaaaaaaaaaaaaaaaaaaaaaaaaaaaaaaaaaaaaaaaaaaaaaaaaaaaaaaaaaaaaaaa

SEQ ID NO: 27112 - DNA, 800 bp, Glycine max
  Clone ID: TF_GmC1163_1
cgccctattgaaagaaaagaaagagtttggcactgataatggcgggaaaggaaatctaactataaaaccctaaccctaaacccattcgaatcggaatcggaagaagataatgtcggaggcggaggagctaccccggtctattgtgcgccgcgtagtgaaggataagctgtcccgttgctccgaagacggagaaatttccgtcagcaaagacgctcttctcgcattctccgaaagcggtaggatcttcatccactacctttccgcaacggctaatgatatatgtaaggagtctaagaggcagattatcaatgttgaggatgttttcaaagctcttgaggaaactgagttccctgagtttcttcgtcctctgaaagcttcccttgaagagtttaggaagaagaatgctggaaagaaagctgcagtgtcaaagggaaaggatgatgagccgagaaagaaaaggaagttggaaggtgagtcacctgataagggtgagggttctgataaagctgagttatcggataaaggagaggatcctgataaaggtgagagtgataaaggtgagagtggtgacgagaccaatgatttaaaggaatgaaggcagttgtatttgttatgactgagccagcgcgtttatgttttgtgttatgttgggaatgtgcatgactccttgtttattggatgcagcttggtattaatgtcaaaaatgtagctttttgattgtttctcagtaaaacacatcccctaccctaccccctgatgtatggagcatttcaggaaataaatgatattccatcttatat

SEQ ID NO: 27113 - DNA, 867 bp, Glycine max
  Clone ID: TF_GmC18981_3
cacgcgtccgaggcgctcaagcccaatcgggaccgtaccccggcggcgccggtggaagtgcaggtgcaggtgcaggtgcaggtgcaggcgcggccccgttccagcacctgctccagcagcagcagcagcagctgcagatgttctggtcgtaccagcggcaagagatcgagcacgtgaacgacttcaagaaccaccagctccccttggcccgcatcaagaagatcatgaaggccgacgaggacgtccgcatgatctccgccgagggccccatcctcttcgccaaggcctgcgagctcttcatcctcgagctcaccattcgctcctggctccacgccgacgagaacaagcgccgcacccctcagaagaacgacattcggcgccgccattactcgcaccgacattttcgacttcctcgtcgacatcgtcccccgcgacgagaccaaggacccccccgcgctcgtcggggcaacggccagtggggtgccttactactacccgcccaatggccagcctgccgggatgatgattggccgccccgccgtcgatcccgccaccggagtttatgtccagccgccctcccaggcctggcagtccgtctggcagtccgccgccgaggacacgccctacggcaccggtgcccaggggaaccttgatggccagagctgagcgacaaccatgccgaaacggactgtcaggagttatgaagattctgaacttgcttggcattttgattgcttgcaatttggaaatggttttgttaactaaatttttatgggatgacactatgaacctgttaactcgatgaacagcatgatttaactacttctgtacaaaaatttaaaactaaaccagtgatccttctgtgtg

SEQ ID NO: 27114 - DNA, 372 bp, Glycine max
  Clone ID: TF_LIB4127-338-Q1-J1-B8
ggctcgaggcgcacaacatgtgaccaccaccccgcgggggggacaggagcctgagcagcctcacaatcaggggactcttcgttgctccctctactctttcgggtggagcccatggacatcgttgggaaggccaaggaagacgcttctcttcctaaagcgacaatgacaaaaattattaaagagatgttgccccggggggggcgtgtcgacagagatgcacaggatttatagaacgagtgatgtgtcgaggttataaaccttgactggtcagagggcaatgaagtctgtcgcaaagaagaaagacggacaattgctccagaacacctgttaaaggcttcacgggcactggaatttggcgagtacatcagggaa

SEQ ID NO: 27115 - DNA, 468 bp, Glycine max
  Clone ID: TF_LIB4281-017-R1-K1-D6
ttccggctcgaccccgcgtccgaatttttctcctcttctgtaaacttggtccatccatgtcaatgttttttggatctcagtcaccaccgttccctttccatcgccaattaatccccccctcaatttttacttccctctcatctgccatacatacacgtctctataaacatcatccagaaaaaggtgcattgcattgattgttttctttatcgaatatatatatatatatatatatatatatatatatatatatatttgcattgtaatttgtagggtttgtgagatgtcggatgcgccaccgagcccgactcatgagagtggtggcgagcagagcccgcgcggttcgtcttccgtcgcgaggcagcaggaccgtgacctaccgattgccaacatcaggcgcattatgaagaaggctctgcctcccaacggggggattggggaggatgccagagacaccgtgcaggaatg

SEQ ID NO: 27116 - DNA, 335 bp, Glycine max
  Clone ID: TF_LIB4127-338-Q1-N1-B8
ccccaccctcagatattccctgtgcgactactctgttaatctgcgacctggcggtccgccctctatggtgtcgagtggcgcccatggacatgcgctgggaaggccaatgtttgttctctagcggttcctaatgcgacgggtggcgggagatgatgctcctagatgcgtgcccccgcggcgggtcgtgtcgccagagatgcacaggatgtatggagcgagtgttgtcccaggcttgtaagccttgtggcgtcagagtccaatgaagtctgtgaccaagaacagcgaaggacgaattgcaccggtgcacgtgcttaaggctctatggggccttggat

SEQ ID NO: 27117 - DNA, 493 bp, Glycine max
  Clone ID: TF_GmC18981_4
cccacgcgtccgatcgggtctctctgtctctctcggatcatcaaaatcagaaagaattgggggaatggagaacaaccagcaacaaggcgctcaagcccaatcgggaccgtaccccggcggcgccggtggaagtgcaggtgcaggtgcaggtgcaggcgcggccccgttccagcacctgctccagcagcagcagcagcagctgcagatgttctggtcgtaccagcggcaagagatcgagcacgtgaacgacttcaagaaccaccagctccccttggcccgcatcaagaagatcatgaaggccgacgaggacgtccgcatgatctccgccgaggcccccatcctcttcgccaaggcctgcgagctcttcatcctcgagctcaccatccgctcctggctccacgccgacgagaacaagcgccgcaccctccagaagaacgacatcggcggcggcatcactcgggccgagattttgggcttggtggggggcgtgggg

SEQ ID NO: 27118 - DNA, 548 bp, Glycine max
  Clone ID: TF_GmC718702_1
aattaagaattcataatctccaattaatttattagagttccaattagacggctaaagcaggcttggccggccatgttattggagtgaaactatgaaagcttcaaaggaaatggcatatataacactcaaacttgacactgatgctacaactaagagactactaaagctgaagttaactcagaaacacataggagtgaagtagaacaaatatgagacaagctggtgcatattcagggttactgtgtggtggggtatcaggaaggacagggccccactcactgcccttggcaaggatcaagaagatcatgaagaattctggggaggatgttaagatgatatcaggtgaggctccaattattttctccaaggcttgtgagctcttcattgaggaacttactagaaggtcctggatcatggccatccaaggcaaaaggaggactttgcacaaagaggacttggcttctgctgttatagccactgatatatttgattttttgatcactttggtttccagttctgaaagccatgcagttggtggtgccacaaat

SEQ ID NO: 27119 - DNA, 513 bp, Glycine max
  Clone ID: TF_jC-gmXLIB3563P059cd04a1
cagtttctctctcttagggttttctcctcccccattgacccaccgtccatcgcaaaggaagtcgcgcccaatttccatggaactgtaaagagattatagtttgtagattaaatcttaaagcagtaagtcatcatggataaatcagagcagactcagcagcaacatcagcatgggatgggcgttgccacaggtgctagccaaatggcctattcttctcactacccgactgctcccatggtggcttctggcacgcctgctgtagctgttccttccccaactcaggctccagctgccttctctagttctgctcaccagcttgcataccagcaagcacagcatttccaccaccaacagcagcaacaccaacaacagcagcttcaaatgttctggtcaaaccaaatgcaagaaattgagcaaacaattgactttaaaaaccacagtcttcctcttgctcggataaaaaagataatgaaagctgatgaagatgtccggatgatttctgcagaagctcca

SEQ ID NO: 27120 - DNA, 1199 bp, Glycine max
  Clone ID: TF_GmC49_1
acctgtcattctattgttatcatatcctcgcacctagaactgtggaatttcttttttgctttctatgttactgtctggcttttggagcctggacaagacactcctcttggtttcctctcttgcattattcgcatacatttgtttttgtaaatcgataccaccaatcatcgctgtccttgtcgcgccaaatacaaaaaccaaatcctctacctctctcctactgactctctcagtcttaccgggtttgtgagatgtcggatgcgccaccgagcccgactcatgagagtgggggcgagcagagcccgcgcggttcgtcgtccggcgcgagggagcaggaccggtacctcccgattgccaacatcagccgcattatgaagaaggctctgcctcccaacggcaagattgcaaaggatgccaaagacaccatgcaggaatgcgtttctgagttcatcagcttcattaccagcgaggcgagtgagaaatgccagaaggagaagagaaagacaatcaatggagacgatttgctatgggccatggccactttaggatttgaagactacatagagccgcttaaggtgtacctggctaggtacagagaggcggagggtgacactaaaggatctgctagaagtggtgatggatctgctacaccagatcaagttggccttgcaggtcaaaattctcagcttgttcatcagggttcgctgaactatattggtttgcaggtgcaaccacaacatctggttatgccttcaatgcaaagccatgaatagtttagatgcttctacgcatcttatttatttccctttaatgcttgtacgcatggcatgggtggaaacaattgtctggtgatttaatatttaggttctcgtgtagaagggtgtcagaattttgttacggtactaatgtagatttttattaatacatgtcttatttagctttgtaatacctactcaagggagagatgtgtttagggttatgctagtgattcgccatgtagcttgtcagggtgagaagcacttgcttttagagttttctttagattattatataatatataatatttgcagacactgcatttgttagtttatttagtttaggccatacagtttgcttctctcttaatgatgtaaaaaatattcacttgtcattcatctagaaaattcgtaatagtgtaatagaatctttaaagacttgct

SEQ ID NO: 27121 - DNA, 754 bp, Glycine max
  Clone ID: TF_GmC49_2
cggccgctcgagccggctggcgggagatgctaagtaaaatagtgcggctcgagctctgctttctgtgttattgtctggcttttggagccgatccaaccaatcatcgctggcgccaaatacaaaatctcatcccttcccctttctcttactgactctctttgtcaccgggtttgtgagatgtcggatgcaccggcgagtccgagtcacgagagtggtggcgagcagagccctcgcggctcgttgtccggcgcggctagagagcaggaccggtaccttcccattgccaacatcagccgcatcatgaagaaggctctgcctcccaatggcaagattgcgaaggatgcaaaagacacaatgcaagaatgcgtttctgaattcatcagcttcattaccagcgaggcgagtgagaaatgccagaaggagaagagaaagacaatcaatggagacgatttactatgggccatggcaactttagggtttgaagactacattgagccgcttaaggtgtacctggctaggtacagagaggcggagggtgacactaaaggatctgctagaagtggtgatggatctgctagaccagatcaagttggccttgcaggtcaaaatgctcagcttgttcatcagggtccgctgatgcatattgtgttgcaggtgcaaccacaacatctggttatgccttcaatgcaaggccatgaataggttagatgcttctacgcatcttatttatttcccttggatgcttgtacgcatg

SEQ ID NO: 27122 - DNA, 343 bp, Glycine max
  Clone ID: TF_LIB3167-011-P1-K1-B5
atcagtttttctaaatccatttcactaattatttctgcccttgtctcaccaaaggcaggaaccaacacttctacctctctccttctgactctctcactctcacccaggaagtcagatgtcatatgcgccaccaagccctcctcatgagaatcttggccatcatagcccgcacggatcttcatccagctcgagttatcacgaccaaaaccttacgatttccaacatctgccgcattatgaagaatgctatgtctcccaacctcaagattgctaacgattccaaagacaccgtgcatgaattctgtactcatttcatctacttcattaccaacgaagccatttat

SEQ ID NO: 27123 - DNA, 1203 bp, Glycine max
  Clone ID: TF_GmC6781_1
ggataatccagagagaggagagagaagtaaaaaggtggaggaagaagcgaaaagcgagtgagggcagtgttgcttaataaaagaaaacgaacggtggtgataggctttagtcaagatctcaatcgtctccaccttgctttcttctccagcgtccgattctctcaccgatctcgcgccaaatacaaattcgtgtcaacccaacccagggttccggcgagcatggccgacggtccggctagcccaggcggcggcagccacgagagcggcgaccacagccctcgctctaacgtgcgcgagcaggacaggtacctccctatcgctaacataagccgcatcatgaagaaggcacttcctgccaacggtaaaatcgcaaaggacgccaaagagaccgttcaggaatgcgtctccgagttcatcagcttcatcaccagcgaggcctctgataagtgtcagagagaaaagagaaagactattaacggcgatgatttgctctgggcgatggccactctcggtttcgaggattatatggatcctcttaaaatttacctcactagataccgagagatggagggtgatacgaagggctctgccaagggtggagactcatctgctaagagagatgttcagccaagtcctaatgctcagcttgctcatcaaggttctttctcacaaaatgttacttacccgaattctcagggtcgacatatgatggttccaatgcaaggcccggagtaggtatcaagtttattattgaccctcttgttgtaacgtatgttttctacgccagttaccaagtgctcacggcatattgaatgtctttttatgttatgtgaatactgacaggagatgttggttcttgtgtccgtttttttttttaaattaaggtttgtatattatctttggattcgaattattatttgaaagttattattatattgtaaatcctagagccctgttgtctgaatccatcaggcggcttggcaaagaccgagattttaggactgattgtaagcataaacccgaatattcttttcctaatttctttgtgcaataatgtatgaaaaaggctcgagcttctttttaaaaaaaaaaaaaaaaaacacgcaagggacaacggccggcaaagccgggctcctatgcccgccccgaaactttggcccccttctgaagaaaggaagggtcccttagcgtgttcgtaccggg

SEQ ID NO: 27124 - DNA, 824 bp, Glycine max
  Clone ID: TF_GmC140739_1
gaaacagttaaaaccgagagtgatgcatcttccacaatttctagtgaatctggatccattggttgcgttaataatgctaatctggcaaagagaaagactactcaaaataatagttctggttcctcgcagtggactttgctagacttgtattctggttgtggagccatgtccacagggctttgtttgggtgcatccttggctggaataaaacttgtcacaatgtgggctgtggacattaatgcacatgcatgcaaaagtttgaagctgaaccaccctgaaactcatgttagaaatgaaccagctgaagacttcttaaacctaataaaagcttgggccaagctttgtgaagagtttgcattattaggatcagaacggtcagattccgatccagacatggatgaagatgagaatgaagctgtgagaaaagaagagtcaggaaatcaatctgattcagaggaatttgaagtagaaaaattacttgctgtgtgctatggtgatccaaacgacgtcaaaaaaccaggactatattttaaagttcgttggctgggttatgcttccagctatgacacgtgggagccaatagaaggattgagtgattgcaaggaagctatgaaagattttgtgacaaaaggctacaagaaaagattattgcctcttcctggtgatgctaactttatttgcggtggacccccatgccaaggagtaagcggtttcaaccgcttcaggaatgcagcagctccattagaggacacaaagaataagcaattgcttgtttacatggatattattgattttttgaagccaaaatatgtcctcatggagaa

SEQ ID NO: 27125 - DNA, 612 bp, Glycine max
  unsure (1)..(612): unsure at all n locations
  Clone ID: TF_LIB4281-035-R1-K1-H4
cgacccagcgtccggatctttttgccaagaaaatccgggacaactcagcaaaggtagagaggatagagagaagtgatgcgaaagagaatttatgtcaagcctgtggtgaaaatgaaaatcttgtgagctgtggaacgtgcacatatgcttaccatcctaggtgtttacttccaccccttaaaggtccccttccagacaattggaggtgccctgaatgtgttagcccacttaatgatattgataagatattagattgtgagatgcggcctactactgctgctgacaatgaagccacaaaattagggtcaaagcaaatttttgtcaaacaatacctcggtaagtggaagggcctatcctatttgcattgcacatgggtgcctgagaaagagtttctgaaagcatttaagactcatcctcgnctaaagaccaaggtgaacaacttccatcaaaaaatggcatctgtcaatacttctgacgaagactttgttgccattcgacccgaatggactacagntgatcgaatacttgcttgcaggggtgatgatgatgagagggaatatcttgtgaagtggaaggagcttccatatgatgaatgctattgggagtttgagt

SEQ ID NO: 27126 - DNA, 647 bp, Glycine max
  Clone ID: TF_8827924
cagtactttacaagtaagtctgttattagcttatagatatcattgtaaatcaaactatgtgctgttcaatgaaagaactggaccagaaacagaggaaaagattgtactgttatggtggtactttcaacacccaagaccgaatacaaaatgagttcgaggtctcaccaccctccacttctcaattttctctctaacccctaactaacttctctcaattctatttatagttataactaactacagttagttatcctagctgttataactaactaacaacactttagctcttccaaaaatatctcctaacatacacctttccccatctatcaataccccctcccctcaagatggaccttgttctcaaggtcaagttgaggaaaaacagcctgcatttcatcagcaagttcccaactatcttcatggtggggtaagcctcgccatttgatgagaacttcttttctgccatcttctcaagttatactctgcattactttctctggttggacttgcagttcccaattctcattcacggctgttggtaatagttgacgggagcaagtgggcttaaccgctttcttgagcagagatatatggaacaccaaatgcatcttgctaccctcttagagttccaatttataagcgacctc

SEQ ID NO: 27127 - DNA, 532 bp, Glycine max
  Clone ID: TF_15286908
attccttctcgccttgaagaagtcaataaactaataattgctcgggatggattattggctactctaagagaaaatttgttgaagtcttaagatatcatgtgagcaaataccaacaaacgtcgtcgggacatagaatatgtagtcggtgattaggtgttcttgaagatgcaaccttacaggagaagatccttggctaaaaggattaatgaaaaactctcccctcgattttatgctcctttccaggtgtttaataaggtgggtactattgcttataagttggatcttccatctcacattaaaattcatccggtctttcatgtctctctcctcaagaaagccagtcccaacctttaccacctatgttatctgaggattggaaattacaaacttattcagattctgttttagatagtcgtgaattacaaccgggcaacgtgaaagttttaattcagtggaaaaatctccctcccagtgaaaatagttgggaatctgtggctaaattacaagagattttttcgatttatcaccttga

SEQ ID NO: 27128 - DNA, 433 bp, Glycine max
  Clone ID: TF_13789341
ggaattcggcacgaggctcaaattacgaccccaccgtcaatcttcagcaaaagggccagagcccatcacaggcaaactatcaaagcgattctttggtccgtttcaagttgttgagcgcgtaggcaagggtgcttatcggctccaacttcctgtggacgctaaactgcaccctgtttttcactgctctttgctgaaacccttccaaggcaacccaccggatactgctgcacctttacctcctacgctcttcgatcatcagtcagtaatcgcacccttggtaatcttggcaactcgcacagtcaatgatgatgatatcgaggtcctcgttcaatggcagggcttgtctcctgatgatgcaacatgggagaagtggacggaattgtgtaaggaatttcaccttgaggacaaggtgcttccccatgggcccgtggaa

SEQ ID NO: 27129 - DNA, 752 bp, Glycine max
  unsure (1)..(752): unsure at all n locations
  Clone ID: TF_LIB4167-004-Q1-K1-G11
gggccggaattaccgcttcgacccacgcgtccgggtggtgctgctgttgctcaagggggacgacaaggttttcctgttcttggtgagaatttctttgaggttcaggctattcgtcgtaagagggtgcgcaagggtcaggtgcaatacttaatcaaatggaatgggtggcctgagacagccaacacatgggagcctccagaaaatctagagtctgttcctgatgttgttgaagcttttgaggagagcttgaagtcaggcaaacatcggaagcgcaaacgcaagcatgtagtgcatcatactcaacccaagaagcggctggagcgttctaccactccttacagccttcggcgtttttcgactggtacagctgagaaccatacacagtcagctcctcctcttattgatcctagccttcctaatattcccgccttccctcgtactgtgctgttttctgatgatgtgggaaatggtgctgaaggcagcagtcttagaaaagccacaccctctaatgctaacaggtctgcaaatggttcagaaccaaatattaaaaggactgaggaaaatgattatgatcctgtgcttagtgagcttaaaactatgactgccaatgggaatgatacagacaggcttgcaatacggattccagaagccaagggttctgggccttctggcagtaacgatcaaatggatgctaaatcaaagggggtttccatggaaaacaaatgcagtggccgctgccggngatccaaaag

SEQ ID NO: 27130 - DNA, 2115 bp, Glycine max
  Clone ID: TF_GmC149_1
ggctcgagtgttgttgttgttgttgttgttgttgctgctgctgctgcaatgaagggtggtggtgggaagagaaaggcttctacctcggaggctccgaacgatgttgttgttgttgttgctgctgcttctgctccttctgatgatgctgatttgggtgttggagatgtcgggggtgtgaaagttcaaaactttgagggaaacgagggtacccagttgcggaatactgaagaacaggaagaagaaccccaccacgtggagggtgatgaaggaggagaagacgaagaagattatgccgagggagaggaagaatatgaagaagaaaatggtggtgctgttgctgggggacaacaaggttttcctgctcttggtgaaaatttctttgaagttgaagccatacgtcgtaagaggttgcgcaagggtgaggtgcaatacttaatcaaatggaatgggtggcccgagacagccaacacttgggagcctctggaaaatctagagtctgttcctgatgttgttgaagcttttgaggagagcttgaagtccggaaaacatcgtaagcgcaaacgcaagcatgtagtgcatcatactcaacccaagaagcggctggagcgttcgacaactccttacagccttcggcgtttttcaactagtacagctgagaaccatacacagtctgctcctcctcttaatgatcctagccttccagatattcccgccttccctcacactgtgctgttttctgatgatgtgggaaatggtgctgaaggcagcagtcttagaaaagccacacccagtaatgctaacaggtctgcaaatggttcagaacaaaatattaaaaggaatgaggaaaatgattatgatcctgtgcttagtgagcttaaagctatgacttctaatgggaatgatgcagacaggcttgcaatacggattccagaagctaagggttctgggccttctggcagtaatggtcaaatggatgctaaatcaaagggggcttgcatggaaacaagtgaaagtgaccgctgccggggatccaaaaggagaaaatgtggttccgtaaagaggttcaagaaagaactatatgctaatgagcctgctaatgcggaaaatccagttagcatgcctgttggtacagctgagccagaacgaacaagagatgctggtagtggtggcaatactaatcatgccagacctgctagcaatattgtaaacattgtaaagccagtaggctattcagcttcagtagccagtggaatgcaggatgttttagtaacctttgtggcttcaaagtctgatggaacagaagtgatggttgacaacaagtatctaaaagcatttaatccacttcttgtagtaccctataccttcacattattacatttaattattgggtgtattatctttttggtccctcatcttttgaggatttctgtttttagtccttaaatttttttaatctgtttttagtccctcaatttttttcgttctgcttttggtccttgatgtaaattttatcaggaactaaacgaaaatccacaaagatgagggaccaaaaatttcgtaaactccttaattatttcctcaatgcctcattaaaatgttgctatggcctcttttcacctataccctaatatttttcatatgttgcagctgatcaatttctatgagcagcatcttcgctacagccctacattgtgaccaaacagagaatagaaggtgcttttgagtttgtagttaggttcacacgattgtgcttagttagtagttttgttgaagaatgtcttacttttatagatgcagaagatagtaaagggtaagaaatgcattgtttgttagttacacgtaggtatgattttaacaagtggttgtcagtgtggctatatactgactgatgcatgctgatggcataaataactatatatttgaatgcctcaaacacacgaggatagacaatagtttcttaggagttagtcaagaatgaaaaactattttggattattgtaaatttttatggaagttcttggctatttctgagcgatttgtttgcctattataatttgaatactgattggttgattgattgacatgattctaaaggaaaatccacaattaactgtt

SEQ ID NO: 27131 - DNA, 1300 bp, Glycine max
  Clone ID: TF_GmC69_1
ggatgaaagaaatataaatagaagcagcagcgggatttggtaaagctagaaattgcaatgaagaagaggagcagcagcagcagcagcagttcagtttttgaggcgaatggagtggaggaacctcaacaaccttcatcctgtgcagcagcagcacttgatgagttgcataaagagaaaaatgagaatggagaagaaaccctcgtgccttccaatccctatcccaatcttgacgatggcttctatgaaatcgaaaccatacgccgtaagaggctacgcaagggtcagctccagtacctaatcaaatggcgtggatggcctgagactgccaacacttgggaacctcttgaaaatctacagtccgttcctgatctcgttgatgcttttgaggacagcctcaagtctggaaaacatcagaagcgcaagcgcaagcatgtggatgtgcttcaactcaccctactcaagaagcgctccgaacgttctaccacttcttacagccttagacatttcccacctctaactcccactaatgcaaatgattatgatccaaagctcagtgaacttaaggcaccaacacacactggggttcagctagataaccttgcaatacatttccaacaaccaattccaagcagaggagcaaaaaggagaaaatctgcttcttctgtcaagaggttcaagagagacaccgatgcagctgcacttcaaccaatttctgctcctatcaacatgcctgatgctaatactgcctgcaatattgtcaagattatcaagccaataggctattcagcttctttatctgacaacatgcacgatgttttagtcacctttatggctatgaggtctgatggaacagaagtgatggtggacaacagatatctcaaggcatacaatcctcttctgctgatcaatttctatgagatgcatctccggtatactcctacaccgtgactgaacagggtaatgaaggggcttcctgtgtttgctgttggtgataacaatgtagttttgtagacgcagcggatcgtgaagggtaatacttttttggttagtgtatgacgatataaccattagaccaattgtttcaaatgcctgcctgcatgacttcatactaagacaaccaagaattagagccatgaacatgactaggaaattgtatttcaaatctttgcaaacctctttaatctaattattctacatcccgttctatcctctcattattatcgactaacatgtacaagagagagacacaaatattattatggcgagatttttcattatttgtgttggatttaccgtgtat

SEQ ID NO: 27132 - DNA, 607 bp, Glycine max
  Clone ID: TF_uC-gmroLIB3259P228e07b1
ggattgagatattttcaaacacaacagtcaggtggaaagagtaattgcagataggatcagcaaagataattctggcaatgttattccagaatacttggtcaagtggcaaggactatcttatgctgaagcgacttgggaaaaggacattgatattgcttttgctcaacatactattgatgagtataaggctcgtgaggctgctatggcagttcaaggaaagatggtagattctcagcgtaagaagagcaaaggttggtagactcctcggcttttttatgggcagtgctcttttttcaataaaacttggaacatttcgacagattctgtgtatgcacttgacatggttgctggtgtggtaaacttgtgttattattacttttatctactacaatatagtttctaagttcttggaattaaattacaaaaaaaaagaccaacagtatttggtacacctttaccaattatgttgtatcactataatttgtagtgtaccagaaatccacttctgttatgttcatatcacgaggacttctcagtcttgatttacttgattctagttcaaattaaggtcattgtcttaatagcatgtcttctctattaaacatag

SEQ ID NO: 27133 - DNA, 810 bp, Glycine max
  Clone ID: TF_GmC986_10
agggtttgtaagagaaagaaaaaagaggcgcaagatgagtggtagggtttctgggaaggtgaagtggttcaacgatcagaaggggtttggattcataacccctgacgatggcagcgaggaactcttcgttcaccaatctcagatcaaatctgacggtttccgaagcctagctgaaggagagtccgttgagttcgctattgaatctgaatctgacggacgcgccaaggctgttgatgtcactggccccgacggcgccagcgtccagggaaccagacgcggcggtgatggtggccgaagctatggcgggggacgaggaggtggctacggtggtggtgggcgaggcggtggtggcggggcttgctacaactgcggtgaatcgggacatctggctagggactgcagccaaggaggcggtggagacaggtacggcggaggcggtggtggtggtggcaggtatggaggcggcggtggcggcaggtacggtggtggtggaggaggtggtggcggcggaggaagctgctacagctgtggagagtctgggcatttcgccagagattgcccatcaagtgctcgttgaaattactgttatggtggtttatgttatgcggattgttttaagtttttactttaacatgttgtagggattttaatggtttctgtcaaagctgtggcttcttataagtagatgcgtgagatttttcttttttttggttatttaaatgaaagtttctgtgttatcgttacaatctgcaaacaaaatctgtttggacctacattttgctataatgaattggatgattgttatcggtt

SEQ ID NO: 27134 - DNA, 979 bp, Glycine max
  unsure (1)..(979): unsure at all n locations
  Clone ID: TF_GmC986_23
cccacgcgtccgaagggtttgtaagagaaagaaaaaagaggcgcaagatgagtggtagggtttctgggaaggtgaagtggttcaacgatcagaaggggtttggattcataacccctgacgatggcagcgaggaactcttcgttcaccaatctcagatcaaatctgacggtttccgaagcctagctgaaggagagtccgttgagttcgctattgaatctgaatctgacggacgcgccaaggctgttgatgtcactggccccgacggcgccagcgtccagggaaccagacgcggcggtgatggtggccgaagctatggcgggggacgaggaggtggtggaggtggatatggcggtggcggcggctacggtggtggcggtggatatggtggaggcggtggctacggtggtggtgggcgaggcggtggtggcggggcttgctacaactgcggtgaatcgggacatctggctagggactgcagccaaggaggcggtggagacaggtacggcggaggcggtggtggtggtggcaggtatggaggcggcggtggcgggaggtacggtggtggtggaggaggtggtggcggcggaggaagctgctacagctgtggagagtctgggcatttcgccagagattgcccatcaagtgctcgttgaaattactgttatggtggtttatgttatgcggattgttttaagtttttactttaacatgttgtagggattttaatggtttctgtcaaagctgtggcttcttataagtagatgcgtgagatttttcttttttttggttatttaaatgaaagtttctgtgttatcgttacaatctgcaaacaaaatctgtttggacctacattttgctataatgaattggatgattgttatcaaaaaaaaaaaaaaaaaaaaaaaaaaaaaaaaaaaaaaaaaaaaaaaaaaaaaaaaaaaaaaaaaaaaaaaaaaaaaaaaaannnnnnnaanaaaaa

SEQ ID NO: 27135 - DNA, 408 bp, Glycine max
  Clone ID: TF_uC-gmropic007f04b1
ttatcgcgttctttagggtttgtaagacaaagaaaaaagatgcgcatgatgagtggaagggtttctgggaaggtcacatggttcaacgatcagaaggggtttggattcataacccatgacaatggcactgaggaactgttcactcaccaatctgacatcaaatctgacggttttcgaagactagctgaaggagcttccgttaagttcactattgcttttaaatctgcctggacgctccatgatgttgatgtcactggccccgacggctcccgcgtgcaatggacctgacgcagcgtggatcgacctcgactatatggcagtggacgatgcggcgtgacacggggatattactaagaacatgatcactgggacattccacgctgactgtgctgcttttatcattgattc

SEQ ID NO: 27136 - DNA, 694 bp, Glycine max
  Clone ID: TF_GmC986_16
aagaaaaagaggcgcaagatgagtggtagggtttctgggaaggtgaagtggttcaatgatcagaaggggtttggattcataagccctgacgatggcagcgacgatctcttcgttcaccaatctcagatcaaatctgacggtttccgaagcctcgccgaaggagagtccgttgagttcgccattgaatctgaatctgacggacgcgcgaaggctgttgatgtcactggccccgacggcgccagcgtccagggaaccagacgaggcggtgatggtggccgaagctatggcgggggacgaggaggtggtggaggtggctacggtggaggcggtggctacggtggtggtggtggctacggtggaggcggtggttacggtggtggtggaagaggcggcggcggaggaagctgctacagctgtggagagtctgggcattttgccagagattgcccatcaagtgctcgttgaatttactgttagggttgtttatgttttgcggattgttttaagtttttactttaatatgtcttagggattttaatggtttctgtccaaactatgggttcttatgagtagatgtgtgggatttttcttttttggttatttaaatgaagggtttctgtgttatcgttacaatctgcaaactaaaatctgtttgaacttacattttgctataatgaatcgtatgattgctatc

SEQ ID NO: 27137 - DNA, 918 bp, Glycine max
  Clone ID: TF_GmC986_24
cctcgtgccgaattcggctcgaggagaacaagaaaaagaggcgcaagatgagtggtagggtttctgggaaggtgaagtggttcaatgatcagaaggggtttggattcataagccctgacgatggcagcgacgatctcttcgttcaccaatctcagatcaaatctgacggtttccgaagcctcgccgaaggagagtccgttgagttcgccattgaatctgaatctgacggacgcgcgaaggctgttgatgtcactggccccgacggcgccagcgtccagggaaccagacgaggcggtgatggtggccgaagctatggcgggggacgaggaggtggtggaggtggctacggtggaggcggtggctacggtggtggtggtggctacggtggaggcggtggttacggtggtggtggaagaggcggtggaggcggtgcttgctacaactgtggtgaatcgggacatctggctagggattgcagtggaggcggtggtggggacaggtacggaggaggtggtggtggtggcagatatggaggccggcggtggcgggaggtacggtggtggtggaggcggcggcggcggcggaggaagctgctacagctgtggagagtctgggcattttgccagagattgcccatcaagtgctcgttgaatttactgttagggttgtttatgttttgcggattgttttaagtttttactttaatatgtcttagggattttaatggtttctgtccaaactatgggttcttatgagtagatgtgtgggatttttcttttttggttatttaaatgaagggtttctgtgttatcgttacaatctgcaaactaaaatctgtttgaacttacattttgctataatgaatcgtatgattgctatcaattattgttgtgatttgctatgaagattgaattgtat

SEQ ID NO: 27138 - DNA, 860 bp, Glycine max
  Clone ID: TF_GmC986_15
ggctcgaggaaaaagaggcgcaagatgagtggtagggtttctgggaaggtgaagtggttcaatgatcagaaggggtttggattcataagccctgacgatggcagcgacgatctcttcgttcaccaatctcagatcaaatctgacggtttccgaagcctcgccgaaggagagtccgttgagttcgccattgaatctgaatctgacggacgcgctaaggctgttgatgtcactggccccgacggcgccagcgtccagggaaccagacgaggcggtgatggtggccgaagctatggcgggggacgaggaggtggtggaggtggctacggtggaggcggtggctacggtggtggtggtggctacggtggaggcggtggttacggtggtggtggaagaggcggtggaggcggtgcttgctacaactgtggtgaatcgggacatctggctagggattgcagtggaggcggtggtggggacaggtacggaggaggtggtggtggcagatatggaggcggcggtggcgggaggtacggtggtggtggaggcggcggcggcggcggcggaggaagctgctacagctgtggagagtctgggcattttgccagagattgcccatcaagtgctcgttgaatttactgttagggttgtttatgttttgcggattgttttaagttttcactttaatatgtcttagggattttaatggtttctgtccaaactatgggttcttatgagtagatgtgtgggatttttcttttttggttatttaaatgaagggtttctgtgttatcgttacaatctgcaaactaaaatctgtttgaacttacattttgctataatgaatcgtatgattgttatcaatt

SEQ ID NO: 27139 - DNA, 625 bp, Glycine max
  Clone ID: TF_GmC24172_2
ccacgcgtccgcaccgcttgaggctctctttctagtttctagggtttgttgggtctcaaaatcgaagcgatttcgatggcggaagagcgattcacgggcgtggtgcagtggtttaacaatggcaagggcttcggcttcatcaagcccgacgacggcggcgaggatctcttcgtccaccagtcctccatcagatccgacggctaccgcaccctcctcgagggcgaccgcgttgagttcgccatcgccaccggagacaacgacaagaccaaggccgtcgacgtcactggcgtcgacggcgcccctctccagccccgcgcctctgccgccaacaaccgcgccggaggatccggcttcggcgccaggcgcaatggtggcagcggcgccgcgtgctaccagtgtggtgatttcggccacctcgcaagggattgcaacaggagcagcaataccggcggcggtggaggcggcagtggcggtggttgtttcaattgcggcgggttcggccacctcgcgagggattgcgtgcgcggaggaggcggcaatgtgggtgtaggcggcggttgcgggagcggatcctgctttaggtgtggtggattttgacacatggcgagggattgtgccaccggga

SEQ ID NO: 27140 - DNA, 572 bp, Glycine max
  Clone ID: TF_GmC1564_1
ggaccttagaaagagaaggaaaaaaaaaacttgtgtttcttgggaagccatgagcaccaccgagagtcaaagatataagggcacagtgaaatggttcaacgaggagaagggtttcggtttcataactcccgaagatggtggctctgatctcttcgttcactacagtgcgatccaaaccgacggcggcttccgcaccttgtcggagggtcagtcagtagagttcctcgtcactcaggacgacagcgggcgagccgcggccgtcaacgtgacgaccaccacggttaaatctagtgacagcggtaacggggaaaactctggtggtgatgctgccaatgttgagaaataagtgagaatgaattattggagtttcctgaattgcgagtatgatatttatattgatagttggacaatatactagtccattggtattttatattttattatattatctctggttattggcatttggttccaaacttgtaatacatttatcatgtgtttaacgtggttatgtagtaagttgttggatgtgtcaaaaaaatgtcaaataaaaatatatttatattattttt

SEQ ID NO: 27141 - DNA, 1045 bp, Glycine max
  Clone ID: TF_GmC1314_1
aaagaggagaaggtatagactatagagagagagagagagagagatctgatccggagcgatgagtgagagtgagaagcagagagtaacggggaaggtgaagtggttcgatgaccagaagggttttggcttcataaccaccgacgacagcggcgaggaattcttcgtccaccagtcctccatccgatccgacggcttccgcagcctcgccctcggcgagtccgtcgagttccttattgactccgatcccgaaggccgcaccaaggccgtcgacgtcaccggccctgacgaatcgccagtccagggcacccgcggtggcggaggaggaggaagaggaagctatggtggaggtggcggaagaggtggctatggtggtggcggacgcggcggaagaggtggatatggaggaggcggcggaggctatgggggaggtggctatggcggaggcggtggttatggtggaggtggcggcggcggcggcggagggggatgctataagtgtggcgagactggtcacatagctagggactgcagcccaaggtgggggtggcggtggaaggtacggcggtggtgggggtggcggcggaagctgctacaactgtggggagtccgggcattttgccagggactgcccttccagtgctcgttgatacaatagtacgggggtgtggccttgcttttgtgttctgtggttcttttgttttcttttttctaaatctgaatattaccctttagaaatagggttagctagggtgtggcttctttgcgttttcttttttcttttttcgggtttacattataagcaattagcttatgattagctcttggatttattggtttgctttttgggcttagggaaatgagagttttggtgaggttctgaaaccatcgactaaatactctgtttcctgtcgtgaacgtaatatgctctgccttaccttattttgttgaaatctttgaatatatcatggtatcatggtcctgctgttcggatggatggttgtgtatattttgaatatattgtgcaggaaatattgatttgttgtcg

SEQ ID NO: 27142 - DNA, 492 bp, Glycine max
  Clone ID: TF_jC-gmXLIB3563P068bb10a1
gcggagagcggaccccagagagccctgagcagccccaccgccgccgccggcctagttaccatcacaccccgggaggagccgcagctgccgcagccggccccagtcaccatcaccgcaaccatgagcagcgaggccgagacccagcagccgcccgccgccccccccgtcgcccccgccctcagcgccgccgacaccaagcccggcactacgggcagcggcgcagggagcggtggcccgggcggcctcacatcggcggcgcctgccggcggggacaagaaggtcatcgcaacgaaggttttgggaacagtaaaatggttcaatgtaaggaacggatatggtttcatcaacaggaatgacaccaaggaagatgtatttgtacaccagactgccataaagaagaataaccccaggaagtaccttcgcagtgtaggagatggagagactgtggagtttgatgttgttgaaggagaaaagggtgcggaggcagcaaat

SEQ ID NO: 27143 - DNA, 323 bp, Glycine max
  Clone ID: TF_jC-gmst02400008a08a1
ggctcgaggaattggtataacgatcagaacgggtttggattcataacccatgacgatggcatggaggaactgttcgttcaccaatctcagatcaaatctgacggctttcgaatcctagctgaacgagagtacgttcagttctctattgaatctgaatctgactgacgcgccacggctgtagatgtcactggacccgaccgagccagagtccagggcaccagacactgcggcgatggtcgccgaagctatggcggtggacgaggaggtgctgtaagtggatatcgctgttgcatcgtctactgtgattgcgttggatctggtgg

SEQ ID NO: 27144 - DNA, 840 bp, Glycine max
  Clone ID: TF_GmC954_1
cctcaattcagcgtaactttcccaaacccaaataagaatcttccagaaacttcttttctttcaggagccaccatggccgagactcggagatccacgggcaccgttaagtggttcaacgcgcacaaaggtttcggattcataactccccaagatggaaccgatgatctcttcgtgcacttcacttccatccgatccgacggctaccgttctttgtccgacggtcagtccgttgagtttctcctcgattacggcgacgacggccgcaccatggccgtcgacgtcacctcagccgttagatctcgtcttcccggaggatttcgcggcggcggcggtgggaggggcagaggaggaggacgctacgggggcggggaaggccgtggcagagggttcggtcggagaggaggaggccctgagtgttataactgtggaagaataggtcacttggcaagggattgttaccatggacagggtggtggtggtggtgatgatggtaggaatcggagacgcggcggtggtggtggaggaggaggagggtgttttaactgtggggaggaagggcattttgcgagggaatgtccgaatgttggaaaaggaaatgagtgagaatgtgttatggtttcttctattgaattgagtctgttactgttagttggggttggttaaatggattctgttatttttgtttctagccattggcatttccttccttccttccaaatatgtttttccagggctttgctaattgttttatctaatgcgcttcttttcaacaaagtgtgattcattatgcttgttcctcctcttgaatatgaagattgaagcgcaacggacggcttaatt

SEQ ID NO: 27145 - DNA, 301 bp, Glycine max
  unsure (1)..(301): unsure at all n locations
  Clone ID: TF_6134224
acgagcgcttttccctcgaattcagcgtaagctttccccaaagccgaaaaagaatcttccagaaacttcttttctttgaggagccatggccgaaagtcggagatccacgggcacggttaagtggttcaactcgcagaagggtttcngattcataactgcccaagatggaaccgataatctcttcgtacacttcacttccatccgatccaacagctaccgttctttatccaaaggtcagtccattaaatttctcctcaattacagcaacaacagccacaccataaccatcaacatcacctcc

SEQ ID NO: 27146 - DNA, 236 bp, Glycine max
  Clone ID: TF_LIB3051-101-Q1-K1-H12
aaagactttactcgaagcgatttcgatcgcggaagtacgattcacgggcgtcttgcattgattcaacaatggcacgggcttcagcttcatcaagcccgacaacggcaattagaatctcttccatcaccagtactccatcagatccgacggataccgcacacttctcgagggctaccgcttcgagttcgccatcgtcaccgacaacaacgacaagaacaatgccgtctacttcaccg

SEQ ID NO: 27147 - DNA, 478 bp, Glycine max
  Clone ID: TF_15285323
cgggaccttgaggaatgtccccgtaggcggcggctgccggaggaacaagaggagcagaggaagctccagcagcaacaccaggtcgccggcaaactccgatcgccaaaccgcgagtgccggctccgcttcaaccaccagtggctcctcttctgctgacttggtggccagcctcggtggcggcaccggggtgccaccgtctcttaggttcatggctccattgcatcaacttggggaccaccaccaccttggtggtggtggaggagaaatagggttaagctatggcttgaactatggcgcaatttctggtccaatgggaggaataggagacttgaatttccatataggaggcactttgagtgggggtggttctatgttatctggtttggaccaatggagggttccacaaactcaccaatttcccttcttgtctggtttggaagctacttcatcacatgggttgtacccttttgaaggtgct

SEQ ID NO: 27148 - DNA, 1453 bp, Glycine max
  unsure (1)..(1453): unsure at all n locations
  Clone ID: TF_GmC735_1
gattctccaccatctccctaaagagccatcaaactttataaaaagaaaaaacataaaagcatttgaacgccatggttttctcctctattccagtctttgtagatcctcccaattggcagcagcaaccaaataaccatcctcaagcaaataataatggtggtgacaacactcagcttcttccacctttgccaccacatcaatctctcgtggcaagttgtagcagcacactaaaccatccttcaagcacagtaataatggtggtggtaactccaagcttctcccacctttgccaccacagcaacctcatgtgggccaccaacacgattcaatcaggccaggatccatggcagatcgagctaggctagctaagataccacccttgtaggcggtattgaacagtccacgttgcgctaccaaccgttcctgtgggtgcagggtcccgtaggaacaacactctccaagaggagtagtcgctctaagtctccagcatcatcggagaaacaacaaacactttctggttccacaagtgcaatagtcccctctggtggaaccactcatgaacagattggtcatcagttgccacagccacagaaccttcccttcttggcttctcttcagaaccttaatcgttatgctgttggaaacatgggtcttgggttgcgtgagattcacggacagaacgagaacatggggtttcagattggtaattcttctgctggtggaggaatggatcagtggcgcttgcatcagcaggttcctttctttaatggttttgaatcaacttcagctgggttcatacccttttcaaaatgaaggtattaacgaaacaccttctggttttggtggtgacataacaacgaattccagggtttctcagatgccatcggttaaaatggaggaaagtggggctttgaatttgtcaagatcaacactcaataatgtctcagaaaataaccagtactattcatggactgatatgtcaggacttgcttctttttctgctactcatctcttgtaactttgaacatataacgtgtatgtggtcaataaccacatcaccggaattgttatgtccttgatggatcagagaaattctcaaacgatttggatgtgttatactgaacaccctcgacttgacttcattccaagttctcactatcatcagttgacagaaattaacgcagacatggtagaattgatgtcttctcttcttgtaattgcaattccggacattgatttgtgtttatgtttttttttttttgtttttttttcatccagtcgagtattttatgtactatatacatgggcttgctttaattgtataactgtgtgtgcatgtaatgttttgtgtttctgctttcatccagttgagtattttgtgtgctatatacatgggcttgctttaattgtataactgcgtgtgcatgtaatgttttnnnngtccgcgtannga

SEQ ID NO: 27149 - DNA, 1363 bp, Glycine max
  Clone ID: TF_GmC61107_1
cctcgtgccgaattcggcacgagggcacagagaaaaccttcctccattaatggaggaggtggaggaggaggagttttactcccaattactacaccttctccttcttcttttccctcttccacgaccagtgatgttaccctcacatccacaacaacaactgctgctactactgctgctactgctgctactactactactgctgtcgaaaacctgagatgtcctcgatgtgattcatcgaacaccaagttttgttactacaacaactacaacctcactcagccgcggcacttctgcaagacgtgccgccgctactggaccaaaggtggggctctccggaacgtccccatcggaggcggatgccggaagaataagagcattggcgtggcgagctcggtggcggggaagacagcctcgaccaagatgaaaaccattgcatcggagtttggaaaatcgccgggctttggcggtgggttcgaggtggaacacgaacttccgccaccaccgggccaaatcctctggggatcgccccaaaacacccaccttctagccttgctgagagctacacaaactcaaaaccctaaccctaaccctagtcccatgtccctcaaggaagaaggaaccctattgggccacatggtgagcactgatcagcccttggtttcaaacactttgctgagctaccgaaccttaggctatgatgctgttgcgcaagttccttcttcgcttggtctgtttgggagaaacaatcaagatcaacaacaacaaaatggagggttcctagttggggaacatcacaacaacagtggaattcaagagctttaccagaagctaaggtcatcatcaactgttaataataattattgcagtgataataactcgtcacaaatgtttatggggaacatggcttctaactattcctcttctgtgtccaacaacattttggagacaacctcggttgctgggggtgaattcggatactggaatggtccaactttttctaattggtctgatcttccaaccactaatggcgctggtgcatatccgtaacaaaaataactgttttaattttcttcaccagttaaatcttcttgttttcctgttagatagtggcatagtgctcctaattaatcactttgtatcttaagggtttggttattttgtggtttcttttggttcgggtggtatatgaatatggatctagaactttttcttttctaattccctctctagccttctatctttttttttttttttggtgtaagtttggttgatggtgtgcttggctaagttatctatggtttatttcgagggtacaagagttcaaaactgaatggagaaatcagtgtatttttaatgcttcata

SEQ ID NO: 27150 - DNA, 445 bp, Glycine max
  Clone ID: TF_GmC161628_1
gtattggactgctggtggaacgatgagaaatgttccgataggtgctggtcgacggaagaataagcacctagcctctcaataccgacacattatagtaacctctgatggaattccaacctccaggctagaaaccacggactcgtctggtctccaacagcagcatatcgcaagtcttgaatcctcagttcctttcaggtcttcagcagataacggcaccgtgttgaaatttggtcccgatatccctctttgcgaatcgatggattcaatgcttaatcttagagaccagagaagatgtgttgatgcaagttctatcagctgtgtagagtatagaggggaaccatccttatatggatcttcagtgacaactaatggtgctcaaggaagtgaattatcagaacatagtccatcaaattggctgcaatgttaccctgttcctccatgggta
